(19) United States
(12) Patent Application Publication
(10) Pub. No.: US 2024/0084332 A1
(43) Pub. Date: Mar. 14, 2024

(54) REPROGRAMMABLE TNPB POLYPEPTIDES AND USE THEREOF

(71) Applicants: THE BROAD INSTITUTE, INC., Cambridge, MA (US); MASSACHUSETTS INSTITUTE OF TECHNOLOGY, Cambridge, MA (US)

(72) Inventors: Feng Zhang, Cambridge, MA (US); Han Altae-Tran, Cambridge, MA (US); Soumya Kannan, Cambridge, MA (US); Suchita Nety, Cambridge, MA (US)

(21) Appl. No.: 18/271,684

(22) PCT Filed: Jan. 25, 2022
(86) PCT No.: PCT/US2022/013710

§ 371 Date: Jul. 11, 2023

Related U.S. Application Data
(60) Provisional application No. 63/141,371, filed on Jan. 25, 2021.
(60) Provisional application No. 63/195,610, filed on Jun. 1, 2021.
(60) Provisional application No. 63/210,860, filed on Jun. 15, 2021.
(60) Provisional application No. 63/282,352, filed on Nov. 23, 2021.

(51) Int. Cl. C12N 15/90; C12N 9/22; C12N 15/11; C12N 15/70; C12N 15/74

(52) U.S. Cl. CPC C12N 15/907; C12N 9/22; C12N 15/11; C12N 15/70; C12N 15/74; C12Y 301/21; C12N 2310/20; C12N 2310/531; C12N 2800/101; C12N 2800/107; C12N 2800/80

(57) ABSTRACT

Systems, methods and composition for targeting polynucleotides are detailed herein. In particular, engineered DNA-targeting systems comprising novel TnpB polypeptides and a reprogrammable targeting nucleic acid component and methods and application of use are provided.

### CROSS-REFERENCE TO RELATED APPLICATIONS

[0001] The application claims the benefit of U.S. Provisional Application Nos. 63/141,371 filed Jan. 25, 2021, 63/195,610 filed Jun. 1, 2021, 63/210,860 filed Jun. 15, 2021, and 63/282,352 filed Nov. 23, 2021. The entire contents of the above-identified applications are hereby fully incorporated herein by reference.

### STATEMENT AS TO FEDERALLY SPONSORED RESEARCH

[0002] This invention was made with government support under Grant Nos. HL141201 and HG09761 awarded by The National Institutes of Health. The government has certain rights in the invention.

### SEQUENCE LISTING

[0003] This application contains sequence listings on CD-ROM being sent concurrent with filing and labeled, “COPY 1,” “COPY 2,” and “3 of 3.” Each contains an ASCII.txt file entitled BROD-5345WP_ST25.txt, created on Jan. 25, 2022 and having a size of 222,687,678 bytes (222.7 MB on disk). The content of the sequence listing is incorporated herein in its entirety.

### TECHNICAL FIELD

[0004] The subject matter disclosed herein is generally directed to systems, methods and compositions used for targeted gene modification and nucleic acid editing utilizing systems comprising TnpB polypeptides.

### BACKGROUND

[0005] While there are genome-editing techniques available for producing targeted genome perturbations, there remains a need for new genome engineering technologies that employ novel strategies and molecular mechanisms and are affordable, easy to set up, scalable, and amenable to targeting multiple positions within the genome. Additional desirable tools in genome engineering and biotechnology would further advance the art.

[0006] Citation or identification of any document in this application is not an admission that such a document is available as prior art to the present invention.

### SUMMARY

[0007] In certain example embodiments, non-naturally occurring, engineered compositions comprising a) a TnpB polypeptide comprising a RuvC like domain and b) an nucleic acid component molecule, ωRNA, comprising a scaffold and a reprogrammable spacer sequence, the RNA molecule capable of forming a complex with the TnpB polypeptide and directing the TnpB polypeptide to a target polynucleotide. In one embodiment, the TnpB polypeptide comprises about 200 to about 500 amino acids. The composition may comprise an ωRNA component molecule reprogrammable spacer sequence of 10 nucleotides to 30 nucleotides in length. In embodiments, the nucleic acid component molecule comprises a scaffold of about 80 to 200 nucleotides in length. In an aspect, the target sequence comprises a target adjacent motif (TAM) sequence 5′ of the target polynucleotide which may comprise the sequence TCA or TTCAN.

[0008] In an embodiment, the TnpB proteins are selected from Table 1A, Table 1B, or FIG. 1, or are encoded by a polynucleotide sequence in Table 1C. In an embodiment, the TnpB proteins are selected from Table 1A, Table 1B, Table 1C or FIG. 1, or comprise one or more catalytic residues corresponding to 195D, 277E, or 361D of the sequence alignment in FIG. 1. In one embodiment, the TnpB protein is active, i.e., possesses nuclease activity, in the temperature range of 45° C. to 60° C.

[0009] In an embodiment, the TnpB protein is selected from Actinomadura cellulosilytica strain DSM 45823, Actinomadura namibiensis strain DSM 44197, Actinoplanus lobatus strain DSM 43150 (TnpB-1 and TnpB-2), Lipingzhangella halophila strain DSM 102030, Ktedonobacter racemifer, and Epsilonproteobacteria bacterium QNF01000004_Extraction_(reversed), and Alicyclobacillus macrosporangiidus strain DSM 17980.

[0010] In embodiments, the target polynucleotide is DNA. In an aspect, the nucleic acid component further comprises an aptamer. In an embodiment, the ωRNA component molecule further comprises an extension to add an RNA template.

[0011] In embodiments, the composition may comprise a functional domain associated with the TnpB protein. In an aspect, the functional domain has transposase activity, recombinase activity, methylase activity, demethylase activity, translation activation activity, translation repression activity, transcription activation activity, transcription repression activity, transcription release factor activity, chromatin modifying or remodeling activity, histone modification activity, nuclease activity, single-strand RNA cleavage activity, double-strand RNA cleavage activity, single-strand DNA cleavage activity, double-strand DNA cleavage activity, nucleic acid binding activity, detectable activity, or any combination thereof. The composition may comprise a serine or tyrosine recombinase.

[0012] In one embodiment, the composition may further comprise a homologous recombination donor template comprising a donor sequence for insertion into a target polynucleotide.

[0013] In an aspect, the composition provides site-specific modification that may comprise cleaving a DNA polynucleotide. In an aspect, the cleaving results in a 5′ overhang, which may occur distal to a target-adjacent motif. In an embodiment, TnpB mediated cleavage occurs at the site of the spacer annealing site or 3′ of the target sequence.

[0014] A vector system is also provided and may comprise one or more vectors encoding the TnpB polypeptide and the ωRNA component compositions as detailed herein.

[0015] In embodiments, an engineered cell comprising the composition as detailed herein is provided.

[0016] Methods of editing nucleic acids in target polynucleotides comprising delivering the compositions, the one or more polynucleotides, or one or more vectors to a cell or population of cells comprising the target polynucleotides as disclosed herein are provided. In an embodiment, the target polynucleotides are target sequences within genomic DNA. In an embodiment, the target polynucleotide is edited at one or more bases to introduce a G→A or C→T mutation.

[0017] An isolated cell or progeny thereof is also provided comprising one or more base edits made using the method as described herein.

[0018] Methods of modifying a target polynucleotide sequence in a cell are provided herein, comprising introducing to the cell any one of the compositions as disclosed herein. In an aspect, the polypeptide and/or ωRNA components are provided via one or more polynucleotides encoding the polypeptides and/or ωRNA(s), and wherein the one or more polynucleotides are operably configured to express the TnpB polypeptide and/or the ωRNA molecule. In one embodiment, the method introduces one or more mutations including substitutions, deletions, and insertions.

[0019] In embodiments, provided herein are engineered, non-naturally occurring compositions comprising: a) a TnpB polypeptide, wherein the TnpB polypeptide is catalytically inactive; b) a nucleotide deaminase associated with or otherwise capable of forming a complex with the TnpB protein; and c) an ωRNA component molecule capable of forming a complex with the TnpB protein and directing site-specific binding at a target sequence. In an embodiment, the nucleotide deaminase is an adenosine deaminase or cytodine deaminase.

[0020] One or more polynucleotides are provided encoding the one or more polynucleotides as disclosed herein.

[0021] One or more vectors are also provided encoding the one or more polynucleotides as disclosed herein.

[0022] A cell or progeny thereof is provided genetically engineered to express one or more components of the compositions as disclosed herein.

[0023] In embodiments, provided herein are engineered, non-naturally occurring compositions comprising: a) a catalytically dead TnpB polypeptide; b) a reverse transcriptase associated with or otherwise capable of forming a complex with the TnpB polypeptide; and c) an ωRNA component molecule capable of forming a complex with the TnpB protein and directing site-specific binding of the complex to a target sequence of a target polynucleotide, the guide molecule further comprising a donor template encoding a donor sequence for insertion into the target polynucleotide.

[0024] One or more polynucleotides are provided encoding the one or more polynucleotides as disclosed herein.

[0025] One or more vectors are provided encoding the one or more polynucleotides as disclosed herein.

[0026] Methods of modifying a target polynucleotide comprising delivery of the above compositions, the one or more polynucleotides, or the one or more vectors to a cell or population of cells, comprising the target polynucleotides, wherein the complex directs the reverse transcriptase to the target sequence and the reverse transcriptase facilitates insertion of a donor sequence encoded by the donor template from the ωRNA component molecule into the target polynucleotide are provided.

[0027] In embodiments, provided herein are methods wherein insertion of the donor sequence: a) introduces one or more base edits; b) corrects or introduces a premature stop codon; c) disrupts a splice site; d) inserts or restores a splice site; e) inserts a gene or gene fragment at one or both alleles of the target polynucleotide; or f) a combination thereof. In an embodiment, provided herein, is an isolated cell or progeny thereof comprising the modifications made using the method as disclosed.

[0028] In embodiments, provided herein are engineered, non-naturally occurring compositions comprising: a) a TnpB polypeptide; b) a non-LTR retrotransposon protein associated with or otherwise capable of forming a complex with the TnpB polypeptide; and c) an ωRNA component molecule capable of forming a complex with the TnpB protein and directing site-specific binding of the complex to a target sequence of a target polynucleotide, the ωRNA molecule further comprising a donor template encoding a donor sequence for insertion into the target polynucleotide and located between two binding elements capable of forming a complex with the non-LTR retrotransposon protein.

[0029] In an embodiment, provided herein is a composition wherein the TnpB protein is fused to the N-terminus of the non-LTR retrotransposon protein. In an embodiment, provided herein is a composition wherein the TnpB protein is engineered to have nickase activity. In an embodiment, the ωRNA component molecule directs the fusion protein to a target sequence 5′ of the targeted insertion site, and wherein the TnpB protein generates a strand break at the targeted insertion site. In an embodiment, the ωRNA component molecule directs the fusion protein to a target sequence 3′ of the targeted insertion site, and wherein the TnpB protein generates a strand break at the targeted insertion site. In an embodiment, the donor polynucleotide further comprises a polymerase processing element to facilitate 3′ end processing of the donor polynucleotide sequence. In an embodiment, the donor polynucleotide further comprises a homology region to the target sequence on the 5′ end of the donor construct, the 3′ end of the donor construct, or both. In an example embodiment, the homology region is from 8 to 25 base pairs.

[0030] One or more polynucleotides are provided encoding one or more components of the compositions as disclosed herein.

[0031] One or more vectors are provided comprising the one or more polynucleotides as disclosed herein.

[0032] Methods of modifying a target polynucleotide comprising delivery of the above composition, the one or more polynucleotides, or the one or more vectors to a cell or population of cells, comprising the target polynucleotides, wherein the complex directs the non-LTR retrotransposon protein to the target sequence and the non-LTR retrotransposon protein facilitates insertion of a donor polynucleotide sequence from the donor construct into the target polynucleotide are provided.

[0033] In embodiments, provided herein are methods wherein insertion of the donor sequence: a) introduces one or more base edits; b) corrects or introduces a premature stop codon; c) disrupts a splice site; d) inserts or restores a splice site; e) inserts a gene or gene fragment at one or both alleles of the target polynucleotide; or f) a combination thereof. In an embodiment, provided herein is an isolated cell or progeny thereof comprising the modifications made using the method disclosed herein.

[0034] In embodiments, provided herein are engineered, non-naturally occurring compositions comprising: a) a TnpB polypeptide; b) an integrase protein associated with or otherwise capable of forming a complex with the TnpB polypeptide; and c) an ωRNA component molecule capable of forming a complex with the TnpB protein and directing site-specific binding of the complex to a target sequence of a target polynucleotide, the guide molecule further comprising a donor template encoding a donor sequence for insertion into the target polynucleotide and located between two binding elements capable of forming a complex with the integrase protein. In an embodiment, the TnpB protein is fused to the integrase protein and optionally to the reverse transcriptase. In an embodiment, provided herein is a composition wherein the TnpB protein is engineered to have nickase activity. In an embodiment, the ωRNA component molecule directs the fusion protein to a target sequence, and wherein the TnpB protein generates a nick at the targeted insertion site. In an embodiment, the donor polynucleotide further comprises a homology region to the target sequence on the 5′ end of the donor construct, the 3′ end of the donor construct, or both.

[0035] One or more polynucleotides are provided encoding one or more components of the compositions as disclosed herein.

[0036] One or more vectors are provided comprising the one or more polynucleotides as disclosed herein.

[0037] Methods of modifying a target polynucleotide comprising delivery of the above composition, the one or more polynucleotides, or the one or more vectors to a cell or population of cells, comprising the target polynucleotides, wherein the complex directs the integrase protein to the target sequence and the integrase protein facilitates insertion of a donor polynucleotide sequence from the donor construct into the target polynucleotide are provided.

[0038] In embodiments, provided herein are methods wherein insertion of the donor sequence: a) introduces one or more base edits; b) corrects or introduces a premature stop codon; c) disrupts a splice site; d) inserts or restores a splice site; e) inserts a gene or gene fragment at one or both alleles of the target polynucleotide; or f) a combination thereof. In an embodiment, provided herein, is an isolated cell or progeny thereof comprising the modifications made using the method disclosed above.

[0039] In embodiments, provided herein are compositions for detecting the presence of a target nucleotide in a sample, comprising: one or more TnpB proteins possessing collateral activity; at least one ωRNA component comprising a sequence capable of binding a target polynucleotide and designed to form a complex with the one of more TnpB proteins; a detection construct comprising a polynucleotide component, wherein the TnpB protein exhibits collateral nuclease activity and cleaves the polynucleotide component of the detection construct once activated by the target sequence; and optionally, isothermal amplification reagents.

[0040] In an embodiment, the TnpB proteins are selected from Table 1A, Table 1B, or FIG. 1, or are encoded by a polynucleotide sequence in Table 1C. In an embodiment, the TnpB proteins are selected from Table 1A, Table 1B, or FIG. 1, or comprise one or more catalytic residues corresponding to 195D, 277E, or 361D of the sequence alignment in FIG. 1, or is encoded by a polynucleotide sequence in Table 1C. In one embodiment, the TnpB protein is active, i.e., possesses nuclease activity, in the temperature range of 45° C. to 60° C.

[0041] In an embodiment, the isothermal amplification reagents are loop-mediated isothermal amplification (LAMP) reagents. In an example embodiment, the LAMP reagents comprise LAMP primers.

[0042] In an embodiment, provided herein are compositions further comprising one or more additives to increase reaction specificity or kinetics. In an embodiment, provided herein are compositions comprising polynucleotide binding beads.

[0043] In embodiments, a system for the detection of a target sequence, for example, coronavirus, is provided. A system for detecting the presence of a target sequence in a sample may comprise: a TnpB protein; at least one ωRNA component molecule comprising a sequence capable of binding a target sequence and designed to form a complex with the TnpB protein; and a detection construct comprising a polynucleotide component, wherein the TnpB protein exhibits collateral RNase activity and cleaves the polynucleotide component of the detection construct once activated by the target sequence.

[0044] In example embodiments, compositions for detecting the presence of a target polynucleotide in a sample are provided, comprising isothermal amplification reagents for amplifying the target polynucleotide, and an extraction-free solution for isolating polynucleotides from a cell or virus particle. The isothermal amplification reagents may comprise LAMP reagents comprising F3, B3, FIP, BIP, Loop Forward and Loop Reverse primers. In an aspect, the LAMP reagents may further comprise oligonucleotide strand displacement (OSD) probes.

[0045] The systems and methods may utilize one or more TnpB proteins, in an aspect, the TnpB protein is thermostable. Compositions for detection may comprise a DNA extraction solution. Methods of detection can further comprise the step of treating the sample with a DNA extraction solution prior to contacting the sample with the systems disclosed herein. Extraction may also comprise the addition of beads capable of concentrating targets of interest of the sample, in an aspect, the beads are magnetic.

[0046] In an embodiment, the detection of amplified target polynucleotides by binding of the target polynucleotides to the TnpB complex occurs in the temperature range of 45° C. to 60° C.

[0047] In an embodiment, the TnpB protein in the TnpB complex is selected from Actinomadura cellulosilytica strain DSM 45823, Actinomadura namibiensis strain DSM 44197, Actinoplanus lobatus strain DSM 43150 (TnpB-1 and TnpB-2), Lipingzhangella halophila strain DSM 102030, Ktedonobacter racemifer, and Epsilonproteobacteria bacterium QNF01000004_Extraction_(reversed), and Alicyclobacillus macrosporangiidus strain DSM 17980.

[0048] Devices comprising detection systems are also provided. Devices may comprise a lateral flow device or cartridge. A lateral flow device comprising a substrate comprising a first end and a second end, are also provided, the first end comprising a sample loading portion, a first region comprising a detectable ligand, two or more systems of the claims provided herein, and one or more first capture regions, each comprising a first binding agent; the substrate comprising two or more second capture regions between the first region of the first end and the second end, each second capture region comprising a different binding agent. In an aspect, the first end comprises two detection constructs, wherein each of the two detection constructs comprises an RNA or DNA oligonucleotide, comprising a first molecule on a first end and a second molecule on a second end. In an aspect, the first end comprises three detection constructs, wherein each of the three detection constructs comprises an RNA or DNA oligonucleotide, comprising a first molecule on a first end and a second molecule on a second end. The lateral flow device may comprise a polynucleotide encoding a TnpB, and nucleic acid component molecules are provided as a multiplexing polynucleotide, the multiplexing polynucleotide configured to comprise two or more nucleic acid component molecules.

[0049] A cartridge can be provided comprising at least a first and second ampoule, a lysis chamber, an amplification chamber and a sample receiving chamber, the first ampoule fluidically connected to the sample receiving chamber, the sample receiving chamber further connected to the lysis chamber, the lysis chamber connected via a metering channel to the second ampoule and the amplification chamber.

[0050] The cartridge may be configured to fit in a system comprising a heating means, an optic means, a means for releasing reagents on the cartridge, and a means for readout of assay result. The cartridge can comprise a first ampoule that comprises lysis buffer, and/or the second ampoule that comprises a TnpB system, the TnpB system comprising one or more TnpB proteins and at least one nucleic acid component molecule.

[0051] In an embodiment, a cartridge is provided wherein the TnpB protein in the TnpB collateral detection system for amplifying and detecting the target polynucleotide is active, i.e., possesses nuclease activity, in the temperature range of 45° C. to 60° C.

[0052] In an embodiment, a cartridge is provided wherein the TnpB protein is the TnpB in Table 1A from Actinomadura cellulosilytica strain DSM 45823, Actinomadura namibiensis strain DSM 44197, Actinoplanus lobatus strain DSM 43150 (TnpB-1 and TnpB-2), Lipingzhangella halophila strain DSM 102030, Ktedonobacter racemifer, and Epsilonproteobacteria bacterium QNF01000004_Extraction_(reversed), and Alicyclobacillus macrosporangiidus strain DSM 17980.

[0053] Methods for detecting polynucleotides in a sample are provided comprising contacting one or more target sequences with a TnpB, at least one ωRNA component capable of forming a complex with the TnpB and direct sequence-specific binding to one or more target polynucleotides and a detection construct, wherein the TnpB exhibits collateral nuclease activity and cleaves the detection construction once activated by the one or more target sequences; and detecting a signal from cleavage of the detection construction thereby detecting the one or more target polynucleotides. Methods for detecting polynucleotides in a sample are provided further comprising amplifying the target polynucleotides using isothermal amplification prior to the contacting step. In an embodiment, a method is provided wherein detection of the amplified target polynucleotides by binding of the target polynucleotides to the TnpB complex occurs in the temperature range of 45° C. to 60° C. In an example embodiment, the target polynucleotide is detected in one hour or less.

[0054] Methods for detecting a target nucleic acid in a sample are also provided, comprising contacting a sample with the devices described herein.

[0055] These and other aspects, objects, features, and advantages of the example embodiments will become apparent to those having ordinary skill in the art upon consideration of the following detailed description of example embodiments.

### BRIEF DESCRIPTION OF THE DRAWINGS

[0056] An understanding of the features and advantages of the present invention will be obtained by reference to the following detailed description that sets forth illustrative embodiments, in which the principles of the invention may be utilized, and the accompanying drawings of which:

[0057] FIG. 1—shows sequence alignment of exemplary TnpB peptides. RuvC catalytic amino acid residues are underlined.

[0058] FIG. 2—alignment of exemplary TnpB sequences.

[0059] FIG. 3—alignment of 3′ end of exemplary TnpB loci.

[0060] FIG. 4—depicts 5′ Inverted Terminal Repeat (ITR) sequence of exemplary TnpB.

[0061] FIG. 5—5′ ITR of IscB shows similarity on sequence level with exemplary TnpB.

[0062] FIG. 6—depicts exemplary Ktedonobacter racemifer TnpB gene, RNA conserved region and guide (i.e., spacer).

[0063] FIG. 7—depicts annotated sequence of exemplary TnpB loci from K. racemifer, including 5′ ITR and 3′ITR.

[0064] FIG. 8—shows an experimental setup for interrogation of TAM requirements of exemplary TnpB proteins of Actinoplanes lobatus strain DSM 43150 and Epsilonproteobacteria bacterium isolate B11.

[0065] FIG. 9—shows a 5′ TAM weblogo of Actinoplanes lobatus strain DSM 43150 (TCAG) and Epsilonproteobacteria bacterium isolate B11 (TCAT).

[0066] FIG. 10—shows a schematic of exemplary plasmid cleavage assay used in evaluation of target cleavage.

[0067] FIG. 11A-11D—shows a TnpB Rd1 summary of ortholog 5. Rd1 is a selection of 10 orthologs that appear to be associated with a ncRNA with sequence similarity to IscB ncRNA. (11A) RNA-seq analysis validates that TnpB is associated with a ncRNA. (11B) Weblogo of TnpBRd1_5_Fn30_TAM showing enriched TAMs (30 bp guide to Fn spacer region) among all captured TAMs. (11C) Weblogo of TnpBRd1_5_644PSP1_30 showing enriched TAMs (30 bp guide to 644PSP1 spacer region) among the top 15% of captured TAMs. (11D) Weblogo of depleted TAMs (30 bp guide to Fn spacer region) among the 10% depletion observed for TCAG TAMs.

[0068] FIG. 12A-12B—shows a TnpB Rd1 validation of orthologs 1 and 4. (12A) TXTL cleavage assay of plasmid substrates validates TAM-specific cleavage in A. lobatus TnpB-1 and A. cellulosilytica TnpB. Each condition includes two separate plasmids at the same concentration for direct comparison of different substrates. (12B) Site of adaptor ligation is similar between TAM screens and validation (results shown for ortholog 4). Location of adaptor ligation using the 8N TAM library plasmid (upper bar graphs) of the non-target (NT) and target (T) strands show that the site of adaptor ligation is slightly different with respect to each strand. When a single TAM plasmid is used (bottom bar graph) with the non-target (NT) strand, the site of adaptor ligation is similar to the non-target (NT) strand when the TAM library is used.

[0069] FIG. 13A-13B—shows identification of TAM sequences in seven exemplary TnpB orthologs. (13A) Two methods were used to determine TAM sequences in orthologs having 5′ TAMs: (i) Sequencing of intact pTargets and (ii) sequencing of enriched TAMs after cleavage and adapter ligation. (13B) Weblogo showing TAMs of seven bacterial TnpB ortholog sequences including Actinomadura celluolosilytica strain DSM 45823, Actinomadura namibiensis strain DSM 44197, two TnpB from Actinoplanes lobatus strain DSM 43150, Alicyclobacillus macrosprangiidus strain DSM 17980, Lipingzhangella halophila strain DSM 102030, and Epsilonproteobacterium bacterium and Ktedonobacter racemifer.

[0070] FIG. 14—shows validation of TAMs for two TnpB orthologs. The TAMs were determined after adapter-ligation of cleavage products for A. lobatus TnpB-1 and A. cellulosilytica TnpB.

[0071] FIG. 15A-15B—shows identification of the DNA cleavage site for (15A) A. lobatus TnpB-2 for both the target strand (TS) and the non-target strand (NTS). Black triangles represent the specific cleavage sites on both strands identified after sequencing. (15B) Sequencing and analysis of the 8N TAM library plasmid cleavage products from A. lobatus TnpB-2. Both the non-target (NT) and target (T) strands were cleaved and the abundance of reads at different positions in the spacer region (bp) are shown.

[0072] FIG. 16A-16B—shows characterization of non-coding RNA (ncRNA) associated with A. lobatus TnpB. (16A) Expression of A. lobatus TnpB-2 in E. coli and RNA pulldown shows a 173 nt scaffold immediately downstream of the TnpB-2 ORF followed by a guide sequence. (16B) RNA scaffolds ranging in size from full-length 173 nt truncated to 102 nt that have been shown to maintain TAM-specific enrichment.

[0073] FIG. 17—shows non-coding RNA region associated with K. racemifer TnpB.

[0074] FIG. 18A-18F—shows exploration of the diversity of IS200/605 superfamily nucleases. (18A) Evolution between IS200/605 transposon superfamily-encoded nucleases and associated RNAs. Dashed lines reflect tentative/unknown relationships. (18B) Native expression of TnpB ωRNA in K. racemifer. (18C) Comparison of ωRNAs from K. racemifer IscB and TnpB loci. (18D) Secondary structure prediction of KraTnpB-linked ωRNA. (18E) Weblogos of A. lobatus and A. cellulosilytica TnpB cleavage TAMs using a reprogrammed guide in an IVTT TAM screen. (18F) Plasmid competition assays with A. lobatus and A. cellulosilytica TnpBs (* indicates p<0.05).

[0075] FIG. 19—shows naturally occurring RNA-guided DNA-targeting systems. Comparison of Ω (Obligate Mobile Element Guided Activity (OMEGA)) systems with other known RNA-guided systems. In contrast to CRISPR systems, which capture spacer sequences and store them within the CRISPR array in the locus, Q systems transpose their loci (or trans-acting loci) into target sequences, apparently, converting targets into ωRNA guides in a process that can be called guide conscription.

[0076] FIG. 20—shows the results of a TnpB conservation analysis. Conservation of the 3′ end of TnpB loci that share the KraIscB-1 transposon end. The conserved region on the 3′ region of the TnpB loci corresponds to the 5′ region of the ωRNA of IscB. The conservation of the TnpB loci outside of the ORF on the 3′ end suggests the presence of a non-coding RNA that may function similarly to the ωRNA of IscB.

[0077] FIG. 21A-21C—Characterization of TnpB ωRNA-guided cleavage. (21A) Small RNA-seq of A. lobatus TnpB-2 recombinantly purified in the presence of the downstream predicted ωRNA and guide. The predicted ωRNA scaffold and a downstream region constituting the putative guide co-purified with the A. lobatus TnpB-2 protein, suggesting interaction of the protein with the ωRNA transcript. (21B) TAM screens of additional TnpB loci. (21C) Plasmid competition assay positive control with SpCas9. As expected, SpCas9 cleaves only TAM and target-containing plasmids as indicated by the presence of cleavage-specific adapter ligation products. Statistical significance was assessed by comparing the number of adapter-ligated reads of the first plasmid listed in each condition normalized to the average of adapter-ligated reads of the second plasmid listed in the + protein versus − protein conditions using a two-tailed T-test.

[0078] FIG. 22—shows that targeted adjacent motif (TAM) and target-dependent dsDNA cleavage, using TnpB protein at different temperatures (range 37° C. to 80° C.) of a dsDNA substrate, requires both a TAM and a target and is most robust between 45° C. and 60° C. In this experiment, TnpB protein was obtained from ortholog 6, corresponding to Alicyclobacillus macrosporangiidus strain DSM 17980, and was added at a final concentration of 1 μM protein and 100 ng of dsDNA substrate.

[0079] FIG. 23—is a photo showing collateral cleavage of collateral substrates (collateral substrate 1) using TnpB protein from Alicyclobacillus macrosporangiidus strain DSM 17980 at a final concentration of 1 μM at 60° C. The “ssDNA substrate” and the “dsDNA substrate” contain a target sequence to which the ωRNA is designed to bind. The “collateral substrate 1” does not contain a target sequence. The photo shows cleavage of collateral substrate 1 is induced in the presence of dsDNA substrate where the dsDNA substrate had both the target sequence and a TAM. Cleavage of collateral substrate 1 was also induced in the presence of ssDNA substrate with the target sequence and both with and without the TAM.

[0080] The figures herein are for illustrative purposes only and are not necessarily drawn to scale.

### DETAILED DESCRIPTION OF THE EXAMPLE EMBODIMENTS

### General Definitions

[0081] Unless defined otherwise, technical and scientific terms used herein have the same meaning as commonly understood by one of ordinary skill in the art to which this disclosure pertains. Definitions of common terms and techniques in molecular biology may be found in Molecular Cloning: A Laboratory Manual, 2^{nd} edition (1989) (Sambrook, Fritsch, and Maniatis); Molecular Cloning: A Laboratory Manual, 4^{th} edition (2012) (Green and Sambrook); Current Protocols in Molecular Biology (1987) (F. M. Ausubel et al. eds.); the series Methods in Enzymology (Academic Press, Inc.): PCR 2: A Practical Approach (1995) (M. J. MacPherson, B. D. Hames, and G. R. Taylor eds.): Antibodies, A Laboratory Manual (1988) (Harlow and Lane, eds.): Antibodies A Laboratory Manual, 2^{nd} edition 2013 (E. A. Greenfield ed.); Animal Cell Culture (1987) (R. I. Freshney, ed.); Benjamin Lewin, Genes IX, published by Jones and Bartlet, 2008 (ISBN 0763752223); Kendrew et al. (eds.), The Encyclopedia of Molecular Biology, published by Blackwell Science Ltd., 1994 (ISBN 0632021829); Robert A. Meyers (ed.), Molecular Biology and Biotechnology: a Comprehensive Desk Reference, published by VCH Publishers, Inc., 1995 (ISBN 9780471185710); Singleton et al., Dictionary of Microbiology and Molecular Biology 2nd ed., J. Wiley & Sons (New York, N.Y. 1994), March, Advanced Organic Chemistry Reactions, Mechanisms and Structure 4th ed., John Wiley & Sons (New York, N.Y. 1992); and Marten H. Hofker and Jan van Deursen, Transgenic Mouse Methods and Protocols, 2^{nd} edition (2011).

[0082] As used herein, the singular forms “a” “an”, and “the” include both singular and plural referents unless the context clearly dictates otherwise.

[0083] The term “optional” or “optionally” means that the subsequent described event, circumstance or substituent may or may not occur, and that the description includes instances where the event or circumstance occurs and instances where it does not.

[0084] The recitation of numerical ranges by endpoints includes all numbers and fractions subsumed within the respective ranges, as well as the recited endpoints.

[0085] The terms “about” or “approximately” as used herein when referring to a measurable value such as a parameter, an amount, a temporal duration, and the like, are meant to encompass variations of and from the specified value, such as variations of +/−10% or less, +/−5% or less, +/−1% or less, and +/−0.1% or less of and from the specified value, insofar such variations are appropriate to perform in the disclosed invention. It is to be understood that the value to which the modifier “about” or “approximately” refers is itself also specifically, and preferably, disclosed.

[0086] As used herein, a “biological sample” may contain whole cells and/or live cells and/or cell debris. The biological sample may contain (or be derived from) a “bodily fluid”. The present invention encompasses embodiments wherein the bodily fluid is selected from amniotic fluid, aqueous humour, vitreous humour, bile, blood serum, breast milk, cerebrospinal fluid, cerumen (earwax), chyle, chyme, endolymph, perilymph, exudates, feces, female ejaculate, gastric acid, gastric juice, lymph, mucus (including nasal drainage and phlegm), pericardial fluid, peritoneal fluid, pleural fluid, pus, rheum, saliva, sebum (skin oil), semen, sputum, synovial fluid, sweat, tears, urine, vaginal secretion, vomit and mixtures of one or more thereof. Biological samples include cell cultures, bodily fluids, cell cultures from bodily fluids. Bodily fluids may be obtained from a mammal organism, for example by puncture, or other collecting or sampling procedures.

[0087] The terms “subject,” “individual,” and “patient” are used interchangeably herein to refer to a vertebrate, preferably a mammal, more preferably a human. Mammals include, but are not limited to, murines, simians, humans, farm animals, sport animals, and pets. Tissues, cells and their progeny of a biological entity obtained in vivo or cultured in vitro are also encompassed.

[0088] Various embodiments are described hereinafter. It should be noted that the specific embodiments are not intended as an exhaustive description or as a limitation to the broader aspects discussed herein. One aspect described in conjunction with a particular embodiment is not necessarily limited to that embodiment and can be practiced with any other embodiment(s). Reference throughout this specification to “one embodiment”, “an embodiment,” “an example embodiment,” means that a particular feature, structure or characteristic described in connection with the embodiment is included in at least one embodiment of the present invention. Thus, appearances of the phrases “in one embodiment,” “in an embodiment,” or “an example embodiment” in various places throughout this specification are not necessarily all referring to the same embodiment, but may. Furthermore, the particular features, structures or characteristics may be combined in any suitable manner, as would be apparent to a person skilled in the art from this disclosure, in one or more embodiments. Furthermore, while some embodiments described herein include some but not other features included in other embodiments, combinations of features of different embodiments are meant to be within the scope of the invention. For example, in the appended claims, any of the claimed embodiments can be used in any combination.

[0089] All publications, published patent documents, and patent applications cited herein are hereby incorporated by reference to the same extent as though each individual publication, published patent document, or patent application was specifically and individually indicated as being incorporated by reference.

### Overview

[0090] Embodiments disclosed herein provide engineered TnpB systems. The TnpB system comprises a TnpB polypeptide and a nucleic acid component capable of forming a complex with the TnpB polypeptide and directing the complex to a target polynucleotide. The TnpB systems and TnpB/nucleic acid component complexes may also be referred to herein as OMEGA (Obligate Mobile Element Guided Activity) systems or complexes, or Ω sytems or complexes for short. TnpB systems are a distinct type of Ω sytem, which further include IscB, IsrB, and IshB systems. The nucleic acid component of Ω sytems is structurally distinct from other RNA-guided nucleases, such as CRISPR-Cas systems, and may also be referred to as a ωRNA. In certain example embodiments, the TnpB systems are RNA-predominate, that is the nucleic acid component makes a larger contribution to the overall size of the TnpB complex relative to other RNA-guided nuclease systems such as CRISPR-Cas. Also, given the more minimal structural features of TnpB relative other known programmable nucleases such as CRISPR-Cas, the polynucleotide binding pocket is open and more accessible, which can facilitate greater access to and ability to manipulate, modify, edit, remove, or delete nucleotides at a target region on the bound polynucleotide. Disclosed herein are TnpB systems that may function as nuclease, nickases, or catalytically inactive polynucleotide binding proteins that can be coupled with other functional domains.

[0091] In one embodiment, the TnpB systems and related compositions may specifically target single-strand or double-strand DNA. In one embodiment, the TnpB system may bind and cleave double-strand DNA. In one embodiment, the TnpB system may bind to double-stranded DNA without introducing a break to either of the strands. In one embodiment, the TnpB polypeptides or nuclease/nucleic acid component complexes may open, disrupting the continuity of one of the two DNA strands, thereby introducing a nick of the double stranded DNA. In an embodiment, and without being bound by theory, the size and configuration of the TnpB systems allows exposure to the non-targeting strand, which may be in single-stranded form, to allow for the ability to modify, edit, delete or insert polynucleotides on the non-target strand. In an embodiment, this accessibility further allows for enhanced editing outcomes on the target and/or non-target strand, e.g., increased specificity, enhanced editing efficiency.

[0092] In another aspect, embodiments disclosed herein include applications of the compositions herein, including therapeutic and diagnostic compositions and uses. Delivery of the proteins and systems disclosed is also provided, including to a variety of cells and via a variety of delivery vehicles.

### TNPB Compositions

[0093] In one aspect, embodiments disclosed herein are directed to compositions comprising a TnpB and a ωRNA capable of forming a complex with the TnpB and directing site-specific binding of the TnpB to a target sequence on a target polynucleotide.

### TnpB Polypeptides

[0094] TnpB polypeptides of the present invention may comprise a Ruv-C-like domain. Exemplary TnpB sequences are shown in FIG. 1, Table 1A, Table 1B, Table 1C and Table 5. The RuvC domain may be a split RuvC domain comprising RuvC-I, RuvC-II, and RuvC-III subdomains. The TnpB may further comprise one or more of a HTH domain, a bridge helix domain and a zinc finger domain. TnpB polypeptides do not comprise an HNH domain. In one example embodiment, TnpB proteins comprise, starting at the N-terminus a HTH domain, a RuvC-I sub-domain, a bridge helix domain, a RuvC-II sub-domain, a zinger finger domain, and a RuvC-III sub-domain. In one example embodiment, the RuvC-III sub-domain forms the C-terminus of the TnpB polypeptide.

[0095] In certain example embodiments, the TnpB polypeptides are between 175 and 800 amino acids in size, between 200 and 790 amino acids in size, between 200 and 780 amino acids in size, between 200 and 770 amino acids in size, between 200 and 760 amino acids in size, between 200 and 750 amino acids in size, between 200 and 740 amino acids in size, between 200 and 730 amino acids in size, between 200 and 720 amino acids in size, between 200 and 720 amino acids in size, between 200 and 710 amino acids in size, between 200 and 700 amino acids in size, between 200 and 690 amino acids in size, between 200 and 680 amino acids in size, between 200 and 670 amino acids in size, between 200 and 660 amino acids in size, between 200 and 650 amino acids in size, between 200 and 640 amino acids in size, between 200 and 630 amino acids in size, between 200 and 620 amino acids in size, between 200 and 610 amino acids in size, between 200 and 600 amino acids in size, between 200 and 590 amino acids in size, between 200 and 580 amino acids in size, between 200 and 570 amino acids in size, between 200 and 560 amino acid, between 200 between 550 amino acids, between 200 and 540 amino acids, between 200 and 530 amino acids, between 200 and 520 amino acids, between 200 and 510 amino acids, between 200 and 500 amino acids, between 200 and 490 amino acids, between 200 and 480 amino acids, between 200 and 470 amino acids, between 200 and 460 amino acids, between 200 and 450 amino acids, between 200 and 440 amino acids, between 200 and 430 amino acids, between 200 and 420 amino acids, between 200 and 410 amino acids, between 210 and 500 amino acids, between 220 and 500 amino acids. Between 230 and 500 amino acids, between 240 and 500 amino acids, between 250 and 500 amino acids, between 260 and 500 amino acids, between 270 and 500 amino acids, between 280 and 500 amino acids, between 290 and 500 amino acids, between 300 and 500 amino acids, between 250 and 490 amino acids, between 250 and 480 amino acids, between 250 and 490 amino acids, or between 250 and 600 amino acids. In one embodiment, the TnpB polypeptide is between 300 and 500 amino acids, or between 350 and 450 amino acids.

[0096] In one embodiment, the TnpB polypeptides may comprise a modified naturally occurring protein, functional fragment or truncated version thereof, or a non-naturally occurring protein. In one embodiment, the TnpB polypeptide comprises one or more domains originating from other TnpB polypeptides, more particularly originating from different organisms. In one embodiment, the TnpB polypeptides may be designed by in silico approaches. Examples of in silico protein design have been described in the art and are therefore known to a skilled person.

[0097] In one embodiment, the TnpB polypeptide is from Epsilonproteobacteria bacterium, or Actinoplanes lobatus strain DSM 43150, Actinomadura celluolosilytica strain DSM 45823, Actinomadura namibiensis strain DSM 44197, Alicyclobacillus macrosprangiidus strain DSM 17980, Lipingzhangella halophila strain DSM 102030, or Ktedonobacter recemifer. In one embodiment, the TnpB polypeptide is from Ktedonobacter racemifer, or comprises a conserved RNA region with similarity to the 5′ ITR of K. racemifer TnpB loci. See, e.g. Table 5, FIG. 2. In an aspect, the TnpB polypeptide encodes 5′ ITR/RNA (with RNA on the 3′ strand), TnpB (3′ strand), and lastly 3′ ITR. In one example embodiment, the TnpB may comprise a Fanzor protein, TnpB homologs, found in eukaryotic genomes.

[0098] The TnpB polypeptides also encompasses homologs or orthologs of TnpB polypeptides whose sequences are specifically described herein. The terms “ortholog” and “homolog” are well known in the art. By means of further guidance, a “homolog” of a protein as used herein is a protein of the same species which performs the same or a similar function as the protein it is a homolog of. Homologous proteins may but need not be structurally related, or are only partially structurally related. An “ortholog” of a protein as used herein is a protein of a different species which performs the same or a similar function as the protein it is an orthologue of. Orthologous proteins may be, but may not always be, structurally related or are only partially structurally related. In particular embodiments, the homolog or ortholog of a TnpB polypeptide such as referred to herein has a sequence homology or identity of at least 80%, at least 81%, at least 82%, at least 83%, at least 84% at least 85%, at least 86%, at least 87%, at least 88%, at least 89%, at least 90%, at least 91%, at least 92%, at least 93%, at least 94%, at least 95%, at least 96%, at least 97%, at least 98%, or at least 99% with a TnpB polypeptide, more specifically with a TnpB sequence identified in Table 1A, 1B, 1C, 5, or FIG. 1. In particular embodiments, a homolog or ortholog is identified according to its domain structure and/or function. In embodiments, the homolog or ortholog comprises catalytic residues and/or domains as defined herein, including as identified in FIGS. 1 and 18. Sequence alignments conducted as described herein, as well as folding studies and domain predictions as taught herein can aid in the identification of a homolog or ortholog with the structural and functional characteristics identifying TnpB polypeptides, particularly those with conserved residues, including catalytic residues, and domains of TnpB polypeptides.

[0099] In one embodiment, the TnpB loci comprises inverted terminal repeats (ITRs). An inverted terminal repeat may be present on the 5′ or 3′ end of the TnpB sequence. In an aspect, the inverted terminal repeat may comprise between about 20 to about 40 nucleotides, for example, about 20, 21, 22, 23, 24, 25, 26, 27, 28, 29, 30, 31, 32, 33, 34, 35, 36, 37, 38, 39, or 40 nucleotides. In embodiments, the ITR comprises about 25 to 35 nucleotides, about 28 to 32 nucleotides. In an aspect, the ITR shares similarity with one or more inverted terminal repeats with sequences encoding IscB polypeptides. In one embodiment, the 5′ ITR or 3′ITR of TnpB has a sequence homology or identity of at least 80%, at least 85%, at least 90%, at least 95%, at least 96%, at least 97% at least 98% or at least 99% identity with an IscB 5′ ITR or 3′ ITR. In an embodiment, the 5′ ITR of the TnpB is homologous to the 5′ ITR of the IscB. Exemplary IscB ITRs are disclosed in Altae-Tran et al., Science 9 Sep. 2021, 374: 6563, pp. 57-65; doi:10.1126/science.abj685, specifically incorporated herein by reference in its entirety, including supplementary materials Data S1 to S4 and Tables S1 to S6.

[0100] In one embodiment, the TnpB loci comprises a region of high conservation beyond the sequence encoding the polypeptide that indicates the presence of RNA at the 5′ end of the TnpB loci. In an aspect, the region upstream of the 5′ ITR of TnpB comprises a region encoding an RNA species that comprises a guide sequence.

[0101] A chimeric enzyme can comprise a first fragment and a second fragment, and the fragments can be of TnpB polypeptide orthologs of organisms of a genus or of a species, e.g., the fragments are from TnpB polypeptide orthologs of different species.

### RuvC Domain

[0102] In one embodiment, the TnpB polypeptide comprises at least at least one RuvC-like nuclease domain. The RuvC domain may comprise conserved catalytic amino acids indicative of the RuvC catalytic residue. In an example embodiment, the RuvC catalytic residue may be referenced relative to 186D, 270E or 354D of TnpB polypeptide 488601079 of Table 1A; to 172D, 254E, or 337D of TnpB polypeptide 297565028 of Table 1A; or to 179D, 268E, or 351D of TnpB polypeptide 257060308 of Table 1A. The catalytic residue may be referenced relative to 195D, 277E, or 361D of the sequence alignment in FIG. 1. In an aspect, the RuvC domain may comprise multiple subdomains, e.g., RuvC-I, RuvC-II and RuvC-III. The subdomains may be separated by intervening amino acid sequence of the protein. An exemplary domain architecture of an example TnpB polypeptide is shown in FIG. 18A.

[0103] In one embodiment, examples of the RuvC domain include any polypeptides a structural similarity and/or sequence similarity to a RuvC domain described in the art. In some examples, the RuvC domain may have an amino acid sequence that share at least 50%, at least 55%, at least 60%, at least 65%, at least 70%, at least 75%, at least 80%, at least 85%, at least 90%, at least 95%, at least 99%, or 100% sequence identity with RuvC domains known in the art.

[0104] In some examples, the RuvC domain comprise RuvC-I sub-domain, RuvC-II sub-domain, and RuvC-III sub-domain. Examples of the RuvC-I sub-domain also include any polypeptides having structural similarity and/or sequence similarity to a RuvC-I domain described in the art. For example, the RuvC-I domain may share a structural similarity and/or sequence similarity to a RuvC-I found in bacterial or archaeal species In some examples, the RuvC domain may have an amino acid sequence that share at least 50%, at least 55%, at least 60%, at least 5%, at least 70%, at least 75%, at least 80%, at least 85%, at least 90%, at least 95%, at least 99%, or 100% sequence identity with RuvC-I domain. The RuvC-II domain also include any polypeptides a structural similarity and/or sequence similarity to a RuvC-II domain described in the art. In some examples, the RuvC domain may have an amino acid sequence that share at least 50%, at least 55%, at least 60%, at least 5%, at least 70%, at least 75%, at least 80%, at least 85%, at least 90%, at least 95%, at least 99%, or 100% sequence identity with RuvC-II domains. The RuvC-III domain also include any polypeptides a structural similarity and/or sequence similarity to a RuvC-III domain described in the art. In some examples, the RuvC domain may have an amino acid sequence that share at least 50%, at least 55%, at least 60%, at least 5%, at least 70%, at least 75%, at least 80%, at least 85%, at least 90%, at least 95%, at least 99%, or 100% sequence identity with RuvC-III domains.

[0105] For example, and as described in the art (e.g. Crystal structure of Cas9 in complex with nucleic acid component molecule and target DNA, Nishimasu et al. Cell, 2014) a RuvC may consist of a six-stranded mixed β-sheet (β1, β2, β5, β11, β14 and β17) flanked by α-helices (α33, α34 and α39-α45) and two additional two-stranded antiparallel β-sheets (β3/β4 and β15/β16). It has been described that some RuvC domains shares structural similarity with the retroviral integrase superfamily members characterized by an RNase H fold, such as Escherichia coli RuvC (PDB code 1HJR, 14% identity, root-mean-square deviation (rmsd) of 3.6 Å for 126 equivalent Cα atoms) and Thermus thermophilus RuvC (PDB code 4LD0, 12% identity, rmsd of 3.4 Å for 131 equivalent Cα atoms). E. coli RuvC is E. coli RuvC is a 3-layer alpha-beta sandwich containing a 5-stranded beta-sheet sandwiched between 5 alpha-helices. RuvC nucleases have four catalytic residues (e.g., Asp7, Glu70, His143 and Asp146 in T. thermophilus RuvC), and cleave Holliday junctions (or structurally analogous cruciform junctions) through a two-metal mechanism. Asp10 (Ala), Glu762, His983 and Asp986 of the Cas9 RuvC domain are located at positions similar to those of the catalytic residues of T. thermophilus RuvC. The RuvC-like domain of the TnpB polypeptides may comprise 1, 2, 3 or 4 of the catalytic residues.

[0106] In embodiments, the TnpB polypeptide is a nuclease. In one embodiment, the TnpB and nucleic acid component can direct sequence-specific nuclease activity. The cleavage may result in a 5′ overhang. The cleavage may occur distal to a target-adjacent motif (TAM), and may occur at the site of the spacer (guide) annealing site or 3′ of the target sequence. In an aspect, the TnpB cleaves at multiple positions within and beyond the nucleic acid component annealing site. In an aspect, DNA cleavage occurs 15, 16, 17, 18, 19, 20, 21, 22, 23, 24, 25 or more base pairs distal to the TAM and results in a 5′ overhang.

[0107] In an embodiment, the TnpB polypeptide is active, i.e., possesses nuclease activity, over a temperature range of from about 37° C. to about 80° C. In an embodiment, the TnpB polypeptide is active from about 37° C. to about 75° C., from about 37° C. to about 70° C., from about 37° C. to about 65° C., from about 37° C. to about 60° C., from about 37° C. to about 55° C., from about 37° C. to about 50° C., from about 37° C. to about 45° C. In an example embodiment, the TnpB polypeptide is active in the range of 37° C. to 65° C. In an example embodiment, the TnpB polypeptide is active in the range of 45° C. to 65° C. In an example embodiment, the TnpB polypeptide is active in the range of 45° C. to 60° C. In a further example embodiment, the TnpB polypeptide is the TnpB protein selected from Actinomadura cellulosilytica strain DSM 45823, Actinomadura namibiensis strain DSM 44197, Actinoplanus lobatus strain DSM 43150 (TnpB-1 and TnpB-2), Lipingzhangella halophila strain DSM 102030, Ktedonobacter racemifer, and Epsilonproteobacteria bacterium QNF01000004_Extraction_(reversed). In another example embodiment, the TnpB polypeptide is from Alicyclobacillus macrosporangiidus strain DSM 17980. In an example embodiment, the Alicyclobacillus macrosporangiidus strain DSM 17980 TnpB protein is most active in the range of 45° C. to 60° C. (FIG. 22).

[0108] In one embodiment, the TnpB polypeptide displays collateral activity, also referred to as trans cleavage, where upon activation and cleavage of its cognate target, non-specific cleave of non-cognate nucleic acid occurs. In an aspect, the TnpB polypeptide possesses collateral activity once triggered by target recognition. In an aspect, upon binding to the target sequence, the TnpB polypeptide will non-specifically cleave polynucleotide sequences, e.g. DNA. The target-activated nonspecific nuclease activity of TnpB is also referred to herein as collateral activity.

[0109] In an embodiment, the TnpB protein displays nuclease activity towards both ssDNA and dsDNA target sequences. In an embodiment, the TnpB protein displays nuclease activity towards both ssDNA and dsDNA wherein a TAM may not be necessary to cut a ssDNA target (FIG. 23).

[0110] In embodiments, the TnpB polypeptide is a nuclease. In one embodiment, the TnpB and nucleic acid component molecule can direct sequence-specific nuclease activity. The TnpB polypeptides provided herein may also exhibit RNA-guided recombinase activity. The homology to the RuvC domain and relatedness to the DDE family of recombinases indicate potential recombinase activity. In an embodiment some TnpB polypeptides detailed herein may naturally exhibit, or be engineered to exhibit, a lack of nuclease activity, or reduced nuclease activity, and are provided with a functional domain as detailed herein, for example, nucleotide deaminases, reverse transcriptases, transposable elements, e.g. transposase, integrase, recombinase, allowing for RNA-guided target specific modifications.

### Example TnpB Polypeptides

[0111] In certain example embodiments, the TnpB protein may comprise a sequence as set forth in Table 1A, Table 1B, or Table 1C. In Table 1A, provided are the native TnpB amino acid sequences for A. cellulosilytica, A. lobatus TnpB-1, H. alba, A. namibiensis, A. umbrina and Epsilonproteobacteria bacterium 10_QNFX01000004 extraction reversed which all start (+1 position) with a valine (GTG) but as is well known in the art is translated as a methionine because of the peculiar nature of the initiator tRNA.

TABLE 1A
Exemplary TnpB Sequences

| TnpB Reference | TnpB Sequence |
|---|---|
| 488601079 | MLISYRFRIYPSKTVQAKLNEQLELCRWLYNRLLSEVNKARKEGRRIRREDTQSLIV |
| | RIKREEKPELSKVYSKVLQMVNYQLRSNISSLNELRKKGVKVGWLRYKTSPNSFKT |
| | LNFNQSGFKIDFDRKKLSLSKVGDIPIRLHRSIGGKIKGVIIKRTKSGKWYAIVQAEV |
| | DKQPLPPTGRAIGIDVGITHFCVDSDGNYFEHPKYLDRTLEKIKKVQKQLSRKQKGS |
| | KNREKVRIGLAKLYEKLENQRNDFLHKLSRYYVNNYDIMVVEDLNVKEMAENGSS |
| | TTLNRHITDSAWSKFVRLLCEKAERAARTVVKVNPKNTSKRCAMCGYIVNNLKLH |
| | DRTFTCPICGWEADRDYNASLNILDVGMGRSRTPVEGEPLPCVISYREVIAGQVLSM |
| | KQEVPSVRAE (SEQ ID NO: 1) |
| 297565028 | MSLLSVKCKLIPDASTAEKLSRTVNQFANACNYALQVARRDNIWNKFALQRAVYA |
| | DLRAEYGLSANLAIRAIARVGKRKGHKAGGFKATSVDYDQRILSVNVDTETVSLST |
| | VDGRVKVPMRIAGYQRHLLRTAKSIQGGQLVRGRDSSWYIHLWCEYDDPPVLDPQ |
| | GMLGVDLGIVNIATDSDGETYSGKHLNSVRHRHRRLRKKLQKKGTKGAKRRLKKL |
| | SGKETRFSNHVNHTLSKRIVAKAQRTERALALEDLQGIRERVRLRRPQRATLHSWA |
| | FFDLGQKLRYKAERAGVPLVFVDPRNTSRQCPACGHAERANRPTQALFRCVACGY |
| | SGAADYVAAVNIAVRGWAAVNRPYLGEASRVSLHGSVPGSPRL (SEQ ID NO: 2) |
| 257060308 | MLESQPITVACKLQVANTLAKEIDETMMVFACACDWVNQNTPEKMTNKTAMQSL |
| | VYQDVRVNFGLSSNLAIQAIRRVCANRKTAKQKGKKVKEFKPTSISYDARIFSFRES |
| | DWTVSVKLLNSRQRIKLLIGNYQIGLLKSKNPTSATLVKRKSGNYYIHITLDEPTQPE |
| | AKTDKVLGVDLGRTDIATTSEGESWSGKQITAKRNHYAKLRTTIQKKASKGTRSSR |
| | RRCRQLLARLSGKERRFQKHINHEISRQLVNNAVTNKQAIAIEDLTGIRERTNRKPRS |
| | KKDKRLGNNWAFYQLRQFLTYKCILAGVKLILVNPAYTSLSCHKCLVIGDRKGKGF |
| | SCNNCGNKCDADYNGAQNIKALGAIINRPGGSGLSCKLKTNVQYIQLSLFEGLGLL |
| | KTSTSA (SEQ ID NO: 3) |
| Actinomadura | VKLVVRVKLLPDAVMDAALRETLKLCNRAADHASRRAFATRITGRTALQRLVYGE |
| cellulosilytica | LKAMGLSAQPAIHVARKVAGAYATLKANLKAGNYGPEGSKRRARVESRPIRFRRD |
| Strain_DSM | AAQPFDDRCLSWQLDQRTVSIWTVRGRAGGIPFVCSAEQLKMLAAHRRGESDLVY |
| 45823 | RGGQWYLYATCEVPEPDAYEPDGFLGVDLGIANIATTSDGTVHSGKHINQIRHRNR |
| | RLRRKLQRKGTKSARRLLRKLSGREARFAADVNHRIAKRIVTEAQRTCRGIALEDL |
| | GGIRERVRLRRPRRVTLHSWAFAQLGAFIAYKARRAGVPVVHVDPRHTSQGCSAC |
| | GHISRKNRPDQTTFCCTSCGFAEHADVNAARNIAQRGATGRAVSHAADDVA (SEQ |
| | ID NO: 4) |
| Actinomadura. | VYVVVRVKLEPSAEDAAALGATLHAVNKAANEVSRTAFAHGVKRE |
| namibiensis | YALRKLTYAGLKERGLGAQAAQHVIKKVCGAYAVLAGQIRSGFLRG |
| strain DSM | ERRRRAESKPIAFRPDAAHPFDDRCLSWQLHAWTVSIWTVHGRKRGI |
| 44197 | RFSCSGGDLEMLFAHRKGETDLVFRDGMWFLMATCEVPAPPVAEPN |
| | GFIGVDLGIANIATTSDGARHVGRGLNRHRRRQAALRAKLQAKRTR |
| | SARRLLRKRRRREARHARNINHRISKQVVAEAERTGRGIALEDLSGIR |
| | DRERSHRSQRAILHSWSFHQLAEFLEYKARRAGVALVRVNPAYTSR |
| | TCADCGHRERTNRVSQARFVCRSCGVVAHADLNASRNIARLGEAA |
| | WNAGRESRVPAASP (SEQ ID NO: 5) |
| Actinomadura | VKLMVQVRLLPTSEQASALRSTLHVCNVQANEVSRTAFERGVFRNH |
| umbrina strain | DLRKLTYRSVRDAGLGSQAAQHVIKKVADAYGTLRAGIRAGNFGRP |
| DSM 43927 | GSRRRIKAESKPITFRPDAAQPFDRRNMSLALDAGTLSLWTLNGRLK |
| | GVPFACSTSARRTLAECRHGESDLLCRDGKWLLLVTVEVAEQPLNE |
| | EPDGFIGVDLGIANIATTSTGYRAAGRESSRHRARQARLRRRLQAKG |
| | TKSAKRVLKRQRRREQRRARDVNHCVSKRIVAEAERTGRGIALEDL |
| | TGIRDRVRHRRPQRAAFHSWAFHQLGNFITYKARRAGVPVVFVDPA |
| | HTSRTCADCGHRERADRVDQALFICRGCGVVAHADRNASRNIARKG |
| | EVAWDAGRR (SEQ ID NO: 6) |
| Actinoplanes | VKLVVQVKLLPTPVQTSALEATLRACNTAASQVAATARTVDCYRNYDLRKHSYQA |
| lobatus strain | IKADCGLGAQAAQHVIKKVCDAYTTLQANLTAGRYGKPGSRRRRRVEAGPVVFR |
| DSM 43150 | WDAAQPYDARMLSWQHDARTVSIWTVGGRLRDVAFTGSADQLTAVATLPVGECD |
| (TnpB-1) | LLHRDGMWFLYASVEVPEPQLIEPAGFLGVDMGIVNIAYDSDGTRHAGAELNGYR |
| | RRQARLRQRLQAKNSQSAKRLLHRRRRKEARHAADINHVIAKTIVTEAARTGRGIA |
| | VEQLTGIRDRVRLRKPQRVTLSSWSFGQLGAFLAYKACRAGVPLVQVDPRYTSQTC |
| | HRCGHRDKRNRPNQETFTCRSCGVVAHADHNAALNIAHRGVEGWGAVSRPHVA |
| | (SEQ ID NO: 7) |
| Actinoplanes | MKLVVQVKLQPTAEQASMLEATLRACNTAANEVAQVARRARVYRNYDLRKHVY |
| lobatus strain | AGIKADHRLGSQAAQHVIKKVCDAYKTLTSNLRAGNYGPPDAKRYRRVSTEPVRF |
| DSM 43150 | RWQAAQPYDARMLSWQHDARTVSIWTVAGRMKNIAYTGSPDQLKAVAELPVGEC |
| (TnpB-2) | DLVHRDGMWLLYATVEIAEATPVEPAGFLGVDLGIVQIATDSDGTVYAGEQLNRY |
| | RRRQIRLRAKLQAKKTESARRLLVKRARRESRHATNVNHVISKSIVAEAERTSRGIA |
| | VEDLTGIRARVRLRKPQRAALHSWSFAQLGGFLTYKARRAGIPLVQVDPRYTSQTC |
| | SACGHRDKRNRPDQATFICRSCGVVAHADVNAAVNIAARGVDVWGAVSRPYVA |
| | (SEQ ID NO: 8) |
| Alicyclobacillus | MGRKRALIVLNDLCYNNGMNLTLMVKLLPTTEQHQALLETMERFNAACNAIAEVA |
| macrosporangiidus | FEHRTANKIRLQKLVYDSIRKEFGLSAQMTVRAIAKACEAYKRDKSIKPTFKPHGAI |
| strain DSM | VYDQRLLSWKGLDRVSILTLGGRILVPILFGEYQAARLQRIRGQADLIYRDGTFYLA |
| 17980 | VVVDVPDPPQGAPNGFLGVDLGIKNIATDSDGEVFSGGHVNGLRHRHARLRQRLQS |
| | KGTKSAKRLLKKRRRKEARFATNVNHRIAKVLVAKAKDTGRGIALEDLKGIRDRIT |
| | VRKAQRRTQHSWAFHQLRFFIEYKARLAGVPVVFVDPRNTSRTCPSCGHADKRNR |
| | PTRDNFECVECGFAGPADTIAAVNIRRRAEVMQPYAV (SEQ ID NO: 9) |
| Haloactinospora | VSEVAFERGVPREYELRKHTYAELKARGLGAQAAQHVIKKVRDADTTLTANIRAG |
| alba Strain | NLGAPGSKRRRRAESTPIAFRPEAAQPYDDRCLSWQYDRRTVSLWTTAGRIKNVRF |
| DSM 45015 | ACSAEALTRLQQHRQGESDLIERDGVFYLIATCEVPEGEQYEPDGFIGVDLGIANIAT |
| | TSTGYQAAGRGLNRHRKRQLVLRAKLQKKRTKSAKRRLKARARREARHAANQNH |
| | IISKTIVTEAERTSSGLSLEELTGIRQRVRLSKPQRVALHSWAFAQLAGFIVYKAKGA |
| | GVPLVVVDPAYTSQMCAQCQHIDQRNRVDQGLFICRGCGVVAHADRNASHNIAHR |
| | GESVWNAGRESRVPATP (SEQ ID NO: 10) |
| Lipingzhangella | MLISLLVKIVVQVKLVPDAVQASALESTLRTVNEAANWVSGVAFEQGVPREYALR |
| halophila strain | RHTYAELKSRGLGAQAAQHVIKRVRDAYTTLRANLRAGNLGRPGSARRRKAESRPI |
| DSM 102030 | AFRVDAAQPYDDRCLSWQYDAQTVSIWTTAGRVKGVRFACSADALKMLQQYRKG |
| | ESDLIERDGVFYLSATCEVPEATEYEPEGFIGVDLGIANVATTSTGYRAAGRGLNRH |
| | RRRQRALRRKLQAKATKSAKRRLKNRRRKEARHAANVNHIIAKRIVTEAQRTSSGI |
| | ALEDLKGIRQRARLRRPQRVTLHTWAFAQLGQFLAYKARRAGVPLVFVDPAYSSQ |
| | ECAQCHHIAKNNRLNQARFVCRSCGVVAHADRNASRTIAHRGEAAWIAGRESRVP |
| | ATP (SEQ ID NO: 11) |
| Meiothermus | MSLLSVRCKLIPDASTAEKLTRTVNQFANACNYTLQVARRDNLWNKFALQRAVYR |
| Silvanus strain | ELRERFGLSANLAVRAIARVGKRKGHKVGGFKATSVDYDQRILSVNLDTEVVSLST |
| DSM 9946 | VDGRVKVPMQIAGYQRHLLRTAKSIQGGQLVRGRDSWYVHLWCEYDDPPAMTPN |
| | GFLGVDLGIVNIATDSDGETYSGSHLNSVRHRHRRLRRKLQKKGTKGAKRRLKKLS |
| | GKEARFSNHTNHALSKRIVAKAQRTGRGIAIEDLGGIRDRVRLRRPQRAALHSWAF |
| | FDLGQKLRYKAERAGVVLVQVDPRNTSRTCPACGHCEKLNRVSQAQFVCRSCGLV |
| | GHADHFAAVNIAVRGWAAVNRPYLGEAESAIRHNPVPGSPRL (SEQ ID NO: 12) |
| Epsilonproteobacteria | VKLTTQVKLIISREDKQSLLETMEQFNEVCNGISKSAFEYKVFRQYDIHQMLYHPIR |
| bacterium | DCFDLSAQLVVRAISKVADSYKLDIKKIRKFREHGAITYDSRILTWKDEEVSIWAIGG |
| 10_QNFX01000004 | RKKFSYLCGERQKEQLKFQKGESDLIYKNGDFFLYTTCEVPEKEPVPVEQYLGVDL |
| extraction | GITNIATDSLEKIYSGSHISSVRIRNLKLRAKLQSKGTKSAKNLLKKRSKKERRFAKD |
| | INHQISKKIVETAQRHSVGIALENLKGIRSRVTVRKGLRYQLHSWAFNDLAGKIWYK |
| | ARKEGIEVILVDPRYTSQECSSCGHTKKSNRKSQSLFSCQSCGYTVHADINAACVISS |
| | RAAVNRPNVVGEQSPNYKPLPLGRGG (SEQ ID NO: 13) |
| 306920_100076654_ | TTGGTCTTGTTCTATACTTCGATTACGCGACTGACCGTCACAGTCAAGCTCTCGC |
| organized | CTGCCGACCCGGACGGATTGCGCCGTACCCTGCAGACGGCCAATGGGGCCTGCG |
| (reversed) | ATTGGATTAGCGAGCAGGCGTGGCACCACCAGACCTTCCGGCATTTGGCGCTCC |
| | ATAAGCTGGTCTACTACCAAGTCCGCCAGCGCTTTGGTTTGTCCGCTCAGATGGC |
| | GGTGCGGGGGATCGCCAAGGTGGTGGATGCCTACGCGCTCGATAAGCGCACCA |
| | AGCGGAAGTTCCGAACCGATGGGGCTTTTCCGTACGATGCGCGCATCCTGAGTT |
| | GGGATCTGGAATCCGAGACCGTCTCGATCTGGACTGTGGCGGGCCGGCGCCGGA |
| | TGCCATTTGAATGCGGGGAGCGGCAGCGTAACCTGTTGGAGCGGCAACAGGGT |
| | GAAAGCGACCTGATCTACCGCCGCCAGGCTTTCTATTTGGCAACCACCTCGAAC |
| | GTGGATGTGCCTGAACCACAAGCTGTGGATGACTTTCTGGGAGTGGATTTGGGG |
| | GTAGCGAACGTTGCGAGCGATTCGGATGGACGGCGCTACTCCGGCTCTGAGGTG |
| | AAGAATGTGCGCTGGCGGAACCGGAAGTTGCGGGCTAGATTGCAGGCCAAGCA |
| | AACGCGATCCGCCAAACGCAGGTTTAAGAAGTTGGCGGGGGGAGAATCGCGTT |
| | TCGCCCGCCATGTGAACCACTGTATTAGCAAGCAGATCGTTCGCACGGCTAAAG |
| | GCACCGGGCGCGGAATCCGTATGGAGGAGCTGAATGGAATCCGCACACGGGTA |
| | AAAGTTAGGCACGGCGAGCGAGGGGTTCTGCACTCTTGGGGGTTCTGGCAGTTG |
| | CGCCAGATGATCGTTTATAAGGCGGCACTGGCAGGAGTCCTGGTGGAGTTTGTC |
| | GATCCGCGCAACACCAGCCGGACGTGCTCCGAGTGTGGCCACTGTGAGAAGGG |
| | CAACCGCCGTAATCAATCTGAGTTTCGGTGTCGCTCGTGCGGAAGGGAAGCGCA |
| | TGCCGATATCAACGCTGCCGAGAATATCCGGCAGGGCCGCAGTAAACCGGCCG |
| | AACGTGACGTGGTCGAGAATCGTCTGTCGCATTCGTTTCGCTTCAGGCGGCTTTC |
| | AGCCGCAGTCACAAGCCCTCGCCTTTAG (SEQ ID NO: 14) |
| a0307363_1000206_ | ATGAAACTGATTGCCCAAATAAAACTTCTGTGCAGCGAAGTCGAGAAACAGGC |
| organized | CCTGATGGACACCATGCGGCTAATGAACTCGACCTGCGACCAGATCAGCAAGGC |
| (reversed) | CGCGTGGTCGGCGCGGAAGTTTGGACGATCATCTTTACAGAAACTCTGCTATCT |
| | GGATGCCAAGTGCAACGGCCTTACTGCTCAGATGGCTATCCACGCCACTCGGAA |
| | GGTGGCCGACGCATACAAGAAGGACAAGAAAACTCTGCGCCAATTCCGTCCCA |
| | CCGGGGCCATAACTTTTGACGATCGGGTATTGAGCTGGAAACCTGCCCAGCAGA |
| | CTGTCTCTATCTGGACGGTTGCAGGCAGACAAACGATCTCATACGTCTGTGGCG |
| | ACCGGCAGGGTGCGCTGCTCTCCACCCGCCACGGTGAATCCGACTTGGTGTACC |
| | GTGGAGGCGAGTTTTACCTGTTGGCCACCTGTGACATCGAGGATGTTCCTTTGGC |
| | GGATACCGAAAGATTTCTTGGGGTGGATCTTGGTGTTGTGAACATTGCTGTAGA |
| | CAGCGAAGGGACAATCCATAGGGGTAACGCCGTAAACAACGTCCGGTATCGTC |
| | ATAGGGCGCTACGAGGAAAGCTCCAGAGAAAAGGCACTAGATCAGCAAAGCGG |
| | AAACTGAAACAACTCTCAGGCAAGGAATCCAGGTTTGCCCGAGATGTAAACCA |
| | CTGCATCAGCAAAAGCATTGTGGCCAAGGCGCAAGACACCGGCAAGGGGATAG |
| | CGTTGGAAGACCTGACGCACATCCGTAGTCGGATAACGGCTAGACGCTCCCAGC |
| | GGGCCACCCTGCATAGTTGGTCGTTTGGGCAACTAAGGGCATTTATCTCCTATA |
| | AGGCTGAGGTGCTAGGACTACCAGTCGCCCTGGTGGACCCTCGCAACACCAGCA |
| | GGGAATGTCCCGAGTGTGGCCATACGTACAAAGATAACCGGAAGACGCAATCG |
| | AAGTTTCTCTGCACGTCATGCGGTTTCGCTGGAATCGCCGACGTGATCGCGGCA |
| | GGCAACATTGCCCGCCGGGCCGAAGTCAGCCGGCCAAACGTAGCGGAGGCAGC |
| | ATAA (SEQ ID NO: 15) |
| CBXV010000006.1_ | GTGGTAGCAGTAGCATATGAGCATGCAGCGGACGATTCGGGTCGGGCTGAAAC |
| organized_ | CGACCCTCGAGCAGGCGGACGCGCTCCGGGAAACCCTCCGCCAGCACACCGAA |
| (reversed) | TGCTTCAACGCCGTGTGCGCGTATGGTTGGCAGCACCAGGAGAGGAACGGCGTC |
| | CGGCTCCACCATGCCACCTATCGCGCCTTGCGCGAGCGATTCCCAGCGCTCCCG |
| | TCCCAGCTTGTGGTCGCCGCCAGGGAACGCGCCCGCGAGGCGCTGAGGAGTGC |
| | GCTTGGCCGCGCAAGGCGCGGCAAGAAGGCATCCCAGCCGAGAAGCCGTCTGT |
| | GCCCATTCGGTACGACGCACGCACCTACGCGCTTCGCGCCGCCAAGGGCTATGT |
| | GAGCCTCGCGTCCGTGGCGGGGCGGCTCAAAGTGCCGTTCGCCCTCGATCCACA |
| | CACCCAGGGCATTCTGGGTCAGGCCGTCGGCTTCGACAGCGCCGACATGATCCA |
| | TCGCAAAGGCCGGTTCTGGCTGCATATCGTCGTCACCATCCCCGACGTGGAGTT |
| | CCAGCCGTCTGGAGATGTCGTCGGGGTGGACATGGGCCTTTCGCGCCCTGCCGT |
| | CTGCTCCCACAATCGCTTCTTTGGGAAACGCCGCTGGAAGGAGATCGAGCGCCG |
| | GTACTTCCGGCTCCGTCGCAGTCTCCAGCGCAAAGGCACCCGCTCGGCCAAGAG |
| | GCACCTGCGCAAGCTGGCCGGGAAGGTCAACCGCTTTCGGCGCGACTGCGACCA |
| | TGTGCTCAGTCGGCGTATCGTCGATTCCGTCCAGCCCGGCACCGTGATCGTCGTG |
| | GAGAACTTGGTGGACATCCGCACCCGCACTAAGCAGCGCGGCAGGGAATCGCG |
| | CCGTCGCCTGCACTCCTGGAGCTTCGCGCGACTCAGAAGCTTCCTGGCATACAA |
| | GGCAGCAGCTAAGGGGTGCAAGGTTGTGGGTGTCGATCCCCGTCACACGTCGCA |
| | GATGTGCTCCCGTTGCGGACATGTCCATCGTCGAAATCGACGCTCCCAGTCGCG |
| | GTTCCTATGCCGGGCTTGCGGGTTCGAGCTAAACGCCGATCTCAACGCTGCCCG |
| | CAATATAGCCCGGAAGTACCTTGCCAGCGGTGGCATGCCTGCCGCTGGCGGGCC |
| | GTTGTCAACCGGCCTCGCGTGCCAGCCCGCGCAAGCGGGCTAG (SEQ ID NO: 16) |
| CP009479.1_ | ATGGTAAAGCTTCTGCCGGATAAGCAACAGCAGGAGGCACTCATTGACACCTTC |
| organized_ | GTGAAATTCAATGAAGCCTGCAACTTTGTATCCAGGCTTGCATTCGAGAGAAAG |
| (reversed | CTGTACAACAAGGTACTCCTCCAGAAGCTTGTCTACAGGGACATAAGGGAGAAC |
| | TTCGGGCTCGCAGCCCAGCTTGCCATAAGGGTAATAGCAAAGGTCGTTGAAACC |
| | TACAAGAACGACAAAACTGTTATGCACGAGTTCCGGGAATTCGGAAGCATCGTG |
| | TATGACCAGAGGGTGATGAGTTTCAAGGGCCTCGACACAGTGAGCCTCAACACT |
| | GTCAGGGGAAGGGTGAGGATACCCATGACAATAGGGAAATACAGAGAACTTCC |
| | TCTTGACAGGATCAGAGGGCAGTGTGATCTCGTAAGAAGGAACAGGATATTCTA |
| | CCTCATGGTTGTGGTGGAGGTTCCAGAAGAGGAAGCAATTAGCGCGTCAGATGT |
| | TATCGGTGTCGATCTCGGCATCGAGAACATAGCTGTTGACTCGTCAGGACATTA |
| | CTACTCAGGAGACAGGATTGCAGAGGCAGGAACGAAACATTCCAGTCTGCGAT |
| | CAAGGTTGCAGGCTTGTGGCACCAGGTCTGCAAAGAGACATCTCAAGAAACTTT |
| | CCGGGAAGGAGAGACGTTTTGCAAGAGATGTCAACCATGTCATTTCCGGGGAG |
| | ATCGCGGAAAGAGCAAAAGGCACCTCTTCCGCAATAGCCCTTGAAGAACTCAA |
| | GGGCATAAGGAAGAGGACAACCGTTGGGAAGAACAGGAGGTACAGGCACAAT |
| | AGCTGGTCTTTCTGCCAGCTTCGTACCTTCATTGAATACAAGGCTCTTGAATCCG |
| | GCGTCCCAGTCATAGGTGTGAATGCGAAAAACACAAGCAGGGAGTGTCCTGATT |
| | GCCACACCGTTGATAAAAGGAACAGGCCGGAGCGTTCCATATTCAAATGTATTT |
| | CTTGTGGTTTTGAGGGTGAGGCTGATTTCGTCGCATCCCTCAACATCAGGAACA |
| | GGGCTGCCGCCAGCCAGCCTATTGTAGCGGGTGCTATTTTCGATCAGCCGTTGA |
| | TCCCCCAGCTGCAAGCCCCATCCGTCAGGGTGGGGTAG (SEQ ID NO: 17) |
| Actinomadura | GTGAAGCTTGTGGTGCGGGTGAAGCTGCTCCCCGACGCCGTCATGGACGCGGCG |
| cellulosilytica | TTGCGGGAGACGCTGAAGCTGTGCAACCGGGCCGCCGACCACGCCTCCCGGCG |
| Strain DSM | GGCGTTCGCCACCCGGATCACGGGCAGGACCGCACTCCAGCGGCTGGTGTACGG |
| 45823 | CGAGCTGAAGGCCATGGGCCTGTCGGCCCAGCCCGCGATTCATGTGGCCCGGAA |
| | GGTCGCCGGGGCGTACGCCACCCTGAAGGCCAACCTGAAGGCCGGGAACTACG |
| | GCCCCGAAGGGTCGAAGCGCCGCGCCAGGGTCGAGAGCAGGCCGATCCGGTTC |
| | CGCAGGGACGCCGCCCAGCCGTTCGACGACCGGTGCCTGTCCTGGCAACTCGAC |
| | CAGCGGACCGTGTCGATCTGGACGGTGCGCGGCCGGGCGGGCGGTATTCCGTTC |
| | GTGTGCTCGGCGGAGCAGTTGAAGATGCTCGCCGCCCACCGGCGGGGCGAGTCC |
| | GACCTGGTGTACCGGGGTGGGCAGTGGTACCTGTACGCCACCTGCGAGGTTCCC |
| | GAACCCGACGCCTATGAGCCGGACGGGTTCCTCGGCGTGGACCTGGGCATCGCC |
| | AACATCGCCACCACCAGCGACGGCACCGTTCATTCCGGCAAGCACATCAACCAG |
| | ATCCGGCACCGCAACCGCCGCCTGCGCCGCAAGCTGCAGAGGAAAGGCACCAA |
| | GTCCGCCCGGCGCCTGCTGCGCAAGCTGTCCGGCCGCGAAGCGCGCTTCGCGGC |
| | CGACGTCAACCACCGCATCGCCAAACGCATCGTGACCGAGGCTCAACGCACCTG |
| | TCGTGGGATCGCCCTGGAGGACCTGGGTGGGATCCGCGAGAGGGTACGGCTCC |
| | GCAGGCCCCGGCGGGTCACGCTGCACTCGTGGGCGTTCGCCCAGCTCGGCGCGT |
| | TCATCGCCTACAAGGCCCGGCGCGCCGGGGTACCGGTGGTGCACGTGGACCCGC |
| | GCCACACCTCCCAAGGGTGCTCGGCGTGCGGCCACATCTCCCGCAAAAACCGGC |
| | CCGACCAGACCACGTTCTGCTGCACGTCGTGCGGCTTCGCTGAGCACGCCGACG |
| | TGAACGCGGCCCGCAACATCGCCCAACGCGGTGCGACGGGCCGGGCAGTGAGT |
| | CACGCTGCCGACGACGTGGCCTGA (SEQ ID NO: 18) |
| A. namibiensis | GTGTACGTCGTGGTGCGGGTGAAGCTCGAGCCCTCGGCCGAGGACGCGGCCGCT |
| strain DSM | CTCGGCGCGACCTTGCACGCTGTTAACAAGGCGGCGAACGAGGTTTCTCGAACG |
| 44197 | GCGTTCGCGCACGGCGTCAAGCGCGAGTACGCACTGCGGAAACTGACCTACGC |
| | GGGTCTGAAGGAGCGTGGGCTCGGCGCACAGGCGGCGCAACACGTCATCAAGA |
| | AGGTCTGCGGCGCCTATGCCGTTCTGGCGGGCCAGATACGATCCGGTTTCCTGC |
| | GCGGCGAACGGCGTCGCAGGGCCGAGTCCAAGCCGATCGCCTTTCGCCCCGAC |
| | GCGGCGCATCCGTTCGACGACCGTTGCCTGTCCTGGCAGCTCCACGCCTGGACG |
| | GTGTCGATCTGGACGGTACATGGCCGGAAGAGGGGAATCCGCTTCTCCTGCTCC |
| | GGCGGTGATCTTGAGATGCTCTTCGCCCACCGCAAGGGCGAGACGGATCTGGTC |
| | TTCCGGGACGGGATGTGGTTCCTCATGGCCACCTGCGAGGTTCCCGCCCCGCCG |
| | GTGGCCGAGCCGAACGGGTTCATCGGCGTGGACCTCGGCATCGCGAACATCGCC |
| | ACCACGAGCGACGGCGCACGACATGTCGGGCGCGGACTGAACCGGCACCGCAG |
| | ACGCCAGGCCGCGTTGCGAGCCAAGCTGCAGGCCAAGCGAACCAGGTCCGCCA |
| | GGCGGCTGCTGAGGAAACGCCGCCGCAGGGAAGCACGGCACGCACGGAACATC |
| | AATCACCGCATCTCTAAGCAGGTCGTGGCCGAGGCCGAACGCACCGGACGCGG |
| | AATCGCCCTGGAAGATCTTTCGGGCATCCGCGACCGGGAACGGTCGCACCGGTC |
| | CCAACGGGCCATCCTGCACTCCTGGAGTTTTCACCAGCTCGCGGAGTTCCTGGA |
| | GTACAAGGCCCGCCGTGCGGGTGTCGCGCTGGTCAGGGTGAACCCCGCCTACAC |
| | CAGCCGGACCTGCGCTGATTGCGGGCACCGTGAGAGGACCAACCGGGTGAGCC |
| | AGGCCCGGTTCGTATGTCGGAGCTGCGGCGTCGTTGCGCACGCGGACCTGAACG |
| | CTTCCCGCAACATCGCCCGGCTGGGCGAGGCCGCGTGGAACGCGGGGCGTGAG |
| | TCACGCGTCCCAGCCGCCTCACCGTAG (SEQ ID NO: 19) |
| Actinomadura | GTGAAGCTGATGGTGCAGGTGAGGTTGTTGCCGACGTCCGAGCAGGCGTCGGCG |
| umbrina strain | CTGCGATCGACCCTGCACGTCTGCAACGTGCAGGCGAACGAGGTTTCGCGGACC |
| DSM 43927 | GCGTTCGAGCGCGGCGTGTTCCGAAACCATGACCTGCGCAAGCTCACCTACCGG |
| | TCGGTGCGGGACGCGGGGCTCGGGTCGCAGGCCGCCCAGCATGTGATCAAGAA |
| | GGTCGCCGACGCCTACGGCACGCTGCGAGCCGGCATCCGGGCGGGGAACTTCG |
| | GCAGGCCCGGCTCCCGGCGCCGGATCAAGGCCGAGAGCAAGCCGATCACGTTC |
| | CGCCCTGACGCCGCACAGCCGTTCGACCGACGCAACATGTCGTTGGCCCTGGAT |
| | GCGGGGACCCTCTCGCTCTGGACTCTCAACGGCCGGTTGAAGGGCGTACCGTTC |
| | GCCTGCTCCACCTCGGCGCGAAGGACCCTGGCCGAGTGTCGCCACGGTGAGTCC |
| | GATCTGCTGTGCCGGGACGGAAAATGGCTCTTGCTGGTCACGGTCGAGGTGGCC |
| | GAGCAGCCGTTGAACGAGGAACCCGACGGGTTCATCGGGGTGGACCTCGGCAT |
| | CGCCAACATTGCGACCACCTCCACCGGATATCGCGCGGCCGGCCGTGAGTCGAG |
| | TCGGCACCGCGCCCGCCAAGCCCGACTCCGCCGCAGGCTCCAGGCCAAGGGCA |
| | CCAAGTCCGCCAAGCGGGTGTTGAAGCGGCAGCGTCGCAGGGAGCAGCGGCGT |
| | GCCAGGGATGTCAACCACTGTGTTTCGAAACGGATCGTGGCCGAGGCCGAACGC |
| | ACCGGACGCGGCATTGCCCTGGAAGACCTCACGGGCATCCGCGACCGGGTACG |
| | GCACCGCCGGCCCCAACGGGCCGCGTTCCACTCGTGGGCGTTCCACCAACTCGG |
| | GAACTTCATCACCTACAAGGCCCGCCGGGCCGGGGTGCCGGTGGTGTTCGTGGA |
| | CCCGGCCCACACCTCCCGAACCTGCGCGGACTGCGGCCATCGCGAACGGGCCG |
| | ACCGCGTCGATCAAGCCCTGTTCATCTGCCGAGGCTGCGGCGTCGTTGCGCACG |
| | CGGACCGGAACGCCTCCCGCAACATCGCCCGCAAGGGCGAGGTTGCGTGGGAT |
| | GCGGGGCGGCGGTC (SEQ ID NO: 20) |
| Actinoplanes | GTGAAGCTGGTGGTGCAGGTGAAGCTCCTGCCGACGCCCGTGCAGACGTCGGCG |
| lobatus strain | TTGGAGGCCACCCTGCGGGCCTGCAACACCGCCGCCTCCCAGGTTGCCGCCACC |
| DSM 43150 | GCACGCACCGTCGACTGTTACCGCAACTACGACCTACGGAAACACTCCTACCAG |
| (TnpB-1) | GCGATCAAAGCGGATTGCGGGTTGGGTGCGCAGGCCGCGCAACATGTGATCAA |
| | GAAGGTCTGCGACGCGTACACGACGTTGCAGGCCAACCTCACAGCCGGCCGCTA |
| | CGGCAAGCCCGGCAGCAGGCGCCGCCGCAGAGTCGAGGCCGGCCCGGTCGTGT |
| | TCCGCTGGGATGCGGCGCAGCCGTATGACGCGCGGATGCTGTCCTGGCAGCACG |
| | ACGCCCGGACCGTGTCGATCTGGACGGTCGGCGGGCGGCTTAGGGATGTCGCGT |
| | TCACCGGCTCGGCGGATCAGCTCACAGCGGTCGCGACCCTACCGGTCGGTGAAT |
| | GCGATCTGCTGCACCGCGACGGCATGTGGTTCCTGTACGCCAGCGTGGAGGTGC |
| | CCGAGCCGCAGCTGATCGAGCCGGCCGGGTTCCTCGGTGTTGATATGGGCATCG |
| | TCAACATCGCCTACGACTCCGACGGCACCCGGCACGCCGGGGCCGAACTCAAC |
| | GGCTATCGCCGCCGGCAGGCCCGGCTGCGTCAGCGGTTGCAGGCCAAGAACAG |
| | CCAGTCCGCGAAACGGCTGCTGCACCGCCGCCGTCGTAAGGAGGCGCGGCACG |
| | CCGCGGACATCAACCATGTGATCGCCAAGACCATCGTGACCGAGGCTGCACGCA |
| | CCGGCCGCGGTATCGCCGTCGAACAGTTGACGGGGATCCGTGACCGGGTCCGGC |
| | TGAGAAAGCCCCAACGGGTCACGCTCTCCTCATGGTCATTCGGTCAGCTCGGCG |
| | CGTTTCTGGCGTACAAGGCCTGCCGGGCCGGTGTACCGCTGGTCCAAGTGGACC |
| | CCCGCTACACCTCGCAAACCTGTCATCGGTGCGGGCACCGCGACAAACGGAACC |
| | GGCCGAACCAGGAAACCTTCACCTGTCGGTCGTGCGGGGTCGTTGCCCACGCCG |
| | ACCACAACGCGGCCCTCAACATCGCCCACCGCGGTGTCGAGGGCTGGGGCGCA |
| | GTCAGCCGCCCACACGTGGCCTGA (SEQ ID NO: 21) |
| Actinoplanes | GTGAAGCTGGTGGTGCAGGTGAAGCTTCAGCCGACGGCCGAACAGGCGTCGAT |
| lobatus strain | GTTGGAGGCGACCCTGCGTGCTTGCAACACGGCCGCGAACGAGGTTGCTCAGGT |
| DSM 43150 | GGCCCGCCGGGCGCGGGTCTACCGCAACTACGACCTGCGCAAGCATGTGTACGC |
| (TnpB-2) | GGGCATCAAAGCCGATCATCGGCTCGGGTCCCAGGCCGCCCAGCATGTGATCAA |
| | GAAGGTTTGTGACGCGTACAAGACCCTCACGTCGAATCTGCGGGCCGGCAACTA |
| | CGGCCCGCCGGATGCGAAGCGGTACCGGCGGGTGTCCACCGAGCCGGTCCGGTT |
| | CCGGTGGCAGGCCGCCCAGCCGTACGACGCGCGGATGCTGTCGTGGCAGCACG |
| | ACGCCCGTACGGTGTCGATCTGGACCGTGGCCGGCCGGATGAAGAACATCGCCT |
| | ACACCGGCTCTCCCGACCAGCTCAAAGCCGTCGCCGAGTTGCCGGTCGGTGAAT |
| | GCGATCTGGTGCACCGCGACGGCATGTGGTTGCTCTACGCGACCGTCGAGATCG |
| | CCGAGGCCACCCCGGTCGAACCGGCTGGTTTCCTCGGTGTGGATTTGGGCATCG |
| | TGCAGATCGCCACCGACTCCGACGGCACCGTCTACGCGGGCGAACAGCTGAAC |
| | CGGTACCGGCGCCGCCAGATCCGGTTGCGCGCCAAGTTGCAGGCCAAGAAGAC |
| | CGAATCCGCCCGCCGGCTGCTGGTCAAACGCGCCCGCCGGGAGTCACGGCACG |
| | CTACGAACGTCAACCATGTGATCTCGAAAAGCATTGTGGCCGAGGCTGAACGCA |
| | CCTCGCGTGGTATCGCCGTCGAAGACCTGACGGGGATCCGCGCCAGGGTCCGGC |
| | TCCGCAAGCCCCAACGGGCCGCACTGCATTCTTGGAGCTTCGCCCAACTCGGCG |
| | GCTTCTTGACCTACAAGGCCCGCCGGGCCGGTATCCCTCTGGTCCAGGTCGATC |
| | CCCGGTACACGTCGCAGACGTGCTCGGCATGCGGTCACCGGGACAAGAGGAAC |
| | CGGCCCGACCAGGCCACGTTCATCTGCCGGTCGTGTGGAGTCGTTGCCCACGCG |
| | GACGTCAATGCTGCCGTCAACATCGCCGCGCGTGGTGTCGACGTCTGGGGCGCA |
| | GTCAGCCGCCCGTACGTGGCCTGA (SEQ ID NO: 22) |
| Alicyclobacillus | ATGGGGAGGAAACGCGCTCTTATTGTATTGAACGATTTGTGCTATAATAACGGC |
| macrosporangiidus | ATGAACCTGACGTTGATGGTCAAGCTGCTACCCACAACTGAACAGCACCAAGCG |
| strain DSM | TTGCTTGAGACGATGGAACGGTTCAATGCGGCTTGCAATGCGATTGCGGAAGTG |
| 17980 | GCTTTCGAACATCGCACTGCAAACAAGATCCGGTTGCAAAAGCTCGTGTACGAC |
| | AGTATCCGCAAGGAATTTGGGCTTTCAGCCCAAATGACCGTCCGTGCTATCGCT |
| | AAGGCGTGCGAAGCGTACAAGCGAGACAAGTCGATAAAGCCGACATTCAAGCC |
| | GCATGGCGCCATCGTATATGACCAACGCCTCCTTTCTTGGAAAGGTCTTGATCGC |
| | GTGTCCATCCTAACGCTTGGCGGCCGCATCTTGGTCCCCATTTTGTTTGGCGAGT |
| | ACCAGGCTGCACGCCTCCAGCGGATTCGTGGACAAGCCGACCTGATTTACCGCG |
| | ATGGCACCTTCTACCTCGCTGTCGTTGTGGATGTCCCAGATCCACCACAAGGTGC |
| | TCCAAATGGATTTCTTGGCGTGGACTTGGGCATTAAGAACATCGCGACAGACAG |
| | CGACGGCGAGGTGTTTTCTGGAGGGCACGTGAACGGACTGCGCCATCGCCACGC |
| | ACGCCTTCGCCAACGCCTGCAATCGAAAGGCACAAAGTCTGCCAAGCGTCTGCT |
| | GAAGAAGCGTCGCCGCAAGGAAGCCCGTTTCGCCACCAACGTAAACCATCGCA |
| | TTGCGAAAGTGCTGGTTGCGAAAGCCAAAGACACCGGGCGCGGGATTGCACTT |
| | GAAGATCTCAAGGGCATTCGTGACCGGATAACGGTTCGCAAGGCTCAGCGTCGC |
| | ACCCAGCATTCCTGGGCATTCCATCAGCTTCGCTTCTTCATCGAGTACAAGGCAC |
| | GTTTGGCGGGTGTGCCCGTGGTGTTCGTCGATCCGCGCAATACATCTCGAACAT |
| | GTCCAAGCTGCGGTCATGCGGACAAACGCAATCGCCCCACAAGGGATAATTTTG |
| | AGTGTGTCGAATGTGGGTTCGCTGGCCCAGCCGACACCATCGCTGCGGTGAACA |
| | TTCGCCGTAGGGCTGAAGTCATGCAGCCGTACGCGGTATAG (SEQ ID NO: 23) |
| Haloactinospora | GTGTCGGAGGTGGCGTTTGAGCGTGGCGTGCCGCGTGAATATGAGCTGCGCAAG |
| alba Strain | CACACCTACGCCGAGCTGAAGGCCCGTGGGCTGGGAGCGCAGGCCGCCCAGCA |
| DSM 45015 | CGTCATCAAGAAGGTGCGCGACGCCGACACCACGCTCACGGCCAACATTCGTGC |
| | CGGGAACCTCGGCGCGCCAGGATCGAAACGCCGCCGCAGGGCCGAGTCGACAC |
| | CGATCGCCTTCCGACCTGAGGCCGCCCAGCCCTACGACGATCGATGCTTGTCCT |
| | GGCAGTACGACCGCCGAACCGTGTCGCTCTGGACCACGGCGGGCCGTATCAAG |
| | AACGTCCGCTTCGCCTGCTCGGCGGAGGCGCTCACGAGGCTCCAGCAGCATCGG |
| | CAGGGCGAGTCCGACCTGATCGAGCGTGACGGCGTCTTCTACCTCATTGCCACG |
| | TGCGAGGTGCCCGAGGGCGAGCAGTATGAGCCGGACGGCTTCATCGGTGTGGA |
| | CCTCGGTATCGCCAACATCGCCACCACCTCGACCGGCTACCAGGCTGCCGGGCG |
| | CGGCCTGAACCGCCACCGCAAGCGACAGCTCGTCCTGCGAGCCAAGCTCCAGA |
| | AGAAGCGCACGAAGTCCGCCAAGCGGCGGCTCAAGGCCCGCGCCCGCCGCGAG |
| | GCGCGGCACGCCGCGAACCAGAACCACATTATCTCTAAGACGATCGTGACCGA |
| | GGCTGAACGCACCTCGTCCGGACTGTCACTCGAAGAGTTGACGGGTATCCGGCA |
| | GAGGGTACGGCTATCCAAGCCCCAACGGGTCGCGCTGCACTCCTGGGCCTTCGC |
| | CCAGCTCGCAGGATTCATCGTCTACAAGGCCAAGGGGGCGGGTGTGCCCCTGGT |
| | CGTCGTTGACCCTGCCTACACGTCGCAGATGTGCGCACAGTGCCAGCACATCGA |
| | CCAGCGCAACCGTGTCGACCAGGGGCTTTTCATCTGCCGGGGGTGTGGGGTCGT |
| | TGCCCACGCCGACCGGAATGCTTCCCACAACATCGCCCACCGTGGCGAGAGCGT |
| | GTGGAATGCGGGGCGTGAGTCACGCGTCCCTGCCACCCCATAA (SEQ ID NO: 24) |
| Lipingzhangella | ATGTTAATATCACTCCTCGTGAAGATCGTCGTGCAGGTCAAACTTGTTCCGGATG |
| halophila strain | CCGTGCAGGCATCCGCGCTTGAGTCCACCCTGCGCACGGTCAACGAGGCCGCGA |
| DSM 102030 | ACTGGGTCTCCGGGGTGGCCTTCGAGCAGGGTGTGCCGCGTGAGTACGCGTTGC |
| | GCAGGCACACCTACGCCGAGCTGAAGTCTCGTGGGTTGGGGGCGCAGGCGGCC |
| | CAGCATGTGATCAAGAGGGTTCGTGATGCCTACACCACGCTGCGGGCGAACCTG |
| | CGGGCGGGCAACCTCGGTAGGCCGGGGTCGGCGCGGCGTCGCAAGGCGGAGTC |
| | CAGGCCGATCGCCTTTCGGGTCGATGCGGCCCAGCCCTATGACGATCGGTGTCT |
| | GAGCTGGCAGTACGACGCGCAGACCGTGTCGATCTGGACCACCGCAGGTCGGG |
| | TGAAGGGCGTGCGGTTCGCATGCTCGGCGGACGCGCTCAAGATGCTGCAGCAGT |
| | ACCGTAAGGGCGAGTCCGACCTGATCGAACGCGATGGTGTGTTCTACCTGAGCG |
| | CCACCTGCGAGGTCCCCGAAGCCACTGAGTACGAGCCCGAGGGGTTCATCGGCG |
| | TGGATCTGGGCATCGCCAACGTCGCTACCACGTCCACCGGCTACCGGGCCGCCG |
| | GGCGGGGCCTGAATCGGCACCGTAGGCGCCAACGCGCTCTGCGCCGTAAGCTCC |
| | AGGCCAAGGCCACCAAGTCCGCCAAGCGGCGGCTGAAGAATAGGCGGCGTAAG |
| | GAAGCGCGCCACGCCGCCAACGTCAACCACATCATCGCCAAACGCATCGTGAC |
| | CGAGGCGCAACGCACCTCGTCCGGCATCGCCCTGGAAGACCTGAAGGGCATCC |
| | GGCAGAGGGCACGGCTCCGCAGGCCCCAACGGGTCACACTGCACACCTGGGCC |
| | TTCGCCCAGCTTGGCCAGTTCCTGGCCTACAAGGCACGCCGGGCGGGCGTCCCG |
| | CTGGTGTTCGTCGATCCGGCCTATTCCAGCCAGGAATGCGCCCAGTGCCATCAC |
| | ATCGCGAAGAACAACCGCCTCAACCAGGCCCGCTTTGTCTGCCGGTCATGCGGG |
| | GTCGTTGCCCACGCCGACCGCAACGCGTCCCGCACCATCGCCCACCGCGGCGAG |
| | GCTGCGTGGATCGCGGGGCGTGAGTCACGCGTCCCTGCCACCCCATAA (SEQ ID |
| | NO: 25) |
| Meiothermus | ATGTCCCTCCTGTCCGTGCGTTGCAAACTGATACCCGACGCGAGTACGGCCG |
| Silvana strain | AGAAGCTGACCCGCACGGTGAACCAGTTCGCGAATGCCTGTAACTACACCC |
| DSM 9946 | TCCAAGTCGCAAGGCGGGACAACCTGTGGAACAAGTTCGCCCTGCAACGTG |
| | CGGTCTACCGGGAGCTTCGGGAGCGGTTCGGCCTCAGCGCCAACCTCGCGG |
| | TGCGGGCCATCGCTCGGGTGGGCAAGCGCAAAGGCCACAAAGTGGGCGGCT |
| | TCAAGGCTACCAGCGTGGACTACGACCAGCGCATCCTCTCGGTCAACCTGG |
| | ACACCGAAGTGGTCAGCCTCTCCACCGTGGACGGGCGGGTGAAAGTCCCCA |
| | TGCAGATTGCGGGGTATCAGCGCCACCTTTTGCGAACCGCCAAAAGCATCC |
| | AGGGCGGTCAACTGGTCAGGGGGCGGGACTCCTGGTACGTCCACCTGTGGT |
| | GCGAGTACGACGACCCGCCCGCCATGACCCCAAACGGCTTTCTCGGGGTTG |
| | ACCTCGGCATCGTGAACATCGCCACCGATTCGGACGGAGAGACCTACTCCG |
| | GCTCCCACCTCAACTCGGTTCGCCACCGCCACCGGAGGCTCAGGAGGAAGT |
| | TGCAGAAGAAAGGCACCAAGGGGGCCAAGCGCCGCCTGAAGAAGCTCTCG |
| | GGCAAGGAGGCCCGCTTTTCCAACCATACAAACCACGCGCTCAGCAAGCGC |
| | ATTGTCGCCAAGGCCCAACGCACCGGGAGGGGTATCGCCATCGAGGATTTG |
| | GGTGGCATCCGCGACCGGGTACGGCTCAGACGGCCTCAACGGGCGGCCTTG |
| | CATAGCTGGGCGTTCTTCGACCTGGGCCAGAAGCTTCGGTACAAGGCTGAA |
| | CGGGCGGGAGTCGTTCTGGTCCAGGTTGACCCCCGCAACACTTCCCGCACCT |
| | GCCCGGCCTGCGGGCACTGCGAGAAGCTCAACCGCGTTTCGCAGGCACAGT |
| | TCGTCTGTCGGTCGTGCGGCCTCGTTGGGCACGCAGACCACTTCGCAGCCGT |
| | GAACATTGCCGTTCGCGGCTGGGCCGCTGTAAACCGGCCATACCTGGGGGA |
| | AGCGGAGAGTGCTATCCGGCATAATCCTGTCCCTGGAAGCCCCCGGCTTTA |
| | G (SEQ ID NO: 26) |
| QNF01000004_ | GTGAAACTGACTACGCAAGTTAAACTTATAATTTCTAGGGAAGACAAACAATCT |
| Extraction_ | TTGCTTGAAACTATGGAGCAGTTTAACGAAGTTTGCAATGGTATTAGTAAATCT |
| (reversed) | GCTTTTGAATACAAGGTTTTTCGCCAATACGATATCCACCAAATGCTCTACCACC |
| | CTATTCGAGATTGCTTTGATCTCTCCGCTCAACTCGTTGTAAGAGCGATATCCAA |
| | GGTCGCTGACAGCTACAAACTTGATATTAAAAAAATCAGAAAATTTAGAGAAC |
| | ATGGTGCCATCACCTACGACTCTAGAATTTTGACTTGGAAAGATGAAGAGGTCT |
| | CTATCTGGGCGATTGGTGGTCGTAAAAAGTTTTCTTATCTTTGTGGAGAAAGAC |
| | AAAAAGAACAACTCAAATTTCAAAAAGGTGAATCTGATCTGATCTATAAAAATG |
| | GAGATTTTTTCCTCTACACCACTTGTGAGGTTCCGGAAAAGGAACCTGTTCCTGT |
| | TGAGCAATATCTTGGGGTAGATCTTGGCATCACCAACATCGCCACTGACAGCTT |
| | GGAAAAAATTTACAGTGGTTCTCACATCAGCTCTGTTAGGATTAGAAATCTTAA |
| | ACTTAGAGCAAAGCTTCAATCCAAGGGAACCAAGTCTGCCAAAAACCTTTTGAA |
| | AAAAAGAAGCAAAAAAGAAAGAAGATTTGCCAAAGATATCAACCATCAAATAT |
| | CCAAAAAAATTGTTGAAACGGCCCAAAGGCACTCTGTGGGAATTGCCCTTGAAA |
| | ACCTCAAGGGAATAAGATCTAGAGTAACGGTTAGGAAGGGCCTGCGGTATCAA |
| | CTCCATTCTTGGGCATTTAACGATCTTGCCGGGAAGATCTGGTATAAAGCGAGA |
| | AAAGAGGGAATTGAAGTGATTTTGGTCGACCCAAGATACACTTCCCAGGAATGT |
| | TCTAGTTGCGGACATACTAAAAAATCCAATCGAAAATCCCAATCTCTTTTCTCCT |
| | GTCAGTCGTGTGGTTATACCGTCCACGCCGACATCAACGCTGCTTGTGTAATCTC |
| | AAGTAGGGCCGCAGTCAATCGGCCGAACGTAGTGGGGGAGCAATCTCCTAATT |
| | ACAAGCCCCTTCCTTTAGGGAGGGGTGGTTGA (SEQ ID NO: 27) |
| TnpB | RNA scaffold |
| Actinomadura_ | Tctgctgcacgtcgtgcggcttcgctgagcacgccgacgtgaacgcggcccgcaa |
| cellulosilytica_ | catcgcccaacgcggtgcgacgggccgggcagtgagtcacgctgccgacgacgtg |
| strain_DSM_45823 | gcctgacacgcatcccccagatgcgggtcagagctgcaagctcggaccattcagg |
| | gccgagaagctgac (SEQ ID NO: 28) |
| 2_Actinomadura_ | Tcgtatgtcggagctgcggcgtcgttgcgcacgcggacctgaacgcttcccgcaa |
| namibiensis_ | catcgcccggctgggcgaggccgcgtggaacgcggggcgtgagtcacgcgtccca |
| strain_DSM_44197 | gccgcctcaccgtaggcggccaggacgcggcggagcgcatcgcggccagcgacgc |
| | gctccagccgcggatcccccgtgaggagggggaccaagctgac (SEQ ID |
| | NO: 29) |
| 3_Actinomadura_ | Tcacctgtcggtcgtgcggggtcgttgcccacgccgaccacaacgcggccctcaa |
| umbrina_strain_ | catcgcccaccgcggtgtcgagggctggggcgcagtcagccgcccacacgtggcc |
| DSM_43927_$ | tgacctcgcagccagcgggggaagagatccacaaacccacccattcatgggcagg |
| | tagttgac (SEQ ID NO: 30) |
| 4_Actinoplanes_ | Tcacctgtcggtcgtgcggggtcgttgcccacgccgaccacaacgcggccctcaa |
| lobatus_strain_ | catcgcccaccgcggtgtcgagggctggggcgcagtcagccgcccacacgtggcc |
| DSM_43150_1 | tgacctcgcagccagcgggggaagagatccacaaacccacccattcatgggcagg |
| | tagttgac (SEQ ID NO: 31) |
| 5_Actinoplanes_ | Tcatctgccggtcgtgtggagtcgttgcccacgcggacgtcaatgctgccgtcaa |
| lobatus_strain_ | catcgccgcgcgtggtgtcgacgtctggggcgcagtcagccgcccgtacgtggcc |
| DSM_43150_2 | tgacctcgcagccagcgggagcagagatccacaagctcgcccattcatggggggt |
| | agttgac (SEQ ID NO: 32) |
| 6_Alicyclobacillus_ | Ttgagtgtgtcgaatgtgggttcgctggcccagccgacaccatcgctgcggtgaa |
| macrosporangiidus_ | cattcgccgtagggctgaagtcatgcagccgtacgcggtatagcgcaggctacaa |
| strain_ | ctgcaagccccgccctttagggctggggttcatgac (SEQ ID NO: 33) |
| DSM_17980 | |
| 7_Haloactinospora_ | Tcatctgccgggggtgtggggtcgttgcccacgccgaccggaatgcttcccacaa |
| alba_strain_ | catcgcccaccgtggcgagagcgtgtggaatgcggggcgtgagtcacgcgtccct |
| DSM_45015_ | gccaccccataacggggtgtctggacggaggagcccacccagcagccagttgggc |
| | gctacctccgagcccggtcgttcacggccgggtcaagttgac (SEQ ID |
| | NO: 34) |
| 8_Lipingzhangella_ | Ttgtctgccggtcatgcggggtcgttgcccacgccgaccgcaacgcgtcccgcac |
| halophila_strain_ | catcgcccaccgcggcgaggctgcgtggatcgcggggcgtgagtcacgcgtccct |
| DSM_102030 | gccaccccataacggggtgtctggacggaggagtccacccagcacccagttgggc |
| | gctacctccaagcccggtcgtttacggccgggtcaagttgac (SEQ ID |
| | NO: 35) |
| 9_Meiothermus_ | Tcgtctgtcggtcgtgcggcctcgttgggcacgcagaccacttcgcagccgtgaa |
| silvanus_DSM_ | cattgccgttcgcggctgggccgctgtaaaccggccatacctgggggaagcggag |
| 9946, | agtgctatccggcataatcctgtccctggaagcccccggctttagccgtggggtg |
| | gtttac (SEQ ID NO: 36) |
| QNFX01000004 | Tctcctgtcagtcgtgtggttataccgtccacgccgacatcaacgctgcttgtgt |
| | aatctcaagtagggccgcagtcaatcggccgaacgtagtgggggagcaatctcct |
| | aattacaagccccttcctttagggaggggtggttgac (SEQ ID NO: 37) |

### Table 1B. TnpB Polypeptides Corresponding to SEQ ID NOs: 38-64,263

Lengthy table referenced here
US20240084332A1-20240314-T00001
Please refer to the end of the specification for access instructions.

Lengthy table referenced here
US20240084332A1-20240314-T00002
Please refer to the end of the specification for access instructions.

[0113] The TnpB polypeptide may comprise one or more modifications. As used herein, the term “modified” with regard to a TnpB polypeptide generally refers to a TnpB polypeptide having one or more modifications or mutations (including point mutations, truncations, insertions, deletions, chimeras, fusion proteins, etc.) compared to the wild type counterpart from which it is derived. By derived is meant that the derived enzyme is largely based, in the sense of having a high degree of sequence or structural homology with, a wildtype enzyme, but that it has been mutated (modified) in some way as known in the art or as described herein.

[0114] The modified proteins, e.g., modified TnpB polypeptide may be catalytically inactive (also referred as dead). As used herein, a catalytically inactive or dead nuclease may have reduced, or no nuclease activity compared to a wildtype counterpart nuclease. In some cases, a catalytically inactive or dead nuclease may have nickase activity. In some cases, a catalytically inactive or dead nuclease may not have nickase activity. Such a catalytically inactive or dead nuclease may not make either double-strand or single-strand break on a target polynucleotide but may still bind or otherwise form complex with the target polynucleotide.

[0115] In an embodiment, eukaryotic homologues of bacterial TnpB may be utilized in the present invention. These TnpB-like proteins, Fanzor 1 and Fanzor 2, while having a shared amino acid motif in their C-terminal half regions, are variable in their N terminal regions. See, Bao et al., Homologues of bacterial TnpB_IS605 are widespread in diverse eukaryotic transposable elements. Mobile DNA 4, 12 (2013). Doi:10.1186/1759-8753-4-12. In an aspect, the conserved sequence between TnpB and fanzor comprise D-X(125, 275)-[TS]-[TS]-X-X-[C4 zinc finger]-X(5,50)-RD. Fanzor proteins, in addition to varying in their N-terminal region from TnpB have higher diversity, with Fanzor proteins associated with different transposons and compositions. With Applicant's discovery of the nucleic acid component and mechanism for reprogramming TnpB polypeptide activity, the similarity of the Fanzor systems may allow for similar use and applications.

[0116] In one embodiment, the modifications of the TnpB polypeptide may or may not cause an altered functionality. By means of example, modifications which do not result in an altered functionality include for instance codon optimization for expression into a particular host, or providing the nuclease with a particular marker (e.g. for visualization). Modifications with may result in altered functionality may also include mutations, including point mutations, insertions, deletions, truncations (including split nucleases), etc., as well as chimeric nucleases (e.g. comprising domains from different orthologues or homologues) or fusion proteins. Fusion proteins may without limitation include, for instance, fusions with heterologous domains or functional domains (e.g. localization signals, catalytic domains, etc.). In one embodiment, various different modifications may be combined (e.g. a mutated nuclease which is catalytically inactive and which further is fused to a functional domain, such as for instance to induce DNA methylation or another nucleic acid modification, such as including without limitation, a break (e.g. by a different nuclease (domain)), a mutation, a deletion, an insertion, a replacement, a ligation, a digestion, a break or a recombination). As used herein, “altered functionality” includes without limitation an altered specificity (e.g. altered target recognition, increased (e.g. “enhanced” TnpB polypeptide) or decreased specificity, or altered TAM recognition), altered activity (e.g. increased or decreased catalytic activity, including catalytically inactive nucleases or nickases), and/or altered stability (e.g. fusions with destabilization domains). Examples of all these modifications are known in the art. It will be understood that a “modified” nuclease as referred to herein, and in particular a “modified” TnpB polypeptide or system or complex preferably still has the capacity to interact with or bind to the polynucleic acid (e.g. in complex with the nucleic acid component molecule). Such modified TnpB polypeptide can be combined with the deaminase protein or active domain thereof as described herein.

[0117] In one embodiment, an unmodified TnpB polypeptides may have cleavage activity. In one embodiment, the TnpB polypeptides may direct cleavage of one or both nucleic acid (DNA or RNA) strands at the location of or near a target sequence, such as within the target sequence and/or within the complement of the target sequence or at sequences associated with the target sequence. In one embodiment, the TnpB polypeptides may direct cleavage of one or both DNA or RNA strands within about 1, 2, 3, 4, 5, 6, 7, 8, 9, 10, 15, 20, 25, 50, 100, 200, 500, or more base pairs or nucleotides from the first or last nucleotide of a target sequence. In one embodiment, the cleavage may be staggered, i.e. generating sticky ends. In one embodiment, the cleavage is a staggered cut with a 5′ overhang. In one embodiment, the cleavage is a staggered cut with a 5′ overhang of 1 to 5 nucleotides, preferably of 4 or 5 nucleotides. In particular embodiments, the TnpB polypeptides cleave DNA strands.

[0118] In one embodiment, a TnpB polypeptide may be mutated with respect to a corresponding wild-type enzyme such that the mutated TnpB lacks the ability to cleave one or both strands of a target polynucleotide containing a target sequence. As a further example, two or more catalytic domains of a TnpB polypeptide (e.g. RuvC) may be mutated to produce a mutated TnpB polypeptide substantially lacking all DNA cleavage activity. In one embodiment, a TnpB polypeptide may be considered to substantially lack all polynucleotide cleavage activity when the polynucleotide cleavage activity of the mutated enzyme is no more than 25%, no more than 10%, no more than 5%, no more than 1%, no more than 0.1%, no more than 0.01% of the nucleic acid cleavage activity of the non-mutated form of the enzyme; an example can be when the nucleic acid cleavage activity of the mutated form is nil or negligible as compared with the non-mutated form.

[0119] In one embodiment, the TnpB polypeptide may comprise one or more modifications resulting in enhanced activity and/or specificity, such as including mutating residues that stabilize the targeted or non-targeted strand. In one embodiment, the altered or modified activity of the engineered TnpB polypeptide comprises increased targeting efficiency or decreased off-target binding. In one embodiment, the altered activity of the engineered TnpB polypeptide comprises modified cleavage activity. In one embodiment, the altered activity comprises increased cleavage activity as to the target polynucleotide loci. In one embodiment, the altered activity comprises decreased cleavage activity as to the target polynucleotide loci. In one embodiment, the altered activity comprises decreased cleavage activity as to off-target polynucleotide loci. In one embodiment, the modified nuclease comprises a modification that alters association of the protein with the nucleic acid molecule comprising RNA, or a strand of the target polynucleotide loci, or a strand of off-target polynucleotide loci. In an aspect of the invention, the engineered TnpB polypeptide comprises a modification that alters formation of the TnpB polypeptide and related complex. In one embodiment, the altered activity comprises increased cleavage activity as to off-target polynucleotide loci. Accordingly, in one embodiment, there is increased specificity for target polynucleotide loci as compared to off-target polynucleotide loci. In other embodiments, there is reduced specificity for target polynucleotide loci as compared to off-target polynucleotide loci. In one embodiment, the mutations result in decreased off-target effects (e.g. cleavage or binding properties, activity, or kinetics), such as in case for TnpB polypeptide for instance resulting in a lower tolerance for mismatches between target and the ωRNA. Other mutations may lead to increased off-target effects (e.g. cleavage or binding properties, activity, or kinetics). Other mutations may lead to increased or decreased on-target effects (e.g. cleavage or binding properties, activity, or kinetics). In one embodiment, the mutations result in altered (e.g. increased or decreased) activity, association or formation of the functional nuclease complex. Examples mutations include mutation of negative or neutral residues to positively charged residues, or positively charged residues to neutral or neutral residues to negative residues and/or (evolutionary) conserved residues, such as conserved positively charged residues, in order to enhance specificity. See, e.g. Zhou et al., Chem Rev. 2018 Feb. 28: 118(4): 1691-1741, doi: 10.1021/acs/chemrev.7b00305 (discussing electrostatic interactions in protein binding and effects of amino acid mutations on such electrostatic interactions). In one embodiment, such residues may be mutated to uncharged residues, such as alanine. Because the TnpB polypeptide interacts with guide or bound DNA over the length of the TnpB polypeptide, mutation of residues across the TnpB polypeptide may be utilized for altered activity. In an aspect, the TnpB polypeptide residues for mutation are altered based on amino acid sequence positions of Deinococcus radiodurans ISDra2, see, e.g. Karvelis et al., Nature 599, 692-696 (2021). The ISDra2 amino acid may comprise the sequence:

(SEQ ID NO: 68545)
MIRNKAFVVRLYPNAAQTELINRTLGSARFVYNHFLARRIAAYKESG
KGLTYGQTSSELTLLKQAEETSWLSEVDKFALQNSLKNLETAYKNFF
RTVKQSGKKVGFPRFRKKRTGESYRTQFINNNIQIGEGRLKLPKLGW
VKTKGQQDIQGKILNVTVRRIHEGHYEASVLCEVEIPYLPAAPKFAA
GVDVGIKDFAIVTDGVRFKHEQNPKYYRSTLKRLRKAQQTLSRRKKG
SARYGKAKTKLARIHKRIVNKRQDFLHKLTTSLVREYEIIGTEHLKP
DNMRKNRRLALSISDAGWGEFIRQLEYKAAWYGRLVSKVSPYFPSSQ
LCHDCGFKNPEVKNLAVRTWTCPNCGETHDRDENAALNIRREALVAA
GISDTLNAHGGYVRPASAGNGLRSENHATLVV

[0120] In an embodiment, one or more residues are mutated to alter the TAM specificity of the TnpB polypeptide. In an aspect, the one or more mutations correspond to one or more of 52TYR, 53GLY, 56SER, 57SER, 60THR, 72SER, 75ASP, 76LYS, 77PHE, 80GLN, 84LYS, 119ARG, 121GLN, 122PHE, 123THR, 124ASN, 125ASN, 126ASN, 137PRO, 138LYS, 153LYS, 155LEU, and 172LEU based on amino acid sequence positions of ISDra2.

[0121] In one embodiment, one or more residues are mutated to alter the specificity and/or activity of the TnpB selected from one or more of 6ALA, 7PHE, 8VAL, 9VAL, 10ARG, 11LEU, 12TYR, 35PHE, 36LEU, 39ARG, 40 ILE, 42AL A, 43TYR, 46SER, 47GLY, 48LYS, 49GLY, 50LEU, 51THR, 52TYR, 95ARG, 96 THR, 97VAL, 98LYS, 99GLN, 100 SER, 101 GLY, 102 LYS, 103LYS, 104VAL, 105 GLY, 106PHE, 107 PRO, 108 ARG, 109 PHE, 110 ARG, 111 LYS, 112 LYS, 113 ARG, 114 THR, 115 GLY, 116GLU, 117 SER, 118TYR, 119ARG, 120THR, 121GLN, 154ILE, 155LEU, 156ASN, 157VAL 158THR, 159VAL, 160 ARG, 161 ARG, 162 ILE, 163 HIS, 164 GLU, 165 GLY, 166 HIS, 167TYR, 168GLU, 169 ALA, 170 SER, 171VAL, 172 LEU, 173CYS, 174GLU, 215TYR, 216ARG, 217 SER, 218 THR, 219LEU, 220LYS, 221ARG, 222LEU, 223ARG, 224LYS, 225ALA, 226GLN, 227GLN, 228THR, 229LEU, 230SER, 231ARG, 232ARG, 233LYS, 234LYS, 235GLY, 236SER, 237ALA, 238ARG, 239YR, 240 GLY, 241 LYS, 242 ALA, 243 LYS, 244THR, 245LYS, 246LEU, 247ALA, 248 ARG, 249ILE, 250HIS, 251LYS, 252ARG, 253ILE, 254VAL, 283ASP, 284ASN, 285MET, 286ARG, 287 LYS, 288ASN, 289ARG, 290ARG, 291LEU, 292ALA, 293LEU, 294SER, 295ILE, 296SER, and 297ASP based on amino acid sequence positions of ISDra2.

[0122] Without being bound by a particular scientific theory, it is believed that Type V CRISPR-Cas systems evolved from TnpB systems. Type V systems are known to possess collateral activity in vitro against single-stranded DNA, see, e.g. Chen et al., Science. 2018 Apr. 27; 360(6387): 436-439.

### Specialty TnpB Systems

[0123] In one embodiment, the system is a TnpB-based system that is capable of performing a specialized function or activity. For example, the TnpB protein may be fused, operably coupled to, or otherwise associated with one or more heterologous functionals domains. In certain example embodiments, the TnpB protein may be a catalytically dead TnpB protein and/or have nickase activity. A nickase is an TnpB protein that cuts only one strand of a double stranded target. In such embodiments, the catalytically inactive TnpB or nickase provide a sequence specific targeting functionality via the ωRNA that delivers the functional domain to or proximate a target sequence.

[0124] It is also envisaged that the TnpB complex as a whole may be associated with two or more functional domains. For example, there may be two or more functional domains associated with the TnpB polypeptide, or there may be two or more functional domains associated with the nucleic acid component (via one or more adaptor proteins or aptamers), or there may be one or more functional domains associated with the TnpB polypeptide and one or more functional domains associated with the nucleic acid component.

[0125] In one embodiment, one or more functional domains are associated with a TnpB polypeptide via an adaptor protein, for example as used with the modified guides of Konnerman et al. (Nature 517, 583-588, 29 Jan. 2015). In one embodiment, the one or more functional domains is attached to the adaptor protein so that upon binding of the TnpB polypeptide to the RNA molecule and target, the functional domain is in a spatial orientation allowing for the functional domain to function in its attributed function.

[0126] In one embodiment, one or more functional domains are associated with a dead nucleic acid component. In one embodiment, a complex with active TnpB polypeptide directs gene regulation by a functional domain at on gene locus while a functional domain associated with the nucleic acid component directs DNA cleavage by the active TnpB polypeptide at another. In one embodiment, nucleic acid components are selected to maximize selectivity of regulation for a gene locus of interest compared to off-target regulation. In one embodiment, nucleic acid components are selected to maximize target gene regulation and minimize target cleavage. Loops of the nucleic acid component may be extended, without colliding with the TnpB polypeptide by the insertion of distinct loop(s) or distinct sequence(s) that may recruit adaptor proteins that can bind to the distinct loop(s) or distinct sequence(s). The adaptor proteins may include but are not limited to orthogonal polynucleotide-binding protein/aptamer combinations that exist within the diversity of bacteriophage coat proteins. A list of such coat proteins includes, but is not limited to: Qβ, F2, GA, fr, JP501, M12, R17, BZ13, JP34, JP500, KU1, M11, MX1, TW18, VK, SP, FI, ID2, NL95, TW19, AP205, ϕCb5, ϕCb8r, ϕCb12r, ϕCb23r, 7s and PRR1. These adaptor proteins or orthogonal RNA binding proteins can further recruit effector proteins or fusions which comprise one or more functional domains.

[0127] Example functional domains that may be fused to, operably coupled to, or otherwise associated with an TnpB protein can be or include, but are not limited to a nuclear localization signal (NLS) domain, a nuclear export signal (NES) domain, a translational activation domain, a transcriptional activation domain (e.g. VP64, p65, MyoD1, HSF1, RTA, and SET7/9), a translation initiation domain, a transcriptional repression domain (e.g., a KRAB domain, NuE domain, NcoR domain, and a SID domain such as a SID4X domain), a nuclease domain (e.g., FokI), a histone modification domain (e.g., a histone acetyltransferase), a light inducible/controllable domain, a chemically inducible/controllable domain, a transposase domain, a homologous recombination machinery domain, a recombinase domain, a ligase domain, a topoisomerase domain, an integrase domain, and combinations thereof. In an embodiment, the functional domain is an HNH domain, and may be used with a naturally catalytically inactive TnpB protein to engineer a nickase. Methods for generating catalytically dead TnpB or a nickase TnpB can be adapted from approaches in Cas9 proteins, see, for example, WO 2014/204725, Ran et al. Cell. 2013 Sep. 12; 154(6):1380-1389, known in the art and incorporated herein by reference. Briefly, one or more mutations in the catalytic domain of the RuvC domain and/or the HNH domain of the TnpB protein can be introduced that may reduce or abolish NHEJ activity. In an aspect, at least one mutation in the RuvC domain and at least one mutation in the HNH domain is provided. In an embodiment, the TnpB polypeptide comprises a mutation at D191 and/or E278 based on amino acid sequence positions of Deinococcus radiodurans ISDra2. In an aspect, the amino acid mutations comprise D191A and/or E278A based on amino acid sequence positions of Deinococcus radiodurans ISDra2.

[0128] In one embodiment, the functional domains can have one or more of the following activities: nucleobase deaminse activity, reverse transcriptase activity, retrotransposase activity, transposase activity, integrase activity, recombinase activity, topoisomerase activity, ligase activity, polymerase activity, helicase activity, methylase activity, demethylase activity, translation activation activity, translation initiation activity, translation repression activity, transcription activation activity, transcription repression activity, transcription release factor activity, histone modification activity, nuclease activity (e.g. VirD2), single-strand RNA cleavage activity, double-strand RNA cleavage activity, single-strand DNA cleavage activity, double-strand DNA cleavage activity, molecular switch activity, chemical inducibility, light inducibility, and nucleic acid binding activity. In one embodiment, the one or more functional domains may comprise epitope tags or reporters. Non-limiting examples of epitope tags include histidine (His) tags, V5 tags, FLAG tags, influenza hemagglutinin (HA) tags, Myc tags, VSV-G tags, and thioredoxin (Trx) tags. Examples of reporters include, but are not limited to, glutathione-S-transferase (GST), horseradish peroxidase (HRP), chloramphenicol acetyltransferase (CAT) beta-galactosidase, beta-glucuronidase, luciferase, green fluorescent protein (GFP), HcRed, DsRed, cyan fluorescent protein (CFP), yellow fluorescent protein (YFP), and auto-fluorescent proteins including blue fluorescent protein (BFP).

[0129] The one or more functional domain(s) may be positioned at, near, and/or in proximity to a terminus of the effector protein (e.g., a TnpB protein). In embodiments having two or more functional domains, each of the two can be positioned at or near or in proximity to a terminus of the effector protein (e.g., a TnpB protein). In one embodiment, such as those where the functional domain is operably coupled to the effector protein, the one or more functional domains can be tethered or linked via a suitable linker (including, but not limited to, GlySer linkers) to the effector protein (e.g., a TnpB protein). When there is more than one functional domain, the functional domains can be same or different. In one embodiment, all the functional domains are the same. In one embodiment, all of the functional domains are different from each other. In one embodiment, at least two of the functional domains are different from each other. In one embodiment, at least two of the functional domains are the same as each other.

[0130] Histone modifying domains are also preferred In one embodiment. Exemplary histone modifying domains are discussed below. Transposase domains, HR (Homologous Recombination) machinery domains, recombinase domains, and/or integrase domains are also preferred as the present functional domains. In one embodiment, DNA integration activity includes HR machinery domains, integrase domains, recombinase domains and/or transposase domains.

[0131] In one embodiment, the DNA cleavage activity is due to a nuclease. In one embodiment, the nuclease comprises a Fok1 nuclease. See, “Dimeric CRISPR RNA-guided FokI nucleases for highly specific genome editing”, Shengdar Q. Tsai, Nicolas Wyvekens, Cyd Khayter, Jennifer A. Foden, Vishal Thapar, Deepak Reyon, Mathew J. Goodwin, Martin J. Aryee, J. Keith Joung Nature Biotechnology 32(6): 569-77 (2014), relates to dimeric RNA-guided FokI Nucleases that recognize extended sequences and can edit endogenous genes with high efficiencies in human cells.

[0132] Functional domains may be used to regulate transcription, e.g., transcriptional repression. Transcriptional repression is often mediated by chromatin modifying enzymes such as histone methyltransferases (HMTs) and deacetylases (HDACs). Repressive histone effector domains are known and an exemplary list is provided below. Proteins and functional truncations of small size to facilitate efficient viral packaging (for instance via AAV) are preferred. In general, however, the domains may include HDACs, histone methyltransferases (HMTs), and histone acetyltransferase (HAT) inhibitors, as well as HDAC and HMT recruiting proteins. The functional domain may be or include, In one embodiment, HDAC Effector Domains, HDAC Recruiter Effector Domains, Histone Methyltransferase (HMT) Effector Domains, Histone Methyltransferase (HMT) Recruiter Effector Domains, or Histone Acetyltransferase Inhibitor Effector Domains.

[0133] In one embodiment, the functional domain may be a Methyltransferase (HMT) Effector Domain. Preferred examples include NUE, vSET, EHMT2/G9A, SUV39H1, dim-5, KYP, SUVR4, SET4, SET1, SETD8, and TgSET8. NUE is exemplified in the present Examples and, although preferred, it is envisaged that others in the class will also be useful.

[0134] In one embodiment, the functional domain may be a Histone Methyltransferase (HMT) Recruiter Effector Domain. Preferred examples include Hp1a, PHF19, and NIPP1.

[0135] In one embodiment, the functional domain may be Histone Acetyltransferase Inhibitor Effector Domain. Preferred examples include SET/TAF-1β.

[0136] In some cases, the target endogenous (regulatory) control elements (such as enhancers and silencers) in addition to a promoter or promoter-proximal elements. Thus, the invention can also be used to target endogenous control elements (including enhancers and silencers) in addition to targeting of the promoter. These control elements can be located upstream and downstream of the transcriptional start site (TSS), starting from 200 bp from the TSS to 100 kb away. Targeting of known control elements can be used to activate or repress the gene of interest. In some cases, a single control element can influence the transcription of multiple target genes. Targeting of a single control element could therefore be used to control the transcription of multiple genes simultaneously.

[0137] Targeting of putative control elements on the other hand (e.g. by tiling the region of the putative control element as well as 200 bp up to 100 kB around the element) can be used as a means to verify such elements (by measuring the transcription of the gene of interest) or to detect novel control elements (e.g. by tiling 100 kb upstream and downstream of the TSS of the gene of interest). In addition, targeting of putative control elements can be useful in the context of understanding genetic causes of disease. Many mutations and common SNP variants associated with disease phenotypes are located outside coding regions. Targeting of such regions with either the activation or repression systems described herein can be followed by readout of transcription of either a) a set of putative targets (e.g. a set of genes located in closest proximity to the control element) or b) whole-transcriptome readout by e.g. RNAseq or microarray. This would allow for the identification of likely candidate genes involved in the disease phenotype. Such candidate genes could be useful as novel drug targets.

[0138] In one embodiment the one or more functional domains comprise an acetyltransferase, preferably a histone acetyltransferase. These are useful in the field of epigenomics, for example in methods of interrogating the epigenome. Methods of interrogating the epigenome may include, for example, targeting epigenomic sequences. Targeting epigenomic sequences may include the ωRNA being directed to an epigenomic target sequence. Epigenomic target sequence may include, In one embodiment, include a promoter, silencer or an enhancer sequence.

[0139] The functional domains may be acetyltransferases domains. Examples of acetyltransferases are known but may include, In one embodiment, histone acetyltransferases. In one embodiment, the histone acetyltransferase may comprise the catalytic core of the human acetyltransferase p300 (Gerbasch & Reddy, Nature Biotech 6 Apr. 2015).

### Nuclear Localization Sequences

[0140] In one embodiment, the TnpB polypeptide is fused to one or more nuclear localization sequences (NLSs), such as about or more than about 1, 2, 3, 4, 5, 6, 7, 8, 9, 10, or more NLSs. In one embodiment, the TnpB polypeptide comprises about or more than about 1, 2, 3, 4, 5, 6, 7, 8, 9, 10, or more NLSs at or near the amino-terminus, about or more than about 1, 2, 3, 4, 5, 6, 7, 8, 9, 10, or more NLSs at or near the carboxy-terminus, or a combination of these (e.g. zero or at least one or more NLS at the amino-terminus and zero or at one or more NLS at the carboxy terminus). When more than one NLS is present, each may be selected independently of the others, such that a single NLS may be present in more than one copy and/or in combination with one or more other NLSs present in one or more copies. In a preferred embodiment of the invention, the TnpB polypeptide comprises at most 6 NLSs. In one embodiment, an NLS is considered near the N- or C-terminus when the nearest amino acid of the NLS is within about 1, 2, 3, 4, 5, 10, 15, 20, 25, 30, 40, 50, or more amino acids along the polypeptide chain from the N- or C-terminus. Non-limiting examples of NLSs include an NLS sequence derived from: the NLS of the SV40 virus large T-antigen, having the amino acid sequence PKKKRKV (SEQ ID NO: 64,264); the NLS from nucleoplasmin (e.g. the nucleoplasmin bipartite NLS with the sequence KRPAATKKAGQAKKKK (SEQ ID NO: 64,265); the c-myc NLS having the amino acid sequence PAAKRVKLD (SEQ ID NO: 64,266) or RQRRNELKRSP (SEQ ID NO: 64,267); the hRNPA1 M9 NLS having the sequence NQSSNFGPMKGGNFGGRSSGPYGGGGQYFAKPRNQGGY (SEQ ID NO: 64,268); the sequence RMRIZFKNKGKDTAELRRRRVEVSVELRKAKKDEQILKRRNV (SEQ ID NO: 64,269) of the IBB domain from importin-alpha; the sequences VSRKRPRP (SEQ ID NO: 64,270) and PPKKARED (SEQ ID NO: 64,271) of the myoma T protein; the sequence PQPKKKPL (SEQ ID NO: 64,272) of human p53; the sequence SALIKKKKKMAP (SEQ ID NO: 64,273) of mouse c-abl IV; the sequences DRLRR (SEQ ID NO: 64,274) and PKQKKRK (SEQ ID NO: 64,275) of the influenza virus NS1; the sequence RKLKKKIKKL (SEQ ID NO: 64,276) of the Hepatitis virus delta antigen; the sequence REKKKFLKRR (SEQ ID NO: 64,277) of the mouse Mx1 protein; the sequence KRKGDEVDGVDEVAKKKSKK (SEQ ID NO: 64,278) of the human poly(ADP-ribose) polymerase; and the sequence RKCLQAGMNLEARKTKK (SEQ ID NO: 64,279) of the steroid hormone receptors (human) glucocorticoid. In general, the one or more NLSs are of sufficient strength to drive accumulation of the TnpB polypeptide in a detectable amount in the nucleus of a eukaryotic cell. In general, strength of nuclear localization activity may derive from the number of NLSs in the TnpB polypeptide, the particular NLS(s) used, or a combination of these factors. Detection of accumulation in the nucleus may be performed by any suitable technique. For example, a detectable marker may be fused to the TnpB polypeptide, such that location within a cell may be visualized, such as in combination with a means for detecting the location of the nucleus (e.g. a stain specific for the nucleus such as DAPI). Cell nuclei may also be isolated from cells, the contents of which may then be analyzed by any suitable process for detecting protein, such as immunohistochemistry, Western blot, or enzyme activity assay. Accumulation in the nucleus may also be determined indirectly, such as by an assay for the effect of complex formation (e.g. assay for DNA cleavage or mutation at the target sequence, or assay for altered gene expression activity affected by complex formation and/or TnpB polypeptide activity), as compared to a control no exposed to the TnpB polypeptide or complex, or exposed to a TnpB polypeptide lacking the one or more NLSs. In one embodiment of the herein described TnpB polypeptide protein complexes and systems the codon optimized TnpB polypeptide proteins comprise an NLS attached to the C-terminal of the protein. In one embodiment, other localization tags may be fused to the TnpB polypeptide, such as without limitation for localizing the TnpB polypeptide to particular sites in a cell, such as organelles, such as mitochondria, plastids, chloroplast, vesicles, golgi, (nuclear or cellular) membranes, ribosomes, nucleolus, ER, cytoskeleton, vacuoles, centrosome, nucleosome, granules, centrioles, etc.

[0141] In one embodiment of the invention, at least one nuclear localization signal (NLS) is attached to the nucleic acid sequences encoding the TnpB polypeptide. In preferred embodiments at least one or more C-terminal or N-terminal NLSs are attached (and hence nucleic acid molecule(s) coding for the TnpB polypeptide can include coding for NLS(s) so that the expressed product has the NLS(s) attached or connected). In a preferred embodiment a C-terminal NLS is attached for optimal expression and nuclear targeting in eukaryotic cells, preferably human cells. The invention also encompasses methods for delivering multiple nucleic acid components, wherein each nucleic acid component is specific for a different target locus of interest thereby modifying multiple target loci of interest. The nucleic acid component of the complex may comprise one or more protein-binding RNA aptamers. The one or more aptamers may be capable of binding a bacteriophage coat protein.

### Linkers

[0142] In some preferred embodiments, the functional domain is linked to a TnpB polypeptide (e.g., an active or a dead TnpB polypeptide) to target and activate epigenomic sequences such as promoters or enhancers. One or more ωRNAs directed to such promoters or enhancers may also be provided to direct the binding of the TnpB polypeptide to such promoters or enhancers.

[0143] The term “associated with” is used here in relation to the association of the functional domain to the TnpB polypeptide protein or the adaptor protein. It is used in respect of how one molecule ‘associates’ with respect to another, for example between an adaptor protein and a functional domain, or between the TnpB polypeptide protein and a functional domain. In the case of such protein-protein interactions, this association may be viewed in terms of recognition in the way an antibody recognizes an epitope. Alternatively, one protein may be associated with another protein via a fusion of the two, for instance one subunit being fused to another subunit. Fusion typically occurs by addition of the amino acid sequence of one to that of the other, for instance via splicing together of the nucleotide sequences that encode each protein or subunit. Alternatively, this may essentially be viewed as binding between two molecules or direct linkage, such as a fusion protein. In any event, the fusion protein may include a linker between the two subunits of interest (i.e. between the enzyme and the functional domain or between the adaptor protein and the functional domain). Thus, In one embodiment, the TnpB polypeptide protein or adaptor protein is associated with a functional domain by binding thereto. In other embodiments, the TnpB polypeptide or adaptor protein is associated with a functional domain because the two are fused together, optionally via an intermediate linker.

[0144] The term “linker” as used in reference to a fusion protein refers to a molecule which joins the proteins to form a fusion protein. Generally, such molecules have no specific biological activity other than to join or to preserve some minimum distance or other spatial relationship between the proteins. However, in one embodiment, the linker may be selected to influence some property of the linker and/or the fusion protein such as the folding, net charge, or hydrophobicity of the linker.

[0145] Suitable linkers for use in the methods of the present invention are well known to those of skill in the art and include, but are not limited to, straight or branched-chain carbon linkers, heterocyclic carbon linkers, or peptide linkers. However, as used herein the linker may also be a covalent bond (carbon-carbon bond or carbon-heteroatom bond). In particular embodiments, the linker is used to separate the TnpB polypeptide and the nucleotide deaminase by a distance sufficient to ensure that each protein retains its required functional property. Preferred peptide linker sequences adopt a flexible extended conformation and do not exhibit a propensity for developing an ordered secondary structure. In one embodiment, the linker can be a chemical moiety which can be monomeric, dimeric, multimeric or polymeric. Preferably, the linker comprises amino acids. Typical amino acids in flexible linkers include Gly, Asn and Ser. Accordingly, in particular embodiments, the linker comprises a combination of one or more of Gly, Asn and Ser amino acids. Other near neutral amino acids, such as Thr and Ala, also may be used in the linker sequence. Exemplary linkers are disclosed in Maratea et al. (1985), Gene 40: 39-46; Murphy et al. (1986) Proc. Nat'l. Acad. Sci. USA 83: 8258-62; U.S. Pat. Nos. 4,935,233; and 4,751,180. For example, GlySer linkers GGS, GGGS (SEQ ID NO: 64,280) or GSG can be used. GGS, GSG, GGGS (SEQ ID NO: 64,280) or GGGGS (SEQ ID NO: 64,281) linkers can be used in repeats of 3 (such as (GGS)₃ (SEQ ID NO: 64,282), (GGGGS)₃ (SEQ ID NO: 64,283)) or 5, 6, 7, 9 or even 12 or more, to provide suitable lengths. In some cases, the linker may be (GGGGS)₃₋₁₅ (SEQ ID NO: 64,283-64,295), For example, in some cases, the linker may be (GGGGS)₃₋₁₁ (SEQ ID NO: 64,283-64,291), e.g., GGGGS (SEQ ID NO: 64,281), (GGGGS)₂ (SEQ ID NO: 64,296), (GGGGS)₃ (SEQ ID NO: 64,283), (GGGGS)₄ (SEQ ID NO: 64,284), (GGGGS)₅ (SEQ ID NO: 64,285), (GGGGS)₆ (SEQ ID NO: 64,286), (GGGGS)₇ (SEQ ID NO: 64,287), (GGGGS)₈ (SEQ ID NO: 64,288), (GGGGS)₉ (SEQ ID NO: 64,289), (GGGGS)₁₀ (SEQ ID NO: 64,290), or (GGGGS)₁₁ (SEQ ID NO: 64,291).

[0146] In particular embodiments, linkers such as (GGGGS)₃ (SEQ ID NO: 64,283) are preferably used herein. (GGGGS)₆ (SEQ ID NO: 64,286), (GGGGS)₉ (SEQ ID NO: 64,289) or (GGGGS)₁₂ (SEQ ID NO: 64,292) may preferably be used as alternatives. Other preferred alternatives are (GGGGS)₁ (SEQ ID NO: 64,281), (GGGGS)₂ (SEQ ID NO: 64,296), (GGGGS)₄ (SEQ ID NO: 64,284), (GGGGS)₅ (SEQ ID NO: 64,285), (GGGGS)₇ (SEQ ID NO: 64,287), (GGGGS)₈ (SEQ ID NO: 64,288), (GGGGS)₁₀ (SEQ ID NO: 64,290), or (GGGGS)₁₁ (SEQ ID NO: 64,291). In yet a further embodiment, LEPGEKPYKCPECGKSFSQSGALTRHQRTHTR (SEQ ID NO: 64,297) is used as a linker. In yet an additional embodiment, the linker is an XTEN linker. In particular embodiments, the TnpB polypeptide is linked to the deaminase protein or its catalytic domain by means of an LEPGEKPYKCPECGKSFSQSGALTRHQRTHTR (SEQ ID NO: 64,297) linker. In further particular embodiments, TnpB polypeptide is linked C-terminally to the N-terminus of a deaminase protein or its catalytic domain by means of an LEPGEKPYKCPECGKSFSQSGALTRHQRTHTR (SEQ ID NO: 64,297) linker. In addition, N- and C-terminal NLSs can also function as linker (e.g., PKKKRKVEASSPKKRKVEAS (SEQ ID NO: 64,298)).

[0147] Examples of linkers are shown in Table 2 below.

TABLE 2

| | |
|---|---|
| GGS | GGTGGTAGT |
| GGSx3 (9) | GGTGGTAGTGGAGGGAGCGGCGGTTCA |
| | (SEQ ID NO: 64,299) |
| GGSx7 (21) | ggtggaggaggctctggtggaggcggtagcggagg |
| | cggagggtcgGGTGGTAGTGGAGGGAGCGGCGGTT |
| | CA (SEQ ID NO: 64,300) |
| XTEN | TCGGGATCTGAGACGCCTGGGACCTCGGAATCGGC |
| | TACGCCCGAAAGT (SEQ ID NO: 64,301) |
| Z-EGFR_Short | Gtggataacaaatttaacaaagaaatgtgggcggc |
| | gtgggaagaaattcgtaacctgccgaacctgaacg |
| | gctggcagatgaccgcgtttattgcgagcctggtg |
| | gatgatccgagccagagcgcgaacctgctggcgga |
| | agcgaaaaaactgaacgatgcgcaggcgccgaaaa |
| | ccggcggtggttctggt |
| | (SEQ ID NO: 64,302) |
| GSAT | Ggtggttctgccggtggctccggttctggctccag |
| | cggtggcagctctggtgcgtccggcacgggtactg |
| | cgggtggcactggcagcggttccggtactggctct |
| | ggc (SEQ ID NO: 64,303) |

[0148] Linkers may be used between the ωRNA molecules and the functional domain (activator or repressor), or between the TnpB polypeptide and the functional domain. The linkers may be used to engineer appropriate amounts of “mechanical flexibility”.

[0149] In one embodiment, the one or more functional domains are controllable, e.g., inducible.

[0150] Other suitable functional domains can be found, for example, in International Application Publication No. WO 2019/018423, for example, at [0678]-[0692], incorporated herein by reference. Exemplary functional domains are further detailed elsewhere herein.

### ωRNA Molecules

[0151] The TnpB systems herein may further comprise one or more nucleic acid components, which are also referred to herein as omega RNA (ωRNA). Such nucleic acid component may comprise RNA, DNA, or combinations thereof and include modified and non-canonical nucleotides as described further below. The ωRNA can comprise a reprogrammable spacer sequence and a scaffold that interacts with the TnpB polypeptide. ωRNA may form a complex (i complex) with a TnpB polypeptide, and direct sequence-specific binding of the complex to a target sequence of a target polynucleotide. In one example embodiment, the ωRNA is a single molecule comprising a scaffold sequence and a spacer sequence. In certain example embodiments, the spacer is 5′ of the scaffold sequence. In one example embodiment, the ωRNA may further comprise a conserved nucleic acid sequence between the scaffold and spacer portions.

[0152] In embodiments, the ωRNA comprises a spacer sequence and a scaffold sequence, e.g. a conserved nucleotide sequence. In embodiments, the ωRNA comprises about 45 to about 250 nucleotides, or about 45, 46, 47, 48, 49, 50, 51, 52, 53, 54, 55, 56, 57, 58, 59, 60, 61, 62, 63, 64, 65, 66, 67, 68, 69, 70, 71, 72, 73, 74, 75, 76, 77, 78, 79, 80, 81, 82, 83, 84, 85, 86, 87, 88, 89, 90, 91, 92, 93, 94, 95, 96, 97, 98, 99, 100, 101, 102, 103, 104, 105, 106, 107, 108, 109, 110, 111, 112, 113, 114, 115, 116, 117, 118, 119, 120, 121, 122, 123, 124, 125, 126, 127, 128, 129, 130, 131, 132, 133, 134, 135, 136, 17, 138, 19, 140, 141, 142, 143, 144, 145, 146, 147, 148, 149, 150, 151, 152, 153, 154, 155, 156, 157, 158, 159, 160, 11, 162, 163, 164, 165, 166, 167, 168, 169, 170, 171, 172, 173, 174, 175, 176, 177, 178, 179, 180, 181, 182, 183, 184, 185, 186, 187, 188, 189, 190, 191, 192, 193, 194, 195, 196, 197, 198, 199, 200, 201, 202, 203, 204, 205, 206, 207, 208, 209, 210, 211, 212, 213, 214, 215, 216, 217, 218, 219, 220, 221, 222, 223, 224, 225, 226, 227, 228, 229, 230, 231, 232, 233, 234, 235, 236, 237, 238, 239, 2340, 241, 242, 243, 244, 245, 246, 247, 248, 249, or 250 nucleotides.

[0153] In embodiments, the ωRNA comprises a scaffold sequence, e.g. a conserved nucleotide sequence. The scaffold sequence therefore typically comprises conserved regions, with the scaffold comprising about 30 to 200 nucleotides, about 50 to 180, about 80 to 175 nucleotides, or about 30, 31, 32, 33, 34, 35, 36, 37, 38, 3940, 41, 42, 43, 44, 45, 46, 4748, 49, 50, 51, 52, 53, 54, 55, 56, 57, 58, 59, 60, 61, 62, 63, 64, 65, 66, 67, 68, 69, 70, 71, 72, 73, 74, 75, 76, 77, 78, 79, 80, 81, 82, 83, 84, 85, 86, 87, 88, 89, 90, 91, 92, 93, 94, 95, 96, 97, 98, 99, 100, 101, 102, 103, 104, 105, 106, 107, 108, 109, 110, 111, 112, 113, 114, 115, 116, 117, 118, 119, 120, 121, 122, 123, 124, 125, 126, 127, 128, 129, 130, 131, 132, 133, 134, 135, 136, 137, 138, 139, 140, 141, 142, 143, 144, 145, 146, 147, 148, 149, 150, 151, 152, 153, 154, 155, 156, 157, 158, 159, 160, 161, 162, 163, 164, 165, 166, 167, 168, 169, 170, 171, 172, 173, 174, 175, 176, 177, 178, 179, 180 or more nt. In an aspect, the Nucleic acid component scaffold comprises one conserved nucleotide sequence. In embodiments, the conserved nucleotide sequence is on or near a 5′ end of the scaffold.

[0154] The ωRNA may further comprise a spacer, which can be re-programmed to direct site-specific binding to a target sequence of a target polynucleotide. The spacer may also be referred to herein as part of the ωRNA scaffold or ωRNA, and may comprise an engineered heterologous sequence. In an embodiment the scaffold may comprise a sequence from Table 5. In an embodiment, the scaffold comprises one or more conserved sequences to the RNA conserved region in Table 5 and depicted in FIG. 2. In one embodiment, the secondary structure of the ωRNA comprises a multi-hairpin regions indicated in FIG. 18D. In an aspect, the RNA species comprises the RNA conserved region+guide sequence, which is distinct from but generally related to the DR+spacer configuration of CRISPR-Cas systems.

[0155] In one embodiment, the spacer length of the ωRNA is from 10 to 50 nt. In one embodiment, the spacer length of the ωRNA is at least 10, 11, 12, 13, 14, or 15 nucleotides. In one embodiment, the spacer length is from 10 to 40 nucleotides, from 15 to 30 nt, 15 to 17 nt, e.g., 15, 16, or 17 nt, from 17 to 20 nt, e.g., 17, 18, 19, or 20 nt, from 20 to 24 nt, e.g., 20, 21, 22, 23, or 24 nt, from 23 to 25 nt, e.g., 23, 24, or 25 nt, from 24 to 27 nt, e.g., 24, 25, 26, or 27 nt, from 27 to 30 nt, e.g., 27, 28, 29, or 30 nt, from 30 to 35 nt, e.g., 30, 31, 32, 33, 34, or 35 nt, or 35 nt or longer. In example embodiments, the spacer sequence is 14, 15, 16, 17, 18, 19, 20, 21, 22, 23, 24, 25, 26, 27, 28, 29, 30, 31, 32, 33, 34, 35, 36, 37, 38, 39, 40, 41, 42, 43, 44, 45, 46, 47, 48, 49, or 50 nt.

[0156] In one embodiment, the sequence of the ωRNA is selected to reduce the degree secondary structure within the ωRNA. In one embodiment, about or less than about 75%, 50%, 40%, 30%, 25%, 20%, 15%, 10%, 5%, 1%, or fewer of the nucleotides of the nucleic acid-targeting ωRNA component participate in self-complementary base pairing when optimally folded. Optimal folding may be determined by any suitable polynucleotide folding algorithm. Some programs are based on calculating the minimal Gibbs free energy. An example of one such algorithm is mFold, as described by Zuker and Stiegler (Nucleic Acids Res. 9 (1981), 133-148). Another example of a folding algorithm is the online webserver RNAfold, developed at Institute for Theoretical Chemistry at the University of Vienna, using the centroid structure prediction algorithm (see e.g., A. R. Gruber et al., 2008, Cell 106(1): 23-24; and P A Carr and G M Church, 2009, Nature Biotechnology 27(12): 1151-62).

[0157] As used herein, a heterologous ωRNA is an ωRNA that is not derived from the same species as the TnpB polypeptide, or comprises a portion of the molecule, e.g. spacer, that is not derived from the same species as the TnpB polypeptide. For example, a heterologous ωRNA of a TnpB polypeptide derived from species A comprises a polynucleotide derived from a species different from species A, or an artificial polynucleotide.

[0158] In a particular embodiment, the ωRNA comprises a spacer sequence linked to a conserved nucleotide sequence, wherein the conserved nucleotide sequence may comprise one or more stem loops or optimized secondary structures. In particular embodiments, the conserved nucleotide sequence has a minimum length of 16 nts and a single stem loop. In further embodiments the conserved nucleotide sequence has a length longer than 16 nts, preferably more than 17 nts, and has more than one stem loops or optimized secondary structures. In particular embodiments, the spacer sequence may be linked to all or part of the natural conserved nucleotide sequence. In particular embodiments, certain aspects of the ωRNA architecture can be modified, for example by addition, subtraction, or substitution of features, whereas certain other aspects of architecture are maintained. Preferred locations for engineered ωRNA modifications, including but not limited to insertions, deletions, and substitutions include ωRNA termini and regions of the ωRNA that are exposed when complexed with TnpB polypeptide and/or target.

[0159] In one embodiment, the ωRNA forms a stemloop with a separate non-covalently linked sequence, which can be DNA or RNA. In particular embodiments, the sequences forming the ωRNA are first synthesized using the standard phosphoramidite synthetic protocol (Herdewijn, P., ed., Methods in Molecular Biology Col 288, Oligonucleotide Synthesis: Methods and Applications, Humana Press, New Jersey (2012)). In one embodiment, these sequences can be functionalized to contain an appropriate functional group for ligation using the standard protocol known in the art (Hermanson, G. T., Bioconjugate Techniques, Academic Press (2013)). Examples of functional groups include, but are not limited to, hydroxyl, amine, carboxylic acid, carboxylic acid halide, carboxylic acid active ester, aldehyde, carbonyl, chlorocarbonyl, imidazolylcarbonyl, hydrozide, semicarbazide, thio semicarbazide, thiol, maleimide, haloalkyl, sufonyl, ally, propargyl, diene, alkyne, and azide. Once this sequence is functionalized, a covalent chemical bond or linkage can be formed between this sequence and the conserved nucleotide sequence. Examples of chemical bonds include, but are not limited to, those based on carbamates, ethers, esters, amides, imines, amidines, aminotrizines, hydrozone, disulfides, thioethers, thioesters, phosphorothioates, phosphorodithioates, sulfonamides, sulfonates, fulfones, sulfoxides, ureas, thioureas, hydrazide, oxime, triazole, photolabile linkages, C—C bond forming groups such as Diels-Alder cyclo-addition pairs or ring-closing metathesis pairs, and Michael reaction pairs.

[0160] In one embodiment, these stem-loop forming sequences can be chemically synthesized. In one embodiment, the chemical synthesis uses automated, solid-phase oligonucleotide synthesis machines with 2′-acetoxyethyl orthoester (2′-ACE) (Scaringe et al., J. Am. Chem. Soc. (1998) 120: 11820-11821; Scaringe, Methods Enzymol. (2000) 317: 3-18) or 2′-thionocarbamate (2′-TC) chemistry (Dellinger et al., J. Am. Chem. Soc. (2011) 133: 11540-11546; Hendel et al., Nat. Biotechnol. (2015) 33:985-989).

[0161] The repeat:anti repeat duplex will be apparent from the secondary structure of the ωRNA component. It may be typically a first complimentary stretch after (in 5′ to 3′ direction) the poly U tract and before the tetraloop; and a second complimentary stretch after (in 5′ to 3′ direction) the tetraloop and before the poly A tract. The first complimentary stretch (the “repeat”) is complimentary to the second complimentary stretch (the “anti-repeat”). As such, they Watson-Crick base pair to form a duplex of dsRNA when folded back on one another. As such, the anti-repeat sequence is the complimentary sequence of the repeat and in terms to A-U or C-G base pairing, but also in terms of the fact that the anti-repeat is in the reverse orientation due to the tetraloop.

[0162] In an embodiment of the invention, modification of the ωRNA component molecule architecture comprises replacing bases in stemloop 2. For example, In one embodiment, “actt” (“acuu” in RNA) and “aagt” (“aagu” in RNA) bases in stemloop2 are replaced with “cgcc” and “gcgg”. In one embodiment, “actt” and “aagt” bases in stemloop2 are replaced with complimentary GC-rich regions of 4 nucleotides. In one embodiment, the complimentary GC-rich regions of 4 nucleotides are “cgcc” and “gcgg” (both in 5′ to 3′ direction). In one embodiment, the complimentary GC-rich regions of 4 nucleotides are “gcgg” and “cgcc” (both in 5′ to 3′ direction). Other combination of C and G in the complimentary GC-rich regions of 4 nucleotides will be apparent including CCCC and GGGG.

[0163] In one aspect, the stemloop 2, e.g., “ACTTgtttAAGT (SEQ ID NO: 64,304)” can be replaced by any “XXXXgtttYYYY (SEQ ID NO: 64,305)”, e.g., where XXXX and YYYY represent any complementary sets of nucleotides that together will base pair to each other to create a stem.

[0164] As used herein, the term “spacer” may also be referred to as a “guide sequence.” In one embodiment, the degree of complementarity of the spacer sequence to a given target sequence, when optimally aligned using a suitable alignment algorithm, is about or more than 50%, 60%, 75%, 80%, 85%, 90%, 95%, 97.5%, 99%, or more. In certain example embodiments, the ωRNA molecule comprises a spacer sequence that may be designed to have at least one mismatch with the target sequence, such that a RNA duplex formed between the sequence and the target sequence. Accordingly, the degree of complementarity is less than 99%. For instance, where the spacer sequence consists of 24 nucleotides, the degree of complementarity is more particularly about 96% or less. In particular embodiments, the spacer sequence is designed to have a stretch of two or more adjacent mismatching nucleotides, such that the degree of complementarity over the entire sequence is further reduced. For instance, where the spacer sequence consists of 24 nucleotides, the degree of complementarity is more particularly about 96% or less, more particularly, about 92% or less, more particularly about 88% or less, more particularly about 84% or less, more particularly about 80% or less, more particularly about 76% or less, more particularly about 72% or less, depending on whether the stretch of two or more mismatching nucleotides encompasses 2, 3, 4, 5, 6 or 7 nucleotides, etc. In one embodiment, aside from the stretch of one or more mismatching nucleotides, the degree of complementarity, when optimally aligned using a suitable alignment algorithm, is about or more than about 50%, 60%, 75%, 80%, 85%, 90%, 95%, 97.5%, 99%, or more. Optimal alignment may be determined with the use of any suitable algorithm for aligning sequences, non-limiting example of which include the Smith-Waterman algorithm, the Needleman-Wunsch algorithm, algorithms based on the Burrows-Wheeler Transform (e.g., the Burrows Wheeler Aligner), ClustalW, Clustal X, BLAT, Novoalign (Novocraft Technologies; available at www.novocraft.com), ELAND (Illumina, San Diego, CA), SOAP (available at soap.genomics.org.cn), and Maq (available at maq.sourceforge.net). The ability of a sequence (within a nucleic acid-targeting ωRNA t molecule) to direct sequence-specific binding of a nucleic acid-targeting complex to a target nucleic acid sequence may be assessed by any suitable assay. For example, the components of a ωRNA system sufficient to form a TnpB-targeting complex, including the ωRNA molecule sequence to be tested, may be provided to a host cell having the corresponding target nucleic acid sequence, such as by transfection with vectors encoding the components of the TnpB-targeting complex, followed by an assessment of preferential targeting (e.g., cleavage) within the target nucleic acid sequence, such as by Surveyor assay as described herein. Similarly, cleavage of a target nucleic acid sequence (or a sequence in the vicinity thereof) may be evaluated in a test tube by providing the target nucleic acid sequence, components of a TnpB-targeting complex, including the sequence to be tested and a control sequence different from the test ωRNA, and comparing binding or rate of cleavage at or in the vicinity of the target sequence between the test and control ωRNA molecule sequence reactions. Other assays are possible, and will occur to those skilled in the art. A spacer sequence, and hence a nucleic acid-targeting ωRNA may be selected to target any target nucleic acid sequence.

[0165] A ωRNA, and hence a nucleic acid-targeting spacer, may be selected to target any target nucleic acid sequence. The target sequence may be DNA. The target sequence may be any RNA sequence. In one embodiment, the target sequence may be a sequence within a RNA molecule selected from the group consisting of messenger RNA (mRNA), pre-mRNA, ribosomal RNA (rRNA), transfer RNA (tRNA), micro-RNA (miRNA), small interfering RNA (siRNA), small nuclear RNA (snRNA), small nucleolar RNA (snoRNA), double stranded RNA (dsRNA), non-coding RNA (ncRNA), long non-coding RNA (lncRNA), and small cytoplasmatic RNA (scRNA). In some preferred embodiments, the target sequence may be a sequence within a RNA molecule selected from the group consisting of mRNA, pre-mRNA, and rRNA. In some preferred embodiments, the target sequence may be a sequence within a RNA molecule selected from the group consisting of ncRNA, and lncRNA. In some more preferred embodiments, the target sequence may be a sequence within an mRNA molecule or a pre-mRNA molecule.

[0166] In one embodiment, the ωRNA forms a stemloop with a separate non-covalently linked sequence, which can be DNA or RNA. In particular embodiments, the sequences forming the ωRNA component are first synthesized using the standard phosphoramidite synthetic protocol (Herdewijn, P., ed., Methods in Molecular Biology Col 288, Oligonucleotide Synthesis: Methods and Applications, Humana Press, New Jersey (2012)). In one embodiment, these sequences can be functionalized to contain an appropriate functional group for ligation using the standard protocol known in the art (Hermanson, G. T., Bioconjugate Techniques, Academic Press (2013)). Examples of functional groups include, but are not limited to, hydroxyl, amine, carboxylic acid, carboxylic acid halide, carboxylic acid active ester, aldehyde, carbonyl, chlorocarbonyl, imidazolylcarbonyl, hydrozide, semicarbazide, thio semicarbazide, thiol, maleimide, haloalkyl, sufonyl, ally, propargyl, diene, alkyne, and azide. Once this sequence is functionalized, a covalent chemical bond or linkage can be formed between this sequence and the conserved nucleotide sequence. Examples of chemical bonds include, but are not limited to, those based on carbamates, ethers, esters, amides, imines, amidines, aminotrizines, hydrozone, disulfides, thioethers, thioesters, phosphorothioates, phosphorodithioates, sulfonamides, sulfonates, fulfones, sulfoxides, ureas, thioureas, hydrazide, oxime, triazole, photolabile linkages, C—C bond forming groups such as Diels-Alder cyclo-addition pairs or ring-closing metathesis pairs, and Michael reaction pairs.

### ωRNA Chemical Modifications

[0167] In one embodiment, these stem-loop forming sequences can be chemically synthesized. In one embodiment, the chemical synthesis uses automated, solid-phase oligonucleotide synthesis machines with 2′-acetoxyethyl orthoester (2′-ACE) (Scaringe et al., J. Am. Chem. Soc. (1998) 120: 11820-11821; Scaringe, Methods Enzymol. (2000) 317: 3-18) or 2′-thionocarbamate (2′-TC) chemistry (Dellinger et al., J. Am. Chem. Soc. (2011) 133: 11540-11546; Hendel et al., Nat. Biotechnol. (2015) 33:985-989).

[0168] In one embodiment, the ωRNA component molecule comprises non-naturally occurring nucleic acids and/or non-naturally occurring nucleotides and/or nucleotide analogs, and/or chemically modifications. Preferably, these non-naturally occurring nucleic acids and non-naturally occurring nucleotides are located outside the ωRNA sequence. Non-naturally occurring nucleic acids can include, for example, mixtures of naturally and non-naturally occurring nucleotides. Non-naturally occurring nucleotides and/or nucleotide analogs may be modified at the ribose, phosphate, and/or base moiety. In an embodiment of the invention, a ωRNA component nucleic acid comprises ribonucleotides and non-ribonucleotides. In one such embodiment, a ωRNA component comprises one or more ribonucleotides and one or more deoxyribonucleotides. In an embodiment of the invention, the ωRNA component comprises one or more non-naturally occurring nucleotide or nucleotide analog such as a nucleotide with phosphorothioate linkage, a locked nucleic acid (LNA) nucleotides comprising a methylene bridge between the 2′ and 4′ carbons of the ribose ring, or bridged nucleic acids (BNA). Other examples of modified nucleotides include 2′-O-methyl analogs, 2′-deoxy analogs, or 2′-fluoro analogs. Further examples of modified bases include, but are not limited to, 2-aminopurine, 5-bromo-uridine, pseudouridine, inosine, 7-methylguanosine. Examples of ωRNA chemical modifications include, without limitation, incorporation of 2′-O-methyl (M), 2′-O-methyl 3′phosphorothioate (MS), S-constrained ethyl (cEt), or 2′-O-methyl 3′thioPACE (MSP) at one or more terminal nucleotides. Such chemically modified ωRNA components can comprise increased stability and increased activity as compared to unmodified ωRNA components, though on-target vs. off-target specificity is not predictable. (See, Hendel, 2015, Nat Biotechnol. 33(9):985-9, doi: 10.1038/nbt.3290, published online 29 Jun. 2015 Ragdarm et al., 0215, PNAS, E7110-E7111; Allerson et al., J. Med. Chem. 2005, 48:901-904; Bramsen et al., Front. Genet., 2012, 3:154; Deng et al., PNAS, 2015, 112:11870-11875; Sharma et al., MedChemComm., 2014, 5:1454-1471; Hendel et al., Nat. Biotechnol. (2015) 33(9): 985-989; Li et al., Nature Biomedical Engineering, 2017, 1, 0066 DOI:10.1038/s41551-017-0066). In one embodiment, the 5′ and/or 3′ end of a ωRNA component is modified by a variety of functional moieties including fluorescent dyes, polyethylene glycol, cholesterol, proteins, or detection tags. (See Kelly et al., 2016, J. Biotech. 233:74-83). In one embodiment, a ωRNA component comprises ribonucleotides in a region that binds to a target sequence and one or more deoxyribonucletides and/or nucleotide analogs in a region that binds to the TnpB polypeptide. In an embodiment, deoxyribonucleotides and/or nucleotide analogs are incorporated in engineered ωRNA component structures. In one embodiment, 3-5 nucleotides at either the 3′ or the 5′ end of a ωRNA component is chemically modified. In one embodiment, only minor modifications are introduced in the seed region, such as 2′-F modifications. In one embodiment, 2′-F modification is introduced at the 3′ end of a ωRNA component. In one embodiment, three to five nucleotides at the 5′ and/or the 3′ end of the ωRNA component are chemically modified with 2′-O-methyl (M), 2′-O-methyl 3′ phosphorothioate (MS), S-constrained ethyl(cEt), or 2′-O-methyl 3′ thioPACE (MSP). Such modification can enhance genome editing efficiency (see Hendel et al., Nat. Biotechnol. (2015) 33(9): 985-989). In one embodiment, all of the phosphodiester bonds of a ωRNA component are substituted with phosphorothioates (PS) for enhancing levels of gene disruption. In one embodiment, more than five nucleotides at the 5′ and/or the 3′ end of the ωRNA component are chemically modified with 2′-O-Me, 2′-F or S-constrained ethyl(cEt). Such chemically modified ωRNA component can mediate enhanced levels of gene disruption (see Ragdarm et al., 0215, PNAS, E7110-E7111). In an embodiment of the invention, a ωRNA component is modified to comprise a chemical moiety at its 3′ and/or 5′ end. Such moieties include, but are not limited to amine, azide, alkyne, thio, dibenzocyclooctyne (DBCO), or Rhodamine. In certain embodiment, the chemical moiety is conjugated to the ωRNA component by a linker, such as an alkyl chain. In one embodiment, the chemical moiety of the modified Nucleic acid component can be used to attach the ωRNA component to another molecule, such as DNA, RNA, protein, or nanoparticles. Such chemically modified ωRNA component can be used to identify or enrich cells generically edited by a TnpB polypeptide and related systems (see Lee et al., eLife, 2017, 6:e25312, DOI:10.7554).

[0169] In a particular embodiment, the conserved nucleotide sequence may be modified to comprise one or more protein-binding RNA aptamers. In a particular embodiment, one or more aptamers may be included such as part of optimized secondary structure. Such aptamers may be capable of binding a bacteriophage coat protein as detailed further herein.

[0170] In embodiments, the TnpB polypeptide utilizes the ωRNA component scaffold comprising a polynucleotide sequence that facilitates the interaction with the TnpB protein, allowing for sequence specific binding and/or targeting of the Nucleic acid component molecule with the target polynucleotide. Chemical synthesis of the ωRNA component scaffold is contemplated, using covalent linkage using various bioconjugation reactions, loops, bridges, and non-nucleotide links via modifications of sugar, internucleotide phosphodiester bonds, purine and pyrimidine residues. Sletten et al., Angew. Chem. Int. Ed. (2009) 48:6974-6998; Manoharan, M. Curr. Opin. Chem. Biol. (2004) 8: 570-9; Behlke et al., Oligonucleotides (2008) 18: 305-19; Watts, et al., Drug. Discov. Today (2008) 13: 842-55; Shukla, et al., ChemMedChem (2010) 5: 328-49; chemical synthesis using automated, solid-phase oligonucleotide synthesis machines with 2′-acetoxyethyl orthoester (2′-ACE) (Scaringe et al., J. Am. Chem. Soc. (1998) 120: 11820-11821; Scaringe, Methods Enzymol. (2000) 317: 3-18) or 2′-thionocarbamate (2′-TC) chemistry (Dellinger et al., J. Am. Chem. Soc. (2011) 133: 11540-11546; Hendel et al., Nat. Biotechnol. (2015) 33:985-989).

[0171] In certain example embodiments, the scaffold and spacer may designed as two separate molecules that can hybridize or covalently joined into a single molecule. Covalent linkage can be via a linker (e.g., a non-nucleotide loop) that comprises a moiety such as spacers, attachments, bioconjugates, chromophores, reporter groups, dye labeled RNAs, and non-naturally occurring nucleotide analogues. More specifically, suitable spacers for purposes of this invention include, but are not limited to, polyethers (e.g., polyethylene glycols, polyalcohols, polypropylene glycol or mixtures of ethylene and propylene glycols), polyamines group (e.g., spennine, spermidine and polymeric derivatives thereof), polyesters (e.g., poly(ethyl acrylate)), polyphosphodiesters, alkylenes, and combinations thereof. Suitable attachments include any moiety that can be added to the linker to add additional properties to the linker, such as but not limited to, fluorescent labels. Suitable bioconjugates include, but are not limited to, peptides, glycosides, lipids, cholesterol, phospholipids, diacyl glycerols and dialkyl glycerols, fatty acids, hydrocarbons, enzyme substrates, steroids, biotin, digoxigenin, carbohydrates, polysaccharides. Suitable chromophores, reporter groups, and dye-labeled RNAs include, but are not limited to, fluorescent dyes such as fluorescein and rhodamine, chemiluminescent, electrochemiluminescent, and bioluminescent marker compounds. The design of example linkers conjugating two nucleic acid components which can be adapted for use with ωRNAs are also described in WO 2004/015075.

[0172] The linker (e.g., a non-nucleotide loop) can be of any length. In one embodiment, the linker has a length equivalent to about 0-16 nucleotides. In one embodiment, the linker has a length equivalent to about 0-8 nucleotides. In one embodiment, the linker has a length equivalent to about 0-4 nucleotides. In one embodiment, the linker has a length equivalent to about 2 nucleotides. Example linker design is also described in International Patent Publication No. WO 2011/008730.

### Escorted ωRNA Components

[0173] In particular embodiments, the compositions or complexes have a ωRNA component molecule with a functional structure designed to improve ωRNA component molecule structure, architecture, stability, genetic expression, or any combination thereof. Such a structure can include an aptamer.

[0174] Aptamers are biomolecules that can be designed or selected to bind tightly to other ligands, for example using a technique called systematic evolution of ligands by exponential enrichment (SELEX; Tuerk C, Gold L: “Systematic evolution of ligands by exponential enrichment: RNA ligands to bacteriophage T4 DNA polymerase.” Science 1990, 249:505-510). Nucleic acid aptamers can for example be selected from pools of random-sequence oligonucleotides, with high binding affinities and specificities for a wide range of biomedically relevant targets, suggesting a wide range of therapeutic utilities for aptamers (Keefe, Anthony D., Supriya Pai, and Andrew Ellington. “Aptamers as therapeutics.” Nature Reviews Drug Discovery 9.7 (2010): 537-550). These characteristics also suggest a wide range of uses for aptamers as drug delivery vehicles (Levy-Nissenbaum, Etgar, et al. “Nanotechnology and aptamers: applications in drug delivery.” Trends in biotechnology 26.8 (2008): 442-449; and, Hicke B J, Stephens A W. “Escort aptamers: a delivery service for diagnosis and therapy.” J Clin Invest 2000, 106:923-928.). Aptamers may also be constructed that function as molecular switches, responding to a que by changing properties, such as RNA aptamers that bind fluorophores to mimic the activity of green fluorescent protein (Paige, Jeremy S., Karen Y. Wu, and Samie R. Jaffrey. “RNA mimics of green fluorescent protein.” Science 333.6042 (2011): 642-646). It has also been suggested that aptamers may be used as components of targeted siRNA therapeutic delivery systems, for example targeting cell surface proteins (Zhou, Jiehua, and John J. Rossi. “Aptamer-targeted cell-specific RNA interference.” Silence 1.1 (2010): 4).

[0175] Accordingly, in particular embodiments, the ωRNA component molecule is modified, e.g., by one or more aptamer(s) designed to improve ωRNA component molecule delivery, including delivery across the cellular membrane, to intracellular compartments, or into the nucleus. Such a structure can include, either in addition to the one or more aptamer(s) or without such one or more aptamer(s), moiety(ies) so as to render the Nucleic acid component molecule deliverable, inducible or responsive to a selected effector. The invention accordingly comprehends a ωRNA component molecule that responds to normal or pathological physiological conditions, including without limitation pH, hypoxia, 02 concentration, temperature, protein concentration, enzymatic concentration, lipid structure, light exposure, mechanical disruption (e.g. ultrasound waves), magnetic fields, electric fields, or electromagnetic radiation.

[0176] Light responsiveness of an inducible system may be achieved via the activation and binding of cryptochrome-2 and CIB1. Blue light stimulation induces an activating conformational change in cryptochrome-2, resulting in recruitment of its binding partner CIB1. This binding is fast and reversible, achieving saturation in <15 sec following pulsed stimulation and returning to baseline <15 min after the end of stimulation. These rapid binding kinetics result in a system temporally bound only by the speed of transcription/translation and transcript/protein degradation, rather than uptake and clearance of inducing agents. Crytochrome-2 activation is also highly sensitive, allowing for the use of low light intensity stimulation and mitigating the risks of phototoxicity. Further, in a context such as the intact mammalian brain, variable light intensity may be used to control the size of a stimulated region, allowing for greater precision than vector delivery alone may offer.

[0177] Energy sources such as electromagnetic radiation, sound energy or thermal energy may induce the Nucleic acid component molecule. Advantageously, the electromagnetic radiation is a component of visible light. In a preferred embodiment, the light is a blue light with a wavelength of about 450 to about 495 nm. In an especially preferred embodiment, the wavelength is about 488 nm. In another preferred embodiment, the light stimulation is via pulses. The light power may range from about 0-9 mW/cm2. In a preferred embodiment, a stimulation paradigm of as low as 0.25 sec every 15 sec should result in maximal activation.

[0178] The chemical or energy sensitive ωRNA component may undergo a conformational change upon induction by the binding of a chemical source or by the energy allowing it act as a ωRNA and have the TnpB polypeptide system or complex function. The invention can involve applying the chemical source or energy so as to have the ωRNA function and the TnpB polypeptide system or complex function; and optionally further determining that the expression of the genomic locus is altered.

[0179] There are several different designs of this chemical inducible system: 1. ABI-PYL based system inducible by Abscisic Acid (ABA) (see, e.g., stke.sciencemag.org/cgi/content/abstract/sigtrans;4/164/rs2), 2. FKBP-FRB based system inducible by rapamycin (or related chemicals based on rapamycin) (see, e.g., nature.com/nmeth/journal/v2/n6/full/nmeth763.html), 3. GID1-GAI based system inducible by Gibberellin (GA) (see, e.g., nature.com/nchembio/journal/v8/n5/full/nchembio.922.html).

[0180] A chemical inducible system can be an estrogen receptor (ER) based system inducible by 4-hydroxytamoxifen (4OHT) (see, e.g., pnas.org/content/104/3/1027.abstract). A mutated ligand-binding domain of the estrogen receptor called ERT2 translocates into the nucleus of cells upon binding of 4-hydroxytamoxifen. In further embodiments of the invention any naturally occurring or engineered derivative of any nuclear receptor, thyroid hormone receptor, retinoic acid receptor, estrogen receptor, estrogen-related receptor, glucocorticoid receptor, progesterone receptor, androgen receptor may be used in inducible systems analogous to the ER based inducible system.

[0181] Another inducible system is based on the design using Transient receptor potential (TRP) ion channel-based system inducible by energy, heat or radio-wave (see, e.g., sciencemag.org/content/336/6081/604). These TRP family proteins respond to different stimuli, including light and heat. When this protein is activated by light or heat, the ion channel will open and allow the entering of ions such as calcium into the plasma membrane. This influx of ions will bind to intracellular ion interacting partners linked to a polypeptide including the nucleic acid component and the other components of the TnpB polypeptide/ωRNA molecule complex or system, and the binding will induce the change of sub-cellular localization of the polypeptide, leading to the entire polypeptide entering the nucleus of cells. Once inside the nucleus, the nucleic acid component protein, and the other components of the TnpB polypeptide/ωRNA molecule complex will be active and modulating target gene expression in cells.

[0182] While light activation may be an advantageous embodiment, sometimes it may be disadvantageous especially for in vivo applications in which the light may not penetrate the skin or other organs. In this instance, other methods of energy activation are contemplated, in particular, electric field energy and/or ultrasound which have a similar effect.

[0183] Electric field energy is preferably administered substantially as described in the art, using one or more electric pulses of from about 1 Volt/cm to about 10 kVolts/cm under in vivo conditions. Instead of or in addition to the pulses, the electric field may be delivered in a continuous manner. The electric pulse may be applied for between 1 μs and 500 milliseconds, preferably between 1 μs and 100 milliseconds. The electric field may be applied continuously or in a pulsed manner for 5 about minutes.

[0184] As used herein, ‘electric field energy’ is the electrical energy to which a cell is exposed. Preferably the electric field has a strength of from about 1 Volt/cm to about 10 kVolts/cm or more under in vivo conditions (see WO97/49450).

[0185] As used herein, the term “electric field” includes one or more pulses at variable capacitance and voltage and including exponential and/or square wave and/or modulated wave and/or modulated square wave forms. References to electric fields and electricity should be taken to include reference the presence of an electric potential difference in the environment of a cell. Such an environment may be set up by way of static electricity, alternating current (AC), direct current (DC), etc., as known in the art. The electric field may be uniform, non-uniform or otherwise, and may vary in strength and/or direction in a time dependent manner.

[0186] Single or multiple applications of electric field, as well as single or multiple applications of ultrasound are also possible, in any order and in any combination. The ultrasound and/or the electric field may be delivered as single or multiple continuous applications, or as pulses (pulsatile delivery).

[0187] Electroporation has been used in both in vitro and in vivo procedures to introduce foreign material into living cells. With in vitro applications, a sample of live cells is first mixed with the agent of interest and placed between electrodes such as parallel plates. Then, the electrodes apply an electrical field to the cell/implant mixture. Examples of systems that perform in vitro electroporation include the Electro Cell Manipulator ECM600 product, and the Electro Square Porator T820, both made by the BTX Division of Genetronics, Inc (see U.S. Pat. No. 5,869,326).

[0188] The known electroporation techniques (both in vitro and in vivo) function by applying a brief high voltage pulse to electrodes positioned around the treatment region. The electric field generated between the electrodes causes the cell membranes to temporarily become porous, whereupon molecules of the agent of interest enter the cells. In known electroporation applications, this electric field comprises a single square wave pulse on the order of 1000 V/cm, of about 100 .mu.s duration. Such a pulse may be generated, for example, in known applications of the Electro Square Porator T820.

[0189] Preferably, the electric field has a strength of from about 1 V/cm to about 10 kV/cm under in vitro conditions. Thus, the electric field may have a strength of 1 V/cm, 2 V/cm, 3 V/cm, 4 V/cm, 5 V/cm, 6 V/cm, 7 V/cm, 8 V/cm, 9 V/cm, 10 V/cm, 20 V/cm, 50 V/cm, 100 V/cm, 200 V/cm, 300 V/cm, 400 V/cm, 500 V/cm, 600 V/cm, 700 V/cm, 800 V/cm, 900 V/cm, 1 kV/cm, 2 kV/cm, 5 kV/cm, 10 kV/cm, 20 kV/cm, 50 kV/cm or more. More preferably from about 0.5 kV/cm to about 4.0 kV/cm under in vitro conditions. Preferably the electric field has a strength of from about 1 V/cm to about 10 kV/cm under in vivo conditions. However, the electric field strengths may be lowered where the number of pulses delivered to the target site are increased. Thus, pulsatile delivery of electric fields at lower field strengths is envisaged.

[0190] Preferably, the application of the electric field is in the form of multiple pulses such as double pulses of the same strength and capacitance or sequential pulses of varying strength and/or capacitance. As used herein, the term “pulse” includes one or more electric pulses at variable capacitance and voltage and including exponential and/or square wave and/or modulated wave/square wave forms.

[0191] Preferably, the electric pulse is delivered as a waveform selected from an exponential wave form, a square wave form, a modulated wave form and a modulated square wave form.

[0192] A preferred embodiment employs direct current at low voltage. Thus, Applicants disclose the use of an electric field which is applied to the cell, tissue or tissue mass at a field strength of between 1V/cm and 20V/cm, for a period of 100 milliseconds or more, preferably 15 minutes or more.

[0193] Ultrasound is advantageously administered at a power level of from about 0.05 W/cm2 to about 100 W/cm2. Diagnostic or therapeutic ultrasound may be used, or combinations thereof.

[0194] As used herein, the term “ultrasound” refers to a form of energy which consists of mechanical vibrations the frequencies of which are so high they are above the range of human hearing. Lower frequency limit of the ultrasonic spectrum may generally be taken as about 20 kHz. Most diagnostic applications of ultrasound employ frequencies in the range 1 and 15 MHz’ (From Ultrasonics in Clinical Diagnosis, P. N. T. Wells, ed., 2nd. Edition, Publ. Churchill Livingstone [Edinburgh, London & NY, 1977]).

[0195] Ultrasound has been used in both diagnostic and therapeutic applications. When used as a diagnostic tool (“diagnostic ultrasound”), ultrasound is typically used in an energy density range of up to about 100 mW/cm2 (FDA recommendation), although energy densities of up to 750 mW/cm2 have been used. In physiotherapy, ultrasound is typically used as an energy source in a range up to about 3 to 4 W/cm2 (WHO recommendation). In other therapeutic applications, higher intensities of ultrasound may be employed, for example, HIFU at 100 W/cm up to 1 kW/cm2 (or even higher) for short periods of time. The term “ultrasound” as used in this specification is intended to encompass diagnostic, therapeutic and focused ultrasound.

[0196] Focused ultrasound (FUS) allows thermal energy to be delivered without an invasive probe (see Morocz et al 1998 Journal of Magnetic Resonance Imaging Vol. 8, No. 1, pp. 136-142. Another form of focused ultrasound is high intensity focused ultrasound (HIFU) which is reviewed by Moussatov et al in Ultrasonics (1998) Vol. 36, No. 8, pp. 893-900 and TranHuuHue et al in Acustica (1997) Vol. 83, No. 6, pp. 1103-1106.

[0197] Preferably, a combination of diagnostic ultrasound and a therapeutic ultrasound is employed. This combination is not intended to be limiting, however, and the skilled reader will appreciate that any variety of combinations of ultrasound may be used. Additionally, the energy density, frequency of ultrasound, and period of exposure may be varied.

[0198] Preferably, the exposure to an ultrasound energy source is at a power density of from about 0.05 to about 100 Wcm-2. Even more preferably, the exposure to an ultrasound energy source is at a power density of from about 1 to about 15 Wcm-2.

[0199] Preferably, the exposure to an ultrasound energy source is at a frequency of from about 0.015 to about 10.0 MHz. More preferably the exposure to an ultrasound energy source is at a frequency of from about 0.02 to about 5.0 MHz or about 6.0 MHz. Most preferably, the ultrasound is applied at a frequency of 3 MHz.

[0200] Preferably the exposure is for periods of from about 10 milliseconds to about 60 minutes. Preferably the exposure is for periods of from about 1 second to about 5 minutes. More preferably, the ultrasound is applied for about 2 minutes. Depending on the particular target cell to be disrupted, however, the exposure may be for a longer duration, for example, for 15 minutes.

[0201] Advantageously, the target tissue is exposed to an ultrasound energy source at an acoustic power density of from about 0.05 Wcm-2 to about 10 Wcm-2 with a frequency ranging from about 0.015 to about 10 MHz (see WO 98/52609). However, alternatives are also possible, for example, exposure to an ultrasound energy source at an acoustic power density of above 100 Wcm-2, but for reduced periods of time, for example, 1000 Wcm-2 for periods in the millisecond range or less.

[0202] Preferably, the application of the ultrasound is in the form of multiple pulses; thus, both continuous wave and pulsed wave (pulsatile delivery of ultrasound) may be employed in any combination. For example, continuous wave ultrasound may be applied, followed by pulsed wave ultrasound, or vice versa. This may be repeated any number of times, in any order and combination. The pulsed wave ultrasound may be applied against a background of continuous wave ultrasound, and any number of pulses may be used in any number of groups.

[0203] Preferably, the ultrasound may comprise pulsed wave ultrasound. In a highly preferred embodiment, the ultrasound is applied at a power density of 0.7 Wcm-2 or 1.25 Wcm-2 as a continuous wave. Higher power densities may be employed if pulsed wave ultrasound is used.

[0204] Use of ultrasound is advantageous as, like light, it may be focused accurately on a target. Moreover, ultrasound is advantageous as it may be focused more deeply into tissues unlike light. It is therefore better suited to whole-tissue penetration (such as but not limited to a lobe of the liver) or whole organ (such as but not limited to the entire liver or an entire muscle, such as the heart) therapy. Another important advantage is that ultrasound is a non-invasive stimulus which is used in a wide variety of diagnostic and therapeutic applications. By way of example, ultrasound is well known in medical imaging techniques and, additionally, in orthopedic therapy. Furthermore, instruments suitable for the application of ultrasound to a subject vertebrate are widely available and their use is well known in the art.

[0205] In particular embodiments, the ωRNA molecule is modified by a secondary structure to increase the specificity of the TnpB polypeptide and related system and the secondary structure can protect against exonuclease activity and allow for 5′ additions to the nucleic acid component sequence also referred to herein as a protected nucleic acid component molecule.

[0206] In one aspect, the invention provides for hybridizing a “protector RNA” to a sequence of the nucleic acid component molecule, wherein the “protector RNA” is an RNA strand complementary to the 3′ end of the nucleic acid component molecule to thereby generate a partially double-stranded nucleic acid component. In an embodiment of the invention, protecting mismatched bases (i.e., the bases of the nucleic acid component molecule which do not form part of the nucleic acid component sequence) with a perfectly complementary protector sequence decreases the likelihood of target DNA binding to the mismatched basepairs at the 3′ end. In particular embodiments of the invention, additional sequences comprising an extended length may also be present within the nucleic acid component molecule such that the nucleic acid component comprises a protector sequence within the nucleic acid component molecule. This “protector sequence” ensures that the nucleic acid component molecule comprises a “protected sequence” in addition to an “exposed sequence” (comprising the part of the nucleic acid component sequence hybridizing to the target sequence). In particular embodiments, the nucleic acid component molecule is modified by the presence of the protector nucleic acid component to comprise a secondary structure such as a hairpin. Advantageously there are three or four to thirty or more, e.g., about 10 or more, contiguous base pairs having complementarity to the protected sequence, the nucleic acid component sequence or both. It is advantageous that the protected portion does not impede thermodynamics of the TnpB polypeptide and related system interacting with its target. By providing such an extension including a partially double stranded nucleic acid component molecule, the nucleic acid component molecule is considered protected and results in improved specific binding of the TnpB polypeptide/nucleic acid component molecule complex, while maintaining specific activity.

[0207] In particular embodiments, use is made of a truncated ωRNA component (tru-nucleic acid component), i.e. a nucleic acid component molecule which comprises a nucleic acid component sequence which is truncated in length with respect to the canonical nucleic acid component sequence length. As described by Nowak et al. (Nucleic Acids Res (2016) 44 (20): 9555-9564), such nucleic acid component molecules may allow catalytically active TnpB polypeptide to bind its target without cleaving the target DNA. In particular embodiments, a truncated nucleic acid component is used which allows the binding of the target but retains only nickase activity of the TnpB polypeptide.

[0208] In one embodiment, conjugation of triantennary N-acetyl galactosamine (GalNAc) to oligonucleotide components may be used to improve delivery, for example delivery to select cell types, for example hepatocytes (see International Patent Publication No. WO 2014/118272 incorporated herein by reference; Nair, J K et al., 2014, Journal of the American Chemical Society 136 (49), 16958-16961). This is considered to be a sugar-based particle and further details on other particle delivery systems and/or formulations are provided herein. GalNAc can therefore be considered to be a particle in the sense of the other particles described herein, such that general uses and other considerations, for instance delivery of said particles, apply to GalNAc particles as well. A solution-phase conjugation strategy may for example be used to attach triantennary GalNAc clusters (mol. wt. ˜2000) activated as PFP (pentafluorophenyl) esters onto 5′-hexylamino modified oligonucleotides (5′-HA ASOs, mol. wt. ˜8000 Da; çstergaard et al., Bioconjugate Chem., 2015, 26 (8), pp 1451-1455). Similarly, poly(acrylate) polymers have been described for in vivo nucleic acid delivery (see WO2013158141 incorporated herein by reference). In further alternative embodiments, pre-mixing TnpB polypeptide nanoparticles (or protein complexes) with naturally occurring serum proteins may be used in order to improve delivery (Akinc A et al, 2010, Molecular Therapy vol. 18 no. 7, 1357-1364).

[0209] Screening techniques are available to identify delivery enhancers, for example by screening chemical libraries (Gilleron J. et al., 2015, Nucl. Acids Res. 43 (16): 7984-8001). Approaches have also been described for assessing the efficiency of delivery vehicles, such as lipid nanoparticles, which may be employed to identify effective delivery vehicles for components (see Sahay G. et al., 2013, Nature Biotechnology 31, 653-658).

### Target Adjacent Motifs

[0210] The TnpB systems disclosed herein may recognize a target adjacent motif (TAM) in order to recognize and bind a target sequence on a target polynucleotide. In one embodiment, the nucleic acid-guided nucleases and related compositions do not contain a TAM requirement. The precise sequence and length requirements for the TAM will differ depending on the nucleic acid-guided nucleases used. In some examples, TAMs are typically 2-5 base pair sequences adjacent the protospacer (that is, the target sequence). In one example embodiment, the TAM is 3′ adjacent to the target polynucleotide. In another example embodiment, the TAM is 5′ adjacent to the target sequence of the target polynucleotide.

[0211] In one embodiment, the cleavage site is distant from the TAM, e.g., the cleavage occurs after the nth nucleotide on the non-target strand and after the nucleotide on the targeted strand. In one embodiment, the cleavage site occurs after an identified nucleotide (counted from the TAM) on the non-target strand and after the further identified nucleotide (counted from the TAM) on the targeted strand. In one embodiment, a vector encodes a nucleic acid-targeting effector protein that may be mutated with respect to a corresponding wild-type enzyme such that the mutated nucleic acid-targeting effector protein lacks the ability to cleave one or both DNA and RNA strands of a target polynucleotide containing a target sequence.

[0212] In one example embodiment the TAM sequence is TCAG. In another example embodiment, the TAM sequence is TCAA. TAM identification and specificity may be identified, for example, using the methods disclosed in the Examples section below.

### HDR Donor Templates

[0213] In one embodiment, the compositions and systems herein may further comprise one or more HDR donor templates for use in homology-directed repair mediated editing. In some cases, the HDR donor template may comprise one or more polynucleotides. In certain cases, the HDR donor template may comprise coding sequences for one or more polynucleotides. The HDR donor template may be a DNA template.

[0214] The HDR donor template may be used for editing the target polynucleotide. In some cases, the donor polynucleotide comprises one or more mutations to be introduced into the target polynucleotide. Examples of such mutations include substitutions, deletions, insertions, or a combination thereof. The mutations may cause a shift in an open reading frame on the target polynucleotide. In some cases, the HDR donor template alters a stop codon in the target polynucleotide. For example, the HDR donor template may correct a premature stop codon. The correction may be achieved by deleting the stop codon or introduces one or more mutations to the stop codon. In other example embodiments, the HDR donor template addresses loss of function mutations, deletions, or translocations that may occur, for example, in certain disease contexts by inserting or restoring a functional copy of a gene, or functional fragment thereof, or a functional regulatory sequence or functional fragment of a regulatory sequence. A functional fragment refers to less than the entire copy of a gene by providing sufficient nucleotide sequence to restore the functionality of a wild type gene or non-coding regulatory sequence (e.g. sequences encoding long non-coding RNA). In certain example embodiments, the systems disclosed herein may be used to replace a single allele of a defective gene or defective fragment thereof. In another example embodiment, the systems disclosed herein may be used to replace both alleles of a defective gene or defective gene fragment. A “defective gene” or “defective gene fragment” is a gene or portion of a gene that when expressed fails to generate a functioning protein or non-coding RNA with functionality of a the corresponding wild-type gene. In certain example embodiments, these defective genes may be associated with one or more disease phenotypes. In certain example embodiments, the defective gene or gene fragment is not replaced but the systems described herein are used to insert HDR donor templates that encode gene or gene fragments that compensate for or override defective gene expression such that cell phenotypes associated with defective gene expression are eliminated or changed to a different or desired cellular phenotype.

[0215] In an embodiment of the invention, the HDR donor template may include, but not be limited to, genes or gene fragments, encoding proteins or RNA transcripts to be expressed, regulatory elements, repair templates, and the like. According to the invention, the HDR donor templates may comprise left end and right end sequence elements that function with transposition components that mediate insertion.

[0216] In certain cases, the HDR donor template manipulates a splicing site on the target polynucleotide. In some examples, the HDR donor template disrupts a splicing site. The disruption may be achieved by inserting the polynucleotide to a splicing site and/or introducing one or more mutations to the splicing site. In certain examples, the HDR donor template may restore a splicing site. For example, the polynucleotide may comprise a splicing site sequence.

[0217] The HDR donor template to be inserted may has a size from 10 basepair or nucleotides to 50 kb in length, e.g., from 50 to 40 k, from 100 and 30 k, from 100 to 10000, from 100 to 300, from 200 to 400, from 300 to 500, from 400 to 600, from 500 to 700, from 600 to 800, from 700 to 900, from 800 to 1000, from 900 to from 1100, from 1000 to 1200, from 1100 to 1300, from 1200 to 1400, from 1300 to 1500, from 1400 to 1600, from 1500 to 1700, from 600 to 1800, from 1700 to 1900, from 1800 to 2000 base pairs (bp) or nucleotides in length.

### Systems and Complexes

[0218] In one aspect, the present disclosure provides nucleic acid-targeting systems. Such systems may be used to target, modify, and otherwise manipulate target polynucleotides. In one embodiment, the systems comprise the TnpB polypeptide and one or more ωRNAs. The TnpB polypeptide may have nuclease activity, e.g., capable of cleaving DNA. In some embodiments the TnpB polypeptide may, or be engineered to have have nickase activity, e.g., capable of generating a single-strand break on a double-strand nucleic acid such as dsDNA or dsRNA.

[0219] In some examples, two or more of the components in a system herein may form a complex. For example, the components are separate molecules but interact with each other directly or indirectly. In certain two or more of the components in a system herein may be comprised in a fusion protein.

[0220] As used herein, “target sequence” refers to a sequence to which a ωRNA is designed to have complementarity, where hybridization between a target sequence and a ωRNA promotes the formation of a polynucleotide targeting complex. Full complementarity is not necessarily required, provided there is sufficient complementarity to cause hybridization and promote formation of a TnpB-targeting complex. A target sequence may comprise DNA polynucleotides. In one embodiment, a target sequence is located in the nucleus or cytoplasm of a cell. In one embodiment, the target sequence may be within an organelle of a eukaryotic cell, for example, mitochondrion or chloroplast. A sequence or template that may be used for recombination into the targeted locus comprising the target sequences is referred to as an “editing template” or “editing sequence”. In aspects of the invention, an exogenous template may be referred to as an editing template. In an aspect the recombination is homologous recombination.

[0221] In one embodiment, formation of a TnpB-targeting complex (comprising a ωRNA hybridized to a target sequence and complexed with one or more nucleic acid-targeting effector proteins) results in cleavage of one or both nucleic acid strands in or near (e.g. within 1, 2, 3, 4, 5, 6, 7, 8, 9, 10, 20, 50, or more base pairs from) the target sequence. In one embodiment, one or more vectors driving expression of one or more elements of the TnpB system are introduced into a host cell such that expression of the elements of the TnpB system direct formation of a TnpB complex at one or more target sites. For example, a TnpB polypeptide and a ωRNA could each be operably linked to separate regulatory elements on separate vectors. Alternatively, two or more of the elements expressed from the same or different regulatory elements, may be combined in a single vector, with one or more additional vectors providing any components of the TnpB system not included in the first vector. TnpB system elements combined in a single vector may be arranged in any suitable orientation, such as one element located 5′ with respect to (“upstream” of) or 3′ with respect to (“downstream” of) a second element. The coding sequence of one element may be located on the same or opposite strand of the coding sequence of a second element, and oriented in the same or opposite direction. In one embodiment, a single promoter drives expression of a transcript encoding a TnpB and a ωRNA embedded within one or more intron sequences (e.g. each in a different intron, two or more in at least one intron, or all in a single intron). In one embodiment, the TnpB polypeptide and ωRNAs are operably linked to and expressed from the same promoter.

[0222] The present disclosure encompasses computational methods and algorithms to predict new TnpB polypeptides, identify the components, and new TnpB systems therein. In some examples, a computational method of identifying novel TnpB polypeptide loci analysis of the candidates may be conducted by searching metagenomics databases for additional homologs.

[0223] In one aspect the identifying all predicted protein coding genes is carried out by comparing the identified genes with TnpB polypeptide specific profiles and annotating them according to NCBI Conserved Domain Database (CDD) which is a protein annotation resource that consists of a collection of well-annotated multiple sequence alignment models for ancient domains and full-length proteins. These are available as position-specific score matrices (PSSMs) for fast identification of conserved domains in protein sequences via RPS-BLAST. CDD content includes NCBI-curated domains, which use 3D-structure information to explicitly define domain boundaries and provide insights into sequence/structure/function relationships, as well as domain models imported from a number of external source databases (Pfam, SMART, COG, PRK, TIGRFAM).

[0224] In a further aspect, the case-by-case analysis is performed using PSI-BLAST (Position-Specific Iterative Basic Local Alignment Search Tool). PSI-BLAST derives a position-specific scoring matrix (PSSM) or profile from the multiple sequence alignment of sequences detected above a given score threshold using protein-protein BLAST. This PSSM is used to further search the database for new matches, and is updated for subsequent iterations with these newly detected sequences. Thus, PSI-BLAST provides a means of detecting distant relationships between proteins.

[0225] In another aspect, the case-by-case analysis is performed using HHpred, a method for sequence database searching and structure prediction that is as easy to use as BLAST or PSI-BLAST and that is at the same time much more sensitive in finding remote homologs. In fact, HHpred's sensitivity is competitive with the most powerful servers for structure prediction currently available. HHpred is the first server that is based on the pairwise comparison of profile hidden Markov models (HMMs). Whereas most conventional sequence search methods search sequence databases such as UniProt or the NR, HHpred searches alignment databases, like Pfam or SMART. This greatly simplifies the list of hits to a number of sequence families instead of a clutter of single sequences. All major publicly available profile and alignment databases are available through HHpred. HHpred accepts a single query sequence or a multiple alignment as input. Within only a few minutes it returns the search results in an easy-to-read format similar to that of PSI-BLAST. Search options include local or global alignment and scoring secondary structure similarity. HHpred can produce pairwise query-template sequence alignments, merged query-template multiple alignments (e.g. for transitive searches), as well as 3D structural models calculated by the MODELLER software from HHpred alignments.

### Specialized Systems

[0226] The TnpB polypeptide may be in a dead form, e.g. does not have nuclease or nickase activity. In one embodiment, the systems further comprising one or more functional domains, e.g., nucleotide deaminase, reverse transcriptase, non-LTR retrotransposon (and protein encoded), polymerase, diversity generating element (and protein encoded) and integrases. In some examples, the systems further comprise one or more donor polynucleotides. The donor polynucleotides may be inserted to a target polynucleotide by the systems. The donor polynucleotide may be comprised in or coded by a nucleic acid template.

### TnpB Base Editing Systems

[0227] The present disclosure also provides for base editing systems. In general, such a system may comprise a nucleobase deaminase (e.g., an adenosine deaminase or cytidine deaminase) associated (e.g., fused) with a TnpB polypeptide. The TnpB polypeptide may be a catalytically inactive, or dead TnpB polypeptide, dTnpB. In certain examples, the nucleobase deaminase is a mutated form of an adenosine deaminase. The mutated form of the adenosine deaminase may have both adenosine deaminase and cytidine deaminase activities.

[0228] In some examples, the present disclosure provides an engineered, non-naturally occurring composition comprising: a dTnpB, a nucleobase deaminase associated with or otherwise capable of forming a complex with the dTnpB, and a ωRNA capable of forming a complex with the TnpB protein and directing site-specific binding at a target sequence at or adjacent to a single nucleotide or nucleotide base pair to be edited. In an aspect, the nucleotide deaminase or other editing enzyme flips the target base within the DNA. See, e.g. Hong and Cheng et al., DNA Base Flipping: A general Mechanism for Writing Reading and Erasing DNA Modifications, Adv. Exp Med Biol., 2016:945:321-341, doi:10.1007/978-3-316-43624-1_14. Without being bound by theory, the TnpB-ωRNA complex bound to the target provides a more open pocket relative to, for example, a CRISPR-Cas protein, e.g. Cas9, Cas12, which advantageously provides more accessibility for the complex and the base flipping of the target nucleotide by the deaminase or other base editing enzyme, reducing steric hindrance and making it possible to enhance the specificity of the base editing system.

[0229] In an aspect, the bae edits can be targeted from about 2 to 100 bae pairs from the end of the TAM, or about 4 to 100, 50 to 100, 6, to 100, 7 to 100, 8 to 100, 9. To 100, 10, to 100, 11 to 100, 12 to 100, 13 to 100, 14 to 100, 15 to 100, 16 to 100, 17 to 100, 18 to 100, 18 to 100, 19 to 100, 20 to 100, 25 to 100, 3 to 90, 3 to 80, 3 to 70, 3 to 60, 3 to 50, 3 to 40, 3 to 30, or about 3 to 30 base pairs from the end of the TAM. In an aspect, when the base editor is fused to the TnpB, the linker length can be configured to allow for more precise base editing at the desired location. For example, the linker length, as detailed elsewhere herein, can be tuned to facilitate base editing closer or more distant to the TAM, and may be configured with increasing or decreasing rigidity and other properties to generate a desired configuration or presentation at the binding site. A more open configuration at the binding pocket of the TnpB complex may allow more flexibility in configuration of the TnpB editing system and specificity in access to target sites.

[0230] In one aspect, the present disclosure provides an engineered adenosine deaminase. The engineered adenosine deaminase may comprise one or more mutations herein. In one embodiment, the engineered adenosine deaminase has cytidine deaminase activity. In certain examples, the engineered adenosine deaminase has both cytidine deaminase activity and adenosine deaminase. In some cases, the modifications by base editors herein may be used for targeting post-translational signaling or catalysis. In one embodiment, compositions herein comprise nucleotide sequence comprising encoding sequences for one or more components of a base editing system. A base-editing system may comprise a deaminase (e.g., an adenosine deaminase or cytidine deaminase) fused with a TnpB polypeptide or a variant thereof. In some cases, the target polynucleotide is edited at one or more bases to introduce a G→A or C→T mutation.

[0231] In some cases, the adenosine deaminase is double-stranded RNA-specific adenosine deaminase (ADAR). Examples of ADARs include those described Yiannis A Savva et al., The ADAR protein family, Genome Biol. 2012; 13(12): 252, which is incorporated by reference in its entirety. In some examples, the ADAR may be hADAR1. In certain examples, the ADAR may be hADAR2. The sequence of hADAR2 may be that described under Accession No. AF525422.1.

[0232] In some cases, the deaminase may be a deaminase domain, e.g., a deaminase domain of ADAR (“ADAR-D”). In one example, the deaminase may be the deaminase domain of hADAR2 (“hADAR2-D), e.g., as described in Phelps K J et al., Recognition of duplex RNA by the deaminase domain of the RNA editing enzyme ADAR2. Nucleic Acids Res. 2015 January; 43(2):1123-32, which is incorporated by reference herein in its entirety. In a particular example, the hADAR2-D has a sequence comprising amino acid 299-701 of hADAR2-D, e.g., amino acid 299-701 of the sequence under Accession No. AF525422.1.

[0233] In certain examples, the system comprises a mutated form of an adenosine deaminase fused with a dTnpB. The mutated form of the adenosine deaminase may have both adenosine deaminase and cytidine deaminase activities. In one embodiment, the adenosine deaminase may comprise one or more of the mutations: E488Q based on amino acid sequence positions of hADAR2-D, and mutations in a homologous ADAR protein corresponding to the above. In one embodiment, the adenosine deaminase may comprise one or more of the mutations: E488Q, V351G, based on amino acid sequence positions of hADAR2-D, and mutations in a homologous ADAR protein corresponding to the above. In one embodiment, the adenosine deaminase may comprise one or more of the mutations: E488Q, V351G, S486A, based on amino acid sequence positions of hADAR2-D, and mutations in a homologous ADAR protein corresponding to the above. In one embodiment, the adenosine deaminase may comprise one or more of the mutations: E488Q, V351G, S486A, T375S, based on amino acid sequence positions of hADAR2-D, and mutations in a homologous ADAR protein corresponding to the above. In one embodiment, the adenosine deaminase may comprise one or more of the mutations: E488Q, V351G, S486A, T375S, S370C, based on amino acid sequence positions of hADAR2-D, and mutations in a homologous ADAR protein corresponding to the above. In one embodiment, the adenosine deaminase may comprise one or more of the mutations: E488Q, V351G, S486A, T375S, S370C, P462A, based on amino acid sequence positions of hADAR2-D, and mutations in a homologous ADAR protein corresponding to the above. In one embodiment, the adenosine deaminase may comprise one or more of the mutations: E488Q, V351G, S486A, T375S, S370C, P462A, N597I, based on amino acid sequence positions of hADAR2-D, and mutations in a homologous ADAR protein corresponding to the above. In one embodiment, the adenosine deaminase may comprise one or more of the mutations: E488Q, V351G, S486A, T375S, S370C, P462A, N597I, L332I, based on amino acid sequence positions of hADAR2-D, and mutations in a homologous ADAR protein corresponding to the above. In one embodiment, the adenosine deaminase may comprise one or more of the mutations: E488Q, V351G, S486A, T375S, S370C, P462A, N597I, L332I, I398V, based on amino acid sequence positions of hADAR2-D, and mutations in a homologous ADAR protein corresponding to the above. In one embodiment, the adenosine deaminase may comprise one or more of the mutations: E488Q, V351G, S486A, T375S, S370C, P462A, N597I, L332I, I398V, K350I, based on amino acid sequence positions of hADAR2-D, and mutations in a homologous ADAR protein corresponding to the above. In one embodiment, the adenosine deaminase may comprise one or more of the mutations: E488Q, V351G, S486A, T375S, S370C, P462A, N597I, L332I, I398V, K350I, M383L, based on amino acid sequence positions of hADAR2-D, and mutations in a homologous ADAR protein corresponding to the above. In one embodiment, the adenosine deaminase may comprise one or more of the mutations: E488Q, V351G, S486A, T375S, S370C, P462A, N597I, L332I, I398V, K350I, M383L, D619G, based on amino acid sequence positions of hADAR2-D, and mutations in a homologous ADAR protein corresponding to the above. In one embodiment, the adenosine deaminase may comprise one or more of the mutations: E488Q, V351G, S486A, T375S, S370C, P462A, N597I, L332I, I398V, K350I, M383L, D619G, S582T, based on amino acid sequence positions of hADAR2-D, and mutations in a homologous ADAR protein corresponding to the above. In one embodiment, the adenosine deaminase may comprise one or more of the mutations: E488Q, V351G, S486A, T375S, S370C, P462A, N597I, L332I, I398V, K350I, M383L, D619G, S582T, V440I based on amino acid sequence positions of hADAR2-D, and mutations in a homologous ADAR protein corresponding to the above. In one embodiment, the adenosine deaminase may comprise one or more of the mutations: E488Q, V351G, S486A, T375S, S370C, P462A, N597I, L332I, I398V, K350I, M383L, D619G, S582T, V440I, S495N based on amino acid sequence positions of hADAR2-D, and mutations in a homologous ADAR protein corresponding to the above. In one embodiment, the adenosine deaminase may comprise one or more of the mutations: E488Q, V351G, S486A, T375S, S370C, P462A, N597I, L332I, I398V, K350I, M383L, D619G, S582T, V440I, S495N, K418E based on amino acid sequence positions of hADAR2-D, and mutations in a homologous ADAR protein corresponding to the above. In one embodiment, the adenosine deaminase may comprise one or more of the mutations: E488Q, V351G, S486A, T375S, S370C, P462A, N597I, L332I, I398V, K350I, M383L, D619G, S582T, V440I, S495N, K418E, S661T based on amino acid sequence positions of hADAR2-D, and mutations in a homologous ADAR protein corresponding to the above. In some examples, provided herein includes a mutated adenosine deaminase e.g., an adenosine deaminase comprising one or more mutations of E488Q, V351G, S486A, T375S, S370C, P462A, N597I, L332I, I398V, K350I, M383L, D619G, S582T, V440I, S495N, K418E, S661T, fused with a dead TnpB polypeptide or TnpB polypeptide nickase. In some examples, provided herein includes a mutated adenosine deaminase e.g., an adenosine deaminase comprising E488Q, V351G, S486A, T375S, S370C, P462A, N597I, L332I, I398V, K350I, M383L, D619G, S582T, V440I, S495N, K418E, and S661T, fused with a dead TnpB polypeptide or TnpB polypeptide nickase. In some examples, provided herein includes a mutated adenosine deaminase e.g., an adenosine deaminase comprising E488Q, V351G, S486A, T375S, S370C, P462A, N597I, L332I, I398V, K350I, M383L, D619G, S582T, V440I, S495N, K418E, S661T, and S375N fused with a dead TnpB polypeptide or TnpB polypeptide nickase.

[0234] In one embodiment, the adenosine deaminase may be a tRNA-specific adenosine deaminase or a variant thereof. In one embodiment, the adenosine deaminase may comprise one or more of the mutations: W23L, W23R, R26G, H36L, N37S, P48S, P48T, P48A, I49V, R51L, N72D, L84F, S97C, A106V, D108N, H123Y, G125A, A142N, S146C, D147Y, R152H, R152P, E155V, I156F, K157N, K161T, based on amino acid sequence positions of E. coli TadA, and mutations in a homologous deaminase protein corresponding to the above. In one embodiment, the adenosine deaminase may comprise one or more of the mutations: D108N based on amino acid sequence positions of E. coli TadA, and mutations in a homologous deaminase protein corresponding to the above. In one embodiment, the adenosine deaminase may comprise one or more of the mutations: A106V, D108N, based on amino acid sequence positions of E. coli TadA, and mutations in a homologous deaminase protein corresponding to the above. In one embodiment, the adenosine deaminase may comprise one or more of the mutations: A106V, D108N, D147Y, E155V, based on amino acid sequence positions of E. coli TadA, and mutations in a homologous deaminase protein corresponding to the above. In one embodiment, the adenosine deaminase may comprise one or more of the mutations: A106V, D108N, based on amino acid sequence positions of E. coli TadA, and mutations in a homologous deaminase protein corresponding to the above. In one embodiment, the adenosine deaminase may comprise one or more of the mutations: A106V, D108N, D147Y, E155V, L84F, H123Y, I156F, based on amino acid sequence positions of E. coli TadA, and mutations in a homologous deaminase protein corresponding to the above. In one embodiment, the adenosine deaminase may comprise one or more of the mutations: A106V, D108N, D147Y, E155V, L84F, H123Y, I156F, A142N, based on amino acid sequence positions of E. coli TadA, and mutations in a homologous deaminase protein corresponding to the above. In one embodiment, the adenosine deaminase may comprise one or more of the mutations: A106V, D108N, D147Y, E155V, L84F, H123Y, I156F, H36L, R51L, S146C, K157N, based on amino acid sequence positions of E. coli TadA, and mutations in a homologous deaminase protein corresponding to the above. In one embodiment, the adenosine deaminase may comprise one or more of the mutations: A106V, D108N, D147Y, E155V, L84F, H123Y, I156F, H36L, R51L, S146C, K157N, P48S, based on amino acid sequence positions of E. coli TadA, and mutations in a homologous deaminase protein corresponding to the above. In one embodiment, the adenosine deaminase may comprise one or more of the mutations: A106V, D108N, D147Y, E155V, L84F, H123Y, I156F, H36L, R51L, S146C, K157N, P48S, A142N, based on amino acid sequence positions of E. coli TadA, and mutations in a homologous deaminase protein corresponding to the above. In one embodiment, the adenosine deaminase may comprise one or more of the mutations: A106V, D108N, D147Y, E155V, L84F, H123Y, I156F, H36L, R51L, S146C, K157N, P48S, W23R, P48A, based on amino acid sequence positions of E. coli TadA, and mutations in a homologous deaminase protein corresponding to the above. In one embodiment, the adenosine deaminase may comprise one or more of the mutations: A106V, D108N, D147Y, E155V, L84F, H123Y, I156F, H36L, R51L, S146C, K157N, P48S, W23R, P48A, A142N, based on amino acid sequence positions of E. coli TadA, and mutations in a homologous deaminase protein corresponding to the above. In one embodiment, the adenosine deaminase may comprise one or more of the mutations: A106V, D108N, D147Y, E155V, L84F, H123Y, I156F, H36L, R51L, S146C, K157N, P48S, W23R, P48A, R152P, based on amino acid sequence positions of E. coli TadA, and mutations in a homologous deaminase protein corresponding to the above. In one embodiment, the adenosine deaminase may comprise one or more of the mutations: A106V, D108N, D147Y, E155V, L84F, H123Y, I156F, H36L, R51L, S146C, K157N, P48S, W23R, P48A, R152P, A142N, based on amino acid sequence positions of E. coli TadA, and mutations in a homologous deaminase protein corresponding to the above.

[0235] In some examples, the base editing systems may comprise an intein-mediated trans-splicing system that enables in vivo delivery of a base editor, e.g., a split-intein cytidine base editors (CBE) or adenine base editor (ABE) engineered to trans-splice. Examples of the such base editing systems include those described in Colin K. W. Lim et al., Treatment of a Mouse Model of ALS by In Vivo Base Editing, Mol Ther. 2020 Jan. 14. pii: S1525-0016(20)30011-3. doi: 10.1016/j.ymthe.2020.01.005; and Jonathan M. Levy et al., Cytosine and adenine base editing of the brain, liver, retina, heart and skeletal muscle of mice via adeno-associated viruses, Nature Biomedical Engineering volume 4, pages 97-110(2020), which are incorporated by reference herein in their entireties.

[0236] Examples of base editing systems include those described in International Patent Publication Nos. WO 2019/071048 (e.g. paragraphs [0933]-[0938]), WO 2019/084063 (e.g., paragraphs [0173]-[0186], [0323]-[0475], [0893]-[1094]), WO 2019/126716 (e.g., paragraphs [0290]-[0425], [1077]-[1084]), WO 2019/126709 (e.g., paragraphs [0294]-[0453]), WO 2019/126762 (e.g., paragraphs [0309]-[0438]), WO 2019/126774 (e.g., paragraphs [0511]-[0670]), Cox D B T, et al., RNA editing with CRISPR-Cas13, Science. 2017 Nov. 24; 358(6366):1019-1027; Abudayyeh 00, et al., A cytosine deaminase for programmable single-base RNA editing, Science 26 Jul. 2019: Vol. 365, Issue 6451, pp. 382-386; Gaudelli N M et al., Programmable base editing of A⋅T to G⋅C in genomic DNA without DNA cleavage, Nature volume 551, pages 464-471 (23 Nov. 2017); Komor A C, et al., Programmable editing of a target base in genomic DNA without double-stranded DNA cleavage. Nature. 2016 May 19; 533(7603):420-4; Jordan L. Doman et al., Evaluation and minimization of Cas9-independent off-target DNA editing by cytosine base editors, Nat Biotechnol (2020). doi.org/10.1038/s41587-020-0414-6; and Richter M F et al., Phage-assisted evolution of an adenine base editor with improved Cas domain compatibility and activity, Nat Biotechnol (2020). doi.org/10.1038/s41587-020-0453-z, which are incorporated by reference herein in their entireties and can be used to adapt to the TnpB polypeptides.

### TnpB Prime Editing Systems

[0237] In one embodiment, the present disclosure provides compositions and systems may comprise a TnpB or a dTnpB, one or more nucleic acid components, and a reverse transcriptase. The systems may be used to insert a donor polynucleotide to a target polynucleotide. In some examples, the composition or system comprises a catalytically inactive TnpB polypeptide, a reverse transcriptase associated with or otherwise capable of forming a complex with the TnpB polypeptide, and a nucleic acid component molecule capable of forming a complex with the TnpB polypeptide and directing site-specific binding of the complex to a target sequence of a target polynucleotide, the nucleic acid component molecule further comprising a donor template which functions as a template for insertion of a donor sequence into a target polynucleotide by the reverse transcriptase.

[0238] In some cases, the TnpB or dTnpB may be a nickase, e.g., a DNA nickase. The TnpB nickase may comprise or more mutations. In some examples, the TnpB comprises mutations corresponding to the mutations in the RuvC nuclease. In some examples, the TnpB is naturally catalytically inactive and comprises fusion to a nuclease domain, e.g. HNH or FokI domain.

[0239] A reverse transcriptase domain may be a reverse transcriptase or a fragment thereof. In certain aspects, the reverse transcriptase is Human immunodeficiency virus (HIV) RT, Avian myoblastosis virus (AMV) RT, Moloney murine leukemia virus (M-MLV) RT a group II intron RT, a group II intron-like RT, or a chimeric RT. In certain embodiments, the RT comprises modified forms of these RTs, such as, engineered variants of Avian myoblastosis virus (AMV) RT, Moloney murine leukemia virus (M-MLV) RT, or Human immunodeficiency virus (HIV) RT (see, e.g., Anzalone, et al., Search-and-replace genome editing without double-strand breaks or donor DNA, Nature. 2019 December; 576(7785):149-157).

[0240] In some examples, the compositions and systems may comprise the TnpB protein herein; a reverse transcriptase (RT) polypeptide connected to or otherwise capable of forming a complex with the TnpB protein; and a ωRNA molecule capable of forming a complex with the TnpB protein and comprising: a ωRNA sequence capable of directing site-specific binding of the TnpB complex to a target sequence of a target polynucleotide; a 3′ binding site region capable of binding to a cleaved upstream strand of the target polynucleotide; and a RT template sequence encoding an extended sequence, wherein the extended sequence comprises a variant region and a 3′ homologous sequence capable of hybridization to the downstream cleaved strand of the target polynucleotide.

[0241] A wide variety of reverse transcriptases (RT) may be used in alternative embodiments of the present invention, including prokaryotic and eukaryotic RT, provided that the RT functions within the host to generate a donor polynucleotide sequence from the RNA template. If desired, the nucleotide sequence of a native RT may be modified, for example using known codon optimization techniques, so that expression within the desired host is optimized. A reverse transcriptase (RT) is an enzyme used to generate complementary DNA (cDNA) from an RNA template, a process termed reverse transcription. Reverse transcriptases are used by retroviruses to replicate their genomes, by retrotransposon mobile genetic elements to proliferate within the host genome, by eukaryotic cells to extend the telomeres at the ends of their linear chromosomes, and by some non-retroviruses such as the hepatitis B virus, a member of the Hepadnaviridae, which are dsDNA-RT viruses. Retroviral RT has three sequential biochemical activities: RNA-dependent DNA polymerase activity, ribonuclease H, and DNA-dependent DNA polymerase activity. Collectively, these activities enable the enzyme to convert single-stranded RNA into double-stranded cDNA. In one embodiment, the RT domain of a reverse transcriptase is used in the present invention. The domain may include only the RNA-dependent DNA polymerase activity. In some examples, the RT domain is non-mutagenic, i.e., does not cause mutation in the donor polynucleotide (e.g., during the reverse transcriptase process). In some cases, In some examples, the RT domain may be non-retron RT, e.g., a viral RT or a human endogenous RTs. In some examples, the RT domain may be retron RT or DGRs RT. In some examples, the RT may be less mutagenic than a counterpart wildtype RT. In one embodiment, the RT herein is not mutagenic.

[0242] The reverse transcriptase may be fused to the C-terminus of a TnpB. Alternatively, or additionally, the reverse transcriptase may be fused to the N-terminus of a TnpB. The fusion may be via a linker and/or an adaptor protein. In some examples, the reverse transcriptase may be an M-MLV reverse transcriptase or variant thereof. The M-MLV reverse transcriptase variant may comprise one or more mutations. For the examples, the M-MLV reverse transcriptase may comprise D200N, L603W, and T330P. In another example, the M-MLV reverse transcriptase may comprise D200N, L603W, T330P, T306K, and W313F. In a particular example, the fusion of TnpB polypeptide and reverse transcriptase is TnpB polypeptide with mutation fused with M-MLV reverse transcriptase (D200N+L603W+T330P+T306K+W313F).

[0243] The small sizes of the TnpB polypeptide herein may allow easier packaging and delivery of the prime editing system, e.g., with a viral vector, e.g., AAV or lentiviral vector. See, e.g. Lino et al. Drug Deliv. 2018; 25(1): 1234-1257; doi: 10.1080/10717544.2018.1474964, incorporated herein by reference, specifically, see table 1, incorporated herein by reference for CRISPR delivery approaches.

[0244] A single-strand break (a nick) may be generated on the target DNA by the TnpB polypeptide at the target site to expose a 3′-hydroxyl group, thus priming the reverse transcription of an edit-encoding extension on the nucleic acid component molecule directly into the target site. These steps may result in a branched intermediate with two redundant single-stranded DNA flaps: a 5′ flap that contains the unedited DNA sequence, and a 3′ flap that contains the edited sequence copied from the nucleic acid component. The 5′ flaps may be removed by a structure-specific endonuclease, e.g., FEN122, which excises 5′ flaps generated during lagging-strand DNA synthesis and long-patch base excision repair. The non-edited DNA strand may be nicked to induce bias DNA repair to preferentially replace the non-edited strand. Examples of prime editing systems and methods include those described in Anzalone A V et al., Search-and-replace genome editing without double-strand breaks or donor DNA, Nature. 2019 Oct. 21. doi: 10.1038/s41586-019-1711-4, which is incorporated by reference herein in its entirety.

[0245] The TnpB (e.g., the nickase form) may be used to prime-edit a single nucleotide on a target DNA. Alternatively or additionally, the TnpB polypeptide may be used to prime-edit at least 2, at least 3, at least 4, at least 5, at least 6, at least 7, at least 8, at least 10, at least 11, at least 12, at least 13, at least 14, at least 15, at least 16, at least 17, at least 18, at least 19, at least 20, at least 21, at least 22, at least 23, at least 24, at least 25, at least 26, at least 27, at least 28, at least 29, at least 30, at least 40, at least 50, at least 60, at least 70, at least 80, at least 90, at least 100, at least 200, at least 300, at least 400, at least 500, at least 600, at least 700, at least 800, at least 900, or at least 1000 nucleotides on a target DNA.

[0246] In yet another embodiment, PRIME editing is used first to create a longer 3′ region (e.g. 20 nucleotides). Examples of prime editing systems and methods include those described in Anzalone A V et al., Search-and-replace genome editing without double-strand breaks or donor DNA, Nature. 2019 Oct. 21. doi: 10.1038/s41586-019-1711-4, which is incorporated by reference herein in its entirety. In such cases, the system comprises a TnpB protein with nickase activity, a reverse transcriptase domain, and a DNA polymerase, and a ωRNA molecule comprising a binding sequence capable of hybridizing to the target polynucleotide and an editing sequence. The generated region may be further extended on a DNA template as described herein. The latter may allow generation of a target-independent sequence, compatible with a generic donor sequence.

[0247] The TnpB protein is capable of generating a first cleavage in the target sequence and a second cleavage outside the target sequence on the target polynucleotide. In some variations, a second TnpB-mediated cleavage in vicinity to the target site may be made, which may enable more efficient invasion of the extended DNA.

[0248] In some examples, the compositions and systems of the TnpB protein herein comprise: a reverse transcriptase (RT) polypeptide connected to or otherwise capable of forming a complex with the TnpB protein; a first ωRNA molecule capable of forming a first TnpB-Reverse transcriptase complex with the TnpB protein and comprising: a ωRNA sequence capable of directing site-specific binding of the first TnpB-Reverse transcriptase complex to a first target sequence of a target polynucleotide; a first binding site region capable of binding to a cleaved or nicked strand of the target polynucleotide; and a RT template sequence encoding a first extended sequence; a second ωRNA molecule capable of forming a second TnpB-Reverse transcriptase complex with the TnpB protein and comprising: a ωRNA sequence capable of directing site specific binding of the second TnpB-Reverse transcriptase complex to a second target sequence of the target polynucleotide; a second binding site region capable of binding to a cleaved or nicked strand of the target polynucleotide; and a RT template sequence encoding a second extended sequence.

[0249] In some cases, the compositions and systems may further comprise: a donor template; a third ωRNA sequence capable of forming a TnpB-Reverse transcriptase complex-ωRNA with the TnpB protein and comprising: a ωRNA sequence capable of directing site-specific binding to a target sequence on the donor template; a third binding region capable of binding to a cleaved or nicked strand of the donor template; and a RT template encoding a third extended region complementary to the first extended region generated on the target polynucleotide: and a fourth oRNA sequence capable of forming a TnpB-Reverse transcriptase complex with the TnpB protein and comprising: a ωRNA sequence capable of directing site-specific binding to a second target sequence on the donor template; a fourth binding region capable of binding to a cleaved or nicked strand of the donor template; and a RT template encoding a fourth extended region complementary to the second extended region generated on the target polynucleotide.

[0250] Advantageously, the more open configuration of the TnpB complex relative to a CRISPR-Cas enzyme can allow for improved accessibility not only for a sequence complementary to the target site, but also for the RT template sequence and the reverse transcriptase, which may increase the editing efficiency at the target site. Additionally, the more minimal size of the TnpB allows for increased packaging efficiency for delivery with the reverse transcriptase, accessibility for deliver of additional ωRNA sequences, as detailed further below, all of which may further improvide editing efficiencies.

[0251] In some cases, the compositions and systems may further comprise a site-specific recombinase, and wherein the first and second extended regions are complementary to each other and introduce a serine integrase recombination site; and a donor molecule comprising a donor sequence for insertion into the target polypeptide and the complementary recombination site to the serine integrase recombination site.

[0252] In some examples, the compositions and systems may further comprise a recombinase. The recombinase is connected to or otherwise capable of forming a complex with the TnpB protein. In certain embodiments, the complex is capable of inserting a recombination site in the DNA loci of interest by extension of RT templates that encode for the recombination site on the 3′ extension of the ωRNA sequences by the reverse transcriptase. In certain embodiments, a donor template comprising a compatible recombination site is provided that can recombine unidirectionally with the inserted recombination site when a recombinase specific for the recombination site is also provided. In certain embodiments, the donor template is a plasmid comprising the complementary recombination site and any sequence for insertion at the DNA loci of interest. In certain embodiments, the recombinase is connected to or capable of forming a complex with the TnpB enzyme, such that all of the enzymatic proteins are brought into contact at the loci of interest. In certain embodiments, the recombinase is codon optimized for eukaryotic cells (described further herein). In certain embodiments, the recombinase includes a NLS (described further herein). In certain embodiments, the recombinase is provided as a separate protein. The separate recombinase may form a dimer and bind to the donor template recombination site. The recombinase may be targeted to the loci of interest as a result of the insertion of the compatible recombination site that is also recognized by the recombinase. Thus, the recombinase may recognize the recombination site inserted at the DNA loci of interest and the recombination site on the donor and be targeted to the DNA loci of interest without any additional modifications to the recombinase.

[0253] In certain embodiments, a second TnpB complex connected to a recombinase is targeted to the DNA loci of interest. In certain embodiments, the second TnpB complex comprises a dead TnpB protein (dTnpB, described further herein), such that the recombinase is targeted to the DNA loci of interest, but the target sequence is not further cleaved. In certain embodiments, the dTnpB targets a sequence generated only after the insertion of the recombination site. In certain embodiments, the recombinase recognizes and binds to the donor template recombination site and the inserted recombination site. In certain embodiments, the recombinase forms a dimer with a recombinase provided as a separate protein.

[0254] As used herein, the term “Recombinase” refers to an enzyme that catalyzes recombination between two or more recombination sites (e.g., an acceptor and donor site). Recombinases useful in the present invention catalyze recombination at specific recombination sites which are specific polynucleotide sequences that are recognized by a particular recombinase. “Uni-directional recombinases” or “integrases” refer to recombinase enzymes whose recognition sites are destroyed after the recombination has taken place. The term “integrase” refers to a type of recombinase. In other words, the sequence recognized by the recombinase is changed into one that is not recognized by the recombinase upon recombination. As a result, once a sequence is subjected to recombination by the uni-directional recombinase, the continued presence of the recombinase cannot reverse the previous recombination event.

[0255] “Recombination sites” are specific polynucleotide sequences that are recognized by the recombinase enzymes described herein. Typically, two different sites are involved (in regards to recombination termed “complementary sites”), one present in the target nucleic acid (e.g., a chromosome or episome of a eukaryote) and another on the nucleic acid that is to be integrated at the target recombination site. The terms “attB” and “attP,” which refer to attachment (or recombination) sites originally from a bacterial target (attachment site of bacteria) and a phage donor (attachment site of phage), respectively, are used herein although recombination sites for particular enzymes may have different names. The two attachment sites can share as little sequence identity as a few base pairs. The recombination sites typically include left and right arms separated by a core or spacer region. Thus, an attB recombination site consists of BOB′, where B and B′ are the left and right arms, respectively, and O is the core region. Similarly, attP is POP′, where P and Pare the arms and O is again the core region. Upon recombination between the attB and attP sites, and concomitant integration of a nucleic acid at the target, the recombination sites that flank the integrated DNA are referred to as “attL” and “aatR.” The attL and attR sites, using the terminology above, thus consist of BOP′ and POB′, respectively. In some representations herein, the “O” is omitted and attB and attP, for example, are designated as BB′ and PP′, respectively.

### TnpB-Associated Transposase Systems

[0256] The systems and compositions herein may comprise a TnpB, one or more nucleic acid components, and one or more components of a transposase. In one example embodiment, the TnpB mediates RNA-guided TnpA-catalyzed transposition. In one-example embodiment, TnpB mediate RNA-guided Tn7-catalyzed transposition.

[0257] In an example embodiment, the transposases may comprise TnpA. The transposase may be a Y1 transposase of the IS200/IS605 family, encoded by the insertion sequence (IS) IS608 from Helicobacter pylori, e.g., TnpAIS608, from Deinococcus radiodurans, e.g. ISDra2, from Halanaerobium hydrogeniformans or from Sulfolobus solfataricus. Examples of the transposases include those described in Barabas, O., Ronning, D. R., Guynet, C., Hickman, A. B., TonHoang, B., Chandler, M. and Dyda, F. (2008) Mechanism of IS200/IS605 family DNA transposases: activation and transposon-directed target site selection. Cell, 132, 208-220; in Sadler et al., Genes 2020, 11, 484, doi: 10.3390/genes11050484, and in He et al., (2013) NAR, 41:5, 3302-3313. In certain example embodiments, the transposase is a single stranded DNA transposase. In certain example embodiments, the single stranded DNA transposase is TnpA or a functional fragment thereof. In an aspect, the TnpA motif used for homing to an insertion site is at least 50%, 75% or 100% complementary to the TAM of the TnpB, such that TnpA catalyzed transposition may occur at or near the TAM portion of the sequence.

[0258] In some examples, the one or more transposases or transposase sub-units are, or are derived from, Tn7 transposases. In a particular embodiment, the Tn7 or TN7-like transposase may be a Tn5053 transposase. For example, the Tn5053 transposases include those described in Minakhina S et al., Tn5053 family transposons are res site hunters sensing plasmidal res sites occupied by cognate resolvases. Mol Microbiol. 1999 September; 33(5):1059-68; and FIG. 4 and related texts in Partridge S R et al., Mobile Genetic Elements Associated with Antimicrobial Resistance, Clin Microbiol Rev. 2018 Aug. 1; 31(4), both of which are incorporated by reference herein in their entirety. In some cases, the one or more Tn5053 transposases may comprise one or more of TniA, TniB, and TniQ. TniA is also known as TnsB. TniB is also known as TnsC. TniQ is also known as TnsD. Accordingly, In one embodiment these Tn5053 transposase subunits may be referred to as TnsB, TnsC, and TnsD, respectively. In certain cases, the one or more transposases may comprise TnsB, TnsC, and TnsD.

[0259] In one embodiment, the transposases may be one or more Vibrio cholerae Tn6677 transposases. In one example, the transposon may include a terminal operon comprising the tnsA, tnsB, and tnsC genes. The transposon may further comprise a tniQ gene. In one embodiment, the TnsE may be absent in the transposon.

[0260] In certain examples, the transposase include one or more of Mu-transposase, TniQ, TniB, or functional domains thereof. In certain examples, the transposase include one or more of TniQ, a TniB, a TnpB, or functional domains thereof. In certain examples, the transposase includes one or more of a rve integrase, TniQ, TniB, or functional domains thereof.

[0261] In one embodiment the system, more particularly the transposase does not include an rve integrase. In one embodiment the system, more particularly the transposase does not include one or more of Mu-transposase, TniQ, a TniB, a TnpB, a IstB domain or functional domains thereof.

[0262] In certain examples, the transposase includes one or more of Mu-transposase, TniQ, TniB, or functional domains thereof. In certain examples, the transposase includes one or more of TniQ, a TniB, a TnpB, or functional domains thereof. In certain examples, the transposase includes one or more of a rve integrase, TniQ, TniB, TnpB domain, or functional domains thereof.

[0263] A right end sequence element or a left end sequence element are made in reference to an example Tn7 transposon. The general structure of the left end (LE) and right end (RE) sequence elements of canonical Tn7 is established. Tn7 ends comprise a series of 22-bp TnsB-binding sites. Flanking the most distal TnsB-binding sites is an 8-bp terminal sequence ending with 5′-TGT-3′/3′-ACA-5′. The right end of Tn7 contains four overlapping TnsB-binding sites in the ˜90-bp right end element. The left end contains three TnsB-binding sites dispersed in the ˜150-bp left end of the element. The number and distribution of TnsB-binding sites can vary among Tn7-like elements. End sequences of Tn7-related elements can be determined by identifying the directly repeated 5-bp target site duplication, the terminal 8-bp sequence, and 22-bp TnsB-binding sites (Peters J E et al., 2017). Example Tn7 elements, including right end sequence element and left end sequence element include those described in Parks A R, Plasmid, 2009 January; 61(1):1-14.

### TnpB Recombinase/Integrase Systems

[0264] The systems and compositions herein may comprise a TnpB system, and one or more components of a recombinase o rintegrase. In an aspect, the TnpB is naturally catalytically inactive and utilized with one or more nucleic acid components to provide site-specific targetings, and the one or more components of the recombinase to introduce a modification. In an aspect, the TnpB polypeptide may be catalytically inactivated via mutation of one or more residues of a catalytic domain (e.g. RuvC) or via truncation, and utilized with one or more nucleic acid components to provide site-specific targeting, and the one or more components of the recombinase introduce a modification. In one embodiment, a naturally inactive TnpB is provided with a recombinase, e.g. an integrase, and optionally a reverse transcriptase. The systems and compositions herein may comprise a TnpB polypeptide, one or more nucleic acid components, and one or more components of an integrase. In an aspect, the TnpB polypeptide is a nickase, and utilized with one or more nucleic acid components to provide site-specific targeting, with the one or more components of the integrase introduce a modification. The systems and compositions may be used to insert a donor polynucleotide to a target polynucleotide. The systems and compositions may further comprise a donor polynucleotide.

[0265] In preferred embodiments, the recombinase mediates unidirectional site-specific recombination. In one embodiment, the recombinase is a serine recombinase (SR) also referred to as a serine integrase, encoded, for example, by IS607 family, Tn4451, and bacteriophage phiC31. See, generally, Smith M C, Thorpe H M: Diversity in the serine recombinases. Mol Microbiol. 2002, 44: 299-307. 10.1046/j.1365-2958.2002.02891.x; Li et al., (2018) J. Mol. Biol. 430:21, 4401-4418.

[0266] In an embodiment, the recombinase is a tyrosine recombinase (YR) encoded by IS91, Helitron, IS200/IS605, Crypton or DIRS-retrotransposon families. See, generally, Goodwin T J, Butler M I, Poulter T: Cryptons: a group of tyrosine-recombinase-encoding DNA transposons from pathogenic fungi. Microbiology. 2003, 149: 3099-3109. Doi:10.1099/mic.0.26529-0; Cappello J, Handelsman K, Lodish H F: Sequence of Dictyostelium DIRS-1: an apparent retrotransposon with inverted terminal repeats and an internal circle junction sequence. Cell. 1985, 43: 105-115. 10.1016/0092-8674(85)90016-9.

[0267] In an aspect, the recombinase provides site-specific integration of a template that can be provided with the composition, e.g. a donor oligonucleotide. Without being bound by theory, the recombinase allows for integration independent of payload size and can coordinate strand exchange and re-ligation across multiple cell types, allowing integration of long stretches of polynucleotides. In an exemplary embodiment, the serine recombinase is PhiC31 and the target is DNA. In an aspect, the phiC31 allows for integration of a target site comprising an attP or pseudoattP recognition site. See, e.g. systembio.com/wp-content/uploads/phiC31_productsheet-1.pdf. In an embodiment utilizing phiC231, a donor oligonucleotide would be provided with an attB at sequence that facilitates attachment at the attP site of the target genome. Similar approaches of designing donor oligonucleotides with sequences complementary to attachment sites for a recombinase can be designed for use with the present invention. See, e.g. Li et al., (2018) J. Mol. Biol. 430:21, 4401-4418.

[0268] In preferred embodiments, the integrase mediates gene integration at diverse loci by directing insertion with an TnpB nickase fused to both a reverse transcriptase and an integrase. In one embodiment, the integrase is a serine integrase, encoded, for example, BxbINT. See, generally, Ioannidi et al., “Drag-and-drop genome insertion without DNA cleavage with CRISPR-directed integrases”; doi:10.1101/2021.11.01.466786m incorporated herein by reference in its entirety. In Ioannidi, Gootenberg, Abudayyeh, and colleagues show integration using a CRISPR-Cas9 nickase fused to a reverse transcriptase and serine integrase termed Programmable Addition via Site-specific Targeting Elements (PASTE) with delivery via a single dose of plasmids with functionality in non-dividing and primary cells, utilizing a guide RNA comprising an AttB landing site, termed attachment site-containing guide RNA were used to insert sequences, including diverse cargo sequences that can be inserted across different loci, varying in size up to about 36 kb. Additional uses of the PASTE system included gene tagging, gene replacement, gene delivery, and protein production and secretion, approaches that are contemplated for use with the TnpB nickase and integrase approach. In an aspect, the omega RNA may comprise an AttB landing site. In an aspect, the recombinase provides site-specific integration of a template that can be provided with the composition, e.g. a donor oligonucleotide.

[0269] Additional large serine integrases can be used with the TnpB polypeptide, for example, as identified and described in Durrant et al., Large-scale discovery of recombinases for integrating DNA into the human genome, doi:10.1101/2021.11.05.467528, incorporated herein by reference. Other integrases include BceINT, SscINT, SacINT. See, Ioannidi, 2021 at and FIG. 6d, and FIG. 10a.

[0270] Without being bound by theory, the recombinase allows for integration independent of payload size and can coordinate strand exchange and re-ligation across multiple cell types, allowing integration of long stretches of polynucleotides. In an exemplary embodiment, the integrase is BxbINT and the target is DNA. In an aspect, the BxbINT allows for integration of a target site comprising an attP or pseudoattP recognition site. In an embodiment utilizing BxbINT, a donor oligonucleotide would be provided with an attB at sequence that facilitates attachment at the attP site of the target genome. Similar approaches of designing donor oligonucleotides with sequences complementary to attachment sites for an integrase can be designed for use with the present invention, for example a circular double-strand DNA template containing the AttP attachment site, or delivery of large cargo via an adenovirus or other viral vector, as described elsewhere herein. See, e.g. Ioannidi et al., 2021 at FIGS. 1a, 1b and 5b.

### TnpB Topoisomerase Systems

[0271] The one or more functional domains may be one or more topoisomerase domains. Topoisomerases are a class of enzymes that modify the topological state of DNA via the breakage and rejoining of nucleic acid strands. In some cases, a topoisomerase may be a DNA topoisomerase, which is an enzyme that controls and alters the topologic states of DNA during transcription, and catalyzes the transient breaking and rejoining of a single strand of DNA which allows the strands to pass through one another, thus altering the topology of DNA.

[0272] In one embodiment, the topoisomerase domain is capable of ligating the donor polynucleotide with the target polynucleotide. The ligation may be achieved by sticky end or blunt end ligation. In an example, a donor polynucleotide may comprise a overhang comprising a sequence complementary to a region of the target polynucleotide. Examples of ligating the donor polynucleotide with the target polynucleotide include those of TOPO cloning, e.g., those described in “The Technology Behind TOPO Cloning,” at www.thermofisher.com/us/en/home/life-science/cloning/topo/topo-resources/the-technology-behind-topo-cloning.html.

[0273] In one embodiment, the topoisomerase domain may be associated with a donor polynucleotide. For example, the topoisomerase domain is covalently linked to a donor polynucleotide. In one embodiment, a topoisomerase domain may be provided together with, e.g., associated (e.g., fused) with a TnpB or a variant thereof.

[0274] Alternatively or additionally, the topoisomerase domain may be on a molecule different from TnpB polypeptide. In some cases, the topoisomerase domain may be associated with a donor polynucleotide. For example, the topoisomerase domain may be pre-loaded covalently with a donor DNA molecule. Such deign may allow for efficient ligation of only a specific cargo. The topoisomerase domain may ligate the donor polynucleotide (e.g., a DNA molecule) to a target site on a target polynucleotide (e.g., a free double-stranded DNA end). In one embodiment, the donor polynucleotide may have an overhang that comprises a sequence complementary to a region of the target polynucleotide. For example, the overhang may invade into the target polynucleotide at a cut site generated by the tnpB polypeptide.

[0275] Examples of topoisomerases include type I, including type IA and type IB topoisomerases, which cleave a single strand of a double-stranded nucleic acid molecule, and type II topoisomerases (e.g., gyrases), which cleave both strands of a double-stranded nucleic acid molecule.

[0276] Type IA and IB topoisomerases cleave one strand of a double-stranded nucleic acid molecule. In some examples, the cleavage of a double-stranded nucleic acid molecule by type IA topoisomerases generates a 5′ phosphate and a 3′ hydroxyl at the cleavage site, with the type IA topoisomerase covalently binding to the 5′ terminus of a cleaved strand. Cleavage of a double-stranded nucleic acid molecule by type IB topoisomerases may generate a 3′ phosphate and a 5′ hydroxyl at the cleavage site, with the type IB topoisomerase covalently binding to the 3′ terminus of a cleaved strand.

[0277] Examples of Type IA topoisomerases include E. coli topoisomerase I, E. coli topoisomerase III, eukaryotic topoisomerase II, archeal reverse gyrase, yeast topoisomerase III, Drosophila topoisomerase III, human topoisomerase III, Streptococcus pneumoniae topoisomerase III, and the like, including other type IA topoisomerases. A DNA-protein adduct is formed with the enzyme covalently binding to the 5′-thymidine residue, with cleavage occurring between the two thymidine residues.

[0278] Examples of Type IB topoisomerases include the nuclear type I topoisomerases present in all eukaryotic cells and those encoded by Vaccinia and other cellular poxviruses. The eukaryotic type IB topoisomerases are exemplified by those expressed in yeast, Drosophila and mammalian cells, including human cells. Viral type IB topoisomerases are exemplified by those produced by the vertebrate poxviruses (Vaccinia, Shope fibroma virus, ORF virus, fowlpox virus, and molluscum contagiosum virus), and the insect poxvirus (Amsacta moorei entomopoxvirus).

[0279] Examples of Type II topoisomerases include, bacterial gyrase, bacterial DNA topoisomerase IV, eukaryotic DNA topoisomerase II, and T-even phage encoded DNA topoisomerases. Type II topoisomerases may have both cleaving and ligating activities. Substrate double-stranded nucleic acid molecules of type II topoisomerase can be prepared such that the type II topoisomerase can form a covalent linkage to one strand at a cleavage site. For example, calf thymus type II topoisomerase can cleave a substrate ds nucleic acid molecule containing a 5′ recessed topoisomerase recognition site positioned three nucleotides from the 5′ end, resulting in dissociation of the three nucleic acid molecule 5′ to the cleavage site and covalent binding of the topoisomerase to the 5′ terminus of the ds nucleic acid molecule. Furthermore, upon contacting such a type II topoisomerase-charged ds nucleic acid molecule with a second nucleic acid molecule containing a 3′ hydroxyl group, the type II topoisomerase can ligate the sequences together, and then is released from the recombinant nucleic acid molecule.

[0280] Structural analysis of topoisomerases indicates that the members of each particular topoisomerase families, including type IA, type IB and type II topoisomerases, share common structural features with other members of the family. In addition, sequence analysis of various type IB topoisomerases indicates that the structures are highly conserved, particularly in the catalytic domain. For example, a domain comprising amino acids 81 to 314 of the 314 amino acid Vaccinia topoisomerase shares substantial homology with other type IB topoisomerases, and the isolated domain has essentially the same activity as the full length topoisomerase, although the isolated domain has a slower turnover rate and lower binding affinity to the recognition site. In addition, a mutant Vaccinia topoisomerase, which is mutated in the amino terminal domain (e.g., at amino acid residues 70 and 72) may display identical properties as the full length topoisomerase. Mutation analysis of Vaccinia type IB topoisomerase reveals a large number of amino acid residues that can be mutated without affecting the activity of the topoisomerase, and has identified several amino acids that are required for activity. In view of the high homology shared among the Vaccinia topoisomerase catalytic domain and the other type IB topoisomerases, and the detailed mutation analysis of Vaccinia topoisomerase, it will be recognized that isolated catalytic domains of the type IB topoisomerases and type IB topoisomerases having various amino acid mutations can be used in the methods of the invention and thus are considered to be topoisomerases for purposes of the present invention.

[0281] The various topoisomerases exhibit a range of sequence specificity. For example, type II topoisomerases can bind to a variety of sequences, but cleave at a highly specific recognition site. The type IB topoisomerases may include site specific topoisomerases, which bind to and cleave a specific nucleotide sequence (“topoisomerase recognition site”). Upon cleavage of a double-stranded nucleic acid molecule by a topoisomerase, for example, a type IB topoisomerase, the energy of the phosphodiester bond is conserved via the formation of a phosphotyrosyl linkage between a specific tyrosine residue in the topoisomerase and the 3′ nucleotide of the topoisomerase recognition site. Where the topoisomerase cleavage site is near the 3′ terminus of the nucleic acid molecule, the downstream sequence (3′ to the cleavage site) can dissociate, leaving a nucleic acid molecule having the topoisomerase covalently bound to the newly generated 3′ end.

[0282] The covalently bound topoisomerase also can catalyze the reverse reaction, for example, covalent linkage of the 3′ nucleotide of the recognition sequence, to which a type IB topoisomerase is linked through the phosphotyrosyl bond, and a nucleic acid molecule containing a free 5′ hydroxyl group. As such, methods have been developed for using a type IB topoisomerase to produce recombinant nucleic acid molecules. Nucleic acid molecules such as those comprising a cDNA library, or restriction fragments, or sheared genomic DNA sequences that are to be cloned into such a vector are treated, for example, with a phosphatase to produce 5′ hydroxyl termini, then are added to the linearized vector under conditions that allow the topoisomerase to ligate the nucleic acid molecules at the 5′ terminus containing the hydroxyl group and the 3′ terminus containing the covalently bound topoisomerase.

[0283] Examples of vaccinia viruses encode a 314 amino acid type I topoisomerase enzyme capable of site-specific single-strand nicking of double stranded DNA, as well as 5′ hydroxyl driven re-ligation. Site-specific type I topoisomerases include, but are not limited to, viral topoisomerases such as pox virus topoisomerase. Examples of pox virus topoisomerases include Shope fibroma virus and ORF virus. Other site-specific topoisomerases are well known to those skilled in the art and can be used to practice this invention.

[0284] Examples of vaccinia topoisomerase binds to duplex DNA and cleaves the phosphodiester backbone of one strand while exhibiting a high level of sequence specificity. Cleavage may occur at a consensus pentapyrimidine element 5′-(C/T)CCTT↓, or related sequences in the scissile strand. In one embodiment the scissile bond is situated in the range of 2 to 12 bp from the 3′ end of the duplex DNA. In another embodiment cleavable complex formation by Vaccinia topoisomerase requires six duplex nucleotides upstream and two nucleotides downstream of the cleavage site.

[0285] In some examples, the topoisomerase is DNA topoisomerase I, e.g., a Vaccinia virus topoisomerase I. The topoisomerase may be pre-loaded with a donor polynucleotide. The Vaccinia virus topoisomerase may need a target comprising a 5′ —OH group.

### TnpB Guided Excision-Transposition Systems

[0286] Embodiments disclosed herein provide an engineered or non-natural guided excision-transposition system. The engineered or non-natural guided excision-transposition system may comprise one or more components of a ωRNA-TnpB system, e.g. an ωRNA scaffold and spacer and/or TnpB polypeptide, and one or more components of a Class II transposon. The components of the ωRNA-TnpB system can direct the Class II transposon component(s) to retrotransposon to a target nucleic acid sequence and direct its transposition into a recipient polynucleotide.

[0287] For example, the engineered or non-natural guided excision-transposition systems that can include (a) a first TnpB protein; (b) a first Class II transposon polypeptide coupled to or otherwise capable of complexing with the first TnpB protein; (c) a first guide molecule capable of forming a first ωRNA-TnpB complex with the first TnpB protein and directing site-specific binding to a first target sequence of a first target polynucleotide; (d) a second TnpB protein; (e) a second Class II transposon polypeptide coupled to or otherwise capable of complexing with the second TnpB protein; (f) a second guide molecule capable of forming a second ωRNA-TnpB complex with the first TnpB protein and directing site-specific binding to a second target sequence of the first target polynucleotide; and (g) a Class II transposon polynucleotide comprising the first target polynucleotide and is capable of forming a complex with the first and second TnpB protein, the first and second guide molecules, and the first and second Class II transposon polypeptides.

[0288] In some embodiments, the engineered or non-natural guided excision-transposition system can include (h) a third guide molecule capable of complexing with the first TnpB protein and directing site-specific binding to a first target sequence of a second target polynucleotide, wherein the third guide molecule is optionally coupled to the first TnpB protein; (i) optionally, a first guide molecule polynucleotide that encodes the third guide molecule; (j) a fourth guide molecule capable of complexing with the second TnpB protein and directing site-specific binding to a second target sequence of the second target polynucleotide, wherein the fourth guide molecule is optionally coupled to the second TnpB protein; and (k) optionally, a second guide molecule polynucleotide that encodes the fourth guide molecule.

[0289] In some embodiments, the first and the second Class II transposon polypeptides are capable of excising the first target polynucleotide from the Class II transposon polynucleotide. In some embodiments, the first and the second Class II transposon polypeptides are capable of transposing the first target polynucleotide in the second target polynucleotide. In some embodiments, the first target polynucleotide does not include one or more Class II transposon long terminal repeats.

[0290] The engineered or non-natural guided excision-transposition systems described herein can be based on a Class II transposon or Class II transposon system. The engineered or non-natural guided excision-transposition system may include a first target polynucleotide, also referred to as a donor polynucleotide or transposon and a second target polynucleotide, which is also referred to herein as a recipient polynucleotide. As used herein, “transposon” (also referred to as transposable element) refers to a polynucleotide sequence that is capable of moving form location in a genome to another. There are several classes of transposons. Transposons include retrotransposons (Class I transposons) and DNA transposons (Class II transposons). In some cases, retrotransposons require the transcription of the polynucleotide that is moved (or transposed) in order to transpose the polynucleotide to a new genome or polynucleotide. DNA transposons are those that do not require reverse transcription of the polynucleotide that is moved (or transposed) in order to transpose the polynucleotide to a new genome or polynucleotide.

[0291] Any suitable transposon system can be used. Suitable transposon and systems thereof can include, but are not limited, to Sleeping Beauty transposon system (Tc1/mariner superfamily) (see e.g. Ivics et al. 1997. Cell. 91(4): 501-510), piggyBac (piggyBac superfamily) (see e.g. Li et al. 2013 110(25): E2279-E2287 and Yusa et al. 2011. PNAS. 108(4): 1531-1536), Tol2 (superfamily hAT), Frog Prince (Tc1/mariner superfamily) (see e.g. Miskey et al. 2003 Nucleic Acid Res. 31(23):6873-6881) and variants thereof.

[0292] In some embodiments, the first and/or second Class II transposon polypeptide is a DD[E/D] transposon or transposon polypeptide. In some embodiments, the first and/or the second Class II transposon polynucleotide is a Tc1/mariner, PiggyBac, Frog Prince, Tn3, Tn5, hAT, CACTA, P, Mutator, PIF/Harbinger, Transib, or a Merlin/IS1016 transposon polynucleotide. In some embodiments, the first and/or second Class II transposon polypeptide is a Tc1/mariner, PiggyBac, Frog Prince, Tn3, Tn5, hAT, CACTA, P, Mutator, PIF/Harbinger, Transib, or a Merlin/IS1016 transposon polypeptide.

[0293] Suitable Class II transposon systems and components that can be utilized can also be and are not limited to those described in e.g. and without limitation, Han et al., 2013. BMC Genomics. 14:71, doi: 10.1186/1471-2164-14-71, Lopez and Garcia-Perez. 2010. Curr. Genomics. 11(2):115-128; Wessler. 2006. PNAS. 103(47): 176000-17601; Gao et al., 2017. Marine Genomics. 34:67-77; Bradic et al. 2014. Mobile DNA. 5(12) doi:10.1186/1759-8753-5-12; Li et al., 2013. PNAS. 110(25)E2279-E2287; Kebriaei et al. 2017. Trends in Genetics. 33(11): 852-870); Miskey et al. 2003. Nucleic Acid res. 31(23):6873-6881; Nicolas et al. 2015. Microbiol Spectr. 3(4) doi: 10.1128/microbiolspec.MDNA3-0060-2014); W. S. Reznikoff. 1993. Annu Rev. Microbiol. 47:945-963; Rubin et al. 2001. Genetics. 158(3): 949-957; Wicker et al. 2003. Plant Physiol. 132(1): 52-63; Majumdar and Rio. 2015. Microbiol. Spectr. 3(2) doi: 10.1128/microbiolspec.MDNA3-0004-2014; D. Lisch. 2002. Trends in Plant Sci. 7(11): 498-504; Sinzelle et al. 2007. PNAS. 105(12): 4715-4720; Han et al. 2014; Genome Biol. Evol. 6(7):1748-1757; Grzebelus et al. 2006; Mol. Genet. Genomics. 275(5):450-459; Zhang et al. 2004. Genetics. 166(2):971-986; Chen and Li. 2008. Gene. 408(1-2):51-63; and C. Feschotte. 2004. Mol. Biol. Evol. 21(9):1769-1780.

### TnpB Retrotransposon Systems

[0294] The systems and compositions herein may comprise a TnpB, one or more nucleic acid components, and one or more components of a retrotransposon, e.g., a non-LTR retrotransposon. The one or more components of a retrotransposon include a retrotransposon protein and retrotransposon RNA. The systems and compositions may be used to insert a donor polynucleotide to a target polynucleotide. The systems and compositions may further comprise a donor polynucleotide.

[0295] In some examples, the present disclosure provides an engineered, non-naturally occurring composition comprising: a TnpB polypeptide, a non-LTR retrotransposon protein associated with or otherwise capable of forming a complex with the TnpB polypeptide; a single nucleic acid component capable of forming a complex with the TnpB polypeptide and directing site-specific binding to a target sequence of a target polynucleotide. The composition may further comprise a donor construct comprising a donor polynucleotide for insertion to the target polynucleotide and located between two binding elements capable of forming a complex with the non-LTR retrotransposon protein. In some cases, the TnpB polypeptide is engineered to have nickase activity.

[0296] In some examples, the TnpB polypeptide is fused to the N-terminus of the non-LTR retrotransposon protein. In some examples, the TnpB polypeptide is fused to the C-terminus of the non-LTR retrotransposon protein.

[0297] The nucleic acid component molecule s may direct the fusion protein to a target sequence 5′ of the targeted insertion site, and wherein the TnpB polypeptide generates a double-strand break at the targeted insertion site. The nucleic acid component molecule s may direct the fusion protein to a target sequence 3′ of the targeted insertion site, and wherein the TnpB polypeptide generates a double-strand break at the targeted insertion site.

[0298] The donor polynucleotide may further comprise a polymerase processing element to facilitate 3′ end processing of the donor polynucleotide sequence. The polymerase may be a DNA polymerase, e.g., DNA polymerase I. In some examples, the polymerase may be an RNA polymerase.

[0299] In some examples, the donor polynucleotide further comprises a homology region to the target sequence on the 5′ end of the donor construct, the 3′ end of the donor construct, or both. In some examples, the homology region is from 1 to 50, from 5 to 30, from 8 to 25, e.g., 1, 2, 3, 4, 5, 6, 7, 8, 9, 10, 11, 12, 13, 14, 15, 16, 17, 18, 19, 20, 21, 22, 23, 24, 25, 26, 27, 28, 29, 30, 31, 32, 33, 34, 35, 36, 37, 38, 39, 40, 41, 42, 43, 44, 45, 46, 47, 48, 49, or 50 base pairs in length.

[0300] Native or wild-type non-LTR retrotransposons encode the protein machinery necessary for their self-mobilization. The non-LTR retrotransposon element comprises a DNA element integrated into a host genome. This DNA element may encode one or two open reading frames (ORFs). For example, the R2 element of Bombyx mori encodes a single ORF containing reverse transcriptase (RT) activity and a restriction enzyme-like (REL) domain. L1 elements encode two ORFs, ORF1 and ORF2. ORF1 contains a leucine zipper domain involved in protein-protein interactions and a C-terminal nucleic acid binding domain. ORF2 has a N-terminal apurinic/apyrimidinic endonuclease (APE), a central RT domain, and a C-terminal cysteine histidine rich domain. An example replicative cycle of a non-LTR retrotransposon may comprise transcription of the full-length retrotransposon element to generate an mRNA active element (retrotransposon RNA). The active element mRNA is translated to generate the encoded retrotransposon proteins or polypeptides. A ribonucleoprotein complex comprising the active element and retrotransposon protein or polypeptide is formed and this RNP facilitates integration of the active element into the genome. The RNA-transposase complex nicks the genome. The 3′ end of the nicked DNA serves as a primer to allow the reverse transcription of the transposon RNA into cDNA. Fourth, the transposase proteins integrate the cDNA into the genome.

[0301] Elements of these systems may be engineered to work within the context of the invention. For example, a non-LTR retrotransposon polypeptide may be fused to a site-specific nuclease. The binding elements that allow a non-LTR retrotransposon polypeptide to bind to the native retrotransposon DNA element, may be engineered into a donor construct to facilitate entry of a donor polynucleotide sequence into a target polypeptide.

[0302] In the present invention, the protein component of the non-LTR retrotransposon may be connected to or otherwise engineered to form a complex with a site-specific nuclease, e.g. TnpB polypeptide. The retrotransposon RNA may be engineered to encode a donor polynucleotide sequence. Thus, in certain example embodiments, the TnpB polypeptide, via formation of a TnpB polypeptide complex with a nucleic acid component molecule sequence, directs the retrotransposon complex (e.g. the retrotransposon polypeptide(s) and retrotransposon RNA to a target sequence in a target polynucleotide, where the retrotransposon RNP complex facilitates integration of the donor polynucleotide sequence into the target polynucleotide. Accordingly, the one or more non-LTR retrotransposon components may comprise retrotransposon polypeptides, or function domains thereof, that facilitate binding of the retrotransposon RNA, reverse transcription of the retrotransposon RNA into cDNA, and/or integration of the donor polynucleotide into the target polynucleotide, as well as retrotransposon RNA elements modified to encode the donor polynucleotide sequence.

[0303] Examples non-LTR retrotransposons include CRE, R2, R4, L1, RTE, Tad, R1, LOA, I, Jockey, CR1. In one example, the non-LTR retrotransposon is R2. In another example, the non-LTR retrotransposon is L1. Examples of non-LTR retrotransposons may include those described in Christensen S M et al., RNA from the 5′ end of the R2 retrotransposon controls R2 protein binding to and cleavage of its DNA target site, Proc Natl Acad Sci USA. 2006 Nov. 21; 103(47):17602-7; Eickbush T H et al, Integration, Regulation, and Long-Term Stability of R2 Retrotransposons, Microbiol Spectr. 2015 April; 3(2):MDNA3-0011-2014. doi: 10.1128/microbiolspec.MDNA3-0011-2014; Han J S, Non-long terminal repeat (non-LTR) retrotransposons: mechanisms, recent developments, and unanswered questions, Mob DNA. 2010 May 12; 1(1):15. doi: 10.1186/1759-8753-1-15; Malik H S et al., The age and evolution of non-LTR retrotransposable elements, Mol Biol Evol. 1999 June; 16(6):793-805, which are incorporated by reference herein in their entireties.

[0304] Examples of the non-LTR retrotransposon polypeptides also include R2 from Clonorchis sinensis, or Zonotrichia albicollis.

[0305] A non-LTR retrotransposon may comprise multiple retrotransposon polypeptides or polynucleotides encoding same. In one embodiment, the retrotransposon polypeptides may form a complex. For example, a non-LTR retrotransposon is a dimer, e.g., comprising two retrotransposon polypeptides forming a dimer. The dimer subunits may be connected or form a tandem fusion. A TnpB polypeptide may be associate with (e.g., connected to) one or more subunits of such complex. In some examples, the non-LTR retrotransposon is a dimer of two retrotransposon polypeptides; one of the retrotransposon polypeptides comprises nuclease or nickase activity and is connected with a TnpB polypeptide.

[0306] The retrotransposon polypeptides may comprise one or more modifications to, for example, enhance specificity or efficiency of donor polynucleotide recognition, target-primed template recognition (TPTR). The retrotransposon polypeptides may also comprise one or more truncations or excisions to remove domains or regions of wild-type protein to arrive at a minimal polypeptide that retain donor polynucleotide recognition and TPTR. In some example embodiments, the native endonuclease activity may be mutated to eliminate endonuclease activity.

[0307] In certain example embodiments, the modifications or truncations of the non-LTR retrotransposon peptide may be in a zinc finger region, a Myb region, a basic region, a reverse transcriptase domain, a cysteine-histidine rich motif, or an endonuclease domain.

[0308] A non-LTR retrotransposon may comprise polynucleotide encoding one or more retrotransposon RNA molecules. The polynucleotide may comprise one or more regulatory elements. The regulatory elements may be promoters. The regulatory elements and promoters on the polynucleotides include those described throughout this application. For example, the polynucleotide may comprise a pol2 promoter, a pol3 promoter, or a T7 promoter.

[0309] In some cases, the polynucleotide encodes a retrotransposon RNA with at least a portion of its sequence complementary to a target sequence. For example, the 3′ end of the retrotransposon RNA may be complementary to a target sequence. The RNA may be complementary to a portion of a nicked target sequence. In one embodiment, a retrotransposon RNA may comprise one or more donor polynucleotides. In certain cases, a retrotransposon RNA may encode one or more donor polynucleotides.

[0310] A retrotransposon RNA may be capable of binding to a retrotransposon polypeptide. Such retrotransposon RNA may comprise one or more elements for binding to the retrotransposon polypeptide. Examples of binding elements include hairpin structures, pseudoknots (e.g., a nucleic acid secondary structure containing at least two stem-loop structures in which half of one stem is intercalated between the two halves of another stem), stem loops, and bulges (e.g., unpaired stretches of nucleotides located within one strand of a nucleic acid duplex). In certain examples, the retrotransposon RNA comprises one or more hairpin structures. In some examples, the retrotransposon RNA comprises one or more pseudoknots. In certain examples, a retrotransposon RNA comprises a sequence encoding a donor polynucleotide and one or more binding elements for forming a complex with the retrotransposon polypeptide. The binding elements may be located on the 5′ end or the 3′ end.

[0311] In one embodiment, a retrotransposon RNA comprises a region capable of hybridizing with an overhang of a target polynucleotide at the target site. The overhang may be a stretch of single-stranded DNA. The overhang may function as a primer for reverse transcription of at least a portion of the retrotransposon RNA to a cDNA. In some cases, a region of the cDNA may be capable of hybridizing a second overhang of the target polynucleotide. The second overhang may function as a primer for the synthesis of a second strand to generate a double-stranded cDNA. The cDNA may comprise a donor polynucleotide sequence. The two overhangs may be from different strands of the target polynucleotide.

### Reverse Transcriptase Domain

[0312] The one or more functional domains may be one or more reverse transcriptase domains. In some embodiments, the systems comprise an engineered system for modifying a target polynucleotide comprising: a TnpB protein or a variant thereof (e.g., dTnpB); a reverse transcriptase (RT) domain; a RNA template comprising or encoding a donor polynucleotide to be inserted to a target sequence of the target polynucleotide; and an ωRNA molecule (i.e., a naturally single guide RNA molecule comprising a scaffold for reprogramming).

[0313] The reverse transcriptase may generate single-strand DNA based on the RNA template. The single-strand DNA may be generated by a non-retron, retron, or diversity generating retroelement (DGR). In some examples, the single-strand DNA may be generated from a self-priming RNA template. A self-priming RNA template may be used to generate a DNA without the need of a separate primer.

[0314] A reverse transcriptase domain may be a reverse transcriptase or a fragment thereof. A wide variety of reverse transcriptases (RT) may be used in alternative embodiments of the present invention, including prokaryotic and eukaryotic RT, provided that the RT functions within the host to generate a donor polynucleotide sequence from the RNA template. If desired, the nucleotide sequence of a native RT may be modified, for example using known codon optimization techniques, so that expression within the desired host is optimized. A reverse transcriptase (RT) is an enzyme used to generate complementary DNA (cDNA) from an RNA template, a process termed reverse transcription. Reverse transcriptases are used by retroviruses to replicate their genomes, by retrotransposon mobile genetic elements to proliferate within the host genome, by eukaryotic cells to extend the telomeres at the ends of their linear chromosomes, and by some non-retroviruses such as the hepatitis B virus, a member of the Hepadnaviridae, which are dsDNA-RT viruses. Retroviral RT has three sequential biochemical activities: RNA-dependent DNA polymerase activity, ribonuclease H, and DNA-dependent DNA polymerase activity. Collectively, these activities enable the enzyme to convert single-stranded RNA into double-stranded cDNA. In certain embodiments, the RT domain of a reverse transcriptase is used in the present invention. The domain may include only the RNA-dependent DNA polymerase activity. In some examples, the RT domain is non-mutagenic, i.e., does not cause mutation in the donor polynucleotide (e.g., during the reverse transcriptase process). In some examples, the RT domain may be non-retron RT, e.g., a viral RT or a human endogenous RT. In some examples, the RT domain may be retron RT or DGRs RT. In some examples, the RT may be less mutagenic than a counterpart wildtype RT. In some embodiments, the RT herein is not mutagenic.

### Retrons

[0315] In certain embodiments, a donor template for homologous recombination is generated by use of a self-priming RNA template for reverse transcription. A non-limiting example of a self-priming reverse transcription system is the retron system. By the term “retron” it is meant a genetic element which encodes components enabling the synthesis of branched RNA-linked single stranded DNA (msDNA) and a reverse transcriptase. Retrons which encode msDNA are known in the art, for example, but not limited to U.S. Pat. Nos. 6,017,737; 5,849,563; 5,780,269; 5,436,141; 5,405,775; 5,320,958; CA 2,075,515; all of which are herein incorporated by reference.

[0316] In certain embodiments, the reverse transcriptase domain is a retron RT domain. In certain embodiments, the RNA template encodes a retron RNA template that is recognized and reverse transcribed by the retron reverse transcriptase domain. Conserved across many bacterial species, retrons are highly efficient reverse transcription systems of relatively unknown function. The retron system consists of the retron RT protein, as well as the msr and msd transcripts, which function as the primer and template sequences, respectively. All components of the retron system are expressed from a single open reading frame as a single transcript including the msr-msd and encoding the retron RT protein (Lampson, et al., 2005, Retrons, msDNA, and the bacterial genome. Cytogenet Genome Res 110:491-499). The msr element ORF of a retron provides for the RNA portion of the msDNA molecule, while the msd element ORF provides for the DNA portion of the msDNA molecule. The primary transcript from the msr-msd region is thought to serve as both a template and a primer to produce the msDNA. Synthesis of msDNA is primed from an internal rG residue of the RNA transcript using its 2′-OH group. Modification of msd, or msr may also be made to permit insertion of a RNA template encoding a donor polynucleotide within the msd without altering the functioning of or the production of msDNA. The RNA template encoding a donor polynucleotide sequence may be any length but is preferably less than about 5 kb nucleotides, or also less than about 2 kb, or also less than 500 bases, provided that an msDNA product is produced.

### TnpB Diversity Generating Retroelement Systems

[0317] In certain embodiments, the one or more functional domains may be a diversity generating retroelement(s) (e.g., DGR described in US20100041033A1). In some embodiments, the DGR may insert a donor polynucleotide with its homing mechanism. For example, the DGR may be associated with a catalytically inactive TnpB protein (e.g., a dead TnpB), and integrate the single-strand DNA using a homing mechanism. In some examples, the DGR may be less mutagenic than a counterpart wild type DGR. In some examples, the DGR is not error-prone. In some embodiments, the DGR herein is not mutagenic. The non-mutagenic DGR may be a mutant of a wild type DGR. As used herein, the term “DGR” encompasses both diversity generating retroelement polynucleotides and proteins encoded by diversity generating retroelement polynucleotides. In some examples, DGR may be proteins encoded by diversity generating retroelement polynucleotides having reverse transcriptase activity. In some examples, DGR may be proteins encoded by diversity generating retroelement polynucleotides having reverse transcriptase activity and integrase activity. In some cases, the template or donor polynucleotide may be encoded by a diversity generating retroelement polynucleotide. In certain cases, the template may be a polynucleotide different from the diversity generating retroelement polynucleotide, e.g., provided as a separate construct or molecule.

[0318] In some embodiments, the DGR herein may also include a Group II intron (and any proteins and polynucleotides encoded), which are mobile ribozymes that self-splice from precursor RNAs to yield excised intron lariat RNAs, which then invade new genomic DNA sites by reverse splicing. Examples of Group II intron include those described in Lambowitz A M et al., Group II Introns: Mobile Ribozymes that Invade DNA, Cold Spring Harb Perspect Biol. 2011 August; 3(8): a003616.

[0319] In some embodiments, the diversity-generating retroelements (DGRs) are genetic elements that can produce targeted, massive variations in the genomes that carry these elements. In some embodiments, the DGR systems rely on error-prone reverse transcriptases to produce mutagenized cDNA (containing A-to-N mutations) from a template region (TR), to replace a segment called a variable region (VR) that is similar to the TR region—this process is called mutagenic retrohoming (see, e.g., Sharifi and Ye, MyDGR: a server for identification and characterization of diversity-generating retroelements. Nucleic Acids Res. 2019 Jul. 2; 47(W1): W289-W294). DGRs may include a unique family of retroelements that generate sequence diversity of DNA. They exist widely in bacteria, archaea, phage and plasmid, and benefit their hosts by introducing variations and accelerating the evolution of target proteins (see, e.g., Yan et al., Discovery and characterization of the evolution, variation and functions of diversity-generating retroelements using thousands of genomes and metagenomes. BMC Genomics. 2019; 20: 595). The first DGR was discovered in a Bordetella phage, BPP-1. Bordetella causes the respiratory infection in humans and many other mammals, controlled by the BvgAS signal transduction system. The surface of Bordetella is highly variable owing to the dynamic gene expression in the infectious cycle. The invasion of BPP-1 to Bordetella relies on the phage tail fiber protein Mtd. With the process of mutagenic reverse transcription and cDNA integration, DGR may introduce multiple nucleotide substitutions to Mtd gene and generates different receptor-binding molecules, thus making BPP-1 the ability to invade Bordetella with diverse cell surfaces.

[0320] The systems may be used to generate an ssDNA donor using a retron- or DGR RT, which is then integrated by homologous recombination upon target cleavage or nicking using a TnpB polypeptide. In some embodiments, the systems may comprise DGRs and/or Group-II intron reverse transcriptases. The homing mechanism of DGRs or Group-II introns may be used in modifying a target polynucleotide. The DGRs or Group-II introns reverse transcriptase may be guided to a target polynucleotide by tethering to a nuclease-dead TnpB polypeptide, TALE, or ZF protein. In another embodiment, a non-retron/DGR reverse transcriptase (e.g. a viral RT) may be used for generating cDNA off of a self-priming RNA. In some embodiments, a ssDNA may be generated by an RT, but integrate it using a dead TnpB enzyme, creating an accessible R-loop instead of nicking/cleaving.

### TnpB Topoisomerase Systems

[0321] The one or more functional domains may be one or more topoisomerase domains. In some embodiments, an engineered system for modifying a target polynucleotide comprising: a TnpB protein; a topoisomerase domain; and a nucleic acid template comprising or encoding a donor polynucleotide to be inserted to a target sequence of the target polynucleotide. In some examples, two or more of: the TnpB protein; topoisomerase domain; and nucleic acid template may form a complex. In some examples, two or more of: the TnpB protein; topoisomerase domain, may be comprised in a fusion protein.

[0322] Topoisomerases are a class of enzymes that modify the topological state of DNA via the breakage and rejoining of nucleic acid strands. In some cases, a topoisomerase may be a DNA topoisomerase, which is an enzyme that controls and alters the topologic states of DNA during transcription, and catalyzes the transient breaking and rejoining of a single strand of DNA which allows the strands to pass through one another, thus altering the topology of DNA.

[0323] In some embodiments, the topoisomerase domain is capable of ligating the donor polynucleotide with the target polynucleotide. The ligation may be achieved by sticky end or blunt end ligation. In an example, the donor polynucleotide may comprise an overhang comprising a sequence complementary to a region of the target polynucleotide. Examples of ligating the donor polynucleotide with the target polynucleotide include those of TOPO cloning, e.g., those described in “The Technology Behind TOPO Cloning,” at www.thermofisher.com/us/en/home/life-science/cloning/topo/topo-resources/the-technology-behind-topo-cloning.html.

[0324] In some embodiments, the topoisomerase domain may be associated with the donor polynucleotide. For example, the topoisomerase domain is covalently linked to the donor polynucleotide.

[0325] In some embodiments, a topoisomerase domain may be provided together with, e.g., associated (e.g., fused) with a TnpB protein (e.g., a TnpB protein or a variant thereof such as a dead TnpB or a TnpB nickase). Alternatively or additionally, the topoisomerase domain may be on a molecule different from the TnpB protein. In some cases, the topoisomerase domain may be associated with a donor polynucleotide. For example, the topoisomerase domain may be pre-loaded covalently with a donor DNA molecule. Such design may allow for efficient ligation of only a specific cargo. The topoisomerase domain may ligate the donor polynucleotide (e.g., a DNA molecule) to a target site on a target polynucleotide (e.g., a free double-stranded DNA end). In some embodiments, the donor polynucleotide may have an overhang that comprises a sequence complementary to a region of the target polynucleotide. For example, the overhang may invade into the target polynucleotide at a cut site generated by the TnpB protein.

[0326] Examples of topoisomerases include type I, including type IA and type IB topoisomerases, which cleave a single strand of a double-stranded nucleic acid molecule, and type II topoisomerases (e.g., gyrases), which cleave both strands of a double-stranded nucleic acid molecule.

[0327] Type IA and IB topoisomerases cleave one strand of a double-stranded nucleic acid molecule. In some examples, the cleavage of a double-stranded nucleic acid molecule by type IA topoisomerases generates a 5′ phosphate and a 3′ hydroxyl at the cleavage site, with the type IA topoisomerase covalently binding to the 5′ terminus of a cleaved strand. Cleavage of a double-stranded nucleic acid molecule by type IB topoisomerases may generate a 3′ phosphate and a 5′ hydroxyl at the cleavage site, with the type IB topoisomerase covalently binding to the 3′ terminus of a cleaved strand.

[0328] Examples of Type IA topoisomerases include E. coli topoisomerase I, E. coli topoisomerase III, eukaryotic topoisomerase II, archeal reverse gyrase, yeast topoisomerase III, Drosophila topoisomerase III, human topoisomerase III, Streptococcus pneumoniae topoisomerase III, and the like, including other type IA topoisomerases. A DNA-protein adduct is formed with the enzyme covalently binding to the 5′-thymidine residue, with cleavage occurring between the two thymidine residues.

[0329] Examples of Type IB topoisomerases include the nuclear type I topoisomerases present in all eukaryotic cells and those encoded by Vaccinia and other cellular poxviruses. The eukaryotic type IB topoisomerases are exemplified by those expressed in yeast, Drosophila and mammalian cells, including human cells. Viral type IB topoisomerases are exemplified by those produced by the vertebrate poxviruses (Vaccinia, Shope fibroma virus, ORF virus, fowlpox virus, and molluscum contagiosum virus), and the insect poxvirus (Amsacta moorei entomopoxvirus).

[0330] Examples of Type II topoisomerases include, bacterial gyrase, bacterial DNA topoisomerase IV, eukaryotic DNA topoisomerase II, and T-even phage encoded DNA topoisomerases. Type II topoisomerases may have both cleaving and ligating activities. Substrate double-stranded nucleic acid molecules of type II topoisomerase can be prepared such that the type II topoisomerase can form a covalent linkage to one strand at a cleavage site. For example, calf thymus type II topoisomerase can cleave a substrate ds nucleic acid molecule containing a 5′ recessed topoisomerase recognition site positioned three nucleotides from the 5′ end, resulting in dissociation of the three nucleic acid molecule 5′ to the cleavage site and covalent binding of the topoisomerase to the 5′ terminus of the ds nucleic acid molecule. Furthermore, upon contacting such a type II topoisomerase-charged ds nucleic acid molecule with a second nucleic acid molecule containing a 3′ hydroxyl group, the type II topoisomerase can ligate the sequences together, and then is released from the recombinant nucleic acid molecule.

[0331] In some examples, the topoisomerase is DNA topoisomerase I, e.g., a Vaccinia virus topoisomerase I. The topoisomerase may be pre-loaded with a donor polynucleotide. The Vaccinia virus topoisomerase may need a target comprising a 5′ —OH group.

### TnpB Phosphatase Systems

[0332] The systems herein may further comprise a phosphatase domain. A phosphatase is an enzyme capable of removing a phosphate group from a molecule e.g., a nucleic acid such as DNA. Examples of phosphatases include calf intestinal phosphatase, shrimp alkaline phosphatase, Antarctic phosphatase, and APEX alkaline phosphatase.

[0333] In some examples, the 5′ —OH group of in the target polynucleotide may be generated by a phosphatase. A topoisomerase compatible with a 5′ phosphate target may be used to generate stable loaded intermediates. In some cases, a TnpB polypeptide that leaves a 5′ OH after cleaving the target polynucleotide may be used. In some cases, the phosphatase domain may be associated with (e.g., fused to) the TnpB protein. The phosphatase domain may be capable of generating a —OH group at a 5′ end of the target polynucleotide. The phosphatase may be delivered separated from other components in the system, e.g., as a separate protein, on a separate vector from other components.

### TnpB Polymerase Systems

[0334] The systems herein may further comprise a polymerase domain. A polymerase refers to an enzyme that synthesizes chains of nucleic acids. The polymerase may be a DNA polymerase or an RNA polymerase.

[0335] In some embodiments, the systems comprise an engineered system for modifying a target polynucleotide comprising: a TnpB protein; a DNA polymerase domain; and a DNA template comprising a donor polynucleotide to be inserted to a target sequence of the target polynucleotide. In some examples, two or more of: the TnpB protein; DNA polymerase domain; and DNA template may form a complex. In some examples, two or more of: the TnpB protein; DNA polymerase domain; are comprised in a fusion protein. For example, the TnpB protein and DNA polymerase domain may be comprised in a fusion protein.

[0336] In some embodiments, the systems may comprise a TnpB enzyme (or variant thereof such as a dTnpB or TnpB nickase) and a DNA polymerase (e.g. phi29, T4, T7 DNA polymerase). The systems may further comprise a single-stranded DNA or double-stranded DNA template. The DNA template may comprise i) a first sequence homologous to a target site of the TnpB protein on the target polynucleotide, and/or ii) a second sequence homologous to another region of the target polynucleotide. In some embodiments, the template may be a synthetic single-stranded or PCR-generated DNA molecule, (optionally end-protected by modified nucleotides), or a viral genome (e.g. AAV). In another embodiment, the template is generated using a reverse transcriptase. When the system is delivered into a cell, an endogenous DNA polymerase in the cell may be used. Alternatively or additionally, an exogenous DNA polymerase may be expressed in the cell.

[0337] The DNA template may be end-protected by one or more modified nucleotides, or comprises a portion of a viral genome. In some embodiment, the DNA template comprises LNA or other modifications (e.g., at the 3′ end). The presence of LNA and/or the modifications may lead to more efficient annealing with the 3′ flap generated by TnpB protein cleavage.

[0338] Examples of DNA polymerase include Taq, Tne (exo −), Tma (exo −), Pfu (exo −), Pwo (exo −), Thermoanaerobacter thermohydrosulfuricus DNA polymerase, Thermococcus litoralis DNA polymerase I, E. coli DNA polymerase I, Taq DNA polymerase I, Tth DNA polymerase I, Bacillus stearothermophilus (Bst) DNA polymerase I, E. coli DNA polymerase III, bacteriophage T5 DNA polymerase, bacteriophage M2 DNA polymerase, bacteriophage T4 DNA polymerase, bacteriophage T7 DNA polymerase, bacteriophage phi29 DNA polymerase, bacteriophage PRD1 DNA polymerase, bacteriophage phi15 DNA polymerase, bacteriophage phi21DNA polymerase, bacteriophage PZE DNA polymerase, bacteriophage PZA DNA polymerase, bacteriophage Nf DNA polymerase, bacteriophage M2Y DNA polymerase, bacteriophage B103 DNA polymerase, bacteriophage SF5 DNA polymerase, bacteriophage GA-1 DNA polymerase, bacteriophage Cp-5 DNA polymerase, bacteriophage Cp-7 DNA polymerase, bacteriophage PR4 DNA polymerase, bacteriophage PR5 DNA polymerase, bacteriophage PR722 DNA polymerase and bacteriophage L17 DNA polymerase.

### TnpB Ligase Systems

[0339] In general, the systems comprise a TnpB protein and a ligase associated with the TnpB protein. The TnpB protein may be recruited to the target sequence by an ωRNA comprising a spacer capable of binding the target sequence, and generate a break on the target sequence. The oRNA may further comprise a template sequence with desired mutations or other sequence elements. The template sequence may be ligated to the target sequence to introduce the mutations or other sequence elements to the nucleic acid molecule. The TnpB protein may be a nickase that generates a single-strand break on nucleic acid molecule, and the ligase may be a single-strand DNA ligase. In some embodiments, the systems comprise a pair of TnpB-ligases complexes with two distinct ωRNA sequences. Each TnpB-ligase complex can target one strand of a double-stranded polynucleotide, and work together to effectively modify the sequence of the double-stranded polynucleotides.

[0340] In some examples, the TnpB is associated with a ligase or functional fragment thereof. The ligase may ligate a single-strand break (a nick) generated by the TnpB. In certain cases, the ligase may ligate a double-strand break generated by the TnpB. In certain examples, the TnpB is associated with a reverse transcriptase or functional fragment thereof.

[0341] The present invention further provides systems and methods of modifying a nucleic acid sequence using a pair of distinct TnpB-ligase-oRNA complexes, said systems and methods comprising: (a) an engineered TnpB protein connected to or complexed with a ligase; (b) two distinct ωRNA sequences complexed with such TnpB-ligase protein complex to form a first and a second distinct TnpB-ligase ωRNA complexes; (c) the first TnpB-ligase-oRNA complex binding to one strand of a target double-stranded polynucleotide sequence, and the second TnpB-ligase-oRNA complex binding to another strand of the target double-stranded polynucleotide sequence; (d) upon binding of the said complexes to the locus of interest the effector protein induces the modification of the sequences associated with or at the target locus of interest, whereby the two TnpB-ligase-ωRNA complexes work together on different strands of the double-stranded target sequence and modify the sequence.

[0342] One of the advantages of using such a “pair” of TnpB-ligase-ωRNA complexes includes high efficiency in modifying the sequence associated with or at the locus of interest of target double-stranded polynucleotides.

[0343] In some embodiments, the TnpB protein can be a nickase. In a preferred embodiment, a ligase is linked to the TnpB protein. The ligase can ligate the donor sequence to the target sequence. The ligase can be a single-strand DNA ligase or a double-strand DNA ligase. The ligase can be fused to the carboxyl-terminus of a TnpB protein, or to the amino-terminus of a TnpB protein.

[0344] As used herein the term “ligase” refers to an enzyme, which catalyzes the joining of breaks (e.g., double-stranded breaks or single-stranded breaks (“nicks”) between adjacent bases of nucleic acids. For example, a ligase may be an enzyme capable of forming intra- or inter-molecular covalent bonds between a 5′ phosphate group and a 3′ hydroxyl group. The term “ligate” refers to the reaction of covalently joining adjacent oligonucleotides through formation of an internucleotide linkage.

[0345] DNA ligases fall into two general categories: ATP-dependent DNA ligases (EC 6.5.1.1), and NAD (+) dependent DNA ligases (EC 6.5.1.2). NAD (+) dependent DNA ligases are found only in bacteria (and some viruses) while ATP-dependent DNA ligases are ubiquitous. The ATP-dependent DNA ligases can be divided into four classes: DNA ligase I, II, III, and IV. DNA ligase I links Okazaki fragments to form a continuous strand of DNA; DNA ligase II is an alternatively spliced form of DNA ligase III, found only in non-dividing cells; DNA ligase III is involved in base excision repair; and DNA ligase IV is involved in the repair of DNA double-strand breaks by non-homologous end joining (NHEJ). Amongst all ligases, there are two types of prokaryotic and one type of eukaryotic ligases that are particularly well suited for facilitating the blunt-ended, double-stranded DNA ligation: Prokaryotic DNA ligases (T3 and T4) and Eukaryotic DNA ligase (Ligase 1).

[0346] In some cases, the ligase is specific for double-stranded nucleic acids (e.g., dsDNA, dsRNA, RNA/DNA duplex). An example of a ligase specific for double-stranded DNA and DNA/RNA hybrids is T4 DNA ligase. In some cases, the ligase is specific for single-stranded nucleic acids (e.g., ssDNA, ssRNA). An example of such ligase is CircLigase II. In some cases, the ligase is specific for RNA/DNA duplexes. In some cases, the ligase is able to work on single-stranded, double-stranded, and/or RNA/DNA nucleic acids in any combination.

[0347] In some cases, the ligase may be a pan-ligase, which is a single ligase with the ability to ligate both DNA and RNA targets. The ligase may be specific for a target (e.g., DNA-specific or RNA-specific). In some cases, the ligase may be a dual ligase system that include DNA-specific, RNA-specific, and/or pan-ligases, in any combination.

[0348] Examples of ligases that can be used with the disclosure include T4 DNA Ligase, T3 DNA Ligase, T7 DNA Ligase, E. coli DNA Ligase, HiFi Taq DNA Ligase, 9° N™ DNA Ligase, Taq DNA Ligase, SplintR® Ligase (also known as. PBCV-1 DNA Ligase or Chlorella virus DNA Ligase), Thermostable 5′ AppDNA/RNA Ligase, T4 RNA Ligase, T4 RNA Ligase 2, T4 RNA Ligase 2 Truncated, T4 RNA Ligase 2 Truncated K227Q, T4 RNA Ligase 2, Truncated KQ, RtcB Ligase (joins single stranded RNA with a 3″-phosphate or 2′,3′-cyclic phosphate to another RNA), CircLigase II, CircLigase ssDNA Ligase, CircLigase RNA Ligase, or Ampligase® Thermostable DNA Ligas, NAD-dependent ligases including Taq DNA ligase, Thermus filiformis DNA ligase, Escherichia coli DNA ligase, Tth DNA ligase, Thermus scotoductus DNA ligase (I and II), thermostable ligase, Ampligase thermostable DNA ligase, VanC-type ligase, 9° N DNA Ligase, Tsp DNA ligase, and novel ligases discovered by bioprospecting; ATP-dependent ligases including T4 RNA ligase, T4 DNA ligase, T3 DNA ligase, T7 DNA ligase, Pfu DNA ligase, DNA ligase I, DNA ligase III, DNA ligase IV, and novel ligases discovered by bioprospecting, and wild-type, mutant isoforms, and genetically engineered variants thereof. In a particular example, the ligase is a

[0349] In some embodiments, the examples of the ligases include those used in sequencing by synthesis or sequencing by ligation reactions.

### TnpB Helitron Systems

[0350] The systems and compositions herein may comprise a TnpB polypeptide, one or more nucleic acid components, and one or more components of a helitron. The systems and compositions may be used to insert a donor polynucleotide to a target polynucleotide. The systems and compositions may further comprise a donor polynucleotide.

[0351] The term “helitron”, as used herein, refers to a polynucleotide (or nucleic acid segment), recognized as a transposon that captures and mobilizes gene fragments in eukaryotes. The term “helitron” as used herein refers to transposase that comprises an endonuclease domain and a C-terminal helicase domain. Helitrons are rolling-circle RNA transposons. In particular embodiments, the helitron encodes a 1400 to about 2000 amino acid, or about 1800 amino acid multidomain transposase. In embodiments, the helitron comprises a hairpin near the 3′end to function as a transposition terminator. In embodiments, the transposon comprises a RepHel motif comprising a replication initiator (Rep) and a DNA helicase (hel) domain. See, Thomas J. & Pritham E. J. Helitrons, the eukaryotic rolling-circle transposable elements. Microbiol. Spectr. 3, 893-926 (2015). In embodiments, the helitron comprises a Rep nuclease domain and C-terminal helicase domain and inserts between an AT dinucleotide in single strand DNA. In an aspect, the C-terminal helicase unwinds the DNA in a 5′ to 3′ direction. The HUH nuclease domain may comprise one or two active site tyrosine residues, in embodiments, is a 2 Tyrosine (Y2) HUH endonuclease domain. Helitrons can encompass helentron, proto-helentron and helitron2 type proteins, structures of which can be as described in Thomas et al., 2015 at FIGS. 1 and 3, incorporated specifically by reference. Particular organsisms in which the helitron or helentrons have been found can include those in Table 1 of Thomas J. & Pritham E. J. Helitrons, the eukaryotic rolling-circle transposable elements. Microbiol. Spectr. 3, 893-926 (2015), incorporated herein by reference. Similarly, helitrons can be identified based at least in part on the Rep motif, and conserived residues in the helitrons, and according to the alignment sequence of FIG. 2 of Thomas J. & Pritham E. J. Helitrons, the eukaryotic rolling-circle transposable elements. Microbiol. Spectr. 3, 893-926 (2015), specifically incorporated herein by reference.

[0352] The expression “helitron reaction” used herein refers to a reaction wherein a transposase inserts a donor polynucleotide sequence in or adjacent to an insertion site on a target polynucleotide. The insertion site may contain a sequence or secondary structure recognized by the helitron and/or an insertion motif sequence in the target polynucleotide into which the donor polynucleotide sequence may be inserted.

[0353] As described in Grabundzija 2018, the helitron terminal sequences contains a distinct ˜150 base pairs (bp) long sequence with an absolutely conserved dinucleotide at the end of left terminal sequence (LTS), and a tetranucleotide at the end of right terminal sequence (RTS) which is preceded by a palindromic sequence that can form a hairpin structure. Grabundzija et al., Nat. Commun. 2018; 9: 1278; doi:10.1035/s41467-018-03688-w.

[0354] The helitron end sequences may be responsible for identifying the donor polynucleotide for transposition. The helitron end sequences may be the DNA sequences used to perform a transposition reaction, the end sequences may be referred to herein as right terminal sequences and left terminal sequence. The donor polynucleotide can be configured to comprise a first and second helitron recognition sequence that are at least 80%, 85%, 90%, 95% 96%, 97%, 98%, 99% or 100% complementary to a left terminal sequence and/or a right terminal sequence of a polynucleotide encoding the helitron polypeptide.

[0355] In an aspect, the palindromic sequence may be located upstream of the right terminal sequence, for example, about 5, 10, 15, 20, 25, 30, 35 nucleotides upstream of the right terminal sequence end, or about 10 to 15 nucleotides upstream of the right terminal sequence end, about 10 to 12 nucleotides or about 11 nucleotides upstream of the right terminal sequence end. Ivana Grabundzija, Nat Commun. 2016; 7:10716, doi:10.1038/ncomms10716, incorporated herein by reference.

[0356] Exemplary helitrons can be identified using software, for example (EAHelitron) that has been used to identify Helitrons in a wide range of plant genomes. See, Hu, K., Xu, K., Wen, J. et al. Helitron distribution in Brassicaceae and whole Genome Helitron density as a character for distinguishing plant species. BMC Bioinformatics 20, 354 (2019). doi: 10.1186/s12859-019-2945-8, incorporated herein by reference.

[0357] The helitron may be derived from a eukaryote. In an aspect, the helitron is derived from a mammalian genome, in an aspect, vespertilionid bats, e.g. Helibat. In embodiments, the helitron is derived from derived from a Helibat1 transposon. In embodiments, the helitron is Helraiser, the full DNA sequence of the consensus transposon, including left terminal and right terminal sequences as well as hairpin identified is provided in Grabundzija, 2016 at Supplementary FIG. 1, specifically incorporated herein by reference. In an aspect, the helitron is flanked by left and right terminal sequences of the transposon. In an aspect, the left terminal sequence and right terminal sequence terminates with the conserved 5′-TC/CTAG-3′ motif. In one embodiment, the helitron may comprise a palindromic sequence that is about 10 to about 35, or about 5-25 bp or about 19-bp-long palindromic sequence with the potential to form a hairpin structure.

[0358] Elements of these systems may be engineered to work within the context of the invention. For example, a helitron polypeptide may be fused to a polypeptide capable of generating an R-loop. Fusion may be by any appropriate linker, in an exemplary embodiment, XTEN16. The binding elements that allow a helitron polypeptide to bind, for example, the use of sequences complementary to the right terminal sequence and the left terminal sequence of the helitron may be engineered into a donor construct to facilitate entry of a donor polynucleotide sequence into a target polynucleotide.

[0359] In certain example embodiments, the Isc polypeptide, via formation of complex with a nucleic acid component sequence, directs the helitron polypeptide to a target sequence in a target polynucleotide, where the helitron facilitates integration of a donor polynucleotide sequence into the target polynucleotide.

[0360] The helitron polypeptides may also comprise one or more truncations or excisions to remove domains or regions of wild-type protein to arrive at a minimal polypeptide, alter functionality according to the system in which the helitron is used, or mutated to enhance or diminish particular activities associated with the helitron, i.e. nuclease activity or helicase activity.

### Multiplexing

[0361] In one embodiment, TnpB polypeptides may be used in a multiplex (tandem) targeting approach. For example, TnpB polypeptide herein can employ more than one nucleic acid component molecule without losing activity. This may enable the use of the TnpB polypeptide, systems or complexes as defined herein for targeting multiple DNA targets, genes or gene loci, with a single enzyme, system or complex as defined herein. The nucleic acid component molecules may be tandemly arranged, optionally separated by a nucleotide sequence such as a conserved nucleotide sequence as defined herein. The position of the different nucleic acid component molecules is the tandem does not influence the activity.

[0362] In one aspect, the TnpB polypeptides may be used for tandem or multiplex targeting. It is to be understood that any of the TnpB polypeptides, complexes, or compositions herein elsewhere may be used in such an approach. Any of the methods, products, compositions and uses as described herein elsewhere are equally applicable with the multiplex or tandem targeting approach further detailed below. By means of further guidance, the following particular aspects and embodiments are provided.

[0363] In one aspect, the invention provides for the use of a TnpB polypeptide, complex or system as defined herein for targeting multiple gene loci. In one embodiment, this can be established by using multiple (tandem or multiplex) nucleic acid component molecule sequences.

[0364] In one aspect, the invention provides methods for using one or more elements of a TnpB polypeptide, complex or system as defined herein for tandem or multiplex targeting, wherein said system herein comprises multiple nucleic acid component molecule sequences. Said sequences are separated by a nucleotide sequence, such as a conserved nucleotide sequence as defined herein elsewhere.

[0365] The TnpB polypeptides, compositions, systems or complexes as defined herein provides an effective means for modifying multiple target polynucleotides. The TnpB polypeptide, system or complex as defined herein has a wide variety of utility including modifying (e.g., deleting, inserting, translocating, inactivating, activating) one or more target polynucleotides in a multiplicity of cell types. As such the TnpB polypeptide, system or complex as defined herein of the invention has a broad spectrum of applications in, e.g., gene therapy, drug screening, disease diagnosis, and prognosis, including targeting multiple gene loci within a single system.

[0366] In one aspect, the present disclosure provides a TnpB polypeptide, system or complex as defined herein, having a TnpB polypeptide having at least one destabilization domain associated therewith, and multiple nucleic acid component molecule that target multiple nucleic acid molecules such as DNA molecules, whereby each of said multiple nucleic acid component molecules specifically targets its corresponding nucleic acid molecule, e.g., DNA molecule. Each nucleic acid molecule target, e.g., DNA molecule can encode a gene product or encompass a gene locus. Using multiple nucleic acid component molecules hence enables the targeting of multiple gene loci or multiple genes. In one embodiment the TnpB polypeptide may cleave the DNA molecule encoding the gene product. In one embodiment expression of the gene product is altered. The TnpB polypeptide and the nucleic acid component molecules do not naturally occur together. The present disclosure comprehends the nucleic acid component molecules comprising tandemly arranged nucleic acid component molecule. The present disclosure further comprehends coding sequences for the TnpB polypeptide being codon optimized for expression in a eukaryotic cell. In an embodiment the eukaryotic cell is a mammalian cell, a plant cell or a yeast cell and in a more preferred embodiment the mammalian cell is a human cell. Expression of the gene product may be decreased. The TnpB polypeptide may form part of a system or complex, which further comprises tandemly arranged nucleic acid component molecule comprising a series of 2, 3, 4, 5, 6, 7, 8, 9, 10, 15, 25, 25, 30, or more than 30 nucleic acid component molecules, each capable of specifically hybridizing to a target sequence in a genomic locus of interest in a cell. In one embodiment, the functional system or complex binds to the multiple target sequences. In one embodiment, the functional system or complex may edit the multiple target sequences, e.g., the target sequences may comprise a genomic locus, and In one embodiment, there may be an alteration of gene expression. In one embodiment, the functional system or complex may comprise further functional domains. In one embodiment, the invention provides a method for altering or modifying expression of multiple gene products. The method may comprise introducing into a cell containing said target nucleic acids, e.g., DNA molecules, or containing and expressing target nucleic acid, e.g., DNA molecules; for instance, the target nucleic acids may encode gene products or provide for expression of gene products (e.g., regulatory sequences).

[0367] In one embodiment, the TnpB polypeptide used for multiplex targeting is associated with one or more functional domains. In some more specific embodiments, the TnpB polypeptide used for multiplex targeting is a dead TnpB polypeptide. The inventors have found that the TnpB polypeptide as described herein may enable improved and/or direct access to one or more nucleotides involved in the DNA:RNA duplex.

### Inducible Systems

[0368] In one embodiment, a TnpB polypeptide may form a component of an inducible system. The inducible nature of the system would allow for spatiotemporal control of gene editing or gene expression using a form of energy. The form of energy may include but is not limited to electromagnetic radiation, sound energy, chemical energy and thermal energy. Examples of inducible system include tetracycline inducible promoters (Tet-On or Tet-Off), small molecule two-hybrid transcription activations systems (FKBP, ABA, etc.), or light inducible systems (Phytochrome, LOV domains, or cryptochrome). In one embodiment, the TnpB polypeptide may be a part of a Light Inducible Transcriptional Effector (LITE) to direct changes in transcriptional activity in a sequence-specific manner. The components of a light may include a TnpB polypeptide, a light-responsive cytochrome heterodimer (e.g. from Arabidopsis thaliana), and a transcriptional activation/repression domain. Further examples of inducible DNA binding proteins and methods for their use are provided in US Provisional Application Nos. 61/736,465 and U.S. 61/721,283, and International Patent Publication No. WO 2014/018423 A2 which is hereby incorporated by reference in its entirety.

### Self-Inactivating Systems

[0369] Once all copies of a gene in the genome of a cell have been edited, continued expression of the system in that cell is no longer necessary. Indeed, sustained expression would be undesirable in case of off-target effects at unintended genomic sites, etc. Thus time-limited expression would be useful. Inducible expression offers one approach, but in addition Applicants have engineered a self-Inactivating system that relies on the use of a non-coding nucleic acid component molecule target sequence within the vector itself. Thus, after expression begins, the system will lead to its own destruction, but before destruction is complete it will have time to edit the genomic copies of the target gene (which, with a normal point mutation in a diploid cell, requires at most two edits). Simply, the self-inactivating system includes additional RNA (e.g., nucleic acid component molecule) that targets the coding sequence for the TnpB polypeptide itself or that targets one or more non-coding nucleic acid component molecule target sequences complementary to unique sequences present in one or more of the following: (a) within the promoter driving expression of the non-coding RNA elements, (b) within the promoter driving expression of the TnpB polypeptide gene, (c) within 100 bp of the ATG translational start codon in the TnpB polypeptide coding sequence, (d) within the inverted terminal repeat (iTR) of a viral delivery vector, e.g., in the AAV genome.

[0370] In some aspects, a single nucleic acid component molecule is provided that is capable of hybridization to a sequence downstream of a TnpB polypeptide start codon, whereby after a period of time there is a loss of the TnpB polypeptide expression. In some aspects, one or more nucleic acid component molecule(s) are provided that are capable of hybridization to one or more coding or non-coding regions of the polynucleotide encoding the system, whereby after a period of time there is a inactivation of one or more, or in some cases all, of the system. In some aspects of the system, and not to be limited by theory, the cell may comprise a plurality of complexes, wherein a first subset of complexes comprise a first nucleic acid component molecule capable of targeting a genomic locus or loci to be edited, and a second subset of complexes comprise at least one second nucleic acid component molecule capable of targeting the polynucleotide encoding the system, wherein the first subset of complexes mediate editing of the targeted genomic locus or loci and the second subset of complexes eventually inactivate the system, thereby inactivating further expression in the cell.

[0371] The various coding sequences (TnpB polypeptide and nucleic acid component molecule) can be included on a single vector or on multiple vectors. For instance, it is possible to encode the enzyme on one vector and the various RNA sequences on another vector, or to encode the enzyme and one nucleic acid component molecule on one vector, and the remaining nucleic acid component molecule on another vector, or any other permutation. In general, a system using a total of one or two different vectors is preferred.

[0372] Where multiple vectors are used, it is possible to deliver them in unequal numbers, and ideally with an excess of a vector which encodes the first nucleic acid component molecule relative to the second nucleic acid component molecule, thereby assisting in delaying final inactivation of the system until genome editing has had a chance to occur.

[0373] The first nucleic acid component molecule can target any target sequence of interest within a genome, as described elsewhere herein. The second nucleic acid component molecule targets a sequence within the vector which encodes the TnpB polypeptide, and thereby inactivates the enzyme's expression from that vector. Thus the target sequence in the vector must be capable of inactivating expression. Suitable target sequences can be, for instance, near to or within the translational start codon for the TnpB polypeptide coding sequence, in a non-coding sequence in the promoter driving expression of the non-coding RNA elements, within the promoter driving expression of the TnpB polypeptide gene, within 100 bp of the ATG translational start codon in the TnpB polypeptide coding sequence, and/or within the inverted terminal repeat (iTR) of a viral delivery vector, e.g., in the AAV genome. A double stranded break near this region can induce a frame shift in the TnpB polypeptide coding sequence, causing a loss of protein expression. An alternative target sequence for the “self-inactivating” nucleic acid component molecule would aim to edit/inactivate regulatory regions/sequences needed for the expression of the system or for the stability of the vector. For instance, if the promoter for the TnpB polypeptide coding sequence is disrupted then transcription can be inhibited or prevented. Similarly, if a vector includes sequences for replication, maintenance or stability then it is possible to target these. For instance, in a AAV vector a useful target sequence is within the iTR. Other useful sequences to target can be promoter sequences, polyadenylation sites, etc.

[0374] Furthermore, if the nucleic acid component molecules are expressed in array format, the “self-inactivating” nucleic acid component molecules that target both promoters simultaneously will result in the excision of the intervening nucleotides from within the TnpB polypeptide expression construct, effectively leading to its complete inactivation. Similarly, excision of the intervening nucleotides will result where the nucleic acid component molecules target both ITRs, or targets two or more other components simultaneously. Self-inactivation as explained herein is applicable, in general, with systems in order to provide regulation of the systems. For example, self-inactivation as explained herein may be applied to the repair of mutations, for example expansion disorders, as explained herein. As a result of this self-inactivation, repair may be only transiently active.

[0375] Addition of non-targeting nucleotides to the 5′ end (e.g. 1-10 nucleotides, preferably 1-5 nucleotides) of the “self-inactivating” nucleic acid component molecule can be used to delay its processing and/or modify its efficiency as a means of ensuring editing at the targeted genomic locus prior to shut down.

[0376] In one aspect of the self-inactivating AAV system, plasmids that co-express one or more nucleic acid component molecule targeting genomic sequences of interest (e.g. 1-2, 1-5, 1-10, 1-15, 1-20, 1-30) maybe established with “self-inactivating” nucleic acid component molecule that target an TnpB polypeptide sequence at or near the engineered ATG start site (e.g. within 5 nucleotides, within 15 nucleotides, within 30 nucleotides, within 50 nucleotides, within 100 nucleotides). A regulatory sequence in the U6 promoter region can also be targeted with an nucleic acid component molecule. The U6-driven nucleic acid component molecules may be designed in an array format such that multiple nucleic acid component molecule sequences can be simultaneously released. When first delivered into target tissue/cells (left cell) nucleic acid component molecules begin to accumulate while TnpB polypeptide levels rise in the nucleus. TnpB polypeptide complexes with all of the nucleic acid component molecules to mediate genome editing and self-inactivation of the TnpB polypeptide plasmids.

[0377] One aspect of a self-inactivating system is expression of singly or in tandem array format from 1 up to 4 or more different nucleic acid component sequences; e.g. up to about 20 or about 30 sequences. Each individual self-inactivating nucleic acid component molecule sequence may target a different target. Such may be processed from, e.g. one chimeric pol3 transcript. Pol3 promoters such as U6 or HI promoters may be used. Pol2 promoters such as those mentioned throughout herein. Inverted terminal repeat (iTR) sequences may flank the Pol3 promoter-nucleic acid component molecule(s)-Pol2 promoter-TnpB polypeptide.

[0378] One aspect of a tandem array transcript is that one or more nucleic acid component molecule(s) edit the one or more target(s) while one or more self-inactivating nucleic acid component molecules inactivate the system. Thus, for example, the described system for repairing expansion disorders may be directly combined with the self-inactivating system described herein. Such a system may, for example, have two nucleic acid component molecules directed to the target region for repair as well as at least a third nucleic acid component molecule directed to self-inactivation of the TnpB polypeptide or systems.

[0379] The nucleic acid component molecule may be a control molecule. For example it may be engineered to target a nucleic acid sequence encoding the TnpB polypeptide itself, as described in U.S. Patent Publication No. US2015232881A1, the disclosure of which is hereby incorporated by reference. In one embodiment, a system or composition may be provided with just the nucleic acid component molecule engineered to target the nucleic acid sequence encoding the TnpB polypeptide. In addition, the system or composition may be provided with the nucleic acid component molecule engineered to target the nucleic acid sequence encoding the TnpB polypeptide, as well as nucleic acid sequence encoding the TnpB polypeptide and, optionally a second nucleic acid component molecule and, further optionally, a repair template. The second nucleic acid component may be the primary target of the system or composition (such a therapeutic, diagnostic, knock out etc. as defined herein). In this way, the system or composition is self-inactivating. This is exemplified in relation to Cas in US2015232881A1 (also published as WO2015070083 (A1), and may be extrapolated to TnpB polypeptides disclosed herein, e.g. TnpB polypeptides.

### Polynucleotides Encoding TNPB Systems and Vectors

[0380] The systems herein may comprise one or more polynucleotides. The polynucleotide(s) may comprise coding sequences of components of the systems herein, e.g., TnpB polypeptide, nucleic acid component(s), functional domain(s), donor polynucleotide(s), and/or other components in the systems. The present disclosure further provides vectors or vector systems comprising one or more polynucleotides herein. The vectors or vector systems include those described in the delivery sections herein.

[0381] The terms “polynucleotide”, “nucleotide”, “nucleotide sequence”, “nucleic acid” and “oligonucleotide” are used interchangeably. They refer to a polymeric form of nucleotides of any length, either deoxyribonucleotides or ribonucleotides, or analogs thereof. Polynucleotides may have any three dimensional structure, and may perform any function, known or unknown. The following are non-limiting examples of polynucleotides: coding or non-coding regions of a gene or gene fragment, loci (locus) defined from linkage analysis, exons, introns, messenger RNA (mRNA), transfer RNA, ribosomal RNA, short interfering RNA (siRNA), short-hairpin RNA (snucleic acid component), micro-RNA (miRNA), ribozymes, cDNA, recombinant polynucleotides, branched polynucleotides, plasmids, vectors, isolated DNA of any sequence, isolated RNA of any sequence, nucleic acid probes, and primers. The term also encompasses nucleic-acid-like structures with synthetic backbones, see, e.g., Eckstein, 1991; Baserga et al., 1992; Milligan, 1993; WO 97/03211; WO 96/39154; Mata, 1997; Strauss-Soukup, 1997; and Samstag, 1996. A polynucleotide may comprise one or more modified nucleotides, such as methylated nucleotides and nucleotide analogs. If present, modifications to the nucleotide structure may be imparted before or after assembly of the polymer. The sequence of nucleotides may be interrupted by non-nucleotide components. A polynucleotide may be further modified after polymerization, such as by conjugation with a labeling component. As used herein the term “wild type” is a term of the art understood by skilled persons and means the typical form of an organism, strain, gene or characteristic as it occurs in nature as distinguished from mutant or variant forms. A “wild type” can be a base line. As used herein the term “variant” should be taken to mean the exhibition of qualities that have a pattern that deviates from what occurs in nature. The terms “non-naturally occurring” or “engineered” are used interchangeably and indicate the involvement of the hand of man. The terms, when referring to nucleic acid molecules or polypeptides mean that the nucleic acid molecule or the polypeptide is at least substantially free from at least one other component with which they are naturally associated in nature and as found in nature. “Complementarity” refers to the ability of a nucleic acid to form hydrogen bond(s) with another nucleic acid sequence by either traditional Watson-Crick base pairing or other non-traditional types. A percent complementarity indicates the percentage of residues in a nucleic acid molecule which can form hydrogen bonds (e.g., Watson-Crick base pairing) with a second nucleic acid sequence (e.g., 5, 6, 7, 8, 9, 10 out of 10 being 50%, 60%, 70%, 80%, 90%, and 100% complementary). “Perfectly complementary” means that all the contiguous residues of a nucleic acid sequence will hydrogen bond with the same number of contiguous residues in a second nucleic acid sequence. “Substantially complementary” as used herein refers to a degree of complementarity that is at least 60%, 65%, 70%, 75%, 80%, 85%, 90%, 95%, 97%, 98%, 99%, or 100% over a region of 8, 9, 10, 11, 12, 13, 14, 15, 16, 17, 18, 19, 20, 21, 22, 23, 24, 25, 30, 35, 40, 45, 50, or more nucleotides, or refers to two nucleic acids that hybridize under stringent conditions. As used herein, “stringent conditions” for hybridization refer to conditions under which a nucleic acid having complementarity to a target sequence predominantly hybridizes with the target sequence, and substantially does not hybridize to non-target sequences. Stringent conditions are generally sequence-dependent, and vary depending on a number of factors. In general, the longer the sequence, the higher the temperature at which the sequence specifically hybridizes to its target sequence. Non-limiting examples of stringent conditions are described in detail in Tijssen (1993), Laboratory Techniques In Biochemistry And Molecular Biology-Hybridization With Nucleic Acid Probes Part I, Second Chapter “Overview of principles of hybridization and the strategy of nucleic acid probe assay”, Elsevier, N.Y. Where reference is made to a polynucleotide sequence, then complementary or partially complementary sequences are also envisaged. These are preferably capable of hybridizing to the reference sequence under highly stringent conditions. “Hybridization” refers to a reaction in which one or more polynucleotides react to form a complex that is stabilized via hydrogen bonding between the bases of the nucleotide residues. The hydrogen bonding may occur by Watson Crick base pairing, Hoogstein binding, or in any other sequence specific manner. The complex may comprise two strands forming a duplex structure, three or more strands forming a multi stranded complex, a single self-hybridizing strand, or any combination of these. A hybridization reaction may constitute a step in a more extensive process, such as the initiation of PCR, or the cleavage of a polynucleotide by an enzyme. A sequence capable of hybridizing with a given sequence is referred to as the “complement” of the given sequence. As used herein, the term “genomic locus” or “locus” (plural loci) is the specific location of a gene or DNA sequence on a chromosome. A “gene” refers to stretches of DNA or RNA that encode a polypeptide or an RNA chain that has functional role to play in an organism and hence is the molecular unit of heredity in living organisms. For the purpose of this invention, it may be considered that genes include regions which regulate the production of the gene product, whether or not such regulatory sequences are adjacent to coding and/or transcribed sequences. Accordingly, a gene includes, but is not necessarily limited to, promoter sequences, terminators, translational regulatory sequences such as ribosome binding sites and internal ribosome entry sites, enhancers, silencers, insulators, boundary elements, replication origins, matrix attachment sites and locus control regions. As used herein, “expression of a genomic locus” or “gene expression” is the process by which information from a gene is used in the synthesis of a functional gene product. The products of gene expression are often proteins, but in non-protein coding genes such as rRNA genes or tRNA genes, the product is functional RNA. The process of gene expression is used by all known life—eukaryotes (including multicellular organisms), prokaryotes (bacteria and archaea) and viruses to generate functional products to survive. As used herein “expression” of a gene or nucleic acid encompasses not only cellular gene expression, but also the transcription and translation of nucleic acid(s) in cloning systems and in any other context. As used herein, “expression” also refers to the process by which a polynucleotide is transcribed from a DNA template (such as into and mRNA or other RNA transcript) and/or the process by which a transcribed mRNA is subsequently translated into peptides, polypeptides, or proteins. Transcripts and encoded polypeptides may be collectively referred to as “gene product.” If the polynucleotide is derived from genomic DNA, expression may include splicing of the mRNA in a eukaryotic cell. The terms “polypeptide”, “peptide” and “protein” are used interchangeably herein to refer to polymers of amino acids of any length. The polymer may be linear or branched, it may comprise modified amino acids, and it may be interrupted by non amino acids. The terms also encompass an amino acid polymer that has been modified; for example, disulfide bond formation, glycosylation, lipidation, acetylation, phosphorylation, or any other manipulation, such as conjugation with a labeling component. As used herein the term “amino acid” includes natural and/or unnatural or synthetic amino acids, including glycine and both the D or L optical isomers, and amino acid analogs and peptidomimetics. As used herein, the term “domain” or “protein domain” refers to a part of a protein sequence that may exist and function independently of the rest of the protein chain. As described in aspects of the invention, sequence identity is related to sequence homology. Homology comparisons may be conducted by eye, or more usually, with the aid of readily available sequence comparison programs. These commercially available computer programs may calculate percent (%) homology between two or more sequences and may also calculate the sequence identity shared by two or more amino acid or nucleic acid sequences.

[0382] In one embodiment, the polynucleotide sequence is recombinant DNA. In further embodiments, the polynucleotide sequence further comprises additional sequences as described elsewhere herein. In one embodiment, the nucleic acid sequence is synthesized in vitro.

[0383] The present disclosure provides polynucleotide molecules that encode one or more components of the system or TnpB polypeptide as referred to in any embodiment herein. In one embodiment, the polynucleotide molecules may comprise further regulatory sequences. By means of guidance and not limitation, the polynucleotide sequence can be part of an expression plasmid, a minicircle, a lentiviral vector, a retroviral vector, an adenoviral or adeno-associated viral vector, a piggyback vector, or a tol2 vector. In one embodiment, the polynucleotide sequence may be a bicistronic expression construct. In further embodiments, the isolated polynucleotide sequence may be incorporated in a cellular genome. In yet further embodiments, the isolated polynucleotide sequence may be part of a cellular genome. In further embodiments, the isolated polynucleotide sequence may be comprised in an artificial chromosome. In one embodiment, the 5′ and/or 3′ end of the isolated polynucleotide sequence may be modified to improve the stability of the sequence of actively avoid degradation. In one embodiment, the isolated polynucleotide sequence may be comprised in a bacteriophage. In other embodiments, the isolated polynucleotide sequence may be contained in Agrobacterium species. In one embodiment, the isolated polynucleotide sequence is lyophilized.

### Codon Optimization

[0384] Aspects of the invention relate to polynucleotide molecules that encode one or more components of one or more systems as described in any of the embodiments herein, wherein at least one or more regions of the polynucleotide molecule may be codon optimized for expression in a eukaryotic cells. In one embodiment, the polynucleotide molecules that encode one or more components of one or more systems as described in any of the embodiments herein are optimized for expression in a mammalian cell or a plant cell.

[0385] An example of a codon optimized sequence is in this instance a sequence optimized for expression in a eukaryote, e.g., humans (i.e. being optimized for expression in humans), or for another eukaryote, animal or mammal as herein discussed. In one embodiment, an enzyme coding sequence encoding a DNA/RNA-targeting TnpB polypeptide is codon optimized for expression in particular cells, such as eukaryotic cells. The eukaryotic cells may be those of or derived from a particular organism, such as a plant or a mammal, including but not limited to human, or non-human eukaryote or animal or mammal as herein discussed, e.g., mouse, rat, rabbit, dog, livestock, or non-human mammal or primate. In one embodiment, processes for modifying the germ line genetic identity of human beings and/or processes for modifying the genetic identity of animals which are likely to cause them suffering without any substantial medical benefit to man or animal, and also animals resulting from such processes, may be excluded. In general, codon optimization refers to a process of modifying a nucleic acid sequence for enhanced expression in the host cells of interest by replacing at least one codon (e.g., about or more than about 1, 2, 3, 4, 5, 10, 15, 20, 25, 50, or more codons) of the native sequence with codons that are more frequently or most frequently used in the genes of that host cell while maintaining the native amino acid sequence. Various species exhibit particular bias for certain codons of a particular amino acid. Codon bias (differences in codon usage between organisms) often correlates with the efficiency of translation of messenger RNA (mRNA), which is in turn believed to be dependent on, among other things, the properties of the codons being translated and the availability of particular transfer RNA (tRNA) molecules. The predominance of selected tRNAs in a cell is generally a reflection of the codons used most frequently in peptide synthesis. Accordingly, genes can be tailored for optimal gene expression in a given organism based on codon optimization. Codon usage tables are readily available, for example, at the “Codon Usage Database” available at www.kazusa.orjp/codon/ and these tables can be adapted in a number of ways. See Nakamura, Y., et al. “Codon usage tabulated from the international DNA sequence databases: status for the year 2000” Nucl. Acids Res. 28:292 (2000). Computer algorithms for codon optimizing a particular sequence for expression in a particular host cell are also available, such as Gene Forge (Aptagen; Jacobus, PA), are also available. In one embodiment, one or more codons (e.g., 1, 2, 3, 4, 5, 10, 15, 20, 25, 50, or more, or all codons) in a sequence encoding a TnpB polypeptide corresponds to the most frequently used codon for a particular amino acid.

### Delivery

[0386] The present disclosure also provides delivery systems for introducing components of the systems and compositions herein to cells, tissues, organs, or organisms. A delivery system may comprise one or more delivery vehicles and/or cargos. Exemplary delivery systems and methods include those described in paragraphs [00117] to [00278] of Feng Zhang et al., (WO2016106236A1), and pages 1241-1251 and Table 1 of Lino C A et al., Delivering CRISPR: a review of the challenges and approaches, DRUG DELIVERY, 2018, VOL. 25, NO. 1, 1234-1257, which are incorporated by reference herein in their entireties and can be adapted for use with the TnpB proteins disclosed herein.

[0387] In one embodiment, the delivery systems may be used to introduce the components of the systems and compositions to plant cells. For example, the components may be delivered to plant using electroporation, microinjection, aerosol beam injection of plant cell protoplasts, biolistic methods, DNA particle bombardment, and/or Agrobacterium-mediated transformation. Examples of methods and delivery systems for plants include those described in Fu et al., Transgenic Res. 2000 February; 9(1):11-9; Klein R M, et al., Biotechnology. 1992; 24:384-6; Casas A M et al., Proc Natl Acad Sci USA. 1993 Dec. 1; 90(23): 11212-11216; and U.S. Pat. No. 5,563,055, Davey M R et al., Plant Mol Biol. 1989 September; 13(3):273-85, which are incorporated by reference herein in their entireties.

[0388] The example delivery compositions, systems, and methods described herein related to composition or TnpB polypeptide also apply to functional domains and other components (e.g., other proteins and polynucleotides related to the TnpB polypeptide, such as reverse transcriptase, nucleotide deaminase, retrotransposon, donor polynucleotide, etc.). In a preferred embodiment, the composition comprises delivery of the polypeptides via mRNA.

### RNA Delivery

[0389] In one embodiment, the TnpB system may comprise is delivered as an mRNA encoding the TnpB polypeptide. The ωRNA may be delivered with or separately from the mRNA encoding the TnpB polypeptide. The in vivo translation efficiency of mRNA molecules may be further increased by RNA engineering. To achieve effective translation, mRNA requires five structural elements, including the 5′ cap, 3′ poly(A) tail, protein-coding sequence and 5′ and 3′ untranslated regions (UTRs) with sequence engineering of one or more of these elements may be utilized to improve translation in vivo.

[0390] In some embodiments, the isolated mRNA is not self-replicating.

[0391] In some embodiment, the isolated mRNA comprises and/or encodes one or more 5′terminal cap (or cap structure), 3′terminal cap, 5′untranslated region, 3′untranslated region, a tailing region, or any combination thereof.

[0392] In some embodiments, the capping region of the isolated mRNA region may be from 1 to 10, e.g., 2-9, 3-8, 4-7, 1-5, 5-10, or at least 2, or 10 or fewer nucleotides in length. In some embodiments, the cap is absent.

[0393] In an exemplary embodiment, mRNA can be synthesized in vitro and transferred directly into target cells, and may be further modified. For example, the mRNA may comprise a 5′ end of endogenous mRNAs modified with a 7-methylguanosine cap structure, with polyadenylated 3′ end, which may facilitate protein production. Modification of pyrimidine residues may also be performed to enhance transgene expression from delivered mRNAs, as it may lower stimulation of the innate immune system of host cells. In an example embodiment, the mRNA comprises an anti-reverse cap analog and a 120-nt poly(A) tail, and optionally may comprise cytosine and uridine residues replaced with 5-methylcytosine and pseudouridine. See, U.S. Patent Publication 2019/0151474, incorporated herein by reference.

[0394] In some embodiments, a 5′-cap structure is cap0, cap1, ARCA, inosine, N1-methyl-guanosine, 2′-fluoro-guanosine, 7-deaza-guanosine, 8-oxo-guanosine, 2-amino-guanosine, LNA-guanosine, or 2-azido-guanosine.

[0395] In some embodiments, the 5′terminal cap is 7mG(5′)ppp(5′)NlmpNp, m7GpppG cap, N7-methylguanine. In some embodiments, the 3′terminal cap is a 3′-O-methyl-m7GpppG.

[0396] In some embodiments, the 3′-UTR is an alpha-globin 3′-UTR. In some embodiments, the 5′-UTR comprises a Kozak sequence.

[0397] In some embodiments, the tailing sequence may range from absent to 500 nucleotides in length (e.g., at least 60, 70, 80, 90, 120, 140, 160, 180, 200, 250, 300, 350, 400, 450, or 500 nucleotides). In some embodiments, the tailing region is or includes a polyA tail. Where the tailing region is a polyA tail, the length may be determined in units of or as a function of polyA Binding Protein binding. In this embodiment, the polyA tail is long enough to bind at least 4 monomers of PolyA Binding Protein. PolyA Binding Protein monomers bind to stretches of approximately 38 nucleotides. As such, it has been observed that polyA tails of about 80 nucleotides and 160 nucleotides are functional. In some embodiments, the poly-A tail is at least 160 nucleotides in length.

[0398] In some embodiments, the mRNA polynucleotide includes a stabilization element. In some embodiments, the stabilization element is a histone stem-loop. In some embodiments, the stabilization element is a nucleic acid sequence having increased GC content relative to wild type sequence.

[0399] In an embodiment, it is desirable to reduce the immunogenic sequence motifs of the mRNA for delivery. Exemplary techniques are known in the art, see, e.g. International Patent Publication WO/2020/033720, discussing exemplary immunogenic sequence motifs for removal, including those that can bind human TLR8), incorporated herein by reference.

[0400] The isolated mRNA(s) can be made in part or using only in vitro transcription. Methods of making polynucleotides by in vitro transcription are known in the art and are described in U.S. Provisional Patent Application Nos. 61/618,862, 61/681,645, 61/737,130, 61/618,866, 61/681,647, 61/737,134, 61/618,868, 61/681,648, 61/737,135, 61/618,873, 61/681,650, 61/737,147, 61/618,878, 61/681,654, 61/737,152, 61/618,885, 61/681,658, 61/737,155, 61/618,896, 61/668,157, 61/681,661, 61/737,160, 61/618,911, 61/681,667, 61/737,168, 61/618,922, 61/681,675, 61/737,174, 61/618,935, 61/681,687, 61/737,184, 61/618,945, 61/681,696, 61/737,191, 61/618,953, 61/681,704, 61/737,203; International Publication Nos WO2013151666, WO2013151668, WO2013151663, WO2013151669, WO2013151670, WO2013151664, WO2013151665, WO2013151736, WO2013151672, WO2013151671 WO2013151667, and WO/2020/205793A1; the contents of each of which are herein incorporated by reference in their entireties. Cell-free production methods of making ribonucleic acid, including large scale syntheses are described, for example in U.S. Pat. No. 10,954,541, incorporated herein by reference in its entirety.

[0401] Targeted delivery of mRNA and endosomal escape are generally requirements of effective mRNA use. Lipids, including lipid nanoparticles, lipid-like materials, polymers are particularly preferred delivery vehicles, as detailed elsewhere herein.

### Cargos

[0402] The delivery systems may comprise one or more cargos. The cargos may comprise one or more components of the systems and compositions herein. A cargo may comprise one or more of the following: i) a plasmid encoding one or more proteins components in the compositions and systems such as the TnpB polypeptide and/or functional domains; ii) a plasmid encoding one or more nucleic acid components, iii) mRNA of one or more one or more proteins components in the compositions and systems such as the TnpB polypeptide and/or functional domains; iv) one or more nucleic acid component molecules; v) one or more proteins components in the compositions and systems such as the TnpB polypeptide and/or functional domains; vi) any combination thereof. The one or more protein components may include the nuclei acid-guided nuclease (e.g., Cas), reverse transcriptase, nucleotide deaminase, retrotransposon protein, other functional domain, or any combination thereof.

[0403] In some examples, a cargo may comprise a plasmid encoding one or more proteins components in the compositions and systems such as the TnpB polypeptide and/or functional domains and one or more (e.g., a plurality of) nucleic acid component molecules. In some cases, the plasmid may also encode a recombination template (e.g., for HDR). In one embodiment, a cargo may comprise mRNA encoding one or more protein components and one or more nucleic acid component molecules.

[0404] In some examples, a cargo may comprise one or more protein components and one or more nucleic acid component molecules, e.g., in the form of ribonucleoprotein complexes (RNP). The ribonucleoprotein complexes may be delivered by methods and systems herein. In some cases, the ribonucleoprotein may be delivered by way of a polypeptide-based shuttle agent. In one example, the ribonucleoprotein may be delivered using synthetic peptides comprising an endosome leakage domain (ELD) operably linked to a cell penetrating domain (CPD), to a histidine-rich domain and a CPD, e.g., as describe in WO2016161516. RNP may also be used for delivering the compositions and systems to plant cells, e.g., as described in Wu J W, et al., Nat Biotechnol. 2015 November; 33(11):1162-4.

### Physical Delivery

[0405] In one embodiment, the cargos may be introduced to cells by physical delivery methods. Examples of physical methods include microinjection, electroporation, and hydrodynamic delivery. Both nucleic acid and proteins may be delivered using such methods. For example, one or more protein components may be prepared in vitro, isolated, (refolded, purified if needed), and introduced to cells.

### Microinjection

[0406] Microinjection of the cargo directly to cells can achieve high efficiency, e.g., above 90% or about 100%. In one embodiment, microinjection may be performed using a microscope and a needle (e.g., with 0.5-5.0 m in diameter) to pierce a cell membrane and deliver the cargo directly to a target site within the cell. Microinjection may be used for in vitro and ex vivo delivery.

[0407] Plasmids comprising coding sequences for one or more protein components and/or nucleic acid components, mRNAs, and/or nucleic acid component molecules, may be microinjected. In some cases, microinjection may be used i) to deliver DNA directly to a cell nucleus, and/or ii) to deliver mRNA (e.g., in vitro transcribed) to a cell nucleus or cytoplasm. In certain examples, microinjection may be used to delivery nucleic acid component directly to the nucleus and mRNA to the cytoplasm, e.g., facilitating translation and shuttling of one or more protein components to the nucleus.

[0408] Microinjection may be used to generate genetically modified animals. For example, gene editing cargos may be injected into zygotes to allow for efficient germline modification. Such approach can yield normal embryos and full-term mouse pups harboring the desired modification(s). Microinjection can also be used to provide transiently up- or down-regulate a specific gene within the genome of a cell, e.g., using TnpB.

### Electroporation

[0409] In one embodiment, the cargos and/or delivery vehicles may be delivered by electroporation. Electroporation may use pulsed high-voltage electrical currents to transiently open nanometer-sized pores within the cellular membrane of cells suspended in buffer, allowing for components with hydrodynamic diameters of tens of nanometers to flow into the cell. In some cases, electroporation may be used on various cell types and efficiently transfer cargo into cells. Electroporation may be used for in vitro and ex vivo delivery.

[0410] Electroporation may also be used to deliver the cargo to into the nuclei of mammalian cells by applying specific voltage and reagents, e.g., by nucleofection. Such approaches include those described in Wu Y, et al. (2015). Cell Res 25:67-79; Ye L, et al. (2014). Proc Natl Acad Sci USA 111:9591-6; Choi P S, Meyerson M. (2014). Nat Commun 5:3728; Wang J, Quake S R. (2014). Proc Natl Acad Sci 111:13157-62. Electroporation may also be used to deliver the cargo in vivo, e.g., with methods described in Zuckermann M, et al. (2015). Nat Commun 6:7391.

### Hydrodynamic Delivery

[0411] Hydrodynamic delivery may also be used for delivering the cargos, e.g., for in vivo delivery. In some examples, hydrodynamic delivery may be performed by rapidly pushing a large volume (8-10% body weight) solution containing the gene editing cargo into the bloodstream of a subject (e.g., an animal or human), e.g., for mice, via the tail vein. As blood is incompressible, the large bolus of liquid may result in an increase in hydrodynamic pressure that temporarily enhances permeability into endothelial and parenchymal cells, allowing for cargo not normally capable of crossing a cellular membrane to pass into cells. This approach may be used for delivering naked DNA plasmids and proteins. The delivered cargos may be enriched in liver, kidney, lung, muscle, and/or heart.

### Transfection

[0412] The cargos, e.g., nucleic acids, may be introduced to cells by transfection methods for introducing nucleic acids into cells. Examples of transfection methods include calcium phosphate-mediated transfection, cationic transfection, liposome transfection, dendrimer transfection, heat shock transfection, magnetofection, lipofection, impalefection, optical transfection, proprietary agent-enhanced uptake of nucleic acid.

### Delivery Vehicles

[0413] The delivery systems may comprise one or more delivery vehicles. The delivery vehicles may deliver the cargo into cells, tissues, organs, or organisms (e.g., animals or plants). The cargos may be packaged, carried, or otherwise associated with the delivery vehicles. The delivery vehicles may be selected based on the types of cargo to be delivered, and/or the delivery is in vitro and/or in vivo. Examples of delivery vehicles include vectors, viruses, non-viral vehicles, and other delivery reagents described herein.

[0414] The delivery vehicles in accordance with the present invention may have a greatest dimension (e.g. diameter) of less than 100 microns (μm). In one embodiment, the delivery vehicles have a greatest dimension of less than 10 μm. In one embodiment, the delivery vehicles may have a greatest dimension of less than 2000 nanometers (nm). In one embodiment, the delivery vehicles may have a greatest dimension of less than 1000 nanometers (nm). In one embodiment, the delivery vehicles may have a greatest dimension (e.g., diameter) of less than 900 nm, less than 800 nm, less than 700 nm, less than 600 nm, less than 500 nm, less than 400 nm, less than 300 nm, less than 200 nm, less than 150 nm, or less than 100 nm, less than 50 nm. In one embodiment, the delivery vehicles may have a greatest dimension ranging between 25 nm and 200 nm.

[0415] In one embodiment, the delivery vehicles may be or comprise particles. For example, the delivery vehicle may be or comprise nanoparticles (e.g., particles with a greatest dimension (e.g., diameter) no greater than 1000 nm. The particles may be provided in different forms, e.g., as solid particles (e.g., metal such as silver, gold, iron, titanium), non-metal, lipid-based solids, polymers), suspensions of particles, or combinations thereof. Metal, dielectric, and semiconductor particles may be prepared, as well as hybrid structures (e.g., core-shell particles). Nanoparticles may also be used to deliver the compositions and systems to plant cells, e.g., as described in International Patent Publication No. WO 2008042156, US Publication Application No. US 20130185823, and International Patent Publication No WO 2015/089419.

### Vectors

[0416] The systems, compositions, and/or delivery systems may comprise one or more vectors. The present disclosure also includes vector systems. A vector system may comprise one or more vectors. In one embodiment, a vector refers to a nucleic acid molecule capable of transporting another nucleic acid to which it has been linked. Vectors include nucleic acid molecules that are single-stranded, double-stranded, or partially double-stranded; nucleic acid molecules that comprise one or more free ends, no free ends (e.g., circular); nucleic acid molecules that comprise DNA, RNA, or both; and other varieties of polynucleotides known in the art. A vector may be a plasmid, e.g., a circular double stranded DNA loop into which additional DNA segments can be inserted, such as by standard molecular cloning techniques. Certain vectors may be capable of autonomous replication in a host cell into which they are introduced (e.g., bacterial vectors having a bacterial origin of replication and episomal mammalian vectors). Some vectors (e.g., non-episomal mammalian vectors) are integrated into the genome of a host cell upon introduction into the host cell, and thereby are replicated along with the host genome. In certain examples, vectors may be expression vectors, e.g., capable of directing the expression of genes to which they are operatively-linked. In some cases, the expression vectors may be for expression in eukaryotic cells. Common expression vectors of utility in recombinant DNA techniques are often in the form of plasmids.

[0417] Examples of vectors include pGEX, pMAL, pRIT5, E. coli expression vectors (e.g., pTrc, pET 11d, yeast expression vectors (e.g., pYepSec1, pMFa, pJRY88, pYES2, and picZ, Baculovirus vectors (e.g., for expression in insect cells such as SF9 cells) (e.g., pAc series and the pVL series), mammalian expression vectors (e.g., pCDM8 and pMT2PC.

[0418] A vector may comprise i) one or more protein components encoding sequence(s), and/or ii) a single, or at least 2, at least 3, at least 4, at least 5, at least 6, at least 7, at least 8, at least 9, at least 10, at least 12, at least 14, at least 16, at least 32, at least 48, at least 50 nucleic acid component molecule(s) encoding sequences. In a single vector there can be a promoter for each RNA coding sequence. Alternatively or additionally, in a single vector, there may be a promoter controlling (e.g., driving transcription and/or expression) multiple RNA encoding sequences.

[0419] Furthermore, that compositions or systems may be delivered via a vector, e.g., a separate vector or the same vector that is encoding the complex. When provided by a separate vector, the RNA that targets TnpB polypeptide expression can be administered sequentially or simultaneously. When administered sequentially, the RNA that targets TnpB polypeptide expression is to be delivered after the RNA that is intended for e.g. gene editing or gene engineering. This period may be a period of minutes (e.g. 5 minutes, 10 minutes, 20 minutes, 30 minutes, 45 minutes, 60 minutes). This period may be a period of hours (e.g. 2 hours, 4 hours, 6 hours, 8 hours, 12 hours, 24 hours). This period may be a period of days (e.g. 2 days, 3 days, 4 days, 7 days). This period may be a period of weeks (e.g. 2 weeks, 3 weeks, 4 weeks). This period may be a period of months (e.g. 2 months, 4 months, 8 months, 12 months). This period may be a period of years (2 years, 3 years, 4 years). In this fashion, the TnpB polypeptide associates with a first nucleic acid component molecule capable of hybridizing to a first target, such as a genomic locus or loci of interest and undertakes the function(s) desired of the system (e.g., gene engineering); and subsequently the TnpB polypeptide may then associate with the second nucleic acid component molecule capable of hybridizing to the sequence comprising at least part of the TnpB polypeptide. Where the nucleic acid component molecule targets the sequences encoding expression of the TnpB polypeptide, the enzyme becomes impeded and the system becomes self-inactivating. In the same manner, RNA that targets TnpB polypeptide expression applied via, for example liposome, lipofection, particles, microvesicles as explained herein, may be administered sequentially or simultaneously. Similarly, self-inactivation may be used for inactivation of one or more nucleic acid component molecule used to target one or more targets.

### Regulatory Elements

[0420] A vector may comprise one or more regulatory elements. The regulatory element(s) may be operably linked to coding sequences of TnpB polypeptide, accessory proteins, nucleic acid component scaffold and/or nucleic acid component molecule or combination thereof. The term “operably linked” is intended to mean that the nucleotide sequence of interest is linked to the regulatory element(s) in a manner that allows for expression of the nucleotide sequence (e.g. in an in vitro transcription/translation system or in a host cell when the vector is introduced into the host cell). In certain examples, a vector may comprise: a first regulatory element operably linked to a nucleotide sequence encoding a TnpB polypeptide, and a second regulatory element operably linked to a nucleotide sequence encoding a nucleic acid component molecule.

[0421] Examples of regulatory elements include promoters, enhancers, internal ribosomal entry sites (IRES), and other expression control elements (e.g., transcription termination signals, such as polyadenylation signals and poly-U sequences). Such regulatory elements are described, for example, in Goeddel, GENE EXPRESSION TECHNOLOGY: METHODS IN ENZYMOLOGY 185, Academic Press, San Diego, Calif. (1990). Regulatory elements include those that direct constitutive expression of a nucleotide sequence in many types of host cell and those that direct expression of the nucleotide sequence only in certain host cells (e.g., tissue-specific regulatory sequences). A tissue-specific promoter may direct expression primarily in a desired tissue of interest, such as muscle, neuron, bone, skin, blood, specific organs (e.g., liver, pancreas), or particular cell types (e.g., lymphocytes). Regulatory elements may also direct expression in a temporal-dependent manner, such as in a cell-cycle dependent or developmental stage-dependent manner, which may or may not also be tissue or cell-type specific.

[0422] Examples of promoters include one or more pol III promoter (e.g., 1, 2, 3, 4, 5, or more pol III promoters), one or more pol II promoters (e.g., 1, 2, 3, 4, 5, or more pol II promoters), one or more pol I promoters (e.g., 1, 2, 3, 4, 5, or more pol I promoters), or combinations thereof. Examples of pol III promoters include, but are not limited to, U6 and H1 promoters. Examples of pol II promoters include, but are not limited to, the retroviral Rous sarcoma virus (RSV) LTR promoter (optionally with the RSV enhancer), the cytomegalovirus (CMV) promoter (optionally with the CMV enhancer), the SV40 promoter, the dihydrofolate reductase promoter, the R-actin promoter, the phosphoglycerol kinase (PGK) promoter, and the EF1α promoter.

### Viral Vectors

[0423] The cargos may be delivered by viruses. In one embodiment, viral vectors are used. A viral vector may comprise virally-derived DNA or RNA sequences for packaging into a virus (e.g., retroviruses, replication defective retroviruses, adenoviruses, replication defective adenoviruses, and adeno-associated viruses). Viral vectors also include polynucleotides carried by a virus for transfection into a host cell. Viruses and viral vectors may be used for in vitro, ex vivo, and/or in vivo deliveries.

### Adeno Associated Virus (AAV)

[0424] The systems and compositions herein may be delivered by adeno associated virus (AAV). AAV vectors may be used for such delivery. AAV, of the Dependovirus genus and Parvoviridae family, is a single stranded DNA virus. In one embodiment, AAV may provide a persistent source of the provided DNA, as AAV delivered genomic material can exist indefinitely in cells, e.g., either as exogenous DNA or, with some modification, be directly integrated into the host DNA. In one embodiment, AAV do not cause or relate with any diseases in humans. The virus itself is able to efficiently infect cells while provoking little to no innate or adaptive immune response or associated toxicity.

[0425] Examples of AAV that can be used herein include AAV-1, AAV-2, AAV-3, AAV-4, AAV-5, AAV-6, AAV-8, and AAV-9. The type of AAV may be selected with regard to the cells to be targeted; e.g., one can select AAV serotypes 1, 2, 5 or a hybrid capsid AAV1, AAV2, AAV5 or any combination thereof for targeting brain or neuronal cells; and one can select AAV4 for targeting cardiac tissue. AAV8 is useful for delivery to the liver. AAV-2-based vectors were originally proposed for CFTR delivery to CF airways, other serotypes such as AAV-1, AAV-5, AAV-6, and AAV-9 exhibit improved gene transfer efficiency in a variety of models of the lung epithelium. Examples of cell types targeted by AAV are described in Grimm, D. et al, J. Virol. 82: 5887-5911 (2008)), and shown as follows in Table 3:

TABLE 3

| Cell Line | AAV-1 | AAV-2 | AAV-3 | AAV-4 | AAV-5 | AAV-6 | AAV-8 | AAV-9 |
|---|---|---|---|---|---|---|---|---|
| Huh-7 | 13 | 100 | 2.5 | 0.0 | 0.1 | 10 | 0.7 | 0.0 |
| HEK293 | 25 | 100 | 2.5 | 0.1 | 0.1 | 5 | 0.7 | 0.1 |
| HeLa | 3 | 100 | 2.0 | 0.1 | 6.7 | 1 | 0.2 | 0.1 |
| HepG2 | 3 | 100 | 16.7 | 0.3 | 1.7 | 5 | 0.3 | ND |
| Hep1A | 20 | 100 | 0.2 | 1.0 | 0.1 | 1 | 0.2 | 0.0 |
| 911 | 17 | 100 | 11 | 0.2 | 0.1 | 17 | 0.1 | ND |
| CHO | 100 | 100 | 14 | 1.4 | 333 | 50 | 10 | 1.0 |
| COS | 33 | 100 | 33 | 3.3 | 5.0 | 14 | 2.0 | 0.5 |
| MeWo | 10 | 100 | 20 | 0.3 | 6.7 | 10 | 1.0 | 0.2 |
| NIH3T3 | 10 | 100 | 2.9 | 2.9 | 0.3 | 10 | 0.3 | ND |
| A549 | 14 | 100 | 20 | ND | 0.5 | 10 | 0.5 | 0.1 |
| HT1180 | 20 | 100 | 10 | 0.1 | 0.3 | 33 | 0.5 | 0.1 |
| Monocytes | 1111 | 100 | ND | ND | 125 | 1429 | ND | ND |
| Immature DC | 2500 | 100 | ND | ND | 222 | 2857 | ND | ND |
| Mature DC | 2222 | 100 | ND | ND | 333 | 3333 | ND | ND |

[0426] The AAV particles may be created in HEK 293 T cells. Once particles with specific tropism have been created, they are used to infect the target cell line much in the same way that native viral particles do. This may allow for persistent presence of the components in the infected cell type, and what makes this version of delivery particularly suited to cases where long-term expression is desirable. Examples of doses and formulations for AAV that can be used include those describe in U.S. Pat. Nos. 8,454,972 and 8,404,658.

[0427] Various strategies may be used for delivery the systems and compositions herein with AAVs. In some examples, coding sequences of TnpB polypeptide and nucleic acid component may be packaged directly onto one DNA plasmid vector and delivered via one AAV particle. In some examples, AAVs may be used to deliver nucleic acid components into cells that have been previously engineered to express TnpB polypeptide. In some examples, coding sequences of TnpB polypeptide and nucleic acid component may be made into two separate AAV particles, which are used for co-transfection of target cells. In some examples, markers, tags, and other sequences may be packaged in the same AAV particles as coding sequences of TnpB polypeptide and/or nucleic acid components.

### Lentiviruses

[0428] The systems and compositions herein may be delivered by lentiviruses. Lentiviral vectors may be used for such delivery. Lentiviruses are complex retroviruses that have the ability to infect and express their genes in both mitotic and post-mitotic cells.

[0429] Examples of lentiviruses include human immunodeficiency virus (HIV), which may use its envelope glycoproteins of other viruses to target a broad range of cell types; minimal non-primate lentiviral vectors based on the equine infectious anemia virus (EIAV), which may be used for ocular therapies. In one embodiment, self-inactivating lentiviral vectors with an siRNA targeting a common exon shared by HIV tat/rev, a nucleolar-localizing TAR decoy, and an anti-CCR5-specific hammerhead ribozyme (see, e.g., DiGiusto et al. (2010) Sci Transl Med 2:36ra43) may be used/and or adapted to the TnpB system herein.

[0430] Lentiviruses may be pseudo-typed with other viral proteins, such as the G protein of vesicular stomatitis virus. In doing so, the cellular tropism of the lentiviruses can be altered to be as broad or narrow as desired. In some cases, to improve safety, second- and third-generation lentiviral systems may split essential genes across three plasmids, which may reduce the likelihood of accidental reconstitution of viable viral particles within cells.

[0431] In some examples, leveraging the integration ability, lentiviruses may be used to create libraries of cells comprising various genetic modifications, e.g., for screening and/or studying genes and signaling pathways.

### Adenoviruses

[0432] The systems and compositions herein may be delivered by adenoviruses. Adenoviral vectors may be used for such delivery. Adenoviruses include nonenveloped viruses with an icosahedral nucleocapsid containing a double stranded DNA genome. Adenoviruses may infect dividing and non-dividing cells. In one embodiment, adenoviruses do not integrate into the genome of host cells, which may be used for limiting off-target effects of systems in gene editing applications.

### Viral Vehicles for Delivery to Plants

[0433] The systems and compositions may be delivered to plant cells using viral vehicles. In particular embodiments, the compositions and systems may be introduced in the plant cells using a plant viral vector (e.g., as described in Scholthof et al. 1996, Annu Rev Phytopathol. 1996; 34:299-323). Such viral vector may be a vector from a DNA virus, e.g., geminivirus (e.g., cabbage leaf curl virus, bean yellow dwarf virus, wheat dwarf virus, tomato leaf curl virus, maize streak virus, tobacco leaf curl virus, or tomato golden mosaic virus) or nanovirus (e.g., Faba bean necrotic yellow virus). The viral vector may be a vector from an RNA virus, e.g., tobravirus (e.g., tobacco rattle virus, tobacco mosaic virus), potexvirus (e.g., potato virus X), or hordeivirus (e.g., barley stripe mosaic virus). The replicating genomes of plant viruses may be non-integrative vectors.

### Non-Viral Vehicles

[0434] The delivery vehicles may comprise non-viral vehicles. In general, methods and vehicles capable of delivering nucleic acids and/or proteins may be used for delivering the systems compositions herein. Examples of non-viral vehicles include lipid nanoparticles, cell-penetrating peptides (CPPs), DNA nanoclews, gold nanoparticles, streptolysin O, multifunctional envelope-type nanodevices (MENDs), lipid-coated mesoporous silica particles, and other inorganic nanoparticles. Targeted delivery of RNA and endosomal escape are generally requirements of effective RNA use. Lipids, including lipid nanoparticles, lipid-like materials, polymers are particularly preferred delivery vehicles for RNA, as detailed further below.

### Nanoparticles

[0435] Delivery vehicles for use with the present compositions may comprise nanoparticles including lipid nanoparticles. Other particle systems, including polymer based materials such as calcium phosphate-silicate nanoparticle, a calcium phosphate nanoparticle, a silica nanoparticle, and poly(amido-amine), poly-beta amino-esters (PBAEs), and polyethylenimine (PEI) can be used. See, e.g. Trepotec et al. Mol. Therapy 27:4 Apr. 2019. In an embodiment, the exemplary nanoparticle comprises modified dendrimers comprising cores, one or more of homogeneous or heterogeneous intermediate and terminal layers for the enclosure and delivery of nucleic acid, e.g. mRNA. Modified dendrimers can be preferably comprise one or more polyester dendrimers, for example, comprising a core branching into one or more generations of polyester units, with polyester attached at surface via amine linkers (e.g., polyamine) to hydrophobic units (e.g., fatty acid derivative), including polyamidoamine (PAMAM) dendrimers, polypropylene imine (PPI) dendrimers, or polyethylene imine (PEI) dendrimers. The plurality of intermediate layers may comprise both at least one layer modified for endosomal escape and a polyfluorocarbon. Exemplary molecules and methods of making can be found in WO/2020/132196, and WO 2021/207020, incorporated herein by reference. Formulas IB, II and III of International Patent Publication WO 2021/207020 are specifically incorporated herein by reference as exemplary nanoparticle delivery vehicles for the delivery of nucleic acids.

### Lipid Particles

[0436] The delivery vehicles may comprise lipid particles, e.g., lipid nanoparticles (LNPs) and liposomes. Lipidic aminoglycosides and derivatives thereof are known in the art for delivery of RNA, including dioleylamine-A-succinyl-neomycin (“DOSN”), dioleylamine-A-succinyl-paromomycin (“DOSP”), NeoCHol. NeoSucChol, ParomoChol. ParomoCapSucDOLA, ParamoLysSucDOLA, NeoDiSucDODA, NeodiLysSucDOLA, and [ParomoLys]2-Glu-Lys-[SucDOLA]2 as detailed in International Patent Publication WO 2008/040792, incorporated herein by reference.

### Lipid Nanoparticles (LNPs)

[0437] LNPs may encapsulate nucleic acids within cationic lipid particles (e.g., liposomes), and may be delivered to cells with relative ease. In some examples, lipid nanoparticles do not contain any viral components, which helps minimize safety and immunogenicity concerns. Lipid particles may be used for in vitro, ex vivo, and in vivo deliveries. Lipid particles may be used for various scales of cell populations.

[0438] In some examples. LNPs may be used for delivering DNA molecules (e.g., those comprising coding sequences of TnpB polypeptide and/or nucleic acid component) and/or RNA molecules (e.g., mRNA of TnpB polypeptide, nucleic acid component molecules). In certain cases, LNPs may be use for delivering RNP complexes of TnpB polypeptide/nucleic acid component.

[0439] Cationic lipids form complexes with mRNA to form a lipoplex which is then endocytosed by cells. In an example embodiment, the LNP comprises a cationic lipid, a helper lipid, cholesterol, and polyethylene glycol (PEG). In an example embodiment, the LNP can comprise paromomycin-based cationic lipids, with either an amide or a phosphoramide linker, and on the other hand two imidazole-based neutral lipids, having as well either an amide or a phosphoramide function as linker. In an embodiment, assemblies can be obtained when the cationic and helper lipids comprise different linkers. See, Colombani, et al., Self-assembling complexes between binary mixtures of lipids with different linkers and nucleic acids promote universal mRNA, DNA and siRNA delivery. J. Control Release. (2017) doi: 10.1016/j.jconrel.2017.01.041

[0440] In an embodiment, the nanoparticles can be developed according to selective organ targeting (SORT) wherein multiple classes of lipid nanoparticles are systematically engineered to exclusively edit extrahepatic tissues via addition of a supplemental SORT molecule. See, e.g. Cheng et al., Nature Nanotechnology 15, 313-320 2020). The approach has been shown with dendrimer lipid nanoparticles (DLNPs), stable nucleic acid lipid particles (SNALPs), and lipid-like nanoparticles (LLNPs), including with use of ionizable cationic lipids (5A2-SC8, C12-200, or DLin-MC3-DMA)36,48,49, zwitterionic lipids (DOPE or DSPC), cholesterol, DMG-PEG, and permanently cationic lipids (DOTAP, DDAB or EPC). Wei et al., Systemic nanoparticle delivery of CRISPR-Cas9 ribonucle proteins for effective tissue specific genome editing., Nature Comm. (2020) 11:3232, doi:10.1038/s4146020170293, incorporated herein by reference.

[0441] In one embodiment, the composition comprises a plurality of lipid nanoparticles comprising a cationic lipid, a neutral lipid, a cholesterol, a PEG lipid, or a combination thereof, wherein the plurality of lipid nanoparticles optionally has a mean particle size of between 80 nm and 160 nm; and wherein the lipid nanoparticles comprise one or more polynucleotides encoding at least one polypeptide of the present invention, e.g. TnpB polypeptide.

[0442] Components in LNPs may comprise cationic lipids 1,2-dilineoyl-3-dimethylammonium-propane (DLinDAP), 1,2-dilinoleyloxy-3-N,N-dimethylaminopropane (DLinDMA), 1,2-dilinoleyloxyketo-N,N-dimethyl-3-aminopropane (DLinK-DMA), 1,2-dilinoleyl-4-(2-dimethylaminoethyl)-[1,3]-dioxolane (DLinKC2-DMA), (3-o-[2″-(methoxypolyethyleneglycol 2000) succinoyl]-1,2-dimyristoyl-sn-glycol (PEG-S-DMG), R-3-[(ro-methoxy-poly(ethylene glycol)2000) carbamoyl]-1,2-dimyristyloxlpropyl-3-amine (PEG-C-DOMG, and any combination thereof. Preparation of LNPs and encapsulation may be adapted from Rosin et al, Molecular Therapy, vol. 19, no. 12, pages 1286-2200, Dec. 2011).

[0443] Further cationic lipids may comprise di-O-octadecenyl-3-trimethylammonium-propane, (DOTMA), 1,2-dioleoyl-sn-glycero-3-phosphoethanolamine (DOPE), 1,2-dioleoyl-3-trimethylammonium-propane (DOTAP), a biodegradable analogue of DOTMA, alone or in combination with further materials such as, for example cholesterol. Such Cationic lipid LNPs can be delivered as, for example, nanoemulsions and may further incorporate carbonate apatite (increase interaction between particles and cell membranes), or with conjugation with fibronectin, accelerating endocytosis. Other quaternary ammonium lipids, such as Dimethyldioctadecylammonium bromide (DDAB) are also 2,3-dioleyloxy-N-[2-(sperminecarboxamido)ethyl]-N,N-dimethyl-1-propanaminium trifluoroacetate (DOSPA) are also contemplated for use in delivery.

[0444] Lipid nanoparticles for mRNA delivery can comprise 2-(((((3S,8S,9S,10R,13R,14S,17R)-10,13-dimethyl-17-((R)-6-methylheptan-2-yl)-2,3,4,7,8,9,10,11,12,13,14,15,16,17-tetradecahydro-1H-cyclopenta[a]phenanthren-3-yl)oxy)carbonyl)amino)-N,N-bis(2-hydroxyethyl)-N-methylethan-1-aminium bromide (BHEM—Cholesterol). See, Zhang, Y. et al. In situ repurposing of dendritic cells with CRISPR/Cas9-based nanomedicine to induce transplant tolerance. Biomaterials 217, 119302 (2019), incorporated herein by reference.

[0445] In some embodiments, the lipid nanoparticle comprises a molar ratio of 20-60% ionizable cationic lipid, 5-25% non-cationic lipid, 25-55% sterol, and 0.5-15% PEG-modified lipid.

[0446] In some embodiments, the lipid nanoparticle is any nanoparticle described in U.S. Pat. No. 10,442,756, and/or comprises any compound described in U.S. Pat. No. 10,442,756, including but not limited to a nanoparticle according to any one of Formulas (IA) or (II) described therein.

[0447] In some embodiments, the lipid nanoparticle is any nanoparticle described in e.g., U.S. Pat. No. 10,266,485, and/or comprises any compound described in U.S. Pat. No. 10,266,485, including but not limited to a nanoparticle according to Formula (II) described therein.

[0448] In some embodiments, the lipid nanoparticle is a nanoparticle described in U.S. Pat. No. 9,868,692, and/or comprises a compound described in e.g., U.S. Pat. No. 9,868,692, including but not limited to a nanoparticle according to Formula (I), (1A), (II), (IIa), (IIb), (IIc), (IId), (IIe),

[0449] In some embodiments, a lipid nanoparticle comprises compounds of Formula (I) and/or Formula (II) as described in U.S. patent Ser. No. 10/272,150.

[0450] In some embodiments, the mRNA is formulated in a lipid nanoparticle that comprises a compound selected from Compounds 3, 18, 20, 25, 26, 29, 30, 60, 108-112 and 122 of U.S. Pat. No. 10,272,150.

[0451] In some embodiments, at least 80% (e.g., 85%, 90%, 95%, 98%, 99%) of the uracil in the open reading frame have a chemical modification, optionally wherein the vaccine is formulated in a lipid nanoparticle (e.g., a lipid nanoparticle comprises a cationic lipid, a PEG-modified lipid, a sterol and a non-cationic lipid).

[0452] In some embodiments, the lipid nanoparticle has a mean diameter of 50-200 nm.

[0453] In some embodiments, a lipid nanoparticle comprises Compounds 3, 18, 20, 25, 26, 29, 30, 60, 108-112, or 122 as set forth in U.S. patent Ser. No. 10/272,150.

[0454] In some embodiments, the lipid nanoparticle has a polydispersity value of less than 0.4 (e.g., less than 0.3, 0.2 or 0.1).

[0455] In some embodiments, a plurality of lipid nanoparticles, such as when contained in a formulation, has a mean PDI of between 0.02 and 0.2. In some embodiments, a plurality of lipid nanoparticles, such as when contained in a formulation comprising one or more polynucleotide(s), has a mean lipid to polynucleotide ratio (wt/wt) of between 10 and 20.

[0456] In some embodiments, the lipid nanoparticle has a net neutral charge at a neutral pH value.

### Liposomes

[0457] In one embodiment, a lipid particle may be liposome. Liposomes are spherical vesicle structures composed of a uni- or multilamellar lipid bilayer surrounding internal aqueous compartments and a relatively impermeable outer lipophilic phospholipid bilayer. In one embodiment, liposomes are biocompatible, nontoxic, can deliver both hydrophilic and lipophilic drug molecules, protect their cargo from degradation by plasma enzymes, and transport their load across biological membranes and the blood brain barrier (BBB).

[0458] Liposomes can be made from several different types of lipids, e.g., phospholipids. A liposome may comprise natural phospholipids and lipids such as 1,2-distearoryl-sn-glycero-3-phosphatidyl choline (DSPC), sphingomyelin, egg phosphatidylcholines, monosialoganglioside, or any combination thereof.

[0459] Several other additives may be added to liposomes in order to modify their structure and properties. For instance, liposomes may further comprise cholesterol, sphingomyelin, and/or 1,2-dioleoyl-sn-glycero-3-phosphoethanolamine (DOPE), e.g., to increase stability and/or to prevent the leakage of the liposomal inner cargo.

[0460] In one embodiment, the liposome comprises a transport polymer, which may optionally be branched, comprising at least 10 amino acids and a ratio of histidine to non-histidine amino acids greater than 1.5 and less than 10. The branched transport polymer can comprise one or more backbones, one or more terminal branches, and optionally, one or more non-terminal branches. See, U.S. Pat. No. 7,070,807, incorporated herein by reference in its entirety. In one embodiment, the transposrt polymer is a Histidine-Lysine co-polymer (HKP) used to package and deliver mRNA and other cargos. See, U.S. Pat. Nos. 7,163,695, and 7,772,201, incorporated herein by reference in their entireties,

### Stable Nucleic-Acid-Lipid Particles (SNALPs)

[0461] In one embodiment, the lipid particles may be stable nucleic acid lipid particles (SNALPs). SNALPs may comprise an ionizable lipid (DLinDMA) (e.g., cationic at low pH), a neutral helper lipid, cholesterol, a diffusible polyethylene glycol (PEG)-lipid, or any combination thereof. In some examples, SNALPs may comprise synthetic cholesterol, dipalmitoylphosphatidylcholine, 3-N-[(w-methoxy polyethylene glycol)2000)carbamoyl]-1,2-dimyrestyloxypropylamine, and cationic 1,2-dilinoleyloxy-3-N,Ndimethylaminopropane. In some examples, SNALPs may comprise synthetic cholesterol, 1,2-distearoyl-sn-glycero-3-phosphocholine, PEG-cDMA, and 1,2-dilinoleyloxy-3-(N;N-dimethyl)aminopropane (DLinDMA)

### Other Lipids

[0462] The lipid particles may also comprise one or more other types of lipids, e.g., cationic lipids, such as amino lipid 2,2-dilinoleyl-4-dimethylaminoethyl-[1,3]-dioxolane (DLin-KC2-DMA), DLin-KC2-DMA4, C12-200 and colipids disteroylphosphatidyl choline, cholesterol, and PEG-DMG.

### Lipoplexes/Polyplexes

[0463] In one embodiment, the delivery vehicles comprise lipoplexes and/or polyplexes. Lipoplexes may bind to negatively charged cell membrane and induce endocytosis into the cells. Examples of lipoplexes may be complexes comprising lipid(s) and non-lipid components. Examples of lipoplexes and polyplexes include FuGENE-6 reagent, a non-liposomal solution containing lipids and other components, zwitterionic amino lipids (ZALs), Ca2p (e.g., forming DNA/Ca²⁺ microcomplexes), polyethenimine (PEI) (e.g., branched PEI), and poly(L-lysine) (PLL). Core-shell structured lipoplyplex delivery platforms can also be used and are one preferred delivery for mRNA, particularly because the core-shell structured particle can protein and gradually release mRNA upon degradation of the polymers. See, U.S. Patent Publication 2018/0360756, incorporated herein by reference.

### Cell Penetrating Peptides

[0464] In one embodiment, the delivery vehicles comprise cell penetrating peptides (CPPs). CPPs are short peptides that facilitate cellular uptake of various molecular cargo (e.g., from nanosized particles to small chemical molecules and large fragments of DNA).

[0465] CPPs may be of different sizes, amino acid sequences, and charges. In some examples, CPPs can translocate the plasma membrane and facilitate the delivery of various molecular cargoes to the cytoplasm or an organelle. CPPs may be introduced into cells via different mechanisms, e.g., direct penetration in the membrane, endocytosis-mediated entry, and translocation through the formation of a transitory structure.

[0466] CPPs may have an amino acid composition that either contains a high relative abundance of positively charged amino acids such as lysine or arginine or has sequences that contain an alternating pattern of polar/charged amino acids and non-polar, hydrophobic amino acids. These two types of structures are referred to as polycationic or amphipathic, respectively. A third class of CPPs are the hydrophobic peptides, containing only apolar residues, with low net charge or have hydrophobic amino acid groups that are crucial for cellular uptake. Another type of CPPs is the trans-activating transcriptional activator (Tat) from Human Immunodeficiency Virus 1 (HIV-1). Examples of CPPs include to Penetratin, Tat (48-60), Transportan, and (R-AhX-R4) (Ahx refers to aminohexanoyl), Kaposi fibroblast growth factor (FGF) signal peptide sequence, integrin 03 signal peptide sequence, polyarginine peptide Args sequence, Guanine rich-molecular transporters, and sweet arrow peptide. Examples of CPPs and related applications also include those described in U.S. Pat. No. 8,372,951.

[0467] CPPs can be used for in vitro and ex vivo work quite readily, and extensive optimization for each cargo and cell type is usually required. In some examples, CPPs may be covalently attached to the TnpB polypeptide directly, which is then complexed with the nucleic acid component and delivered to cells. In some examples, separate delivery of CPP-TnpB and CPP-nucleic acid component to multiple cells may be performed. CPP may also be used to delivery RNPs.

[0468] CPPs may be used to deliver the compositions and systems to plants. In some examples, CPPs may be used to deliver the components to plant protoplasts, which are then regenerated to plant cells and further to plants.

### DNA Nanoclews

[0469] In one embodiment, the delivery vehicles comprise DNA nanoclews. A DNA nanoclew refers to a sphere-like structure of DNA (e.g., with a shape of a ball of yarn). The nanoclew may be synthesized by rolling circle amplification with palindromic sequences that aide in the self-assembly of the structure. The sphere may then be loaded with a payload. An example of DNA nanoclew is described in Sun W et al, J Am Chem Soc. 2014 Oct. 22; 136(42):14722-5; and Sun W et al, Angew Chem Int Ed Engl. 2015 Oct. 5; 54(41):12029-33. DNA nanoclew may have a palindromic sequences to be partially complementary to the nucleic acid component molecule within the TnpB polypeptide:nucleic acid component ribonucleoprotein complex. A DNA nanoclew may be coated, e.g., coated with PEI to induce endosomal escape.

### Gold Nanoparticles

[0470] In one embodiment, the delivery vehicles comprise gold nanoparticles (also referred to AuNPs or colloidal gold). Gold nanoparticles may form complex with cargos, e.g., TnpB polypeptide:nucleic acid component RNP. Gold nanoparticles may be coated, e.g., coated in a silicate and an endosomal disruptive polymer, PAsp(DET). Examples of gold nanoparticles include AuraSense Therapeutics' Spherical Nucleic Acid (SNA™) constructs, and those described in Mout R, et al. (2017). ACS Nano 11:2452-8; Lee K, et al. (2017). Nat Biomed Eng 1:889-901.

iTOP

[0471] In one embodiment, the delivery vehicles comprise iTOP. iTOP refers to a combination of small molecules drives the highly efficient intracellular delivery of native proteins, independent of any transduction peptide. iTOP may be used for induced transduction by osmocytosis and propanebetaine, using NaCl-mediated hyperosmolality together with a transduction compound (propanebetaine) to trigger macropinocytotic uptake into cells of extracellular macromolecules. Examples of iTOP methods and reagents include those described in D'Astolfo D S, Pagliero R J, Pras A, et al. (2015). Cell 161:674-690.

### Polymer-Based Particles

[0472] In one embodiment, the delivery vehicles may comprise polymer-based particles (e.g., nanoparticles). In one embodiment, the polymer-based particles may mimic a viral mechanism of membrane fusion. The polymer-based particles may be a synthetic copy of Influenza virus machinery and form transfection complexes with various types of nucleic acids ((siRNA, miRNA, plasmid DNA or snucleic acid component, mRNA) that cells take up via the endocytosis pathway, a process that involves the formation of an acidic compartment. The low pH in late endosomes acts as a chemical switch that renders the particle surface hydrophobic and facilitates membrane crossing. Once in the cytosol, the particle releases its payload for cellular action. This Active Endosome Escape technology is safe and maximizes transfection efficiency as it is using a natural uptake pathway. In one embodiment, the polymer-based particles may comprise alkylated and carboxyalkylated branched polyethylenimine. In some examples, the polymer-based particles are VIROMER, e.g., VIROMER RNAi, VIROMER RED, VIROMER mRNA. Example methods of delivering the systems and compositions herein include those described in Bawage S S et al., Synthetic mRNA expressed Cas13a mitigates RNA virus infections, biorxiv.org/content/10.1101/370460v1.full doi: doi.org/10.1101/370460, Viromer® RED, a powerful tool for transfection of keratinocytes. doi: 10.13140/RG.2.2.16993.61281, Viromer® Transfection—Factbook 2018: technology, product overview, users' data., doi:10.13140/RG.2.2.23912.16642.

### Streptolysin O (SLO)

[0473] The delivery vehicles may be streptolysin O (SLO). SLO is a toxin produced by Group A streptococci that works by creating pores in mammalian cell membranes. SLO may act in a reversible manner, which allows for the delivery of proteins (e.g., up to 100 kDa) to the cytosol of cells without compromising overall viability. Examples of SLO include those described in Sierig G, et al. (2003). Infect Immun 71:446-55; Walev I, et al. (2001). Proc Natl Acad Sci USA 98:3185-90; Teng K W, et al. (2017). Elife 6:e25460.

### Multifunctional Envelope-Type Nanodevice (MEND)

[0474] The delivery vehicles may comprise multifunctional envelope-type nanodevice (MENDs). MENDs may comprise condensed plasmid DNA, a PLL core, and a lipid film shell. A MEND may further comprise cell-penetrating peptide (e.g., stearyl octaarginine). The cell penetrating peptide may be in the lipid shell. The lipid envelope may be modified with one or more functional components, e.g., one or more of: polyethylene glycol (e.g., to increase vascular circulation time), ligands for targeting of specific tissues/cells, additional cell-penetrating peptides (e.g., for greater cellular delivery), lipids to enhance endosomal escape, and nuclear delivery tags. In some examples, the MEND may be a tetra-lamellar MEND (T-MEND), which may target the cellular nucleus and mitochondria. In certain examples, a MEND may be a PEG-peptide-DOPE-conjugated MEND (PPD-MEND), which may target bladder cancer cells. Examples of MENDs include those described in Kogure K, et al. (2004). J Control Release 98:317-23; Nakamura T, et al. (2012). Acc Chem Res 45:1113-21.

### Lipid-Coated Mesoporous Silica Particles

[0475] The delivery vehicles may comprise lipid-coated mesoporous silica particles. Lipid-coated mesoporous silica particles may comprise a mesoporous silica nanoparticle core and a lipid membrane shell. The silica core may have a large internal surface area, leading to high cargo loading capacities. In one embodiment, pore sizes, pore chemistry, and overall particle sizes may be modified for loading different types of cargos. The lipid coating of the particle may also be modified to maximize cargo loading, increase circulation times, and provide precise targeting and cargo release. Examples of lipid-coated mesoporous silica particles include those described in Du X, et al. (2014). Biomaterials 35:5580-90; Durfee P N, et al. (2016). ACS Nano 10:8325-45.

### Inorganic Nanoparticles

[0476] The delivery vehicles may comprise inorganic nanoparticles. Examples of inorganic nanoparticles include carbon nanotubes (CNTs) (e.g., as described in Bates K and Kostarelos K. (2013). Adv Drug Deliv Rev 65:2023-33.), bare mesoporous silica nanoparticles (MSNPs) (e.g., as described in Luo G F, et al. (2014). Sci Rep 4:6064), and dense silica nanoparticles (SiNPs) (as described in Luo D and Saltzman W M. (2000). Nat Biotechnol 18:893-5).

### Exosomes

[0477] The delivery vehicles may comprise exosomes. Exosomes include membrane bound extracellular vesicles, which can be used to contain and delivery various types of biomolecules, such as proteins, carbohydrates, lipids, and nucleic acids, and complexes thereof (e.g., RNPs). Examples of exosomes include those described in Schroeder A, et al., J Intern Med. 2010 January; 267(1):9-21; El-Andaloussi S, et al., Nat Protoc. 2012 December; 7(12):2112-26; Uno Y, et al., Hum Gene Ther. 2011 June; 22(6):711-9; Zou W, et al., Hum Gene Ther. 2011 April; 22(4):465-75. Exemplary exosomes can be generated from 293F cells, with mRNA-loaded exosomes driving higher mRNA expression than mRNA loaded LNPs in some instances. See, e.g. J. Biol. Chem. (2021) 297(5) 101266

[0478] In some examples, the exosome may form a complex (e.g., by binding directly or indirectly) to one or more components of the cargo. In certain examples, a molecule of an exosome may be fused with first adapter protein and a component of the cargo may be fused with a second adapter protein. The first and the second adapter protein may specifically bind each other, thus associating the cargo with the exosome. Examples of such exosomes include those described in Ye Y, et al., Biomater Sci. 2020 Apr. 28. doi: 10.1039/d0bm00427h.

### Retrovirus Like Delivery Systems

[0479] The delivery vehicle may comprise a retro-virus like protein, such as PEG10, which is capable of incorporating a cargo into a virus-like particle. As such systems can be re-programmed to package specific cargos, polynucleotides encoding components of the TnpB systems disclosed herein may be further modified with a recognition sequence that leads to selective packaging of the TnpB components into such retro-virus like VLPs. Said VLPs may be further modified with fusogenic proteins that impart tissue or cell specificity. Example systems are disclosed in Segel et al. Mammalian retrovirus-like protein PEG10 packages its own mRNA and can be pseudotyped for mRNA delivery. 373 Science, 882-889 (2021), which is incorporated herein by reference. The harnessing of natural proteins that formvirus-like particles and can deliver mRNA cargo, or Selective Endogenous eNcapsidation for cellular Delivery (SEND), may reduce immunogenic response compared to other delivery approaches.

### Genetically Modified Cells and Organisms

[0480] The present disclosure further provides cells comprising one or more components of the compositions and systems herein, e.g., the TnpB polypeptide and/or nucleic acid component(s). Also provided include cells modified by the systems and methods herein, and cell cultures, tissues, organs, organism comprising such cells or progeny thereof. In one embodiment, the present disclosure provides a method of modifying a cell or organism. The cell may be a prokaryotic cell or a eukaryotic cell. The cell may be a mammalian cell. The mammalian cell many be a non-human primate, bovine, porcine, rodent or mouse cell. The cell may be a non-mammalian eukaryotic cell such as poultry, fish or shrimp. The cell may be a therapeutic T cell or antibody-producing B-cell. The cell may also be a plant cell. The plant cell may be of a crop plant such as cassava, corn, sorghum, wheat, or rice. The plant cell may also be of an algae, tree or vegetable. The modification introduced to the cell by the present invention may be such that the cell and progeny of the cell are altered for improved production of biologic products such as an antibody, starch, alcohol or other desired cellular output. The modification introduced to the cell by the present invention may be such that the cell and progeny of the cell include an alteration that changes the biologic product produced.

[0481] In one embodiment, one or more polynucleotide molecules, vectors, or vector systems driving expression of one or more elements of the compositions, systems, or delivery systems comprising one or more elements of the TnpB system are introduced into a host cell such that expression of the elements of the TnpB system direct formation of a TnpB-targeting complex at one or more target sites. In one embodiment of the invention the host cell may be a eukaryotic cell, a prokaryotic cell, or a plant cell.

[0482] In particular embodiments, the host cell is a cell of a cell line. Cell lines are available from a variety of sources known to those with skill in the art (see, e.g., the American Type Culture Collection (ATCC) (Manassas, Va.)). In one embodiment, a cell transfected with one or more vectors described herein is used to establish a new cell line comprising one or more vector-derived sequences. In one embodiment, a cell transiently transfected with the components of a system as described herein (such as by transient transfection of one or more vectors, or transfection with RNA), and modified through the activity of a complex, is used to establish a new cell line comprising cells containing the modification but lacking any other exogenous sequence. In one embodiment, cells transiently or non-transiently transfected with one or more vectors described herein, or cell lines derived from such cells are used in assessing one or more test compounds.

[0483] Further intended are isolated human cells or tissues, plants or non-human animals comprising one or more of the polynucleotide molecules, vectors, vector systems, or cells described in any of the embodiments herein. In an aspect, host cells and cell lines modified by or comprising the compositions, systems or modified enzymes of present invention are provided, including (isolated) stem cells, and progeny thereof.

[0484] In one embodiment, the plants or non-human animals comprise at least one of the system components, polynucleotide molecules, vectors, vector systems, or cells described in any of the embodiments herein at least one tissue type of the plant or non-human animal. In one embodiment, non-human animals comprise at least one of the system components, polynucleotide molecules, vectors, vector systems, or cells described in any of the embodiments herein in at least one tissue type. In one embodiment, the presence of the system components is transient, in that they are degraded over time. In one embodiment, expression of the components of the systems and compositions described in any of the embodiments comprised in polynucleotide molecules, vectors, vector systems, or cells is limited to certain tissue types or regions in the plant or non-human animal. In one embodiment, the expression of the components of the systems and compositions described in any of the embodiments comprised in polynucleotide molecules, vectors, vector systems, or cells is dependent of a physiological cue. In one embodiment, expression of the components of the systems and compositions described in any of the embodiments comprised in polynucleotide molecules, vectors, vector systems, or cells may be triggered by an exogenous molecule. In one embodiment, expression of the components of the systems and compositions described in any of the embodiments comprised in polynucleotide molecules, vectors, vector systems, or cells is dependent on the expression of a non-TnpB molecule in the plant or non-human animal.

### Applications and Uses in General

[0485] The systems, the vector systems, the vectors and the compositions described herein may be used in various nucleic acids-targeting applications, altering or modifying synthesis of a gene product, such as a protein, nucleic acids cleavage, nucleic acids editing, nucleic acids splicing; trafficking of target nucleic acids, tracing of target nucleic acids, isolation of target nucleic acids, visualization of target nucleic acids, etc.

[0486] Aspects of the invention thus also encompass methods and uses of the compositions and systems described herein in genome engineering, e.g. for altering or manipulating the expression of one or more genes or the one or more gene products, in prokaryotic or eukaryotic cells, in vitro, in vivo or ex vivo. In some examples, the target polynucleotides are target sequences within genomic DNA, including nuclear genomic DNA, mitochondrial DNA, or chloroplast DNA.

[0487] Typically, in the context of a TnpB system, formation of a TnpB complex (comprising a nucleic acid component molecule (oRNA) hybridized to a target sequence and complexed with one or more nucleic acid-targeting effector proteins) results in cleavage of one or both DNA or RNA strands in or near (e.g., within 1, 2, 3, 4, 5, 6, 7, 8, 9, 10, 20, 50, or more base pairs from) the target sequence. As used herein the term “sequence(s) associated with a target locus of interest” refers to sequences near the vicinity of the target sequence (e.g. within 1, 2, 3, 4, 5, 6, 7, 8, 9, 10, 20, 50, or more base pairs from the target sequence, wherein the target sequence is comprised within a target locus of interest).

[0488] In one embodiment, the present disclosure provides a method of targeting a polynucleotide, comprising contacting a sample (such as cell, population of cells, tissue, organ, or an organism) that comprises a target polynucleotide with the composition, systems, polynucleotide(s), or vector(s). The contacting may result in modification of a gene product or modification of the amount or expression of a gene product. In some examples, the target sequence of the polynucleotide is a disease-associated target sequence.

[0489] In one embodiment, the present disclosure provides a method of modifying target polynucleotides comprising delivering the composition, the one or more polynucleotides of 2, or one or more vectors to a cell or population of cells comprising the target polynucleotides, wherein the complex directs the reverse transcriptase to the target sequence and the reverse transcriptase facilitates insertion of the donor sequence from the nucleic acid component into the target polynucleotide.

[0490] Examples of target polynucleotides include a sequence associated with a signaling biochemical pathway, e.g., a signaling biochemical pathway-associated gene or polynucleotide. Examples of target polynucleotides include a disease associated gene or polynucleotide. A “disease-associated” gene or polynucleotide refers to any gene or polynucleotide which is yielding transcription or translation products at an abnormal level or in an abnormal form in cells derived from a disease-affected tissues compared with tissues or cells of a non-disease control. It may be a gene that becomes expressed at an abnormally high level; it may be a gene that becomes expressed at an abnormally low level, where the altered expression correlates with the occurrence and/or progression of the disease. A disease-associated gene also refers to a gene possessing mutation(s) or genetic variation that is directly responsible or is in linkage disequilibrium with a gene(s) that is responsible for the etiology of a disease. The transcribed or translated products may be known or unknown, and may be at a normal or abnormal level.

[0491] The target polynucleotide of a complex can be any polynucleotide endogenous or exogenous to the eukaryotic cell. For example, the target polynucleotide can be a polynucleotide residing in the nucleus of the eukaryotic cell. The target polynucleotide can be a sequence coding a gene product (e.g., a protein) or a non-coding sequence (e.g., a regulatory polynucleotide or a junk DNA). Without wishing to be bound by theory, it is believed that the target sequence should be associated with a TAM (targeted adjacent motif); that is, a short sequence recognized by the complex. The precise sequence and length requirements for the TAMdiffer depending on the TnpB polypeptide used, but TAMs are typically 2-5 base pair sequences adjacent the protospacer (that is, the target sequence). TAM specificity can be determined, for example according to the experimental setup described in FIG. 8. In one embodiment, the TAMsequence comprises TCA. In embodiments, the TAMsequence is TCAN, wherein N may comprise any nucleotide. In one embodiment the TAMsequence comprises TCAG or TCAT. A skilled person will be able to identify further TAMsequences for use with a given TnpB polypeptide. Further, engineering of the TAMInteracting (PI) domain may allow programing of TAMspecificity, improve target site recognition fidelity, and increase the versatility of the TnpB polypeptide, genome engineering platform. TnpB polypeptide may be engineered to alter their TAMspecificity, for example as described in Kleinstiver B P et al. Engineered CRISPR-Cas9 nucleases with altered TAMspecificities. Nature. 2015 Jul. 23; 523(7561):481-5. doi: 10.1038/nature14592.

[0492] Examples of target polynucleotides include a sequence associated with a signaling biochemical pathway, e.g., a signaling biochemical pathway-associated gene or polynucleotide. Examples of target polynucleotides include a disease associated gene or polynucleotide. A “disease-associated” gene or polynucleotide refers to any gene or polynucleotide which is yielding transcription or translation products at an abnormal level or in an abnormal form in cells derived from a disease-affected tissues compared with tissues or cells of a non-disease control. It may be a gene that becomes expressed at an abnormally high level; it may be a gene that becomes expressed at an abnormally low level, where the altered expression correlates with the occurrence and/or progression of the disease. A disease-associated gene also refers to a gene possessing mutation(s) or genetic variation that is directly responsible or is in linkage disequilibrium with a gene(s) that is responsible for the etiology of a disease. The transcribed or translated products may be known or unknown, and may be at a normal or abnormal level.

[0493] Aspects of the invention relate to a method of targeting a polynucleotide, comprising contacting a sample that comprises the polynucleotide with a composition, system or TnpB polypeptide as described in any embodiment herein, a delivery system comprising a composition, system or TnpB polypeptide as described in any embodiment herein, a polynucleotide comprising a composition, system or TnpB polypeptide as described in any embodiment herein, a vector comprising a composition, system or TnpB polypeptide as described in any embodiment herein, or a vector system comprising a composition, system or TnpB polypeptide as described in any embodiment herein. In one embodiment, a target polynucleotide is contacted with at least two different composition, system or TnpB polypeptides. In further embodiments, the two different TnpB polypeptide have different target polynucleotide specificities, or degrees of specificity. In one embodiment, the two different TnpB polypeptide have a different TAMspecificity.

[0494] Also envisaged are methods of targeting a polynucleotide, comprising contacting a sample that comprises the polynucleotide with the composition and systems, vectors, polynucleotides, herein wherein contacting results in modification of a gene product or modification of the amount or expression of a gene product. In one embodiment, the expression of the targeted gene product is increased by the method. In one embodiment, the expression of the targeted gene product is increased by at least 10%, at least 15%, at least 20%, at least 25%, at least 30%, at least 35%, at least 40%, at least 45%, at least 50%, at least 55%, at least 60%, at least 65%, at least 70%, at least 75%, at least 80%, at least 85%, p at least 90%, at least 95%, 100%. In one embodiment, the expression of the targeted gene product is increased at least 1.5-fold, at least 2-fold, at least 2.5-fold, at least 3-fold, at least 3.5-fold, at least 3.5-fold, at least 4-fold, at least 4.5-fold, at least 5-fold, at least 10-fold, at least 10-fold, at least 15-fold, at least 20-fold, at least 25-fold, at least 50-fold, at least 100-fold. In one embodiment, the expression of the targeted gene product is reduced by at least 10%, by at least 15%, by at least 20%, by at least 25%, by at least 30%, by at least 35%, by at least 40%, by at least 45%, by at least 50%, by at least 55%, by at least 60%, by at least 65%, by at least 70%, by at least 75%, by at least 80%, by at least 85%, by at least 90%, by at least 95%, by at least 100%. In one embodiment, the expression of the targeted gene product is reduced at least 1.5-fold, at least 2-fold, at least 2.5-fold, at least 3-fold, at least 3.5-fold, at least 3.5-fold, at least 4-fold, at least 4.5-fold, at least 5-fold, at least 10-fold, at least 10-fold, at least 15-fold, at least 20-fold, at least 25-fold, at least 50-fold, at least 100-fold. In alternative embodiments, the expression of the targeted gene product is reduced by the method. In further embodiments, expression of the targeted gene may be completely eliminated, or may be considered eliminated as remnant expression levels of the targeted gene fall below the detection limit of methods known in the art that are used to quantify, detect, or monitor expression levels of genes.

[0495] In one embodiment, one or more polynucleotide molecules, vectors, or vector systems driving expression of one or more elements of a TnpB system or delivery systems comprising one or more elements of the TnpB system are introduced into a host cell such that expression of the elements of the TnpB system direct formation of a TnpB-targeting complex at one or more target sites. In one embodiment of the invention the host cell may be a eukaryotic cell, a prokaryotic cell, or a plant cell.

[0496] In particular embodiments, the host cell is a cell of a cell line. Cell lines are available from a variety of sources known to those with skill in the art (see, e.g., the American Type Culture Collection (ATCC) (Manassas, Va.)). In one embodiment, a cell transfected with one or more vectors described herein is used to establish a new cell line comprising one or more vector-derived sequences. In one embodiment, a cell transiently transfected with the components of a composition or system as described herein (such as by transient transfection of one or more vectors, or transfection with RNA), and modified through the activity of a complex, is used to establish a new cell line comprising cells containing the modification but lacking any other exogenous sequence. In one embodiment, cells transiently or non-transiently transfected with one or more vectors described herein, or cell lines derived from such cells are used in assessing one or more test compounds.

[0497] Further intended are isolated human cells or tissues, plants or non-human animals comprising one or more of the polynucleotide molecules, vectors, vector systems, or cells described in any of the embodiments herein. In an aspect, host cells and cell lines modified by or comprising the compositions, systems or modified enzymes of present invention are provided, including (isolated) stem cells, and progeny thereof.

[0498] In one embodiment, the plants or non-human animals comprise at least one of the compositions, polynucleotide molecules, vectors, vector systems, or cells described in any of the embodiments herein at least one tissue type of the plant or non-human animal. In certain embodiment, non-human animals comprise at least one of the compositions, polynucleotide molecules, vectors, vector systems, or cells described in any of the embodiments herein in at least one tissue type. In one embodiment, the presence of the compositions is transient, in that they are degraded over time. In one embodiment, expression of the compositions described in any of the embodiments comprised in polynucleotide molecules, vectors, vector systems, or cells is limited to certain tissue types or regions in the plant or non-human animal. In one embodiment, the expression of the compositions described in any of the embodiments comprised in polynucleotide molecules, vectors, vector systems, or cells is dependent of a physiological cue. In one embodiment, expression of the compositions described in any of the embodiments comprised in polynucleotide molecules, vectors, vector systems, or cells may be triggered by an exogenous molecule. In one embodiment, expression of the compositions described in any of the embodiments comprised in polynucleotide molecules, vectors, vector systems, or cells is dependent on the expression of a non-Cas molecule in the plant or non-human animal.

[0499] In one aspect, the invention provides methods for using one or more elements of a TnpB system. The TnpB-targeting complex of the invention provides an effective means for modifying a target DNA or RNA (single or double stranded, linear or super-coiled). The TnpB-targeting complex of the invention has a wide variety of utility including modifying (e.g., deleting, inserting, translocating, inactivating, activating) a target DNA or RNA in a multiplicity of cell types. As such, the TnpB-targeting complex of the invention has a broad spectrum of applications in, e.g., gene therapy, drug screening, disease diagnosis, and prognosis. An exemplary TnpB-targeting complex comprises a DNA or RNA-targeting effector protein complexed with a nucleic acid component molecule hybridized to a target sequence within the target locus of interest.

[0500] In one embodiment, this invention provides a method of cleaving a target polynucleotide. The method may comprise modifying a target polynucleotide using a TnpB-targeting complex that binds to the target polynucleotide and effect cleavage of said target polynucleotide. In an embodiment, the TnpB-targeting complex of the invention, when introduced into a cell, may create a break (e.g., a single or a double strand break) in the polynucleotide sequence. For example, the method can be used to cleave a disease polynucleotide in a cell. For example, an exogenous template comprising a sequence to be integrated flanked by an upstream sequence and a downstream sequence may be introduced into a cell. The upstream and downstream sequences share sequence similarity with either side of the site of integration in the polynucleotide. The exogenous template comprises a sequence to be integrated (e.g., a mutated RNA). The sequence for integration may be a sequence endogenous or exogenous to the cell. Examples of a sequence to be integrated include polynucleotide encoding a protein or a non-coding RNA (e.g., a microRNA). Thus, the sequence for integration may be operably linked to an appropriate control sequence or sequences. Alternatively, the sequence to be integrated may provide a regulatory function. The upstream and downstream sequences in the recombination template are selected to promote recombination between the RNA sequence of interest and the recombination. The upstream sequence is a polynucleotide sequence that shares sequence similarity with the sequence upstream of the targeted site for integration. Similarly, the downstream sequence is a polynucleotide sequence that shares sequence similarity with the polynucleotide sequence downstream of the targeted site of integration. The upstream and downstream sequences in the recombination template can have 75%, 80%, 85%, 90%, 95%, or 100% sequence identity with the targeted sequence. Preferably, the upstream and downstream sequences in the recombination template have about 95%, 96%, 97%, 98%, 99%, or 100% sequence identity with the targeted sequence. In some methods, the upstream and downstream sequences in the recombination template have about 99% or 100% sequence identity with the targeted sequence. An upstream or downstream sequence may comprise from about 20 bp to about 2500 bp, for example, about 50, 100, 200, 300, 400, 500, 600, 700, 800, 900, 1000, 1100, 1200, 1300, 1400, 1500, 1600, 1700, 1800, 1900, 2000, 2100, 2200, 2300, 2400, or 2500 bp. In some methods, the exemplary upstream or downstream sequence have about 200 bp to about 2000 bp, about 600 bp to about 1000 bp, or more particularly about 700 bp to about 1000 bp. In some methods, the recombination template may further comprise a marker. Such a marker may make it easy to screen for targeted integrations. Examples of suitable markers include restriction sites, fluorescent proteins, or selectable markers. The recombination template of the invention can be constructed using recombinant techniques (see, for example, Sambrook et al., 2001 and Ausubel et al., 1996). In a method for modifying a target sequence by integrating an recombination template, a break (e.g., double or single stranded break in double or single stranded DNA or RNA) is introduced into the DNA or RNA sequence by the TnpB-targeting complex, the break is repaired via homologous recombination with an recombination template such that the template is integrated into the target. The presence of a double-stranded break facilitates integration of the template. In other embodiments, this invention provides a method of modifying expression of a RNA in a eukaryotic cell. The method comprises increasing or decreasing expression of a target polynucleotide by using a TnpB-targeting complex that binds to the DNA or RNA (e.g., mRNA or pre-mRNA). In some methods, a target can be inactivated to affect the modification of the expression in a cell. For example, upon the binding of a TnpB-targeting complex to a target sequence in a cell, the target is inactivated such that the sequence is not translated, the coded protein is not produced, or the sequence does not function as the wild-type sequence does. For example, a protein or microRNA coding sequence may be inactivated such that the protein or microRNA or pre-microRNA transcript is not produced. The target of a TnpB-targeting complex can be any polynucleotide endogenous or exogenous to the eukaryotic cell. For example, the target polynucleotide can be a polynucleotide residing in the nucleus of the eukaryotic cell. The target polynucleotide can be a sequence coding a gene product (e.g., a protein) or a non-coding sequence (e.g., ncRNA, lncRNA, tRNA, or rRNA). Examples of target RNA include a sequence associated with a signaling biochemical pathway, e.g., a signaling biochemical pathway-associated polynucleotide. Examples of target polynucleotide include a disease associated polynucleotide. A “disease-associated” polynucleotide refers to any polynucleotide which is yielding translation products at an abnormal level or in an abnormal form in cells derived from a disease-affected tissues compared with tissues or cells of a non-disease control. It may be a gene that becomes expressed at an abnormally high level; it may be a gene that becomes expressed at an abnormally low level, where the altered expression correlates with the occurrence and/or progression of the disease. A disease-associated polynucleotide also refers to a gene possessing mutation(s) or genetic variation that is directly responsible or is in linkage disequilibrium with a gene(s) that is responsible for the etiology of a disease. The translated products may be known or unknown, and may be at a normal or abnormal level. The target RNA of a TnpB-targeting complex can be any polynucleotide endogenous or exogenous to the eukaryotic cell. For example, the target RNA can be a RNA residing in the nucleus of the eukaryotic cell. The target polynucleotide can be a sequence coding a gene product (e.g., a protein) or a non-coding sequence (e.g., ncRNA, lncRNA, tRNA, or rRNA).

[0501] In one embodiment, the method may comprise allowing a compositions to bind to the target DNA or RNA to effect cleavage of said target DNA or RNA thereby modifying the target DNA or RNA, wherein the TnpB-targeting complex comprises a nucleic acid-targeting effector protein complexed with a nucleic acid component molecule hybridized to a target sequence within said target DNA or RNA. In one aspect, the invention provides a method of modifying expression of DNA or RNA in a eukaryotic cell. In one embodiment, the method comprises allowing a TnpB-targeting complex to bind to the DNA or RNA such that said binding results in increased or decreased expression of said DNA or RNA; wherein the TnpB-targeting complex comprises a nucleic acid-targeting effector protein complexed with a nucleic acid component molecule. Similar considerations and conditions apply as above for methods of modifying a target DNA or RNA. In fact, these sampling, culturing and re-introduction options apply across the aspects of the present invention. In one aspect, the invention provides for methods of modifying a target DNA or RNA in a eukaryotic cell, which may be in vivo, ex vivo or in vitro. In one embodiment, the method comprises sampling a cell or population of cells from a human or non-human animal, and modifying the cell or cells. Culturing may occur at any stage ex vivo. The cell or cells may even be re-introduced into the non-human animal or plant. For re-introduced cells it is particularly preferred that the cells are stem cells. The compositions as described in any embodiment herein may be used to detect nucleic acid identifiers. Nucleic acid identifiers are non-coding nucleic acids that may be used to identify a particular article. Example nucleic acid identifiers, such as DNA watermarks, are described in Heider and Barnekow. “DNA watermarks: A proof of concept” BMC Molecular Biology 9:40 (2008). The nucleic acid identifiers may also be a nucleic acid barcode. A nucleic-acid based barcode is a short sequence of nucleotides (for example, DNA, RNA, or combinations thereof) that is used as an identifier for an associated molecule, such as a target molecule and/or target nucleic acid. A nucleic acid barcode can have a length of at least, for example, 4, 5, 6, 7, 8, 9, 10, 11, 12, 13, 14, 15, 16, 17, 18, 19, 20, 21, 22, 23, 24, 25, 26, 27, 28, 29, 30, 35, 40, 45, 50, 60, 70, 80, 90, or 100 nucleotides, and can be in single- or double-stranded form. One or more nucleic acid barcodes can be attached, or “tagged,” to a target molecule and/or target nucleic acid. This attachment can be direct (for example, covalent or non-covalent binding of the barcode to the target molecule) or indirect (for example, via an additional molecule, for example, a specific binding agent, such as an antibody (or other protein) or a barcode receiving adaptor (or other nucleic acid molecule). Target molecule and/or target nucleic acids can be labeled with multiple nucleic acid barcodes in combinatorial fashion, such as a nucleic acid barcode concatemer. Typically, a nucleic acid barcode is used to identify target molecules and/or target nucleic acids as being from a particular compartment (for example a discrete volume), having a particular physical property (for example, affinity, length, sequence, etc.), or having been subject to certain treatment conditions. Target molecule and/or target nucleic acid can be associated with multiple nucleic acid barcodes to provide information about all of these features (and more). Methods of generating nucleic acid-barcodes are disclosed, for example, in International Patent Application Publication No. WO/2014/047561.

[0502] In an embodiment, compositions induce a double strand break for the purpose of inducing HDR-mediated correction. In a further embodiment, two or more nucleic acid component molecules complexing with TnpB polypeptide or an ortholog or homolog thereof, may be used to induce multiplexed breaks for purpose of inducing HDR-mediated correction.

[0503] A recombination template nucleic acid, as that term is used herein, refers to a nucleic acid sequence which can be used in conjunction with compositions discloser herein to alter the structure of a target position. In an embodiment, the target nucleic acid is modified to have some or all of the sequence of the recombination template nucleic acid, typically at or near cleavage site(s). In an embodiment, the recombination template nucleic acid is single stranded. In an alternate embodiment, the recombination template nucleic acid is double stranded. In an embodiment, the recombination template nucleic acid is DNA, e.g., double stranded DNA. In an alternate embodiment, the recombination template nucleic acid is single stranded DNA.

[0504] In one embodiment, a recombination template is provided to serve as a template in homologous recombination, such as within or near a target sequence nicked or cleaved by a nucleic acid-targeting effector protein as a part of a TnpB-targeting complex.

[0505] A recombination template may be a component of another vector as described herein, contained in a separate vector, or provided as a separate polynucleotide. A recombination template polynucleotide may be of any suitable length, such as about or more than about 10, 15, 20, 25, 50, 75, 100, 150, 200, 500, 1000, or more nucleotides in length. In one embodiment, the recombination template polynucleotide is complementary to a portion of a polynucleotide comprising the target sequence. When optimally aligned, a recombination template polynucleotide might overlap with one or more nucleotides of a target sequences (e.g. about or more than about 1, 5, 10, 15, 20, 25, 30, 35, 40, 45, 50, 60, 70, 80, 90, 100 or more nucleotides). In one embodiment, when a recombination template sequence and a polynucleotide comprising a target sequence are optimally aligned, the nearest nucleotide of the recombination template polynucleotide is within about 1, 5, 10, 15, 20, 25, 50, 75, 100, 200, 300, 400, 500, 1000, 5000, 10000, or more nucleotides from the target sequence.

[0506] In an embodiment, the recombination template nucleic acid alters the structure of the target position by participating in homologous recombination. In an embodiment, the recombination template nucleic acid alters the sequence of the target position. In an embodiment, the recombination template nucleic acid results in the incorporation of a modified, or non-naturally occurring base into the target nucleic acid.

[0507] The recombination template sequence may undergo a breakage mediated or catalyzed recombination with the target sequence. In an embodiment, the recombination template nucleic acid may include sequence that corresponds to a site on the target sequence that is cleaved by an TnpB polypeptide mediated cleavage event. In an embodiment, the recombination template nucleic acid may include sequence that corresponds to both, a first site on the target sequence that is cleaved in a first TnpB polypeptide mediated event and a second site on the target sequence that is cleaved in a second TnpB polypeptide mediated event.

[0508] In one embodiment, the recombination template nucleic acid can include sequence which results in an alteration in the coding sequence of a translated sequence, e.g., one which results in the substitution of one amino acid for another in a protein product, e.g., transforming a mutant allele into a wild type allele, transforming a wild type allele into a mutant allele, and/or introducing a stop codon, insertion of an amino acid residue, deletion of an amino acid residue, or a nonsense mutation. In one embodiment, the recombination template nucleic acid can include sequence which results in an alteration in a non-coding sequence, e.g., an alteration in an exon or in a 5′ or 3′ non-translated or non-transcribed region. Such alterations include an alteration in a control element, e.g., a promoter, enhancer, and an alteration in a cis-acting or trans-acting control element.

[0509] A recombination template nucleic acid having homology with a target position in a target gene may be used to alter the structure of a target sequence. The recombination template sequence may be used to alter an unwanted structure, e.g., an unwanted or mutant nucleotide. The recombination template nucleic acid may include sequence which, when integrated, results in: decreasing the activity of a positive control element; increasing the activity of a positive control element; decreasing the activity of a negative control element; increasing the activity of a negative control element; decreasing the expression of a gene; increasing the expression of a gene; increasing resistance to a disorder or disease; increasing resistance to viral entry; correcting a mutation or altering an unwanted amino acid residue conferring, increasing, abolishing or decreasing a biological property of a gene product, e.g., increasing the enzymatic activity of an enzyme, or increasing the ability of a gene product to interact with another molecule.

[0510] The recombination template nucleic acid may include sequence which results in: a change in sequence of 1, 2, 3, 4, 5, 6, 7, 8, 9, 10, 11, 12 or more nucleotides of the target sequence. In an embodiment, the recombination template nucleic acid may be 20+/−10, 30+/−10, 40+/−10, 50+/−10, 60+/−10, 70+/−10, 80+/−10, 90+/−10, 100+/−10, 110+/−10, 120+/−10, 130+/−10, 140+/−10, 150+/−10, 160+/−10, 170+/−10, 180+/−10, 190+/−10, 200+/−10, 210+/−10, of 220+/−10 nucleotides in length. In an embodiment, the t recombination template nucleic acid may be 30+/−20, 40+/−20, 50+/−20, 60+/−20, 70+/−20, 80+/−20, 90+/−20, 100+/−20, 110+/−20, 120+/−20, 130+/−20, 140+/−20, 150+/−20, 160+/−20, 170+/−20, 180+/−20, 190+/−20, 200+/−20, 210+/−20, of 220+/−20 nucleotides in length. In an embodiment, the recombination template nucleic acid is 10 to 1,000, 20 to 900, 30 to 800, 40 to 700, 50 to 600, 50 to 500, 50 to 400, 50 to 300, 50 to 200, or 50 to 100 nucleotides in length.

[0511] A recombination template nucleic acid comprises the following components: [5′ homology arm]-[replacement sequence]-[3′ homology arm]. The homology arms provide for recombination into the chromosome, thus replacing the undesired element, e.g., a mutation or signature, with the replacement sequence. In an embodiment, the homology arms flank the most distal cleavage sites. In an embodiment, the 3′ end of the 5′ homology arm is the position next to the 5′ end of the replacement sequence. In an embodiment, the 5′ homology arm can extend at least 10, 20, 30, 40, 50, 100, 200, 300, 400, 500, 600, 700, 800, 900, 1000, 1500, or 2000 nucleotides 5′ from the 5′ end of the replacement sequence. In an embodiment, the 5′ end of the 3′ homology arm is the position next to the 3′ end of the replacement sequence. In an embodiment, the 3′ homology arm can extend at least 10, 20, 30, 40, 50, 100, 200, 300, 400, 500, 600, 700, 800, 900, 1000, 1500, or 2000 nucleotides 3′ from the 3′ end of the replacement sequence.

[0512] In one embodiment, one or both homology arms may be shortened to avoid including certain sequence repeat elements. For example, a 5′ homology arm may be shortened to avoid a sequence repeat element. In other embodiments, a 3′ homology arm may be shortened to avoid a sequence repeat element. In one embodiment, both the 5′ and the 3′ homology arms may be shortened to avoid including certain sequence repeat elements.

[0513] In one embodiment, a recombination template nucleic acids for correcting a mutation may designed for use as a single-stranded oligonucleotide. When using a single-stranded oligonucleotide, 5′ and 3′ homology arms may range up to about 200 base pairs (bp) in length, e.g., at least 25, 50, 75, 100, 125, 150, 175, or 200 bp in length.

[0514] Unlike TnpB polypeptide-mediated gene knockout, which permanently eliminates expression by mutating the gene at the DNA level, TnpB polypeptide knockdown allows for temporary reduction of gene expression through the use of artificial transcription factors. Mutating key residues in both DNA cleavage domains of the TnpB polypeptide, results in the generation of a catalytically inactive TnpB polypeptide. A catalytically inactive TnpB polypeptide complexes with a nucleic acid component molecule and localizes to the DNA sequence specified by that nucleic acid component molecule's targeting domain, however, it does not cleave the target DNA. Fusion of the inactive TnpB polypeptide protein to an effector domain, e.g., a transcription repression domain, enables recruitment of the effector to any DNA site specified by the nucleic acid component molecule. In one embodiment, TnpB polypeptide may be fused to a transcriptional repression domain and recruited to the promoter region of a gene. Especially for gene repression, it is contemplated herein that blocking the binding site of an endogenous transcription factor would aid in downregulating gene expression. In another embodiment, an inactive TnpB polypeptide can be fused to a chromatin modifying protein. Altering chromatin status can result in decreased expression of the target gene.

[0515] In an embodiment, a nucleic acid component molecule can be targeted to a known transcription response elements (e.g., promoters, enhancers, etc.), a known upstream activating sequences, and/or sequences of unknown or known function that are suspected of being able to control expression of the target DNA.

[0516] In some methods, a target polynucleotide can be inactivated to affect the modification of the expression in a cell. For example, upon the binding of a composition to a target sequence in a cell, the target polynucleotide is inactivated such that the sequence is not transcribed, the coded protein is not produced, or the sequence does not function as the wild-type sequence does. For example, a protein or microRNA coding sequence may be inactivated such that the protein is not produced.

### Non-Homologous End-Joining

[0517] In one embodiment, nuclease-induced non-homologous end-joining (NHEJ) can be used to target gene-specific knockouts. Nuclease-induced NHEJ can also be used to remove (e.g., delete) sequence in a gene of interest. Generally, NHEJ repairs a double-strand break in the DNA by joining together the two ends; however, generally, the original sequence is restored only if two compatible ends, exactly as they were formed by the double-strand break, are perfectly ligated. The DNA ends of the double-strand break are frequently the subject of enzymatic processing, resulting in the addition or removal of nucleotides, at one or both strands, prior to rejoining of the ends. This results in the presence of insertion and/or deletion (indel) mutations in the DNA sequence at the site of the NHEJ repair. Two-thirds of these mutations typically alter the reading frame and, therefore, produce a non-functional protein. Additionally, mutations that maintain the reading frame, but which insert or delete a significant amount of sequence, can destroy functionality of the protein. This is locus dependent as mutations in critical functional domains are likely less tolerable than mutations in non-critical regions of the protein. The indel mutations generated by NHEJ are unpredictable in nature; however, at a given break site certain indel sequences are favored and are over represented in the population, likely due to small regions of microhomology. The lengths of deletions can vary widely; most commonly in the 1-50 bp range, but they can easily be greater than 50 bp, e.g., they can easily reach greater than about 100-200 bp. Insertions tend to be shorter and often include short duplications of the sequence immediately surrounding the break site. However, it is possible to obtain large insertions, and in these cases, the inserted sequence has often been traced to other regions of the genome or to plasmid DNA present in the cells.

[0518] Because NHEJ is a mutagenic process, it may also be used to delete small sequence motifs as long as the generation of a specific final sequence is not required. If a double-strand break is targeted near to a short target sequence, the deletion mutations caused by the NHEJ repair often span, and therefore remove, the unwanted nucleotides. For the deletion of larger DNA segments, introducing two double-strand breaks, one on each side of the sequence, can result in NHEJ between the ends with removal of the entire intervening sequence. Both of these approaches can be used to delete specific DNA sequences; however, the error-prone nature of NHEJ may still produce indel mutations at the site of repair.

[0519] Both double strand cleaving TnpB polypeptide, or an ortholog or homolog thereof, and single strand, or nickase, TnpB polypeptide, or an ortholog or homolog thereof, molecules can be used in the methods and compositions described herein to generate NHEJ-mediated indels. NHEJ-mediated indels targeted to the gene, e.g., a coding region, e.g., an early coding region of a gene of interest can be used to knockout (i.e., eliminate expression of) a gene of interest. For example, early coding region of a gene of interest includes sequence immediately following a transcription start site, within a first exon of the coding sequence, or within 500 bp of the transcription start site (e.g., less than 500, 450, 400, 350, 300, 250, 200, 150, 100 or 50 bp).

[0520] In an embodiment, in which an nucleic acid component molecule and TnpB polypeptide, or an ortholog or homolog thereof, generate a double strand break for the purpose of inducing NHEJ-mediated indels, an RNA component molecule may be configured to position one double-strand break in close proximity to a nucleotide of the target position. In an embodiment, the cleavage site may be between 0-500 bp away from the target position (e.g., less than 500, 400, 300, 200, 100, 50, 40, 30, 25, 20, 15, 10, 9, 8, 7, 6, 5, 4, 3, 2 or 1 bp from the target position).

[0521] In an embodiment, in which two nucleic acid component molecules complexing with TnpB polypeptide, or an ortholog or homolog thereof, e.g., TnpB polypeptide nickases induce two single strand breaks for the purpose of inducing NHEJ-mediated indels, two nucleic acid component molecules may be configured to position two single-strand breaks to provide for NHEJ repair a nucleotide of the target position.

[0522] In some examples, the systems herein may introduce one or more indels via NHEJ pathway and insert sequence from a combination template via HDR.

### Exemplary Applications

[0523] The invention provides a non-naturally occurring or engineered composition, or one or more polynucleotides encoding components of said composition, or vector or delivery systems comprising one or more polynucleotides encoding components of said composition for use in a modifying a target cell in vivo, ex vivo or in vitro and, may be conducted in a manner alters the cell such that once modified the progeny or cell line of the TnpB polypeptide modified cell retains the altered phenotype. The modified cells and progeny may be part of a multi-cellular organism such as a plant or animal with ex vivo or in vivo application of composition to desired cell types. The methods herein include a therapeutic method of treatment. The therapeutic method of treatment may comprise gene or genome editing, or gene therapy.

[0524] In one embodiment, one or more vectors described herein are used to produce a non-human transgenic animal or transgenic plant. In one embodiment, the transgenic animal is a mammal, such as a mouse, rat, or rabbit. Methods for producing transgenic animals and plants are known in the art, and generally begin with a method of cell transfection, such as described herein.

### Use of Orthogonal Catalytically Inactive TnpB Polypeptides

[0525] In particular embodiments, the TnpB polypeptide nickase is used in combination with an orthogonal catalytically inactive TnpB polypeptide to increase efficiency of said nickase (e.g., as described in Chen et al. 2017, Nature Communications 8:14958; doi:10.1038/ncomms14958). More particularly, the orthogonal catalytically inactive TnpB polypeptide is characterized by a different TAMrecognition site than the TnpB nickase used in the AD-functionalized composition and the corresponding nucleic acid component molecule sequence is selected to bind to a target sequence proximal to that of the nickase of the functionalized TnpB polypeptide. The orthogonal catalytically inactive TnpB polypeptide as used in the context of the present invention does not form part of the functionalized composition but merely functions to increase the efficiency of said nickase and is used in combination with a standard nucleic acid component as described in the art for said TnpB polypeptide. In particular embodiments, said orthogonal catalytically inactive TnpB polypeptide is a dead TnpB polypeptide, i.e. comprising one or more mutations which abolishes the nuclease activity of said TnpB polypeptide. In particular embodiments, the catalytically inactive orthogonal TnpB polypeptide is provided with two or more nucleic acid components which are capable of hybridizing to target sequences which are proximal to the target sequence of the nickase. In particular embodiments, at least two nucleic acid components are used to target said catalytically inactive TnpB polypeptide, of which at least one nucleic acid component is capable of hybridizing to a target sequence 5″ of the target sequence of the nickase and at least one nucleic acid component is capable of hybridizing to a target sequence 3′ of the target sequence of the nickase of the functionalized composition, whereby said one or more target sequences may be on the same or the opposite DNA strand as the target sequence of the TnpB nickase. In particular embodiments, the guide sequences of the one or more nucleic acid components of the orthogonal catalytically inactive TnpB polypeptide are selected such that the target sequences are proximal to that of the nucleic acid component for the targeting of the functionalized composition, e.g. for the targeting of the nickase. In particular embodiments, the one or more target sequences of the orthogonal catalytically inactive TnpB polypeptide are each separated from the target sequence of the nickase by more than 5 but less than 450 basepairs. Optimal distances between the target sequences of the nucleic acid component molecules for use with the orthogonal catalytically inactive TnpB polypeptide and the target sequence of the functionalized composition can be determined by the skilled person. In particular embodiments, the catalytically inactive orthogonal TnpB polypeptide has been modified to alter its TAMspecificity as described elsewhere herein. In particular embodiments, the TnpB polypeptide nickase is a nickase which, by itself has limited activity in human cells, but which, in combination with an inactive orthogonal TnpB polypeptide and one or more corresponding proximal nucleic acid component molecules ensures the required nickase activity.

### Detection Methods Such as FISH

[0526] In one aspect, the invention provides an engineered, non-naturally occurring composition comprising a catalytically inactivate TnpB polypeptide described herein, and use this system in detection methods such as fluorescence in situ hybridization (FISH). A dead TnpB polypeptide which lacks the ability to produce DNA double-strand breaks may be fused with a marker, such as fluorescent protein, such as the enhanced green fluorescent protein (eEGFP) and co-expressed with small nucleic acid component molecules to target pericentric, centric and teleomeric repeats in vivo. The dead TnpB polypeptide system can be used to visualize both repetitive sequences and individual genes in the human genome. Such new applications of labelled dead TnpB polypeptide may be important in imaging cells and studying the functional nuclear architecture, especially in cases with a small nucleus volume or complex 3-D structures. (Chen B, Gilbert L A, Cimini B A, Schnitzbauer J, Zhang W, Li G W, Park J, Blackburn E H, Weissman J S, Qi L S, Huang B. 2013. Dynamic imaging of genomic loci in living human cells by an optimized CRISPR/Cas system. Cell 155(7):1479-91. doi: 10.1016/j.cell.2013.12.001.)

### Patient-Specific Screening Methods

[0527] A nucleic acid-targeting system that targets DNA, e.g., trinucleotide repeats can be used to screen patients or patent samples for the presence of such repeats. The repeats can be the target of the ωRNA of the TnpB system, and if there is binding thereto by the TnpB system, that binding can be detected, to thereby indicate that such a repeat is present. Thus, a TnpB system can be used to screen patients or patient samples for the presence of the repeat. The patient can then be administered suitable compound(s) to address the condition; or, can be administered a TnpB system to bind to and cause insertion, deletion or mutation and alleviate the condition.

### Models of Genetic and Epigenetic Conditions

[0528] A method of the invention may be used to create a plant, an animal or cell that may be used to model and/or study genetic or epigenetic conditions of interest, such as a through a model of mutations of interest or a disease model. As used herein, “disease” refers to a disease, disorder, or indication in a subject. For example, a method of the invention may be used to create an animal or cell that comprises a modification in one or more nucleic acid sequences associated with a disease, or a plant, animal or cell in which the expression of one or more nucleic acid sequences associated with a disease are altered. Such a nucleic acid sequence may encode a disease associated protein sequence or may be a disease associated control sequence. Accordingly, it is understood that in embodiments of the invention, a plant, subject, patient, organism or cell can be a non-human subject, patient, organism or cell. Thus, the invention provides a plant, animal or cell, produced by the present methods, or a progeny thereof. The progeny may be a clone of the produced plant or animal, or may result from sexual reproduction by crossing with other individuals of the same species to introgress further desirable traits into their offspring. The cell may be in vivo or ex vivo in the cases of multicellular organisms, particularly animals or plants. In the instance where the cell is in cultured, a cell line may be established if appropriate culturing conditions are met and preferably if the cell is suitably adapted for this purpose (for instance a stem cell). Bacterial cell lines produced by the invention are also envisaged. Hence, cell lines are also envisaged.

[0529] In some methods, the disease model can be used to study the effects of mutations on the animal or cell and development and/or progression of the disease using measures commonly used in the study of the disease. Alternatively, such a disease model is useful for studying the effect of a pharmaceutically active compound on the disease.

[0530] In some methods, the disease model can be used to assess the efficacy of a potential gene therapy strategy. That is, a disease-associated gene or polynucleotide can be modified such that the disease development and/or progression is inhibited or reduced. In particular, the method comprises modifying a disease-associated gene or polynucleotide such that an altered protein is produced and, as a result, the animal or cell has an altered response. Accordingly, in some methods, a genetically modified animal may be compared with an animal predisposed to development of the disease such that the effect of the gene therapy event may be assessed.

[0531] In another embodiment, this invention provides a method of developing a biologically active agent that modulates a cell signaling event associated with a disease gene. The method comprises contacting a test compound with a cell comprising one or more vectors that drive expression of one or more of a TnpB polypeptide, and a conserved nucleotide sequence linked to a guide/spacer sequence; and detecting a change in a readout that is indicative of a reduction or an augmentation of a cell signaling event associated with, e.g., a mutation in a disease gene contained in the cell.

[0532] A cell model or animal model can be constructed in combination with the method of the invention for screening a cellular function change. Such a model may be used to study the effects of a genome sequence modified by the complex of the invention on a cellular function of interest. For example, a cellular function model may be used to study the effect of a modified genome sequence on intracellular signaling or extracellular signaling. Alternatively, a cellular function model may be used to study the effects of a modified genome sequence on sensory perception. In some such models, one or more genome sequences associated with a signaling biochemical pathway in the model are modified.

[0533] Several disease models have been specifically investigated. These include de novo autism risk genes CHD8, KATNAL2, and SCN2A; and the syndromic autism (Angelman Syndrome) gene UBE3A. These genes and resulting autism models are of course preferred, but serve to show the broad applicability of the invention across genes and corresponding models. An altered expression of one or more genome sequences associated with a signaling biochemical pathway can be determined by assaying for a difference in the mRNA levels of the corresponding genes between the test model cell and a control cell, when they are contacted with a candidate agent. Alternatively, the differential expression of the sequences associated with a signaling biochemical pathway is determined by detecting a difference in the level of the encoded polypeptide or gene product.

[0534] To assay for an agent-induced alteration in the level of mRNA transcripts or corresponding polynucleotides, nucleic acid contained in a sample is first extracted according to standard methods in the art. For instance, mRNA can be isolated using various lytic enzymes or chemical solutions according to the procedures set forth in Sambrook et al. (1989), or extracted by nucleic-acid-binding resins following the accompanying instructions provided by the manufacturers. The mRNA contained in the extracted nucleic acid sample is then detected by amplification procedures or conventional hybridization assays (e.g. Northern blot analysis) according to methods widely known in the art or based on the methods exemplified herein.

[0535] For purpose of this invention, amplification means any method employing a primer and a polymerase capable of replicating a target sequence with reasonable fidelity. Amplification may be carried out by natural or recombinant DNA polymerases such as TaqGold™, T7 DNA polymerase, Klenow fragment of E. coli DNA polymerase, and reverse transcriptase. A preferred amplification method is PCR. In particular, the isolated RNA can be subjected to a reverse transcription assay that is coupled with a quantitative polymerase chain reaction (RT-PCR) in order to quantify the expression level of a sequence associated with a signaling biochemical pathway.

[0536] Detection of the gene expression level can be conducted in real time in an amplification assay. In one aspect, the amplified products can be directly visualized with fluorescent DNA-binding agents including but not limited to DNA intercalators and DNA groove binders. Because the amount of the intercalators incorporated into the double-stranded DNA molecules is typically proportional to the amount of the amplified DNA products, one can conveniently determine the amount of the amplified products by quantifying the fluorescence of the intercalated dye using conventional optical systems in the art. DNA-binding dye suitable for this application include SYBR green, SYBR blue, DAPI, propidium iodine, Hoeste, SYBR gold, ethidium bromide, acridines, proflavine, acridine orange, acriflavine, fluorcoumanin, ellipticine, daunomycin, chloroquine, distamycin D, chromomycin, homidium, mithramycin, ruthenium polypyridyls, anthramycin, and the like.

[0537] In another aspect, other fluorescent labels such as sequence specific probes can be employed in the amplification reaction to facilitate the detection and quantification of the amplified products. Probe-based quantitative amplification relies on the sequence-specific detection of a desired amplified product. It utilizes fluorescent, target-specific probes (e.g., TaqMan® probes) resulting in increased specificity and sensitivity. Methods for performing probe-based quantitative amplification are well established in the art and are taught in U.S. Pat. No. 5,210,015.

[0538] In yet another aspect, conventional hybridization assays using hybridization probes that share sequence homology with sequences associated with a signaling biochemical pathway can be performed. Typically, probes are allowed to form stable complexes with the sequences associated with a signaling biochemical pathway contained within the biological sample derived from the test subject in a hybridization reaction. It will be appreciated by one of skill in the art that where antisense is used as the probe nucleic acid, the target polynucleotides provided in the sample are chosen to be complementary to sequences of the antisense nucleic acids. Conversely, where the nucleotide probe is a sense nucleic acid, the target polynucleotide is selected to be complementary to sequences of the sense nucleic acid.

[0539] Hybridization can be performed under conditions of various stringency. Suitable hybridization conditions for the practice of the present invention are such that the recognition interaction between the probe and sequences associated with a signaling biochemical pathway is both sufficiently specific and sufficiently stable. Conditions that increase the stringency of a hybridization reaction are widely known and published in the art. See, for example, (Sambrook, et al., (1989); Nonradioactive In Situ Hybridization Application Manual, Boehringer Mannheim, second edition). The hybridization assay can be formed using probes immobilized on any solid support, including but are not limited to nitrocellulose, glass, silicon, and a variety of gene arrays. A preferred hybridization assay is conducted on high-density gene chips as described in U.S. Pat. No. 5,445,934.

[0540] For a convenient detection of the probe-target complexes formed during the hybridization assay, the nucleotide probes are conjugated to a detectable label. Detectable labels suitable for use in the present invention include any composition detectable by photochemical, biochemical, spectroscopic, immunochemical, electrical, optical or chemical means. A wide variety of appropriate detectable labels are known in the art, which include fluorescent or chemiluminescent labels, radioactive isotope labels, enzymatic or other ligands. In preferred embodiments, one will likely desire to employ a fluorescent label or an enzyme tag, such as digoxigenin, β-galactosidase, urease, alkaline phosphatase or peroxidase, avidin/biotin complex.

[0541] The detection methods used to detect or quantify the hybridization intensity will typically depend upon the label selected above. For example, radiolabels may be detected using photographic film or a phosphoimager. Fluorescent markers may be detected and quantified using a photodetector to detect emitted light. Enzymatic labels are typically detected by providing the enzyme with a substrate and measuring the reaction product produced by the action of the enzyme on the substrate; and finally colorimetric labels are detected by simply visualizing the colored label.

[0542] An agent-induced change in expression of sequences associated with a signaling biochemical pathway can also be determined by examining the corresponding gene products. Determining the protein level typically involves a) contacting the protein contained in a biological sample with an agent that specifically bind to a protein associated with a signaling biochemical pathway; and (b) identifying any agent:protein complex so formed. In one aspect of this embodiment, the agent that specifically binds a protein associated with a signaling biochemical pathway is an antibody, preferably a monoclonal antibody.

[0543] The reaction is performed by contacting the agent with a sample of the proteins associated with a signaling biochemical pathway derived from the test samples under conditions that will allow a complex to form between the agent and the proteins associated with a signaling biochemical pathway. The formation of the complex can be detected directly or indirectly according to standard procedures in the art. In the direct detection method, the agents are supplied with a detectable label and unreacted agents may be removed from the complex; the amount of remaining label thereby indicating the amount of complex formed. For such method, it is preferable to select labels that remain attached to the agents even during stringent washing conditions. It is preferable that the label does not interfere with the binding reaction. In the alternative, an indirect detection procedure may use an agent that contains a label introduced either chemically or enzymatically. A desirable label generally does not interfere with binding or the stability of the resulting agent:polypeptide complex. However, the label is typically designed to be accessible to an antibody for an effective binding and hence generating a detectable signal.

[0544] A wide variety of labels suitable for detecting protein levels are known in the art. Non-limiting examples include radioisotopes, enzymes, colloidal metals, fluorescent compounds, bioluminescent compounds, and chemiluminescent compounds.

[0545] The amount of agent:polypeptide complexes formed during the binding reaction can be quantified by standard quantitative assays. As illustrated above, the formation of agent:polypeptide complex can be measured directly by the amount of label remained at the site of binding. In an alternative, the protein associated with a signaling biochemical pathway is tested for its ability to compete with a labeled analog for binding sites on the specific agent. In this competitive assay, the amount of label captured is inversely proportional to the amount of protein sequences associated with a signaling biochemical pathway present in a test sample.

[0546] A number of techniques for protein analysis based on the general principles outlined above are available in the art. They include but are not limited to radioimmunoassay, ELISA (enzyme linked immunoradiometric assays), “sandwich” immunoassays, immunoradiometric assays, in situ immunoassays (using e.g., colloidal gold, enzyme or radioisotope labels), western blot analysis, immunoprecipitation assays, immunofluorescent assays, and SDS-PAGE.

[0547] Antibodies that specifically recognize or bind to proteins associated with a signaling biochemical pathway are preferable for conducting the aforementioned protein analyses. Where desired, antibodies that recognize a specific type of post-translational modifications (e.g., signaling biochemical pathway inducible modifications) can be used. Post-translational modifications include but are not limited to glycosylation, lipidation, acetylation, and phosphorylation. These antibodies may be purchased from commercial vendors. For example, anti-phosphotyrosine antibodies that specifically recognize tyrosine-phosphorylated proteins are available from a number of vendors including Invitrogen and Perkin Elmer. Anti-phosphotyrosine antibodies are particularly useful in detecting proteins that are differentially phosphorylated on their tyrosine residues in response to an ER stress. Such proteins include but are not limited to eukaryotic translation initiation factor 2 alpha (eIF-2α). Alternatively, these antibodies can be generated using conventional polyclonal or monoclonal antibody technologies by immunizing a host animal or an antibody-producing cell with a target protein that exhibits the desired post-translational modification.

### Genome Wide Knock-Out Screening

[0548] The TnpB polypeptide and systems described herein can be used to perform efficient and cost effective functional genomic screens. Such screens can utilize TnpB polypeptide based genome wide libraries. Such screens and libraries can provide for determining the function of genes, cellular pathways genes are involved in, and how any alteration in gene expression can result in a particular biological process. An advantage of the present invention is that the composition avoids off-target binding and its resulting side effects. This is achieved using systems arranged to have a high degree of sequence specificity for the target DNA. In preferred embodiments of the invention, the TnpB polypeptide complexes are TnpB polypeptide complexes.

[0549] In embodiments of the invention, a genome wide library may comprise a plurality of TnpB polypeptide nucleic acid component molecules, as described herein, comprising guide/spacer sequences that are capable of targeting a plurality of target sequences in a plurality of genomic loci in a population of eukaryotic cells. The population of cells may be a population of embryonic stem (ES) cells. The target sequence in the genomic locus may be a non-coding sequence. The non-coding sequence may be an intron, regulatory sequence, splice site, 3′ UTR, 5′ UTR, or polyadenylation signal. Gene function of one or more gene products may be altered by said targeting. The targeting may result in a knockout of gene function. The targeting of a gene product may comprise more than one nucleic acid component molecule. A gene product may be targeted by 2, 3, 4, 5, 6, 7, 8, 9, or 10 nucleic acid component molecules, preferably 3 to 4 per gene. Off-target modifications may be minimized by exploiting the staggered double strand breaks generated by TnpB polypeptide complexes or by utilizing methods analogous to those used in composition (See, e.g., DNA targeting specificity of RNA-guided Cas nucleases. Hsu, P., Scott, D., Weinstein, J., Ran, FA., Konermann, S., Agarwala, V., Li, Y., Fine, E., Wu, X., Shalem, O., Cradick, T J., Marraffini, LA., Bao, G., & Zhang, F. Nat Biotechnol doi:10.1038/nbt.2647 (2013)), incorporated herein by reference. The targeting may be of about 100 or more sequences. The targeting may be of about 1000 or more sequences. The targeting may be of about 20,000 or more sequences. The targeting may be of the entire genome. The targeting may be of a panel of target sequences focused on a relevant or desirable pathway. The pathway may be an immune pathway. The pathway may be a cell division pathway.

[0550] One aspect of the invention comprehends a genome wide library that may comprise a plurality of nucleic acid component molecules that may comprise guide/spacer sequences that are capable of targeting a plurality of target sequences in a plurality of genomic loci, wherein said targeting results in a knockout of gene function. This library may potentially comprise nucleic acid component molecules that target each and every gene in the genome of an organism.

[0551] In one embodiment of the invention, the organism or subject is a eukaryote (including mammal including human) or a non-human eukaryote or a non-human animal or a non-human mammal. In one embodiment, the organism or subject is a non-human animal, and may be an arthropod, for example, an insect, or may be a nematode. In some methods of the invention the organism or subject is a plant. In some methods of the invention, the organism or subject is a mammal or a non-human mammal. A non-human mammal may be for example a rodent (preferably a mouse or a rat), an ungulate, or a primate. In some methods of the invention the organism or subject is algae, including microalgae, or is a fungus.

[0552] The knockout of gene function may comprise introducing into each cell in the population of cells a vector system of one or more vectors comprising an engineered, non-naturally occurring composition herein. The nucleic acid component molecule sequence may target a unique gene in each cell, wherein the TnpB polypeptide is operably linked to a regulatory element, wherein when transcribed, the nucleic acid component molecule comprising the spacer sequence directs sequence-specific binding of the TnpB polypeptide to a target sequence in the genomic loci of the unique gene, inducing cleavage of the genomic loci by the TnpB polypeptide, and confirming different knockout mutations in a plurality of unique genes in each cell of the population of cells thereby generating a gene knockout cell library. The invention comprehends that the population of cells is a population of eukaryotic cells, and in a preferred embodiment, the population of cells is a population of embryonic stem (ES) cells.

[0553] The one or more vectors may be plasmid vectors. The vector may be a single vector comprising a TnpB polypeptide, a nucleic acid component, and optionally, a selection marker into target cells. Not being bound by a theory, the ability to simultaneously deliver a TnpB polypeptide and nucleic acid component through a single vector enables application to any cell type of interest, without the need to first generate cell lines that express the TnpB polypeptide. The regulatory element may be an inducible promoter. The inducible promoter may be a doxycycline inducible promoter. In some methods of the invention the expression of the nucleic acid component molecule sequence is under the control of the T7 promoter and is driven by the expression of T7 polymerase. The confirming of different knockout mutations may be by whole exome sequencing. The knockout mutation may be achieved in 100 or more unique genes. The knockout mutation may be achieved in 1000 or more unique genes. The knockout mutation may be achieved in 20,000 or more unique genes. The knockout mutation may be achieved in the entire genome. The knockout of gene function may be achieved in a plurality of unique genes which function in a particular physiological pathway or condition. The pathway or condition may be an immune pathway or condition. The pathway or condition may be a cell division pathway or condition.

### Functional Alteration and Screening

[0554] In another aspect, the present invention provides for a method of functional evaluation and screening of genes. The use of the compositions to precisely deliver functional domains, to activate or repress genes or to alter epigenetic state by precisely altering the methylation site on a specific locus of interest, can be with one or more nucleic acid component molecules applied to a single cell or population of cells or with a library applied to genome in a pool of cells ex vivo or in vivo comprising the administration or expression of a library comprising a plurality of nucleic acid components (comprising spacer molecules) and wherein the screening further comprises use of a TnpB polypeptide, wherein the complex comprising the TnpB polypeptide is modified to comprise a heterologous functional domain. In an aspect the invention provides a method for screening a genome comprising the administration to a host or expression in a host in vivo of a library. In an aspect the invention provides a method as herein discussed further comprising an activator administered to the host or expressed in the host. In an aspect the invention provides a method as herein discussed wherein the activator is attached to a TnpB polypeptide. In an aspect the invention provides a method as herein discussed wherein the activator is attached to the N terminus or the C terminus of the TnpB polypeptide. In an aspect the invention provides a method as herein discussed wherein the activator is attached to a nucleic acid component loop. In an aspect the invention provides a method as herein discussed further comprising a repressor administered to the host or expressed in the host. In an aspect the invention provides a method as herein discussed, wherein the screening comprises affecting and detecting gene activation, gene inhibition, or cleavage in the locus.

[0555] It is also preferred to target endogenous (regulatory) control elements (such as enhancers and silencers) e.g. in addition to a promoter or promoter-proximal elements. Thus, the invention can also be used to target endogenous control elements (including enhancers and silencers) in addition to targeting of the promoter. These control elements can be located upstream and downstream of the transcriptional start site (TSS), starting from 200 bp from the TSS to 100 kb away. Targeting of known control elements can be used to activate or repress the gene of interest. In some cases, a single control element can influence the transcription of multiple target genes. Targeting of a single control element could therefore be used to control the transcription of multiple genes simultaneously.

[0556] Targeting of putative control elements on the other hand (e.g. by tiling the region of the putative control element as well as 200 bp up to 100 kB around the element) can be used as a means to verify such elements (by measuring the transcription of the gene of interest) or to detect novel control elements (e.g. by tiling 100 kb upstream and downstream of the TSS of the gene of interest). In addition, targeting of putative control elements can be useful in the context of understanding genetic causes of disease. Many mutations and common SNP variants associated with disease phenotypes are located outside coding regions. Targeting of such regions with either the activation or repression systems described herein can be followed by readout of transcription of either a) a set of putative targets (e.g. a set of genes located in closest proximity to the control element) or b) whole-transcriptome readout by e.g. RNAseq or microarray. This would allow for the identification of likely candidate genes involved in the disease phenotype. Such candidate genes could be useful as novel drug targets.

[0557] Histone acetyltransferase (HAT) inhibitors are mentioned herein. However, an alternative embodiment is for the one or more functional domains to comprise an acetyltransferase, preferably a histone acetyltransferase. These are useful in the field of epigenomics, for example in methods of interrogating the epigenome. Methods of interrogating the epigenome may include, for example, targeting epigenomic sequences. Targeting epigenomic sequences may include the nucleic acid component molecule being directed to an epigenomic target sequence. Epigenomic target sequence may include a promoter, silencer or an enhancer sequence.

### Saturating Mutagenesis

[0558] The compositions herein can be used to perform saturating or deep scanning mutagenesis of genomic loci in conjunction with a cellular phenotype—for instance, for determining critical minimal features and discrete vulnerabilities of functional elements required for gene expression, drug resistance, and reversal of disease. By saturating or deep scanning mutagenesis is meant that every or essentially every DNA base is cut within the genomic loci. A library of Cas1 effector protein nucleic acid component molecules may be introduced into a population of cells. The library may be introduced, such that each cell receives a single nucleic acid component. In the case where the library is introduced by transduction of a viral vector, as described herein, a low multiplicity of infection (MOI) is used. The library may include nucleic acid components targeting every sequence upstream of a (targeted adjacent motif) (TAM) sequence in a genomic locus. The library may include at least 100 non-overlapping genomic sequences upstream of a TAMsequence for every 1000 base pairs within the genomic locus. The library may include nucleic acid components targeting sequences upstream of at least one different TAMsequence. The composition may include more than one TnpB polypeptide. Any TnpB polypeptide protein as described herein, including orthologues or engineered TnpB polypeptides. The frequency of off target sites for a nucleic acid component may be less than 500. Off target scores may be generated to select nucleic acid components with the lowest off target sites. Any phenotype determined to be associated with cutting at a nucleic acid component target site may be confirmed by using nucleic acid components targeting the same site in a single experiment. Validation of a target site may also be performed by using a modified TnpB polypeptide, as described herein, and two nucleic acid components targeting the genomic site of interest. Not being bound by a theory, a target site is a true hit if the change in phenotype is observed in validation experiments.

[0559] The genomic loci may include at least one continuous genomic region. The at least one continuous genomic region may comprise up to the entire genome. The at least one continuous genomic region may comprise a functional element of the genome. The functional element may be within a non-coding region, coding gene, intronic region, promoter, or enhancer. The at least one continuous genomic region may comprise at least 1 kb, preferably at least 50 kb of genomic DNA. The at least one continuous genomic region may comprise a transcription factor binding site. The at least one continuous genomic region may comprise a region of DNase I hypersensitivity. The at least one continuous genomic region may comprise a transcription enhancer or repressor element. The at least one continuous genomic region may comprise a site enriched for an epigenetic signature. The at least one continuous genomic DNA region may comprise an epigenetic insulator. The at least one continuous genomic region may comprise two or more continuous genomic regions that physically interact. Genomic regions that interact may be determined by ‘4C technology’. 4C technology allows the screening of the entire genome in an unbiased manner for DNA segments that physically interact with a DNA fragment of choice, as is described in Zhao et al. ((2006) Nat Genet 38, 1341-7) and in U.S. Pat. No. 8,642,295, both incorporated herein by reference in its entirety. The epigenetic signature may be histone acetylation, histone methylation, histone ubiquitination, histone phosphorylation, DNA methylation, or a lack thereof.

[0560] The compositions for saturating or deep scanning mutagenesis can be used in a population of cells. The compositions can be used in eukaryotic cells, including but not limited to mammalian and plant cells. The population of cells may be prokaryotic cells. The population of eukaryotic cells may be a population of embryonic stem (ES) cells, neuronal cells, epithelial cells, immune cells, endocrine cells, muscle cells, erythrocytes, lymphocytes, plant cells, or yeast cells.

[0561] In one aspect, the present invention provides for a method of screening for functional elements associated with a change in a phenotype. The library may be introduced into a population of cells that are adapted to contain a TnpB polypeptide. The cells may be sorted into at least two groups based on the phenotype. The phenotype may be expression of a gene, cell growth, or cell viability. The relative representation of the nucleic acid component molecules present in each group are determined, whereby genomic sites associated with the change in phenotype are determined by the representation of nucleic acid component molecules present in each group. The change in phenotype may be a change in expression of a gene of interest. The gene of interest may be upregulated, downregulated, or knocked out. The cells may be sorted into a high expression group and a low expression group. The population of cells may include a reporter construct that is used to determine the phenotype. The reporter construct may include a detectable marker. Cells may be sorted by use of the detectable marker.

[0562] In another aspect, the present invention provides for a method of screening for genomic sites associated with resistance to a chemical compound. The chemical compound may be a drug or pesticide. The library may be introduced into a population of cells that are adapted to contain a TnpB polypeptide, wherein each cell of the population contains no more than one nucleic acid component molecule; the population of cells are treated with the chemical compound; and the representation of nucleic acid component molecules are determined after treatment with the chemical compound at a later time point as compared to an early time point, whereby genomic sites associated with resistance to the chemical compound are determined by enrichment of nucleic acid components. Representation of nucleic acid components may be determined by deep sequencing methods.

[0563] Useful in the practice of the instant invention utilizing compositions are methods used in compositions and reference is made to the article entitled BCL11A enhancer dissection by Cas-mediated in situ saturating mutagenesis. Canver, M. C., Smith, E. C., Sher, F., Pinello, L., Sanjana, N. E., Shalem, O., Chen, D. D., Schupp, P. G., Vinjamur, D. S., Garcia, S. P., Luc, S., Kurita, R., Nakamura, Y., Fujiwara, Y., Maeda, T., Yuan, G., Zhang, F., Orkin, S. H., & Bauer, D. E. DOI:10.1038/nature15521, published online Sep. 16, 2015, the article is herein incorporated by reference and discussed briefly below:

[0564] Canver et al. involves novel pooled guide RNA libraries to perform in situ saturating mutagenesis of the human and mouse BCL11A erythroid enhancers previously identified as an enhancer associated with fetal hemoglobin (HbF) level and whose mouse ortholog is necessary for erythroid BCL11A expression. This approach revealed critical minimal features and discrete vulnerabilities of these enhancers. Through editing of primary human progenitors and mouse transgenesis, the authors validated the BCL11A erythroid enhancer as a target for HbF reinduction. The authors generated a detailed enhancer map that informs therapeutic genome editing.

### Modification of a Cell or Organism

[0565] The present disclosure further provides cells comprising one or more components of the systems herein, e.g., the TnpB polypeptide and/or nucleic acid component(s). Also provided include cells modified by the systems and methods herein, and cell cultures, tissues, organs, organism comprising such cells or progeny thereof. The invention In one embodiment comprehends a method of modifying an cell or organism. The cell may be a prokaryotic cell or a eukaryotic cell. The cell may be a mammalian cell. The mammalian cell many be a non-human primate, bovine, porcine, rodent or mouse cell. The cell may be a non-mammalian eukaryotic cell such as poultry, fish or shrimp. The cell may also be a plant cell. The plant cell may be of a crop plant such as cassava, corn, sorghum, wheat, or rice. The plant cell may also be of an algae, tree or vegetable. The modification introduced to the cell by the present invention may be such that the cell and progeny of the cell are altered for improved production of biologic products such as an antibody, starch, alcohol or other desired cellular output. The modification introduced to the cell by the present invention may be such that the cell and progeny of the cell include an alteration that changes the biologic product produced.

### Therapeutic Uses and Methods of Treatment

[0566] Also provided herein are methods of diagnosing, prognosing, treating, and/or preventing a disease, state, or condition in or of a subject. Generally, the methods of diagnosing, prognosing, treating, and/or preventing a disease, state, or condition in or of a subject can include modifying a polynucleotide in a subject or cell thereof using a composition, system, or component thereof described herein and/or include detecting a diseased or healthy polynucleotide in a subject or cell thereof using a composition, system, or component thereof described herein. In one embodiment, the method of treatment or prevention can include using a composition, system, or component thereof to modify a polynucleotide of an infectious organism (e.g. bacterial or virus) within a subject or cell thereof. In one embodiment, the method of treatment or prevention can include using a composition, system, or component thereof to modify a polynucleotide of an infectious organism or symbiotic organism within a subject. The composition, system, and components thereof can be used to develop models of diseases, states, or conditions. The composition, system, and components thereof can be used to detect a disease state or correction thereof, such as by a method of treatment or prevention described herein. The composition, system, and components thereof can be used to screen and select cells that can be used, for example, as treatments or preventions described herein. The composition, system, and components thereof can be used to develop biologically active agents that can be used to modify one or more biologic functions or activities in a subject or a cell thereof.

[0567] In general, the method can include delivering a composition, system, and/or component thereof to a subject or cell thereof, or to an infectious or symbiotic organism by a suitable delivery technique and/or composition. Once administered the components can operate as described elsewhere herein to elicit a nucleic acid modification event. In some aspects, the nucleic acid modification event can occur at the genomic, epigenomic, and/or transcriptomic level. DNA and/or RNA cleavage, gene activation, and/or gene deactivation can occur. Additional features, uses, and advantages are described in greater detail below. On the basis of this concept, several variations are appropriate to elicit a genomic locus event, including DNA cleavage, gene activation, or gene deactivation. Using the provided compositions, the person skilled in the art can advantageously and specifically target single or multiple loci with the same or different functional domains to elicit one or more genomic locus events. In addition to treating and/or preventing a disease in a subject, the compositions may be applied in a wide variety of methods for screening in libraries in cells and functional modeling in vivo (e.g. gene activation of lincRNA and identification of function; gain-of-function modeling; loss-of-function modeling; the use the compositions of the invention to establish cell lines and transgenic animals for optimization and screening purposes).

[0568] The composition, system, and components thereof described elsewhere herein can be used to treat and/or prevent a disease, such as a genetic and/or epigenetic disease, in a subject. The composition, system, and components thereof described elsewhere herein can be used to treat and/or prevent genetic infectious diseases in a subject, such as bacterial infections, viral infections, fungal infections, parasite infections, and combinations thereof. The composition, system, and components thereof described elsewhere herein can be used to modify the composition or profile of a microbiome in a subject, which can in turn modify the health status of the subject. The composition, system, described herein can be used to modify cells ex vivo, which can then be administered to the subject whereby the modified cells can treat or prevent a disease or symptom thereof. This is also referred to in some contexts as adoptive therapy. The composition, system, described herein can be used to treat mitochondrial diseases, where the mitochondrial disease etiology involves a mutation in the mitochondrial DNA.

[0569] Also provided is a method of treating a subject, e.g., a subject in need thereof, comprising inducing gene editing by transforming the subject with the polynucleotide encoding one or more components of the composition, system, or complex or any of polynucleotides or vectors described herein and administering them to the subject. A suitable repair template may also be provided, for example delivered by a vector comprising said repair template. The repair template may be a recombination template herein. Also provided is a method of treating a subject, e.g., a subject in need thereof, comprising inducing transcriptional activation or repression of multiple target gene loci by transforming the subject with the polynucleotides or vectors described herein, wherein said polynucleotide or vector encodes or comprises one or more components of composition, system, complex or component thereof comprising multiple TnpB polypeptides. Where any treatment is occurring ex vivo, for example in a cell culture, then it will be appreciated that the term ‘subject’ may be replaced by the phrase “cell or cell culture.”

[0570] Also provided is a method of treating a subject, e.g., a subject in need thereof, comprising inducing gene editing by transforming the subject with the TnpB polypeptide(s), advantageously encoding and expressing in vivo the remaining portions of the composition, system, (e.g., RNA). A suitable repair template may also be provided, for example delivered by a vector comprising said repair template. Also provided is a method of treating a subject, e.g., a subject in need thereof, comprising inducing transcriptional activation or repression by transforming the subject with the TnpB polypeptide(s) advantageously encoding and expressing in vivo the remaining portions of the composition, system, (e.g., nucleic acid component molecule); advantageously In one embodiment the TnpB polypeptide is a catalytically inactive TnpB polypeptide and includes one or more associated functional domains. Where any treatment is occurring ex vivo, for example in a cell culture, then it will be appreciated that the term ‘subject’ may be replaced by the phrase “cell or cell culture.”

[0571] One or more components of the composition and system described herein can be included in a composition, such as a pharmaceutical composition, and administered to a host individually or collectively. Alternatively, these components may be provided in a single composition for administration to a host. Administration to a host may be performed via viral vectors known to the skilled person or described herein for delivery to a host (e.g. lentiviral vector, adenoviral vector, AAV vector). As explained herein, use of different selection markers (e.g. for lentiviral nucleic acid component selection) and concentration of nucleic acid component (e.g. dependent on whether multiple nucleic acid components are used) may be advantageous for eliciting an improved effect.

[0572] Thus, also described herein are methods of inducing one or more polynucleotide modifications in a eukaryotic or prokaryotic cell or component thereof (e.g. a mitochondria) of a subject, infectious organism, and/or organism of the microbiome of the subject. The modification can include the introduction, deletion, or substitution of one or more nucleotides at a target sequence of a polynucleotide of one or more cell(s). The modification can occur in vitro, ex vivo, in situ, or in vivo.

[0573] In one embodiment, the method of treating or inhibiting a condition or a disease caused by one or more mutations in a genomic locus in a eukaryotic organism or a non-human organism can include manipulation of a target sequence within a coding, non-coding or regulatory element of said genomic locus in a target sequence in a subject or a non-human subject in need thereof comprising modifying the subject or a non-human subject by manipulation of the target sequence and wherein the condition or disease is susceptible to treatment or inhibition by manipulation of the target sequence including providing treatment comprising delivering a composition comprising the particle delivery system or the delivery system or the virus particle of any one of the above embodiment or the cell of any one of the above embodiment.

[0574] Also provided herein is the use of the particle delivery system or the delivery system or the virus particle of any one of the above embodiment or the cell of any one of the above embodiment in ex vivo or in vivo gene or genome editing; or for use in in vitro, ex vivo or in vivo gene therapy. Also provided herein are particle delivery systems, non-viral delivery systems, and/or the virus particle of any one of the above embodiments or the cell of any one of the above embodiments used in the manufacture of a medicament for in vitro, ex vivo or in vivo gene or genome editing or for use in in vitro, ex vivo or in vivo gene therapy or for use in a method of modifying an organism or a non-human organism by manipulation of a target sequence in a genomic locus associated with a disease or in a method of treating or inhibiting a condition or disease caused by one or more mutations in a genomic locus in a eukaryotic organism or a non-human organism.

[0575] In one embodiment, polynucleotide modification can include the introduction, deletion, or substitution of 1-75 nucleotides at each target sequence of said polynucleotide of said cell(s). The modification can include the introduction, deletion, or substitution of at least 1, 5, 10, 11, 12, 13, 14, 15, 16, 17, 18, 19, 20, 21, 22, 23, 24, 25, 26, 27, 28, 29, 30, 35, 40, 45, 50, or 75 nucleotides at each target sequence. The modification can include the introduction, deletion, or substitution of at least 5, 10, 11, 12, 13, 14, 15, 16, 17, 18, 19, 20, 21, 22, 23, 24, 25, 26, 27, 28, 29, 30, 35, 40, 45, 50, or 75 nucleotides at each target sequence of said cell(s). The modification can include the introduction, deletion, or substitution of at least 10, 11, 12, 13, 14, 15, 16, 17, 18, 19, 20, 21, 22, 23, 24, 25, 26, 27, 28, 29, 30, 35, 40, 45, 50, or 75 nucleotides at each target sequence of said cell(s). The modification can include the introduction, deletion, or substitution of at least 20, 21, 22, 23, 24, 25, 26, 27, 28, 29, 30, 35, 40, 45, 50, or 75 nucleotides at each target sequence of said cell(s). The modification can include the introduction, deletion, or substitution of at least 40, 45, 50, 75, 100, 200, 300, 400 or 500 nucleotides at each target sequence of said cell(s). The modification can include the introduction, deletion, or substitution of at least 500, 600, 700, 800, 900, 1000, 1100, 1200, 1300, 1400, 1500, 1600, 1700, 1800, 1900, 2000, 2100, 2200, 2300, 2400, 2500, 2600, 2700, 2800, 2900, 3000, 3100, 3200, 3300, 3400, 3500, 3600, 3700, 3800, 3900, 4000, 4100, 4200, 4300, 4400, 4500, 4600, 4700, 4800, 4900, 5000, 5100, 5200, 5300, 5400, 5500, 5600, 5700, 5800, 5900, 6000, 6100, 6200, 6300, 6400, 6500, 6600, 6700, 6800, 6900, 7000, 7100, 7200, 7300, 7400, 7500, 7600, 7700, 7800, 7900, 8000, 8100, 8200, 8300, 8400, 8500, 8600, 8700, 8800, 8900, 9000, 9100, 9200, 9300, 9400, 9500, 9600, 9700, 9800, or 9900 to 10000 nucleotides at each target sequence of said cell(s).

[0576] In one embodiment, the modifications can include the introduction, deletion, or substitution of nucleotides at each target sequence of said cell(s) via nucleic acid components (e.g. nucleic acid component molecule(s) RNA(s) or nucleic acid component(s)), such as those mediated by a composition, system, or a component thereof described elsewhere herein. In one embodiment, the modifications can include the introduction, deletion, or substitution of nucleotides at a target or random sequence of said cell(s) via a composition, system, or technique.

[0577] In one embodiment, the composition, system, or component thereof can promote Non-Homologous End-Joining (NHEJ). In one embodiment, modification of a polynucleotide by a composition, system, or a component thereof, such as a diseased polynucleotide, can include NHEJ. In one embodiment, promotion of this repair pathway by the composition, system, or a component thereof can be used to target gene or polynucleotide specific knock-outs and/or knock-ins. In one embodiment, promotion of this repair pathway by the composition, system, or a component thereof can be used to generate NHEJ-mediated indels. Nuclease-induced NHEJ can also be used to remove (e.g., delete) sequence in a gene of interest. Generally, NHEJ repairs a double-strand break in the DNA by joining together the two ends; however, generally, the original sequence is restored only if two compatible ends, exactly as they were formed by the double-strand break, are perfectly ligated. The DNA ends of the double-strand break are frequently the subject of enzymatic processing, resulting in the addition or removal of nucleotides, at one or both strands, prior to rejoining of the ends. This results in the presence of insertion and/or deletion (indel) mutations in the DNA sequence at the site of the NHEJ repair. The indel can range in size from 1-50 or more base pairs. In one embodiment the indel can be 1, 2, 3, 4, 5, 6, 7, 8, 9, 10, 11, 12, 13, 14, 15, 16, 17, 18, 19, 20, 21, 22, 23, 24, 25, 26, 27, 28, 29, 30, 31, 32, 33, 34, 35, 36, 37, 38, 39, 40, 41, 42, 43, 44, 45, 46, 47, 48, 49, 50, 51, 52, 53, 54, 55, 56, 57, 58, 59, 60, 61, 62, 63, 64, 65, 66, 67, 68, 69, 70, 71, 72, 73, 74, 75, 76, 77, 78, 79, 80, 81, 82, 83, 84, 85, 86, 87, 88, 89, 90, 91, 92, 93, 94, 95, 96, 97, 98, 99, 100, 101, 102, 103, 104, 105, 106, 107, 108, 109, 110, 111, 112, 113, 114, 115, 116, 117, 118, 119, 120, 121, 122, 123, 124, 125, 126, 127, 128, 129, 130, 131, 132, 133, 134, 135, 136, 137, 138, 139, 140, 141, 142, 143, 144, 145, 146, 147, 148, 149, 150, 151, 152, 153, 154, 155, 156, 157, 158, 159, 160, 161, 162, 163, 164, 165, 166, 167, 168, 169, 170, 171, 172, 173, 174, 175, 176, 177, 178, 179, 180, 181, 182, 183, 184, 185, 186, 187, 188, 189, 190, 191, 192, 193, 194, 195, 196, 197, 198, 199, 200, 201, 202, 203, 204, 205, 206, 207, 208, 209, 210, 211, 212, 213, 214, 215, 216, 217, 218, 219, 220, 221, 222, 223, 224, 225, 226, 227, 228, 229, 230, 231, 232, 233, 234, 235, 236, 237, 238, 239, 240, 241, 242, 243, 244, 245, 246, 247, 248, 249, 250, 251, 252, 253, 254, 255, 256, 257, 258, 259, 260, 261, 262, 263, 264, 265, 266, 267, 268, 269, 270, 271, 272, 273, 274, 275, 276, 277, 278, 279, 280, 281, 282, 283, 284, 285, 286, 287, 288, 289, 290, 291, 292, 293, 294, 295, 296, 297, 298, 299, 300, 301, 302, 303, 304, 305, 306, 307, 308, 309, 310, 311, 312, 313, 314, 315, 316, 317, 318, 319, 320, 321, 322, 323, 324, 325, 326, 327, 328, 329, 330, 331, 332, 333, 334, 335, 336, 337, 338, 339, 340, 341, 342, 343, 344, 345, 346, 347, 348, 349, 350, 351, 352, 353, 354, 355, 356, 357, 358, 359, 360, 361, 362, 363, 364, 365, 366, 367, 368, 369, 370, 371, 372, 373, 374, 375, 376, 377, 378, 379, 380, 381, 382, 383, 384, 385, 386, 387, 388, 389, 390, 391, 392, 393, 394, 395, 396, 397, 398, 399, 400, 401, 402, 403, 404, 405, 406, 407, 408, 409, 410, 411, 412, 413, 414, 415, 416, 417, 418, 419, 420, 421, 422, 423, 424, 425, 426, 427, 428, 429, 430, 431, 432, 433, 434, 435, 436, 437, 438, 439, 440, 441, 442, 443, 444, 445, 446, 447, 448, 449, 450, 451, 452, 453, 454, 455, 456, 457, 458, 459, 460, 461, 462, 463, 464, 465, 466, 467, 468, 469, 470, 471, 472, 473, 474, 475, 476, 477, 478, 479, 480, 481, 482, 483, 484, 485, 486, 487, 488, 489, 490, 491, 492, 493, 494, 495, 496, 497, 498, 499, or 500 base pairs or more. If a double-strand break is targeted near to a short target sequence, the deletion mutations caused by the NHEJ repair often span, and therefore remove, the unwanted nucleotides. For the deletion of larger DNA segments, introducing two double-strand breaks, one on each side of the sequence, can result in NHEJ between the ends with removal of the entire intervening sequence. Both of these approaches can be used to delete specific DNA sequences.

[0578] In one embodiment, composition, system, mediated NHEJ can be used in the method to delete small sequence motifs. In one embodiment, composition, system, mediated NHEJ can be used in the method to generate NHEJ-mediate indels that can be targeted to the gene, e.g., a coding region, e.g., an early coding region of a gene of interest can be used to knockout (i.e., eliminate expression of) a gene of interest. For example, early coding region of a gene of interest includes sequence immediately following a transcription start site, within a first exon of the coding sequence, or within 500 bp of the transcription start site (e.g., less than 500, 450, 400, 350, 300, 250, 200, 150, 100 or 50 bp). In an embodiment, in which a nucleic acid component and TnpB polypeptide generate a double strand break for the purpose of inducing NHEJ-mediated indels, a nucleic acid component may be configured to position one double-strand break in close proximity to a nucleotide of the target position. In an embodiment, the cleavage site may be between 0-500 bp away from the target position (e.g., less than 500, 400, 300, 200, 100, 50, 40, 30, 25, 20, 15, 10, 9, 8, 7, 6, 5, 4, 3, 2 or 1 bp from the target position). In an embodiment, in which two component RNAs complexing with one or more nickases induce two single strand breaks for the purpose of inducing NHEJ-mediated indels, two component RNAs may be configured to position two single-strand breaks to provide for NHEJ repair a nucleotide of the target position.

[0579] For minimization of toxicity and off-target effect, it may be important to control the concentration of TnpB polypeptide mRNA and component RNA delivered. Optimal concentrations of TnpB polypeptide mRNA and component RNA can be determined by testing different concentrations in a cellular or non-human eukaryote animal model and using deep sequencing the analyze the extent of modification at potential off-target genomic loci. Alternatively, to minimize the level of toxicity and off-target effect, nickase mRNA (for example a mutated TnpB) can be delivered with a pair of nucleic acid components targeting a site of interest.

[0580] Typically, in the context of an endogenous TnpB polypeptide, formation of a TnpB polypeptide or complex (comprising a polynucleotide component sequence hybridized to a target sequence and complexed with one or more TnpB polypeptides) results in cleavage, nicking, and/or another modification of one or both strands in or near (e.g. within 1, 2, 3, 4, 5, 6, 7, 8, 9, 10, 20, 50, or more base pairs from) the target sequence.

[0581] In one embodiment, a method of modifying a target polynucleotide in a cell to treat or prevent a disease can include allowing a composition, system, or component thereof to bind to the target polynucleotide, e.g., to effect cleavage, nicking, or other modification as the composition, system, is capable of said target polynucleotide, thereby modifying the target polynucleotide, wherein the composition, system, or component thereof, complex with a nucleic acid component molecule sequence, and hybridize said nucleic acid component molecule sequence to a target sequence within the target polynucleotide, wherein said nucleic acid component molecule sequence is optionally linked to a nucleic acid component scaffold sequence. In some of these embodiments, the composition, system, or component thereof can be or include a TnpB polypeptide complexed with a nucleic acid component molecule sequence. In one embodiment, modification can include cleaving or nicking one or two strands at the location of the target sequence by one or more components of the composition, system, or component thereof.

[0582] The cleavage, nicking, or other modification capable of being performed by the composition, system, can modify transcription of a target polynucleotide. In one embodiment, modification of transcription can include decreasing transcription of a target polynucleotide. In one embodiment, modification can include increasing transcription of a target polynucleotide. In one embodiment, the method includes repairing said cleaved target polynucleotide by homologous recombination with an recombination template polynucleotide, wherein said repair results in a modification such as, but not limited to, an insertion, deletion, or substitution of one or more nucleotides of said target polynucleotide. In one embodiment, said modification results in one or more amino acid changes in a protein expressed from a gene comprising the target sequence. In one embodiment, the modification imparted by the composition, system, or component thereof provides a transcript and/or protein that can correct a disease or a symptom thereof, including but not limited to, any of those described in greater detail elsewhere herein.

[0583] In one embodiment, the method of treating or preventing a disease can include delivering one or more vectors or vector systems to a cell, such as a eukaryotic or prokaryotic cell, wherein one or more vectors or vector systems include the composition, system, or component thereof. In one embodiment, the vector(s) or vector system(s) can be a viral vector or vector system, such as an AAV or lentiviral vector system, which are described in greater detail elsewhere herein. In one embodiment, the method of treating or preventing a disease can include delivering one or more viral particles, such as an AAV or lentiviral particle, containing the composition, system, or component thereof. In one embodiment, the viral particle has a tissue specific tropism. In one embodiment, the viral particle has a liver, muscle, eye, heart, pancreas, kidney, neuron, epithelial cell, endothelial cell, astrocyte, glial cell, immune cell, or red blood cell specific tropism.

[0584] It will be understood that the composition and system, according to the invention as described herein, such as the composition and system, for use in the methods according to the invention as described herein, may be suitably used for any type of application known for composition, system, preferably in eukaryotes. In certain aspects, the application is therapeutic, preferably therapeutic in a eukaryote organism, such as including but not limited to animals (including human), plants, algae, fungi (including yeasts), etc. Alternatively, or in addition, in certain aspects, the application may involve accomplishing or inducing one or more particular traits or characteristics, such as genotypic and/or phenotypic traits or characteristics, as also described elsewhere herein.

### Treating Diseases of the Circulatory System

[0585] In one embodiment, the composition, system, and/or component thereof described herein can be used to treat and/or prevent a circulatory system disease. Exemplary disease is provided, for example, in Tables 2 and 3. In one embodiment the plasma exosomes of Wahlgren et al. (Nucleic Acids Research, 2012, Vol. 40, No. 17 e130) can be used to deliver the composition, system, and/or component thereof described herein to the blood. In one embodiment, the circulatory system disease can be treated by using a lentivirus to deliver the composition, system, described herein to modify hematopoietic stem cells (HSCs) in vivo or ex vivo (see e.g. Drakopoulou, “Review Article, The Ongoing Challenge of Hematopoietic Stem Cell-Based Gene Therapy for β-Thalassemia,” Stem Cells International, Volume 2011, Article ID 987980, 10 pages, doi:10.4061/2011/987980, which can be adapted for use with the composition, system, herein in view of the description herein). In one embodiment, the circulatory system disorder can be treated by correcting HSCs as to the disease using a composition, system, herein or a component thereof, wherein the composition, system, optionally includes a suitable HDR repair template (see e.g. Cavazzana, “Outcomes of Gene Therapy for β-Thalassemia Major via Transplantation of Autologous Hematopoietic Stem Cells Transduced Ex Vivo with a Lentiviral βA-T87Q-Globin Vector.”; Cavazzana-Calvo, “Transfusion independence and HMGA2 activation after gene therapy of human 0-thalassaemia”, Nature 467, 318-322 (16 Sep. 2010) doi:10.1038/nature09328; Nienhuis, “Development of Gene Therapy for Thalassemia, Cold Spring Harbor Perspectives in Medicine, doi: 10.1101/cshperspect.a011833 (2012), LentiGlobin BB305, a lentiviral vector containing an engineered β-globin gene (βA-T87Q); and Xie et al., “Seamless gene correction of 0-thalassaemia mutations in patient-specific iPSCs using CRISPR/Cas9 and piggyback” Genome Research gr.173427.114 (2014) www.genome.org/cgi/doi/10.1101/gr.173427.114 (Cold Spring Harbor Laboratory Press; [1599]

[0586] Watts, “Hematopoietic Stem Cell Expansion and Gene Therapy” Cytotherapy 13(10):1164-1171. doi:10.3109/14653249.2011.620748 (2011), which can be adapted for use with the composition, system, herein in view of the description herein). In one embodiment, iPSCs can be modified using a composition, system, described herein to correct a disease polynucleotide associated with a circulatory disease. In this regard, the teachings of Xu et al. (Sci Rep. 2015 Jul. 9; 5:12065. doi: 10.1038/srep12065) and Song et al. (Stem Cells Dev. 2015 May 1; 24(9):1053-65. doi: 10.1089/scd.2014.0347. Epub 2015 Feb. 5) with respect to modifying iPSCs can be adapted for use in view of the description herein with the composition, system, described herein.

[0587] The term “Hematopoietic Stem Cell” or “HSC” refers broadly those cells considered to be an HSC, e.g., blood cells that give rise to all the other blood cells and are derived from mesoderm; located in the red bone marrow, which is contained in the core of most bones. HSCs of the invention include cells having a phenotype of hematopoietic stem cells, identified by small size, lack of lineage (lin) markers, and markers that belong to the cluster of differentiation series, like: CD34, CD38, CD90, CD133, CD105, CD45, and also c-kit,—the receptor for stem cell factor. Hematopoietic stem cells are negative for the markers that are used for detection of lineage commitment, and are, thus, called Lin−; and, during their purification by FACS, a number of up to 14 different mature blood-lineage markers, e.g., CD13 & CD33 for myeloid, CD71 for erythroid, CD19 for B cells, CD61 for megakaryocytic, etc. for humans; and, B220 (murine CD45) for B cells, Mac-1 (CD11b/CD18) for monocytes, Gr-1 for Granulocytes, Ter119 for erythroid cells, Il7Ra, CD3, CD4, CD5, CD8 for T cells, etc. Mouse HSC markers: CD34lo/−, SCA-1+, Thy1.1+/lo, CD38+, C-kit+, lin−, and Human HSC markers: CD34+, CD59+, Thy1/CD90+, CD38lo/−, C-kit/CD117+, and lin−. HSCs are identified by markers. Hence in embodiments discussed herein, the HSCs can be CD34+ cells. HSCs can also be hematopoietic stem cells that are CD34−/CD38−. Stem cells that may lack c-kit on the cell surface that are considered in the art as HSCs are within the ambit of the invention, as well as CD133+ cells likewise considered HSCs in the art.

[0588] In one embodiment, the treatment or prevention for treating a circulatory system or blood disease can include modifying a human cord blood cell with any modification described herein. In one embodiment, the treatment or prevention for treating a circulatory system or blood disease can include modifying a granulocyte colony-stimulating factor-mobilized peripheral blood cell (mPB) with any modification described herein. In one embodiment, the human cord blood cell or mPB can be CD34+. In one embodiment, the cord blood cell(s) or mPB cell(s) modified can be autologous. In one embodiment, the cord blood cell(s) or mPB cell(s) can be allogenic. In addition to the modification of the disease gene(s), allogenic cells can be further modified using the composition, system, described herein to reduce the immunogenicity of the cells when delivered to the recipient. Such techniques are described elsewhere herein and e.g. Cartier, “MINI-SYMPOSIUM: X-Linked Adrenoleukodystrophypa, Hematopoietic Stem Cell Transplantation and Hematopoietic Stem Cell Gene Therapy in X-Linked Adrenoleukodystrophy,” Brain Pathology 20 (2010) 857-862, which can be adapted for use with the composition, system, herein. The modified cord blood cell(s) or mPB cell(s) can be optionally expanded in vitro. The modified cord blood cell(s) or mPB cell(s) can be derived to a subject in need thereof using any suitable delivery technique.

[0589] The compositions may be engineered to target genetic locus or loci in HSCs. In one embodiment, the TnpB polypeptide(s) can be codon-optimized for a eukaryotic cell and especially a mammalian cell, e.g., a human cell, for instance, HSC, or iPSC and nucleic acid component targeting a locus or loci in HSC, such as circulatory disease, can be prepared. These may be delivered via particles. The particles may be formed by the TnpB polypeptide and the nucleic acid component being admixed. The nucleic acid component and TnpB polypeptide mixture can be, for example, admixed with a mixture comprising or consisting essentially of or consisting of surfactant, phospholipid, biodegradable polymer, lipoprotein and alcohol, whereby particles containing the nucleic acid component and TnpB polypeptide may be formed. The invention comprehends so making particles and particles from such a method as well as uses thereof. Particles suitable delivery of the composition in the context of blood or circulatory system or HSC delivery to the blood or circulatory system are described in greater detail elsewhere herein.

[0590] In one embodiment, after ex vivo modification the HSCs or iPCS can be expanded prior to administration to the subject. Expansion of HSCs can be via any suitable method such as that described by, Lee, “Improved ex vivo expansion of adult hematopoietic stem cells by overcoming CUL4-mediated degradation of HOXB4.” Blood. 2013 May 16; 121(20):4082-9. doi: 10.1182/blood-2012-09-455204. Epub 2013 Mar. 21.

[0591] In one embodiment, the HSCs or iPSCs modified can be autologous. In one embodiment, the HSCs or iPSCs can be allogenic. In addition to the modification of the disease gene(s), allogenic cells can be further modified using the composition, system, described herein to reduce the immunogenicity of the cells when delivered to the recipient. Such techniques are described elsewhere herein and e.g. Cartier, “MINI-SYMPOSIUM: X-Linked Adrenoleukodystrophypa, Hematopoietic Stem Cell Transplantation and Hematopoietic Stem Cell Gene Therapy in X-Linked Adrenoleukodystrophy,” Brain Pathology 20 (2010) 857-862, which can be adapted for use with the composition, system, herein.

### Treating Neurological Diseases

[0592] In one embodiment, the compositions, systems, described herein can be used to treat diseases of the brain and CNS. Delivery options for the brain include encapsulation of TnpB polypeptide and nucleic acid component molecule in the form of either DNA or RNA into liposomes and conjugating to molecular Trojan horses for trans-blood brain barrier (BBB) delivery. Molecular Trojan horses have been shown to be effective for delivery of B-gal expression vectors into the brain of non-human primates. The same approach can be used to delivery vectors containing TnpB polypeptide and nucleic acid component molecule. For instance, Xia C F and Boado R J, Pardridge W M (“Antibody-mediated targeting of siRNA via the human insulin receptor using avidin-biotin technology.” Mol Pharm. 2009 May-June; 6(3):747-51. doi: 10.1021/mp800194) describes how delivery of short interfering RNA (siRNA) to cells in culture, and in vivo, is possible with combined use of a receptor-specific monoclonal antibody (mAb) and avidin-biotin technology. The authors also report that because the bond between the targeting mAb and the siRNA is stable with avidin-biotin technology, and RNAi effects at distant sites such as brain are observed in vivo following an intravenous administration of the targeted siRNA, the teachings of which can be adapted for use with the compositions, systems, herein. In other embodiments, an artificial virus can be generated for CNS and/or brain delivery. See e.g. Zhang et al. (Mol Ther. 2003 January; 7(1):11-8.)), the teachings of which can be adapted for use with the compositions, systems, herein.

### Treating Hearing Diseases

[0593] In one embodiment the composition and system described herein can be used to treat a hearing disease or hearing loss in one or both ears. Deafness is often caused by lost or damaged hair cells that cannot relay signals to auditory neurons. In such cases, cochlear implants may be used to respond to sound and transmit electrical signals to the nerve cells. But these neurons often degenerate and retract from the cochlea as fewer growth factors are released by impaired hair cells.

[0594] In one embodiment, the composition, system, or modified cells can be delivered to one or both ears for treating or preventing hearing disease or loss by any suitable method or technique. Suitable methods and techniques include, but are not limited to those set forth in US Patent Publication No. 20120328580 describes injection of a pharmaceutical composition into the ear (e.g., auricular administration), such as into the luminae of the cochlea (e.g., the Scala media, Sc vestibulae, and Sc tympani), e.g., using a syringe, e.g., a single-dose syringe. For example, one or more of the compounds described herein can be administered by intratympanic injection (e.g., into the middle ear), and/or injections into the outer, middle, and/or inner ear; administration in situ, via a catheter or pump (see e.g. McKenna et al., (U.S. Patent Publication No. 2006/0030837) and Jacobsen et al., (U.S. Pat. No. 7,206,639); administration in combination with a mechanical device such as a cochlear implant or a hearing aid, which is worn in the outer ear (see e.g. U.S. Patent Publication No. 2007/0093878, which provides an exemplary cochlear implant suitable for delivery of the compositions, systems, described herein to the ear). Such methods are routinely used in the art, for example, for the administration of steroids and antibiotics into human ears. Injection can be, for example, through the round window of the ear or through the cochlear capsule. Other inner ear administration methods are known in the art (see, e.g., Salt and Plontke, Drug Discovery Today, 10:1299-1306, 2005). In one embodiment, a catheter or pump can be positioned, e.g., in the ear (e.g., the outer, middle, and/or inner ear) of a patient during a surgical procedure. In one embodiment, a catheter or pump can be positioned, e.g., in the ear (e.g., the outer, middle, and/or inner ear) of a patient without the need for a surgical procedure.

[0595] In general, the cell therapy methods described in US Patent Publication No. 20120328580 can be used to promote complete or partial differentiation of a cell to or towards a mature cell type of the inner ear (e.g., a hair cell) in vitro. Cells resulting from such methods can then be transplanted or implanted into a patient in need of such treatment. The cell culture methods required to practice these methods, including methods for identifying and selecting suitable cell types, methods for promoting complete or partial differentiation of selected cells, methods for identifying complete or partially differentiated cell types, and methods for implanting complete or partially differentiated cells are described below.

[0596] Cells suitable for use in the present invention include, but are not limited to, cells that are capable of differentiating completely or partially into a mature cell of the inner ear, e.g., a hair cell (e.g., an inner and/or outer hair cell), when contacted, e.g., in vitro, with one or more of the compounds described herein. Exemplary cells that are capable of differentiating into a hair cell include, but are not limited to stem cells (e.g., inner ear stem cells, adult stem cells, bone marrow derived stem cells, embryonic stem cells, mesenchymal stem cells, skin stem cells, iPS cells, and fat derived stem cells), progenitor cells (e.g., inner ear progenitor cells), support cells (e.g., Deiters' cells, pillar cells, inner phalangeal cells, tectal cells and Hensen's cells), and/or germ cells. The use of stem cells for the replacement of inner ear sensory cells is described in Li et al., (U.S. Patent Publication No. 2005/0287127) and Li et al., (U.S. patent application Ser. No. 11/953,797). The use of bone marrow derived stem cells for the replacement of inner ear sensory cells is described in Edge et al., PCT/US2007/084654. iPS cells are described, e.g., at Takahashi et al., Cell, Volume 131, Issue 5, Pages 861-872 (2007); Takahashi and Yamanaka, Cell 126, 663-76 (2006); Okita et al., Nature 448, 260-262 (2007); Yu, J. et al., Science 318(5858):1917-1920 (2007); Nakagawa et al., Nat. Biotechnol. 26:101-106 (2008); and Zaehres and Scholer, Cell 131(5):834-835 (2007). Such suitable cells can be identified by analyzing (e.g., qualitatively or quantitatively) the presence of one or more tissue specific genes. For example, gene expression can be detected by detecting the protein product of one or more tissue-specific genes. Protein detection techniques involve staining proteins (e.g., using cell extracts or whole cells) using antibodies against the appropriate antigen. In this case, the appropriate antigen is the protein product of the tissue-specific gene expression. Although, in principle, a first antibody (i.e., the antibody that binds the antigen) can be labeled, it is more common (and improves the visualization) to use a second antibody directed against the first (e.g., an anti-IgG). This second antibody is conjugated either with fluorochromes, or appropriate enzymes for colorimetric reactions, or gold beads (for electron microscopy), or with the biotin-avidin system, so that the location of the primary antibody, and thus the antigen, can be recognized.

[0597] The composition and system may be delivered to the ear by direct application of pharmaceutical composition to the outer ear, with compositions modified from US Patent Publication No. 20110142917. In one embodiment the pharmaceutical composition is applied to the ear canal. Delivery to the ear may also be referred to as aural or otic delivery.

[0598] In one embodiment, the compositions, systems, or components thereof and/or vectors or vector systems can be delivered to ear via a transfection to the inner ear through the intact round window by a novel proteidic delivery technology which may be applied to the TnpB system of the present invention (see, e.g., Qi et al., Gene Therapy (2013), 1-9). About 40 μl of 10 mM RNA may be contemplated as the dosage for administration to the ear.

[0599] According to Rejali et al. (Hear Res. 2007 June; 228(1-2):180-7), cochlear implant function can be improved by good preservation of the spiral ganglion neurons, which are the target of electrical stimulation by the implant and brain derived neurotrophic factor (BDNF) has previously been shown to enhance spiral ganglion survival in experimentally deafened ears. Rejali et al. tested a modified design of the cochlear implant electrode that includes a coating of fibroblast cells transduced by a viral vector with a BDNF gene insert. To accomplish this type of ex vivo gene transfer, Rejali et al. transduced guinea pig fibroblasts with an adenovirus with a BDNF gene cassette insert, and determined that these cells secreted BDNF and then attached BDNF-secreting cells to the cochlear implant electrode via an agarose gel, and implanted the electrode in the scala tympani. Rejali et al. determined that the BDNF expressing electrodes were able to preserve significantly more spiral ganglion neurons in the basal turns of the cochlea after 48 days of implantation when compared to control electrodes and demonstrated the feasibility of combining cochlear implant therapy with ex vivo gene transfer for enhancing spiral ganglion neuron survival. Such a system may be applied to the TnpB system of the present invention for delivery to the ear.

[0600] In one embodiment, the system set forth in Mukherjea et al. (Antioxidants & Redox Signaling, Volume 13, Number 5, 2010) can be adapted for transtympanic administration of the composition, system, or component thereof to the ear. In one embodiment, a dosage of about 2 mg to about 4 mg of TnpB polypeptide for administration to a human.

[0601] In one embodiment, the system set forth in [Jung et al. (Molecular Therapy, vol. 21 no. 4, 834-841 April 2013) can be adapted for vestibular epithelial delivery of the composition, system, or component thereof to the ear. In one embodiment, a dosage of about 1 to about 30 mg of TnpB polypeptide for administration to a human.

### Treating Diseases in Non-Dividing Cells

[0602] In one embodiment, the gene or transcript to be corrected is in a non-dividing cell. Exemplary non-dividing cells are muscle cells or neurons. Non-dividing (especially non-dividing, fully differentiated) cell types present issues for gene targeting or genome engineering, for example because homologous recombination (HR) is generally suppressed in the G1 cell-cycle phase. However, while studying the mechanisms by which cells control normal DNA repair systems, Durocher discovered a previously unknown switch that keeps HR “off” in non-dividing cells and devised a strategy to toggle this switch back on. Orthwein et al. (Daniel Durocher's lab at the Mount Sinai Hospital in Ottawa, Canada) recently reported (Nature 16142, published online 9 Dec. 2015) have shown that the suppression of HR can be lifted and gene targeting successfully concluded in both kidney (293T) and osteosarcoma (U2OS) cells. Tumor suppressors, BRCA1, PALB2 and BRAC2 are known to promote DNA DSB repair by HR. They found that formation of a complex of BRCA1 with PALB2-BRAC2 is governed by a ubiquitin site on PALB2, such that action on the site by an E3 ubiquitin ligase. This E3 ubiquitin ligase is composed of KEAP1 (a PALB2-interacting protein) in complex with cullin-3 (CUL3)-RBX1. PALB2 ubiquitylation suppresses its interaction with BRCA1 and is counteracted by the deubiquitylase USP11, which is itself under cell cycle control. Restoration of the BRCA1-PALB2 interaction combined with the activation of DNA-end resection is sufficient to induce homologous recombination in G1, as measured by a number of methods including a Cas polypeptide nuclease-based gene-targeting assay directed at USP11 or KEAP1 (expressed from a pX459 vector). However, when the BRCA1-PALB2 interaction was restored in resection-competent G1 cells using either KEAP1 depletion or expression of the PALB2-KR mutant, a robust increase in gene-targeting events was detected. These teachings can be adapted for and/or applied to the compositions, systems, described herein.

[0603] Thus, reactivation of HR in cells, especially non-dividing, fully differentiated cell types is preferred, In one embodiment. In one embodiment, promotion of the BRCA1-PALB2 interaction is preferred In one embodiment. In one embodiment, the target ell is a non-dividing cell. In one embodiment, the target cell is a neuron or muscle cell. In one embodiment, the target cell is targeted in vivo. In one embodiment, the cell is in G1 and HR is suppressed. In one embodiment, use of KEAP1 depletion, for example inhibition of expression of KEAP1 activity, is preferred. KEAP1 depletion may be achieved through siRNA, for example as shown in Orthwein et al. Alternatively, expression of the PALB2-KR mutant (lacking all eight Lys residues in the BRCA1-interaction domain is preferred, either in combination with KEAP1 depletion or alone. PALB2-KR interacts with BRCA1 irrespective of cell cycle position. Thus, promotion or restoration of the BRCA1-PALB2 interaction, especially in G1 cells, is preferred. In one embodiment, especially where the target cells are non-dividing, or where removal and return (ex vivo gene targeting) is problematic, for example neuron or muscle cells. KEAP1 siRNA is available from ThermoFischer. In one embodiment, a BRCA1-PALB2 complex may be delivered to the G1 cell. In one embodiment, PALB2 deubiquitylation may be promoted for example by increased expression of the deubiquitylase USP11, so it is envisaged that a construct may be provided to promote or up-regulate expression or activity of the deubiquitylase USP11.

### Treating Diseases of the Eye

[0604] In one embodiment, the disease to be treated is a disease that affects the eyes. Thus, In one embodiment, the composition, system, or component thereof described herein is delivered to one or both eyes.

[0605] The composition, system, can be used to correct ocular defects that arise from several genetic mutations further described in Genetic Diseases of the Eye, Second Edition, edited by Elias I. Traboulsi, Oxford University Press, 2012.

[0606] In one embodiment, the condition to be treated or targeted is an eye disorder. In one embodiment, the eye disorder may include glaucoma. In one embodiment, the eye disorder includes a retinal degenerative disease. In one embodiment, the retinal degenerative disease is selected from Stargardt disease, Bardet-Biedl Syndrome, Best disease, Blue Cone Monochromacy, Choroidermia, Cone-rod dystrophy, Congenital Stationary Night Blindness, Enhanced S-Cone Syndrome, Juvenile X-Linked Retinoschisis, Leber Congenital Amaurosis, Malattia Leventinesse, Norrie Disease or X-linked Familial Exudative Vitreoretinopathy, Pattern Dystrophy, Sorsby Dystrophy, Usher Syndrome, Retinitis Pigmentosa, Achromatopsia or Macular dystrophies or degeneration, Retinitis Pigmentosa, Achromatopsia, and age related macular degeneration. In one embodiment, the retinal degenerative disease is Leber Congenital Amaurosis (LCA) or Retinitis Pigmentosa. Other exemplary eye diseases are described in greater detail elsewhere herein.

[0607] In one embodiment, the composition, system, is delivered to the eye, optionally via intravitreal injection or subretinal injection. Intraocular injections may be performed with the aid of an operating microscope. For subretinal and intravitreal injections, eyes may be prolapsed by gentle digital pressure and fundi visualized using a contact lens system consisting of a drop of a coupling medium solution on the cornea covered with a glass microscope slide coverslip. For subretinal injections, the tip of a 10-mm 34-gauge needle, mounted on a 5-μl Hamilton syringe may be advanced under direct visualization through the superior equatorial sclera tangentially towards the posterior pole until the aperture of the needle was visible in the subretinal space. Then, 2 μl of vector suspension may be injected to produce a superior bullous retinal detachment, thus confirming subretinal vector administration. This approach creates a self-sealing sclerotomy allowing the vector suspension to be retained in the subretinal space until it is absorbed by the RPE, usually within 48 h of the procedure. This procedure may be repeated in the inferior hemisphere to produce an inferior retinal detachment. This technique results in the exposure of approximately 70% of neurosensory retina and RPE to the vector suspension. For intravitreal injections, the needle tip may be advanced through the sclera 1 mm posterior to the corneoscleral limbus and 2 μl of vector suspension injected into the vitreous cavity. For intracameral injections, the needle tip may be advanced through a corneoscleral limbal paracentesis, directed towards the central cornea, and 2 μl of vector suspension may be injected. For intracameral injections, the needle tip may be advanced through a corneoscleral limbal paracentesis, directed towards the central cornea, and 2 μl of vector suspension may be injected. These vectors may be injected at titers of either 1.0-1.4×10¹⁰ or 1.0-1.4×10⁹ transducing units (TU)/ml.

[0608] In one embodiment, for administration to the eye, lentiviral vectors. In one embodiment, the lentiviral vector is an equine infectious anemia virus (EIAV) vector. Exemplary EIAV vectors for eye delivery are described in Balagaan, J Gene Med 2006; 8: 275-285, Published online 21 Nov. 2005 in Wiley InterScience (www.interscience.wiley.com). DOI: 10.1002/jgm.845; Binley et al., HUMAN GENE THERAPY 23:980-991 (September 2012), which can be adapted for use with the composition, system, described herein. In one embodiment, the dosage can be 1.1×105 transducing units per eye (TU/eye) in a total volume of 100 l.

[0609] Other viral vectors can also be used for delivery to the eye, such as AAV vectors, such as those described in Campochiaro et al., Human Gene Therapy 17:167-176 (February 2006), Millington-Ward et al. (Molecular Therapy, vol. 19 no. 4, 642-649 April 2011; Dalkara et al. (Sci Transl Med 5, 189ra76 (2013)), which can be adapted for use with the composition, system, described herein. In one embodiment, the dose can range from about 106 to 109.5 particle units. In the context of the Millington-Ward AAV vectors, a dose of about 2×1011 to about 6×1013 virus particles can be administered. In the context of Dalkara vectors, a dose of about 1×1015 to about 1×1016 vg/ml administered to a human.

[0610] In one embodiment, the sd-rxRNA® system of RXi Pharmaceuticals may be used/and or adapted for delivering composition, system, to the eye. In this system, a single intravitreal administration of 3 μg of sd-rxRNA results in sequence-specific reduction of PPIB mRNA levels for 14 days. The sd-rxRNA® system may be applied to the TnpB system of the present invention, contemplating a dose of about 3 to 20 mg of composition administered to a human.

[0611] In other embodiments, the methods of US Patent Publication No. 20130183282, which is directed to methods of cleaving a target sequence from the human rhodopsin gene, may also be modified to the TnpB system of the present invention.

[0612] In other embodiments, the methods of US Patent Publication No. 20130202678 for treating retinopathies and sight-threatening ophthalmologic disorders relating to delivering of the Puf-A gene (which is expressed in retinal ganglion and pigmented cells of eye tissues and displays a unique anti-apoptotic activity) to the sub-retinal or intravitreal space in the eye may be used or adapted. In particular, desirable targets are zgc:193933, prdm1a, spata2, tex10, rbb4, ddx3, zp2.2, Blimp-1 and HtrA2, all of which may be targeted by the composition, system, of the present invention.

[0613] Wu (Cell Stem Cell, 13:659-62, 2013) designed a guide RNA that led Cas9 to a single base pair mutation that causes cataracts in mice, where it induced DNA cleavage. Then using either the other wild-type allele or oligos given to the zygotes repair mechanisms corrected the sequence of the broken allele and corrected the cataract-causing genetic defect in mutant mouse. This approach can be adapted to and/or applied to the TnpB compositions, systems, described herein.

[0614] US Patent Publication No. 20120159653, describes use of zinc finger nucleases to genetically modify cells, animals and proteins associated with macular degeneration (MD), the teachings of which can be applied to and/or adapted for the TnpB compositions, systems, described herein.

[0615] One aspect of US Patent Publication No. 20120159653 relates to editing of any chromosomal sequences that encode proteins associated with MD which may be applied to the TnpB system of the present invention.

### Treating Muscle Diseases and Cardiovascular Diseases

[0616] In one embodiment, the composition, system can be used to treat and/or prevent a muscle disease and associated circulatory or cardiovascular disease or disorder. The present invention also contemplates delivering the composition, system, described herein, e.g. TnpB effector protein systems, to the heart. For the heart, a myocardium tropic adeno-associated virus (AAVM) is preferred, in particular AAVM41 which showed preferential gene transfer in the heart (see, e.g., Lin-Yanga et al., PNAS, Mar. 10, 2009, vol. 106, no. 10). Administration may be systemic or local. A dosage of about 1-10×10¹⁴ vector genomes are contemplated for systemic administration. See also, e.g., Eulalio et al. (2012) Nature 492: 376 and Somasuntharam et al. (2013) Biomaterials 34: 7790, the teachings of which can be adapted for and/or applied to the compositions, systems, described herein.

[0617] For example, US Patent Publication No. 20110023139, the teachings of which can be adapted for and/or applied to the compositions, systems, described herein describes use of zinc finger nucleases to genetically modify cells, animals and proteins associated with cardiovascular disease. Cardiovascular diseases generally include high blood pressure, heart attacks, heart failure, and stroke and TIA. Any chromosomal sequence involved in cardiovascular disease or the protein encoded by any chromosomal sequence involved in cardiovascular disease may be utilized in the methods described in this disclosure. The cardiovascular-related proteins are typically selected based on an experimental association of the cardiovascular-related protein to the development of cardiovascular disease. For example, the production rate or circulating concentration of a cardiovascular-related protein may be elevated or depressed in a population having a cardiovascular disorder relative to a population lacking the cardiovascular disorder. Differences in protein levels may be assessed using proteomic techniques including but not limited to Western blot, immunohistochemical staining, enzyme linked immunosorbent assay (ELISA), and mass spectrometry. Alternatively, the cardiovascular-related proteins may be identified by obtaining gene expression profiles of the genes encoding the proteins using genomic techniques including but not limited to DNA microarray analysis, serial analysis of gene expression (SAGE), and quantitative real-time polymerase chain reaction (Q-PCR).

[0618] The compositions, systems, herein can be used for treating diseases of the muscular system. The present invention also contemplates delivering the composition, system, described herein, effector protein systems, to muscle(s).

[0619] In one embodiment, the muscle disease to be treated is a muscle dystrophy such as DMD. In one embodiment, the composition, system, such as a system capable of RNA modification, described herein can be used to achieve exon skipping to achieve correction of the diseased gene. As used herein, the term “exon skipping” refers to the modification of pre-mRNA splicing by the targeting of splice donor and/or acceptor sites within a pre-mRNA with one or more complementary antisense oligonucleotide(s) (AONs). By blocking access of a spliceosome to one or more splice donor or acceptor site, an AON may prevent a splicing reaction thereby causing the deletion of one or more exons from a fully-processed mRNA. Exon skipping may be achieved in the nucleus during the maturation process of pre-mRNAs. In some examples, exon skipping may include the masking of key sequences involved in the splicing of targeted exons by using a composition, system, described herein capable of RNA modification. In one embodiment, exon skipping can be achieved in dystrophin mRNA. In one embodiment, the composition, system, can induce exon skipping at exon 1, 2, 3, 4, 5, 6, 7, 8, 10, 11, 12, 13, 14, 15, 16, 17, 18, 19, 20, 21, 22, 23, 24, 25, 26, 27, 28, 29, 30, 31, 32, 33, 34, 45, 36, 37, 38, 39, 40, 41, 42, 43, 44, 45, 46, 47, 48, 49, 50, 51, 52, 53, 54, 55, 56, 57, 58, 59, 60, 61, 62, 63, 64, 65, 66, 67, 68, 69, 70, 71, 72, 73, 74, 75, 76, 77, 78, 79, or any combination thereof of the dystrophin mRNA. In one embodiment, the composition, system, can induce exon skipping at exon 43, 44, 50, 51, 52, 55, or any combination thereof of the dystrophin mRNA. Mutations in these exons, can also be corrected using non-exon skipping polynucleotide modification methods.

[0620] In one embodiment, for treatment of a muscle disease, the method of Bortolanza et al. Molecular Therapy vol. 19 no. 11, 2055-264 November 2011) may be applied to an AAV expressing TnpB polypeptide and injected into humans at a dosage of about 2×10¹⁵ or 2×10¹⁶ vg of vector. The teachings of Bortolanza et al., can be adapted for and/or applied to the compositions, systems, described herein.

[0621] In one embodiment, the method of Dumonceaux et al. (Molecular Therapy vol. 18 no. 5, 881-887 May 2010) may be applied to an AAV expressing TnpB polypeptide and injected into humans, for example, at a dosage of about 10¹⁴ to about 10¹⁵ vg of vector. The teachings of Dumonceaux described herein can be adapted for and/or applied to the compositions, systems, described herein.

[0622] In one embodiment, the method of Kinouchi et al. (Gene Therapy (2008) 15, 1126-1130) may be applied to compositions described herein and injected into a human, for example, at a dosage of about 500 to 1000 ml of a 40 μM solution into the muscle.

[0623] In one embodiment, the method of Hagstrom et al. (Molecular Therapy Vol. 10, No. 2, August 2004) can be adapted for and/or applied to the compositions, systems, herein and injected at a dose of about 15 to about 50 mg into the great saphenous vein of a human.

[0624] In one embodiment, the method comprises treating a sickle cell related disease, e.g., sickle cell trait, sickle cell disease such as sickle cell anemia, β-thalassaemia. For example, the method and system may be used to modify the genome of the sickle cell, e.g., by correcting one or more mutations of the β-globin gene. In the case of β-thalassaemia, sickle cell anemia can be corrected by modifying HSCs with the systems. The system allows the specific editing of the cell's genome by cutting its DNA and then letting it repair itself. The TnpB polypeptide is inserted and directed by a nucleic acid component molecule to the mutated point and then it cuts the DNA at that point. Simultaneously, a healthy version of the sequence is inserted. This sequence is used by the cell's own repair system to fix the induced cut. In this way, the TnpB polypeptide allows the correction of the mutation in the previously obtained stem cells. The methods and systems may be used to correct HSCs as to sickle cell anemia using a system that targets and corrects the mutation (e.g., with a suitable HDR template that delivers a coding sequence for β-globin, advantageously non-sickling β-globin); specifically, the nucleic acid component molecule can target mutation that give rise to sickle cell anemia, and the HDR can provide coding for proper expression of β-globin. An nucleic acid component molecule that targets the mutation-and-TnpB polypeptide containing particle is contacted with HSCs carrying the mutation. The particle also can contain a suitable HDR template to correct the mutation for proper expression of β-globin; or the HSC can be contacted with a second particle or a vector that contains or delivers the HDR template. The so contacted cells can be administered; and optionally treated/expanded; cf. Cartier. The HDR template can provide for the HSC to express an engineered β-globin gene (e.g., βA-T87Q), or β-globin.

### Treating Diseases of the Liver and Kidney

[0625] In one embodiment, the composition, system, or component thereof described herein can be used to treat a disease of the kidney or liver. Thus, in one embodiment, delivery of the composition or component thereof described herein is to the liver or kidney.

[0626] Delivery strategies to induce cellular uptake of the therapeutic nucleic acid include physical force or vector systems such as viral-, lipid- or complex-based delivery, or nanocarriers. From the initial applications with less possible clinical relevance, when nucleic acids were addressed to renal cells with hydrodynamic high-pressure injection systemically, a wide range of gene therapeutic viral and non-viral carriers have been applied already to target posttranscriptional events in different animal kidney disease models in vivo (Csaba Révész and Peter Hamar (2011). Delivery Methods to Target RNAs in the Kidney, Gene Therapy Applications, Prof. Chunsheng Kang (Ed.), ISBN: 978-953-307-541-9, InTech, Available from: www.intechopen.com/books/gene-therapy-applications/delivery-methods-to-target-rnas-inthe-kidney). Delivery methods to the kidney may include those in Yuan et al. (Am J Physiol Renal Physiol 295: F605-F617, 2008). The method of Yuang et al. may be applied to the composition of the present invention contemplating a 1-2 g subcutaneous injection of polypeptide nuclease conjugated with cholesterol to a human for delivery to the kidneys. In one embodiment, the method of Molitoris et al. (J Am Soc Nephrol 20: 1754-1764, 2009) can be adapted to the composition and a cumulative dose of 12-20 mg/kg to a human can be used for delivery to the proximal tubule cells of the kidneys. In one embodiment, the methods of Thompson et al. (Nucleic Acid Therapeutics, Volume 22, Number 4, 2012) can be adapted to the compositions and a dose of up to 25 mg/kg can be delivered via i.v. administration. In one embodiment, the method of Shimizu et al. (J Am Soc Nephrol 21: 622-633, 2010) can be adapted to the compositions and a dose of about of 10-20 μmol compositions complexed with nanocarriers in about 1-2 liters of a physiologic fluid for i.p. administration can be used.

[0627] Other various delivery vehicles can be used to deliver the composition, system to the kidney such as viral, hydrodynamic, lipid, polymer nanoparticles, aptamers and various combinations thereof (see e.g. Larson et al., Surgery, (August 2007), Vol. 142, No. 2, pp. (262-269); Hamar et al., Proc Natl Acad Sci, (October 2004), Vol. 101, No. 41, pp. (14883-14888); Zheng et al., Am J Pathol, (October 2008), Vol. 173, No. 4, pp. (973-980); Feng et al., Transplantation, (May 2009), Vol. 87, No. 9, pp. (1283-1289); Q. Zhang et al., PloS ONE, (July 2010), Vol. 5, No. 7, e11709, pp. (1-13); Kushibikia et al., J Controlled Release, (July 2005), Vol. 105, No. 3, pp. (318-331); Wang et al., Gene Therapy, (July 2006), Vol. 13, No. 14, pp. (1097-1103); Kobayashi et al., Journal of Pharmacology and Experimental Therapeutics, (February 2004), Vol. 308, No. 2, pp. (688-693); Wolfrum et al., Nature Biotechnology, (September 2007), Vol. 25, No. 10, pp. (1149-1157); Molitoris et al., J Am Soc Nephrol, (August 2009), Vol. 20, No. 8 pp. (1754-1764); Mikhaylova et al., Cancer Gene Therapy, (March 2011), Vol. 16, No. 3, pp. (217-226); Y. Zhang et al., J Am Soc Nephrol, (April 2006), Vol. 17, No. 4, pp. (1090-1101); Singhal et al., Cancer Res, (May 2009), Vol. 69, No. 10, pp. (4244-4251); Malek et al., Toxicology and Applied Pharmacology, (April 2009), Vol. 236, No. 1, pp. (97-108); Shimizu et al., J Am Soc Nephrology, (April 2010), Vol. 21, No. 4, pp. (622-633); Jiang et al., Molecular Pharmaceutics, (May-June 2009), Vol. 6, No. 3, pp. (727-737); Cao et al, J Controlled Release, (June 2010), Vol. 144, No. 2, pp. (203-212); Ninichuk et al., Am J Pathol, (March 2008), Vol. 172, No. 3, pp. (628-637); Purschke et al., Proc Natl Acad Sci, (March 2006), Vol. 103, No. 13, pp. (5173-5178).

[0628] In one embodiment, delivery is to liver cells. In one embodiment, the liver cell is a hepatocyte. Delivery of the composition and system herein may be via viral vectors, especially AAV (and in particular AAV2/6) vectors. These can be administered by intravenous injection. A preferred target for the liver, whether in vitro or in vivo, is the albumin gene. This is a so-called “safe harbor” as albumin is expressed at very high levels and so some reduction in the production of albumin following successful gene editing is tolerated. It is also preferred as the high levels of expression seen from the albumin promoter/enhancer allows for useful levels of correct or transgene production (from the inserted recombination template) to be achieved even if only a small fraction of hepatocytes are edited. See sites identified by Wechsler et al. (reported at the 57th Annual Meeting and Exposition of the American Society of Hematology—abstract available online at ash.confex.com/ash/2015/webprogram/Paper86495.html and presented on 6 Dec. 2015) which can be adapted for use with the compositions, systems, herein.

[0629] Exemplary liver and kidney diseases that can be treated and/or prevented are described elsewhere herein.

### Treating Epithelial and Lung Diseases

[0630] In one embodiment, the disease treated or prevented by the composition and system described herein can be a lung or epithelial disease. The compositions and systems described herein can be used for treating epithelial and/or lung diseases. The present invention also contemplates delivering the composition, system, described herein, to one or both lungs.

[0631] In one embodiment, as viral vector can be used to deliver the composition, system, or component thereof to the lungs. In one embodiment, the AAV is an AAV-1, AAV-2, AAV-5, AAV-6, and/or AAV-9 for delivery to the lungs. (see, e.g., Li et al., Molecular Therapy, vol. 17 no. 12, 2067-277 December 2009). In one embodiment, the MOI can vary from 1×10³ to 4×10⁵ vector genomes/cell. In one embodiment, the delivery vector can be an RSV vector as in Zamora et al. (Am J Respir Crit Care Med Vol 183. pp 531-538, 2011. The method of Zamora et al. may be applied to the TnpB system of the present invention and an aerosolized composition, for example with a dosage of 0.6 mg/kg, may be contemplated for the present invention.

[0632] Subjects treated for a lung disease may for example receive pharmaceutically effective amount of aerosolized AAV vector system per lung endobronchially delivered while spontaneously breathing. As such, aerosolized delivery is preferred for AAV delivery in general. An adenovirus or an AAV particle may be used for delivery. Suitable gene constructs, each operably linked to one or more regulatory sequences, may be cloned into the delivery vector. In this instance, the following constructs are provided as examples: Cbh or EF1a promoter for TnpB, U6 or H1 promoter for nucleic acid component molecule): A preferred arrangement is to use a CFTRdelta508 targeting nucleic acid component molecule, a repair template for deltaF508 mutation and a codon optimized composition, with optionally one or more nuclear localization signal or sequence(s) (NLS(s)), e.g., two (2) NLSs.

### Treating Diseases of the Skin

[0633] The compositions and systems described herein can be used for the treatment of skin diseases. The present invention also contemplates delivering the composition and system, described herein, to the skin.

[0634] In one embodiment, delivery to the skin (intradermal delivery) of the composition, system, or component thereof can be via one or more microneedles or microneedle containing device. For example, In one embodiment the device and methods of Hickerson et al. (Molecular Therapy—Nucleic Acids (2013) 2, e129) can be used and/or adapted to deliver the composition, system, described herein, for example, at a dosage of up to 300 μl of 0.1 mg/ml compositions to the skin.

[0635] In one embodiment, the methods and techniques of Leachman et al. (Molecular Therapy, vol. 18 no. 2, 442-446 February 2010) can be used and/or adapted for delivery of a compositions described herein to the skin.

[0636] In one embodiment, the methods and techniques of Zheng et al. (PNAS, Jul. 24, 2012, vol. 109, no. 30, 11975-11980) can be used and/or adapted for nanoparticle delivery of a compositions described herein to the skin. In one embodiment, as dosage of about 25 nM applied in a single application can achieve gene knockdown in the skin.

### Treating Cancer

[0637] The compositions, systems, described herein can be used for the treatment of cancer. The present invention also contemplates delivering the composition, system, described herein, to a cancer cell. Also, as is described elsewhere herein the compositions, systems, can be used to modify an immune cell, such as a CAR or CAR T cell, which can then in turn be used to treat and/or prevent cancer. This is also described in International Patent Publication No. WO 2015/161276, the disclosure of which is hereby incorporated by reference and described herein below.

[0638] Target genes suitable for the treatment or prophylaxis of cancer can include those set forth in Tables 2 and 3. In one embodiment, target genes for cancer treatment and prevention can also include those described in International Patent Publication No. WO 2015/048577 the disclosure of which is hereby incorporated by reference and can be adapted for and/or applied to the composition, system, described herein.

### Adoptive Cell Therapy

[0639] The compositions, systems, and components thereof described herein can be used to modify cells for an adoptive cell therapy. In an aspect of the invention, methods and compositions which involve editing a target nucleic acid sequence, or modulating expression of a target nucleic acid sequence, and applications thereof in connection with cancer immunotherapy are comprehended by adapting the composition, system, of the present invention. In some examples, the compositions, systems, and methods may be used to modify a stem cell (e.g., induced pluripotent cell) to derive modified natural killer cells, gamma delta T cells, and alpha beta T cells, which can be used for the adoptive cell therapy. In certain examples, the compositions, systems, and methods may be used to modify modified natural killer cells, gamma delta T cells, and alpha beta T cells.

[0640] As used herein, “ACT”, “adoptive cell therapy” and “adoptive cell transfer” may be used interchangeably. In one embodiment, Adoptive cell therapy (ACT) can refer to the transfer of cells to a patient with the goal of transferring the functionality and characteristics into the new host by engraftment of the cells (see, e.g., Mettananda et al., Editing an α-globin enhancer in primary human hematopoietic stem cells as a treatment for β-thalassemia, Nat Commun. 2017 Sep. 4; 8(1):424). As used herein, the term “engraft” or “engraftment” refers to the process of cell incorporation into a tissue of interest in vivo through contact with existing cells of the tissue. Adoptive cell therapy (ACT) can refer to the transfer of cells, most commonly immune-derived cells, back into the same patient or into a new recipient host with the goal of transferring the immunologic functionality and characteristics into the new host. If possible, use of autologous cells helps the recipient by minimizing GVHD issues. The adoptive transfer of autologous tumor infiltrating lymphocytes (TIL) (Zacharakis et al., (2018) Nat Med. 2018 June; 24(6):724-730; Besser et al., (2010) Clin. Cancer Res 16 (9) 2646-55; Dudley et al., (2002) Science 298 (5594): 850-4; and Dudley et al., (2005) Journal of Clinical Oncology 23 (10): 2346-57.) or genetically re-directed peripheral blood mononuclear cells (Johnson et al., (2009) Blood 114 (3): 535-46; and Morgan et al., (2006) Science 314(5796) 126-9) has been used to successfully treat patients with advanced solid tumors, including melanoma, metastatic breast cancer and colorectal carcinoma, as well as patients with CD19-expressing hematologic malignancies (Kalos et al., (2011) Science Translational Medicine 3 (95): 95ra73). In one embodiment, allogenic cells immune cells are transferred (see, e.g., Ren et al., (2017) Clin Cancer Res 23 (9) 2255-2266). As described further herein, allogenic cells can be edited to reduce alloreactivity and prevent graft-versus-host disease. Thus, use of allogenic cells allows for cells to be obtained from healthy donors and prepared for use in patients as opposed to preparing autologous cells from a patient after diagnosis.

[0641] Aspects of the invention involve the adoptive transfer of immune system cells, such as T cells, specific for selected antigens, such as tumor associated antigens or tumor specific neoantigens (see, e.g., Maus et al., 2014, Adoptive Immunotherapy for Cancer or Viruses, Annual Review of Immunology, Vol. 32: 189-225; Rosenberg and Restifo, 2015, Adoptive cell transfer as personalized immunotherapy for human cancer, Science Vol. 348 no. 6230 pp. 62-68; Restifo et al., 2015, Adoptive immunotherapy for cancer: harnessing the T cell response. Nat. Rev. Immunol. 12(4): 269-281; and Jenson and Riddell, 2014, Design and implementation of adoptive therapy with chimeric antigen receptor-modified T cells. Immunol Rev. 257(1): 127-144; and Rajasagi et al., 2014, Systematic identification of personal tumor-specific neoantigens in chronic lymphocytic leukemia. Blood. 2014 Jul. 17; 124(3):453-62).

[0642] In one embodiment, an antigen (such as a tumor antigen) to be targeted in adoptive cell therapy (such as particularly CAR or TCR T-cell therapy) of a disease (such as particularly of tumor or cancer) may be selected from a group consisting of: MR1 (see, e.g., Crowther, et al., 2020, Genome-wide CRISPR-Cas9 screening reveals ubiquitous T cell cancer targeting via the monomorphic MHC class I-related protein MR1, Nature Immunology volume 21, pages 178-185), B cell maturation antigen (BCMA) (see, e.g., Friedman et al., Effective Targeting of Multiple BCMA-Expressing Hematological Malignancies by Anti-BCMA CAR T Cells, Hum Gene Ther. 2018 Mar. 8; Berdeja J G, et al. Durable clinical responses in heavily pretreated patients with relapsed/refractory multiple myeloma: updated results from a multicenter study of bb2121 anti-Bcma CAR T cell therapy. Blood. 2017; 130:740; and Mouhieddine and Ghobrial, Immunotherapy in Multiple Myeloma: The Era of CAR T Cell Therapy, Hematologist, May-June 2018, Volume 15, issue 3); PSA (prostate-specific antigen); prostate-specific membrane antigen (PSMA); PSCA (Prostate stem cell antigen); Tyrosine-protein kinase transmembrane receptor ROR1; fibroblast activation protein (FAP); Tumor-associated glycoprotein 72 (TAG72); Carcinoembryonic antigen (CEA); Epithelial cell adhesion molecule (EPCAM); Mesothelin; Human Epidermal growth factor Receptor 2 (ERBB2 (Her2/neu)); Prostase; Prostatic acid phosphatase (PAP); elongation factor 2 mutant (ELF2M); Insulin-like growth factor 1 receptor (IGF-1R); gplOO; BCR-ABL (breakpoint cluster region-Abelson); tyrosinase; New York esophageal squamous cell carcinoma 1 (NY-ESO-1); κ-light chain, LAGE (L antigen); MAGE (melanoma antigen); Melanoma-associated antigen 1 (MAGE-A1); MAGE A3; MAGE A6; legumain; Human papillomavirus (HPV) E6; HPV E7; prostein; survivin; PCTA1 (Galectin 8); Melan-A/MART-1; Ras mutant; TRP-1 (tyrosinase related protein 1, or gp75); Tyrosinase-related Protein 2 (TRP2); TRP-2/INT2 (TRP-2/intron 2); RAGE (renal antigen); receptor for advanced glycation end products 1 (RAGE1); Renal ubiquitous 1, 2 (RU1, RU2); intestinal carboxyl esterase (iCE); Heat shock protein 70-2 (HSP70-2) mutant; thyroid stimulating hormone receptor (TSHR); CD123; CD171; CD19; CD20; CD22; CD26; CD30; CD33; CD44v7/8 (cluster of differentiation 44, exons 7/8); CD53; CD92; CD100; CD148; CD150; CD200; CD261; CD262; CD362; CS-1 (CD2 subset 1, CRACC, SLAMF7, CD319, and 19A24); C-type lectin-like molecule-1 (CLL-1); ganglioside GD3 (aNeu5Ac(2-8)aNeu5Ac(2-3)bDGalp(1-4)bDGlcp(1-1)Cer); Tn antigen (Tn Ag); Fms-Like Tyrosine Kinase 3 (FLT3); CD38; CD138; CD44v6; B7H3 (CD276); KIT (CD 117); Interleukin-13 receptor subunit alpha-2 (IL-13Ra2); Interleukin 11 receptor alpha (IL-11Ra); prostate stem cell antigen (PSCA); Protease Serine 21 (PRSS21); vascular endothelial growth factor receptor 2 (VEGFR2); Lewis(Y) antigen; CD24; Platelet-derived growth factor receptor beta (PDGFR-beta); stage-specific embryonic antigen-4 (SSEA-4); Mucin 1, cell surface associated (MUC1); mucin 16 (MUC16); epidermal growth factor receptor (EGFR); epidermal growth factor receptor variant III (EGFRvIII); neural cell adhesion molecule (NCAM); carbonic anhydrase IX (CAIX); Proteasome (Prosome, Macropain) Subunit, Beta Type, 9 (LMP2); ephrin type-A receptor 2 (EphA2); Ephrin B2; Fucosyl GM1; sialyl Lewis adhesion molecule (sLe); ganglioside GM3 (aNeu5Ac(2-3)bDGalp(1-4)bDGlcp(1-1)Cer); TGS5; high molecular weight-melanoma-associated antigen (HMWMAA); o-acetyl-GD2 ganglioside (OAcGD2); Folate receptor alpha; Folate receptor beta; tumor endothelial marker 1 (TEM1/CD248); tumor endothelial marker 7-related (TEM7R); claudin 6 (CLDN6); G protein-coupled receptor class C group 5, member D (GPRC5D); chromosome X open reading frame 61 (CXORF61); CD97; CD179a; anaplastic lymphoma kinase (ALK); Polysialic acid; placenta-specific 1 (PLAC1); hexasaccharide portion of globoH glycoceramide (GloboH); mammary gland differentiation antigen (NY-BR-1); uroplakin 2 (UPK2); Hepatitis A virus cellular receptor 1 (HAVCR1); adrenoceptor beta 3 (ADRB3); pannexin 3 (PANX3); G protein-coupled receptor 20 (GPR20); lymphocyte antigen 6 complex, locus K 9 (LY6K); Olfactory receptor 51E2 (OR51E2); TCR Gamma Alternate Reading Frame Protein (TARP); Wilms tumor protein (WT1); ETS translocation-variant gene 6, located on chromosome 12p (ETV6-AML); sperm protein 17 (SPA17); X Antigen Family, Member 1A (XAGEl); angiopoietin-binding cell surface receptor 2 (Tie 2); CT (cancer/testis (antigen)); melanoma cancer testis antigen-1 (MAD-CT-1); melanoma cancer testis antigen-2 (MAD-CT-2); Fos-related antigen 1; p53; p53 mutant; human Telomerase reverse transcriptase (hTERT); sarcoma translocation breakpoints; melanoma inhibitor of apoptosis (ML-IAP); ERG (transmembrane protease, serine 2 (TMPRSS2) ETS fusion gene); N-Acetyl glucosaminyl-transferase V (NA17); paired box protein Pax-3 (PAX3); Androgen receptor; Cyclin B1; Cyclin D1; v-myc avian myelocytomatosis viral oncogene neuroblastoma derived homolog (MYCN); Ras Homolog Family Member C (RhoC); Cytochrome P450 1B1 (CYP1B1); CCCTC-Binding Factor (Zinc Finger Protein)-Like (BORIS); Squamous Cell Carcinoma Antigen Recognized By T Cells-1 or 3 (SART1, SART3); Paired box protein Pax-5 (PAX5); proacrosin binding protein sp32 (OY-TES1); lymphocyte-specific protein tyrosine kinase (LCK); A kinase anchor protein 4 (AKAP-4); synovial sarcoma, X breakpoint-1, -2, -3 or -4 (SSX1, SSX2, SSX3, SSX4); CD79a; CD79b; CD72; Leukocyte-associated immunoglobulin-like receptor 1 (LAIR1); Fc fragment of IgA receptor (FCAR); Leukocyte immunoglobulin-like receptor subfamily A member 2 (LILRA2); CD300 molecule-like family member f (CD300LF); C-type lectin domain family 12 member A (CLECi2A); bone marrow stromal cell antigen 2 (BST2); EGF-like module-containing mucin-like hormone receptor-like 2 (EMR2); lymphocyte antigen 75 (LY75); Glypican-3 (GPC3); Fc receptor-like 5 (FCRL5); mouse double minute 2 homolog (MDM2); livin; alphafetoprotein (AFP); transmembrane activator and CAML Interactor (TACI); B-cell activating factor receptor (BAFF-R); V-Ki-ras2 Kirsten rat sarcoma viral oncogene homolog (KRAS); immunoglobulin lambda-like polypeptide 1 (IGLL1); 707-AP (707 alanine proline); ART-4 (adenocarcinoma antigen recognized by T4 cells); BAGE (B antigen; b-catenin/m, b-catenin/mutated); CAMEL (CTL-recognized antigen on melanoma); CAP1 (carcinoembryonic antigen peptide 1); CASP-8 (caspase-8); CDC27m (cell-division cycle 27 mutated); CDK4/m (cycline-dependent kinase 4 mutated); Cyp-B (cyclophilin B); DAM (differentiation antigen melanoma); EGP-2 (epithelial glycoprotein 2); EGP-40 (epithelial glycoprotein 40); Erbb2, 3, 4 (erythroblastic leukemia viral oncogene homolog-2, -3, 4); FBP (folate binding protein); fAchR (Fetal acetylcholine receptor); G250 (glycoprotein 250); GAGE (G antigen); GnT-V (N-acetylglucosaminyltransferase V); HAGE (helicose antigen); ULA-A (human leukocyte antigen-A); HST2 (human signet ring tumor 2); KIAA0205; KDR (kinase insert domain receptor); LDLR/FUT (low density lipid receptor/GDP L-fucose: b-D-galactosidase 2-a-L fucosyltransferase); L1CAM (L1 cell adhesion molecule); MC1R (melanocortin 1 receptor); Myosin/m (myosin mutated); MUM-1, -2, -3 (melanoma ubiquitous mutated 1, 2, 3); NA88-A (NA cDNA clone of patient M88); KG2D (Natural killer group 2, member D) ligands; oncofetal antigen (h5T4); p190 minor bcr-abl (protein of 190KD bcr-abl); Pml/RARa (promyelocytic leukemia/retinoic acid receptor a); PRAME (preferentially expressed antigen of melanoma); SAGE (sarcoma antigen); TEL/AML1 (translocation Ets-family leukemia/acute myeloid leukemia 1); TPI/m (triosephosphate isomerase mutated); CD70; and any combination thereof.

[0643] In one embodiment, an antigen to be targeted in adoptive cell therapy (such as particularly CAR or TCR T-cell therapy) of a disease (such as particularly of tumor or cancer) is a tumor-specific antigen (TSA).

[0644] In one embodiment, an antigen to be targeted in adoptive cell therapy (such as particularly CAR or TCR T-cell therapy) of a disease (such as particularly of tumor or cancer) is a neoantigen.

[0645] In one embodiment, an antigen to be targeted in adoptive cell therapy (such as particularly CAR or TCR T-cell therapy) of a disease (such as particularly of tumor or cancer) is a tumor-associated antigen (TAA).

[0646] In one embodiment, an antigen to be targeted in adoptive cell therapy (such as particularly CAR or TCR T-cell therapy) of a disease (such as particularly of tumor or cancer) is a universal tumor antigen. In certain preferred embodiments, the universal tumor antigen is selected from the group consisting of: a human telomerase reverse transcriptase (hTERT), survivin, mouse double minute 2 homolog (MDM2), cytochrome P450 1B1 (CYP1B), HER2/neu, Wilms' tumor gene 1 (WT1), livin, alphafetoprotein (AFP), carcinoembryonic antigen (CEA), mucin 16 (MUC16), MUC1, prostate-specific membrane antigen (PSMA), p53, cyclin (Dl), and any combinations thereof.

[0647] In one embodiment, an antigen (such as a tumor antigen) to be targeted in adoptive cell therapy (such as particularly CAR or TCR T-cell therapy) of a disease (such as particularly of tumor or cancer) may be selected from a group consisting of: CD19, BCMA, CD70, CLL-1, MAGE A3, MAGE A6, HPV E6, HPV E7, WT1, CD22, CD171, ROR1, MUC16, and SSX2. In certain preferred embodiments, the antigen may be CD19. For example, CD19 may be targeted in hematologic malignancies, such as in lymphomas, more particularly in B-cell lymphomas, such as without limitation in diffuse large B-cell lymphoma, primary mediastinal b-cell lymphoma, transformed follicular lymphoma, marginal zone lymphoma, mantle cell lymphoma, acute lymphoblastic leukemia including adult and pediatric ALL, non-Hodgkin lymphoma, indolent non-Hodgkin lymphoma, or chronic lymphocytic leukemia. For example, BCMA may be targeted in multiple myeloma or plasma cell leukemia (see, e.g., 2018 American Association for Cancer Research (AACR) Annual meeting Poster: Allogeneic Chimeric Antigen Receptor T Cells Targeting B Cell Maturation Antigen). For example, CLL1 may be targeted in acute myeloid leukemia. For example, MAGE A3, MAGE A6, SSX2, and/or KRAS may be targeted in solid tumors. For example, HPV E6 and/or HPV E7 may be targeted in cervical cancer or head and neck cancer. For example, WT1 may be targeted in acute myeloid leukemia (AML), myelodysplastic syndromes (MDS), chronic myeloid leukemia (CML), non-small cell lung cancer, breast, pancreatic, ovarian or colorectal cancers, or mesothelioma. For example, CD22 may be targeted in B cell malignancies, including non-Hodgkin lymphoma, diffuse large B-cell lymphoma, or acute lymphoblastic leukemia. For example, CD171 may be targeted in neuroblastoma, glioblastoma, or lung, pancreatic, or ovarian cancers. For example, ROR1 may be targeted in ROR1+ malignancies, including non-small cell lung cancer, triple negative breast cancer, pancreatic cancer, prostate cancer, ALL, chronic lymphocytic leukemia, or mantle cell lymphoma. For example, MUC16 may be targeted in MUC16ecto+ epithelial ovarian, fallopian tube or primary peritoneal cancer. For example, CD70 may be targeted in both hematologic malignancies as well as in solid cancers such as renal cell carcinoma (RCC), gliomas (e.g., GBM), and head and neck cancers (HNSCC). CD70 is expressed in both hematologic malignancies as well as in solid cancers, while its expression in normal tissues is restricted to a subset of lymphoid cell types (see, e.g., 2018 American Association for Cancer Research (AACR) Annual meeting Poster: Allogeneic CRISPR Engineered Anti-CD70 CAR-T Cells Demonstrate Potent Preclinical Activity Against Both Solid and Hematological Cancer Cells).

[0648] Various strategies may for example be employed to genetically modify T cells by altering the specificity of the T cell receptor (TCR) for example by introducing new TCR a and R chains with selected peptide specificity (see U.S. Pat. No. 8,697,854; PCT Patent Publications: WO2003020763, WO2004033685, WO2004044004, WO2005114215, WO2006000830, WO2008038002, WO2008039818, WO2004074322, WO2005113595, WO2006125962, WO2013166321, WO2013039889, WO2014018863, WO2014083173; U.S. Pat. No. 8,088,379).

[0649] As an alternative to, or addition to, TCR modifications, chimeric antigen receptors (CARs) may be used in order to generate immunoresponsive cells, such as T cells, specific for selected targets, such as malignant cells, with a wide variety of receptor chimera constructs having been described (see U.S. Pat. Nos. 5,843,728; 5,851,828; 5,912,170; 6,004,811; 6,284,240; 6,392,013; 6,410,014; 6,753,162; 8,211,422; and, PCT Publication WO 9215322).

[0650] In general, CARs are comprised of an extracellular domain, a transmembrane domain, and an intracellular domain, wherein the extracellular domain comprises an antigen-binding domain that is specific for a predetermined target. While the antigen-binding domain of a CAR is often an antibody or antibody fragment (e.g., a single chain variable fragment, scFv), the binding domain is not particularly limited so long as it results in specific recognition of a target. For example, In one embodiment, the antigen-binding domain may comprise a receptor, such that the CAR is capable of binding to the ligand of the receptor. Alternatively, the antigen-binding domain may comprise a ligand, such that the CAR is capable of binding the endogenous receptor of that ligand.

[0651] The antigen-binding domain of a CAR is generally separated from the transmembrane domain by a hinge or spacer. The spacer is also not particularly limited, and it is designed to provide the CAR with flexibility. For example, a spacer domain may comprise a portion of a human Fc domain, including a portion of the CH3 domain, or the hinge region of any immunoglobulin, such as IgA, IgD, IgE, IgG, or IgM, or variants thereof. Furthermore, the hinge region may be modified so as to prevent off-target binding by FcRs or other potential interfering objects. For example, the hinge may comprise an IgG4 Fc domain with or without a S228P, L235E, and/or N297Q mutation (according to Kabat numbering) in order to decrease binding to FcRs. Additional spacers/hinges include, but are not limited to, CD4, CD8, and CD28 hinge regions.

[0652] The transmembrane domain of a CAR may be derived either from a natural or from a synthetic source. Where the source is natural, the domain may be derived from any membrane bound or transmembrane protein. Transmembrane regions of particular use in this disclosure may be derived from CD8, CD28, CD3, CD45, CD4, CD5, CDS, CD9, CD 16, CD22, CD33, CD37, CD64, CD80, CD86, CD 134, CD137, CD 154, TCR. Alternatively, the transmembrane domain may be synthetic, in which case it will comprise predominantly hydrophobic residues such as leucine and valine. Preferably a triplet of phenylalanine, tryptophan and valine will be found at each end of a synthetic transmembrane domain. Optionally, a short oligo- or polypeptide linker, preferably between 2 and 10 amino acids in length may form the linkage between the transmembrane domain and the cytoplasmic signaling domain of the CAR. A glycine-serine doublet provides a particularly suitable linker.

[0653] Alternative CAR constructs may be characterized as belonging to successive generations. First-generation CARs typically consist of a single-chain variable fragment of an antibody specific for an antigen, for example comprising a VL linked to a VH of a specific antibody, linked by a flexible linker, for example by a CD8a hinge domain and a CD8α transmembrane domain, to the transmembrane and intracellular signaling domains of either CD3ζ or FcRγ (scFv-CD3ζ or scFv-FcRγ; see U.S. Pat. Nos. 7,741,465; 5,912,172; 5,906,936). Second-generation CARs incorporate the intracellular domains of one or more costimulatory molecules, such as CD28, OX40 (CD134), or 4-1BB (CD137) within the endodomain (for example scFv-CD28/OX40/4-1BB-CD3ζ; see U.S. Pat. Nos. 8,911,993; 8,916,381; 8,975,071; 9,101,584; 9,102,760; 9,102,761). Third-generation CARs include a combination of costimulatory endodomains, such a CD3ζ-chain, CD97, GDIla-CD18, CD2, ICOS, CD27, CD154, CDS, OX40, 4-1BB, CD2, CD7, LIGHT, LFA-1, NKG2C, B7-H3, CD30, CD40, PD-1, or CD28 signaling domains (for example scFv-CD28-4-1BB-CD3ζ or scFv-CD28-OX40-CD3ζ; see U.S. Pat. Nos. 8,906,682; 8,399,645; 5,686,281; PCT Publication No. WO 2014/134165; PCT Publication No. WO 2012/079000). In one embodiment, the primary signaling domain comprises a functional signaling domain of a protein selected from the group consisting of CD3 zeta, CD3 gamma, CD3 delta, CD3 epsilon, common FcR gamma (FCERIG), FcR beta (Fc Epsilon Rib), CD79a, CD79b, Fc gamma RIIa, DAP10, and DAP12. In certain preferred embodiments, the primary signaling domain comprises a functional signaling domain of CD3ζ or FcRγ. In one embodiment, the one or more costimulatory signaling domains comprise a functional signaling domain of a protein selected, each independently, from the group consisting of: CD27, CD28, 4-1BB (CD137), OX40, CD30, CD40, PD-1, ICOS, lymphocyte function-associated antigen-1 (LFA-1), CD2, CD7, LIGHT, NKG2C, B7-H3, a ligand that specifically binds with CD83, CDS, ICAM-1, GITR, BAFFR, HVEM (LIGHTR), SLAMF7, NKp80 (KLRF1), CD160, CD19, CD4, CD8 alpha, CD8 beta, IL2R beta, IL2R gamma, IL7R alpha, ITGA4, VLA1, CD49a, ITGA4, IA4, CD49D, ITGA6, VLA-6, CD49f, ITGAD, CD11d, ITGAE, CD103, ITGAL, CD 11a, LFA-1, ITGAM, CD11b, ITGAX, CD11c, ITGB1, CD29, ITGB2, CD18, ITGB7, TNFR2, TRANCE/RANKL, DNAM1 (CD226), SLAMF4 (CD244, 2B4), CD84, CD96 (Tactile), CEACAM1, CRTAM, Ly9 (CD229), CD160 (BY55), PSGL1, CD100 (SEMA4D), CD69, SLAMF6 (NTB-A, Lyl08), SLAM (SLAMF1, CD150, IPO-3), BLAME (SLAMF8), SELPLG (CD162), LTBR, LAT, GADS, SLP-76, PAG/Cbp, NKp44, NKp30, NKp46, and NKG2D. In one embodiment, the one or more costimulatory signaling domains comprise a functional signaling domain of a protein selected, each independently, from the group consisting of: 4-1BB, CD27, and CD28. In one embodiment, a chimeric antigen receptor may have the design as described in U.S. Pat. No. 7,446,190, comprising an intracellular domain of CD3ζ chain (such as amino acid residues 52-163 of the human CD3 zeta chain, as shown in SEQ ID NO: 14 of U.S. Pat. No. 7,446,190), a signaling region from CD28 and an antigen-binding element (or portion or domain; such as scFv). The CD28 portion, when between the zeta chain portion and the antigen-binding element, may suitably include the transmembrane and signaling domains of CD28 (such as amino acid residues 114-220 of SEQ ID NO: 10, full sequence shown in SEQ ID NO: 6 of U.S. Pat. No. 7,446,190; these can include the following portion of CD28 as set forth in Genbank identifier NM_006139. Alternatively, when the zeta sequence lies between the CD28 sequence and the antigen-binding element, intracellular domain of CD28 can be used alone (such as amino sequence set forth in SEQ ID NO: 9 of U.S. Pat. No. 7,446,190). Hence, certain embodiments employ a CAR comprising (a) a zeta chain portion comprising the intracellular domain of human CD3ζ chain, (b) a costimulatory signaling region, and (c) an antigen-binding element (or portion or domain), wherein the costimulatory signaling region comprises the amino acid sequence encoded by SEQ ID NO: 6 of U.S. Pat. No. 7,446,190.

[0654] Alternatively, costimulation may be orchestrated by expressing CARs in antigen-specific T cells, chosen so as to be activated and expanded following engagement of their native aPTCR, for example by antigen on professional antigen-presenting cells, with attendant costimulation. In addition, additional engineered receptors may be provided on the immunoresponsive cells, for example to improve targeting of a T-cell attack and/or minimize side effects

[0655] By means of an example and without limitation, Kochenderfer et al., (2009) J Immunother. 32 (7): 689-702 described anti-CD19 chimeric antigen receptors (CAR). FMC63-28Z CAR contained a single chain variable region moiety (scFv) recognizing CD19 derived from the FMC63 mouse hybridoma (described in Nicholson et al., (1997) Molecular Immunology 34: 1157-1165), a portion of the human CD28 molecule, and the intracellular component of the human TCR-ζ molecule. FMC63-CD828BBZ CAR contained the FMC63 scFv, the hinge and transmembrane regions of the CD8 molecule, the cytoplasmic portions of CD28 and 4-1BB, and the cytoplasmic component of the TCR-ζ molecule. The exact sequence of the CD28 molecule included in the FMC63-28Z CAR corresponded to Genbank identifier NM_006139; the sequence included all amino acids starting with the amino acid sequence IEVMYPPPY (SEQ. I.D. No. 64,306) and continuing all the way to the carboxy-terminus of the protein. To encode the anti-CD19 scFv component of the vector, the authors designed a DNA sequence which was based on a portion of a previously published CAR (Cooper et al., (2003) Blood 101: 1637-1644). This sequence encoded the following components in frame from the 5′ end to the 3′ end: an XhoI site, the human granulocyte-macrophage colony-stimulating factor (GM-CSF) receptor α-chain signal sequence, the FMC63 light chain variable region (as in Nicholson et al., supra), a linker peptide (as in Cooper et al., supra), the FMC63 heavy chain variable region (as in Nicholson et al., supra), and a NotI site. A plasmid encoding this sequence was digested with XhoI and NotI. To form the MSGV-FMC63-28Z retroviral vector, the XhoI and NotI-digested fragment encoding the FMC63 scFv was ligated into a second XhoI and NotI-digested fragment that encoded the MSGV retroviral backbone (as in Hughes et al., (2005) Human Gene Therapy 16: 457-472) as well as part of the extracellular portion of human CD28, the entire transmembrane and cytoplasmic portion of human CD28, and the cytoplasmic portion of the human TCR-ζ molecule (as in Maher et al., 2002) Nature Biotechnology 20: 70-75). The FMC63-28Z CAR is included in the KTE-C19 (axicabtagene ciloleucel) anti-CD19 CAR-T therapy product in development by Kite Pharma, Inc. for the treatment of inter alia patients with relapsed/refractory aggressive B-cell non-Hodgkin lymphoma (NHL). Accordingly, In one embodiment, cells intended for adoptive cell therapies, more particularly immunoresponsive cells such as T cells, may express the FMC63-28Z CAR as described by Kochenderfer et al. (supra). Hence, In one embodiment, cells intended for adoptive cell therapies, more particularly immunoresponsive cells such as T cells, may comprise a CAR comprising an extracellular antigen-binding element (or portion or domain; such as scFv) that specifically binds to an antigen, an intracellular signaling domain comprising an intracellular domain of a CD3ζ chain, and a costimulatory signaling region comprising a signaling domain of CD28. Preferably, the CD28 amino acid sequence is as set forth in Genbank identifier NM_006139 (sequence version 1, 2 or 3) starting with the amino acid sequence IEVMYPPPY (SEQ ID NO: 64,306) and continuing all the way to the carboxy-terminus of the protein. Preferably, the antigen is CD19, more preferably the antigen-binding element is an anti-CD19 scFv, even more preferably the anti-CD19 scFv as described by Kochenderfer et al. (supra).

[0656] Additional anti-CD19 CARs are further described in International Patent Publication No. WO 2015/187528. More particularly Example 1 and Table 1 of WO2015187528, incorporated by reference herein, demonstrate the generation of anti-CD19 CARs based on a fully human anti-CD19 monoclonal antibody (47G4, as described in US20100104509) and murine anti-CD19 monoclonal antibody (as described in Nicholson et al. and explained above). Various combinations of a signal sequence (human CD8-alpha or GM-CSF receptor), extracellular and transmembrane regions (human CD8-alpha) and intracellular T-cell signaling domains (CD28-CD3ζ; 4-1BB-CD3ζ; CD27-CD3ζ; CD28-CD27-CD3ζ, 4-1BB-CD27-CD3ζ; CD27-4-1BB-CD3ζ; CD28-CD27-FcεRI gamma chain; or CD28-FcεRI gamma chain) were disclosed. Hence, in one embodiment, cells intended for adoptive cell therapies, more particularly immunoresponsive cells such as T cells, may comprise a CAR comprising an extracellular antigen-binding element that specifically binds to an antigen, an extracellular and transmembrane region as set forth in Table 1 of WO2015187528 and an intracellular T-cell signaling domain as set forth in Table 1 of International Application No. WO 2015/187528. Preferably, the antigen is CD19, more preferably the antigen-binding element is an anti-CD19 scFv, even more preferably the mouse or human anti-CD19 scFv as described in Example 1 of WO 2015/187528. In one embodiment, the CAR comprises, consists essentially of or consists of an amino acid sequence of SEQ ID NO: 1, SEQ ID NO: 2, SEQ ID NO: 3, SEQ ID NO: 4, SEQ ID NO: 5, SEQ ID NO: 6, SEQ ID NO: 7, SEQ ID NO: 8, SEQ ID NO: 9, SEQ ID NO: 10, SEQ ID NO: 11, SEQ ID NO: 12, or SEQ ID NO: 13 as set forth in Table 1 of WO2015187528.

[0657] By means of an example and without limitation, chimeric antigen receptor that recognizes the CD70 antigen is described in WO2012058460A2 (see also, Park et al., CD70 as a target for chimeric antigen receptor T cells in head and neck squamous cell carcinoma, Oral Oncol. 2018 March; 78:145-150; and Jin et al., CD70, a novel target of CAR T-cell therapy for gliomas, Neuro Oncol. 2018 Jan. 10; 20(1):55-65). CD70 is expressed by diffuse large B-cell and follicular lymphoma and also by the malignant cells of Hodgkins lymphoma, Waldenstrom's macroglobulinemia and multiple myeloma, and by HTLV-1- and EBV-associated malignancies. (Agathanggelou et al. Am. J. Pathol. 1995; 147: 1152-1160; Hunter et al., Blood 2004; 104:4881. 26; Lens et al., J Immunol. 2005; 174:6212-6219; Baba et al., J Virol. 2008; 82:3843-3852.) In addition, CD70 is expressed by non-hematological malignancies such as renal cell carcinoma and glioblastoma. (Junker et al., J Urol. 2005; 173:2150-2153; Chahlavi et al., Cancer Res 2005; 65:5428-5438) Physiologically, CD70 expression is transient and restricted to a subset of highly activated T, B, and dendritic cells.

[0658] By means of an example and without limitation, chimeric antigen receptor that recognizes BCMA has been described (see, e.g., US20160046724A1; WO2016014789A2; WO2017211900A1; WO2015158671A1; US20180085444A1; WO2018028647A1; US20170283504A1; and WO2013154760A1).

[0659] In one embodiment, the immune cell may, in addition to a CAR or exogenous TCR as described herein, further comprise a chimeric inhibitory receptor (inhibitory CAR) that specifically binds to a second target antigen and is capable of inducing an inhibitory or immunosuppressive or repressive signal to the cell upon recognition of the second target antigen. In one embodiment, the chimeric inhibitory receptor comprises an extracellular antigen-binding element (or portion or domain) configured to specifically bind to a target antigen, a transmembrane domain, and an intracellular immunosuppressive or repressive signaling domain. In one embodiment, the second target antigen is an antigen that is not expressed on the surface of a cancer cell or infected cell or the expression of which is downregulated on a cancer cell or an infected cell. In one embodiment, the second target antigen is an MHC-class I molecule. In one embodiment, the intracellular signaling domain comprises a functional signaling portion of an immune checkpoint molecule, such as for example PD-1 or CTLA4. Advantageously, the inclusion of such inhibitory CAR reduces the chance of the engineered immune cells attacking non-target (e.g., non-cancer) tissues.

[0660] Alternatively, T-cells expressing CARs may be further modified to reduce or eliminate expression of endogenous TCRs in order to reduce off-target effects. Reduction or elimination of endogenous TCRs can reduce off-target effects and increase the effectiveness of the T cells (U.S. Pat. No. 9,181,527). T cells stably lacking expression of a functional TCR may be produced using a variety of approaches. T cells internalize, sort, and degrade the entire T cell receptor as a complex, with a half-life of about 10 hours in resting T cells and 3 hours in stimulated T cells (von Essen, M. et al. 2004. J. Immunol. 173:384-393). Proper functioning of the TCR complex requires the proper stoichiometric ratio of the proteins that compose the TCR complex. TCR function also requires two functioning TCR zeta proteins with ITAM motifs. The activation of the TCR upon engagement of its MHC-peptide ligand requires the engagement of several TCRs on the same T cell, which all must signal properly. Thus, if a TCR complex is destabilized with proteins that do not associate properly or cannot signal optimally, the T cell will not become activated sufficiently to begin a cellular response.

[0661] Accordingly, In one embodiment, TCR expression may eliminated using RNA interference (e.g., snucleic acid component, siRNA, miRNA, etc.), TnpB polypeptide, or other methods that target the nucleic acids encoding specific TCRs (e.g., TCR-α and TCR-β) and/or CD3 chains in primary T cells. By blocking expression of one or more of these proteins, the T cell will no longer produce one or more of the key components of the TCR complex, thereby destabilizing the TCR complex and preventing cell surface expression of a functional TCR.

[0662] In some instances, CAR may also comprise a switch mechanism for controlling expression and/or activation of the CAR. For example, a CAR may comprise an extracellular, transmembrane, and intracellular domain, in which the extracellular domain comprises a target-specific binding element that comprises a label, binding domain, or tag that is specific for a molecule other than the target antigen that is expressed on or by a target cell. In such embodiments, the specificity of the CAR is provided by a second construct that comprises a target antigen binding domain (e.g., an scFv or a bispecific antibody that is specific for both the target antigen and the label or tag on the CAR) and a domain that is recognized by or binds to the label, binding domain, or tag on the CAR. See, e.g., WO 2013/044225, WO 2016/000304, WO 2015/057834, WO 2015/057852, WO 2016/070061, U.S. Pat. No. 9,233,125, US 2016/0129109. In this way, a T-cell that expresses the CAR can be administered to a subject, but the CAR cannot bind its target antigen until the second composition comprising an antigen-specific binding domain is administered.

[0663] Alternative switch mechanisms include CARs that require multimerization in order to activate their signaling function (see, e.g., US Patent Publication Nos. US 2015/0368342, US 2016/0175359, US 2015/0368360) and/or an exogenous signal, such as a small molecule drug (US 2016/0166613, Yung et al., Science, 2015), in order to elicit a T-cell response. Some CARs may also comprise a “suicide switch” to induce cell death of the CAR T-cells following treatment (Buddee et al., PLoS One, 2013) or to downregulate expression of the CAR following binding to the target antigen (International Patent Publication No. WO 2016/011210).

[0664] Alternative techniques may be used to transform target immunoresponsive cells, such as protoplast fusion, lipofection, transfection or electroporation. A wide variety of vectors may be used, such as retroviral vectors, lentiviral vectors, adenoviral vectors, adeno-associated viral vectors, plasmids or transposons, such as a Sleeping Beauty transposon (see U.S. Pat. Nos. 6,489,458; 7,148,203; 7,160,682; 7,985,739; 8,227,432), may be used to introduce CARs, for example using 2nd generation antigen-specific CARs signaling through CD3ζ and either CD28 or CD137. Viral vectors may for example include vectors based on HIV, SV40, EBV, HSV or BPV.

[0665] Cells that are targeted for transformation may for example include T cells, Natural Killer (NK) cells, cytotoxic T lymphocytes (CTL), regulatory T cells, human embryonic stem cells, tumor-infiltrating lymphocytes (TIL) or a pluripotent stem cell from which lymphoid cells may be differentiated. T cells expressing a desired CAR may for example be selected through co-culture with γ-irradiated activating and propagating cells (AaPC), which co-express the cancer antigen and co-stimulatory molecules. The engineered CAR T-cells may be expanded, for example by co-culture on AaPC in presence of soluble factors, such as IL-2 and IL-21. This expansion may for example be carried out so as to provide memory CAR+ T cells (which may for example be assayed by non-enzymatic digital array and/or multi-panel flow cytometry). In this way, CAR T cells may be provided that have specific cytotoxic activity against antigen-bearing tumors (optionally in conjunction with production of desired chemokines such as interferon-γ). CAR T cells of this kind may for example be used in animal models, for example to treat tumor xenografts.

[0666] In one embodiment, ACT includes co-transferring CD4+ Th1 cells and CD8+ CTLs to induce a synergistic antitumor response (see, e.g., Li et al., Adoptive cell therapy with CD4+ T helper 1 cells and CD8+ cytotoxic T cells enhances complete rejection of an established tumor, leading to generation of endogenous memory responses to non-targeted tumor epitopes. Clin Transl Immunology. 2017 October; 6(10): e160).

[0667] In one embodiment, Th17 cells are transferred to a subject in need thereof. Th17 cells have been reported to directly eradicate melanoma tumors in mice to a greater extent than Th1 cells (Muranski P, et al., Tumor-specific Th17-polarized cells eradicate large established melanoma. Blood. 2008 Jul. 15; 112(2):362-73; and Martin-Orozco N, et al., T helper 17 cells promote cytotoxic T cell activation in tumor immunity. Immunity. 2009 Nov. 20; 31(5):787-98). Those studies involved an adoptive T cell transfer (ACT) therapy approach, which takes advantage of CD4+ T cells that express a TCR recognizing tyrosinase tumor antigen. Exploitation of the TCR leads to rapid expansion of Th17 populations to large numbers ex vivo for reinfusion into the autologous tumor-bearing hosts.

[0668] In one embodiment, ACT may include autologous iPSC-based vaccines, such as irradiated iPSCs in autologous anti-tumor vaccines (see e.g., Kooreman, Nigel G. et al., Autologous iPSC-Based Vaccines Elicit Anti-tumor Responses In Vivo, Cell Stem Cell 22, 1-13, 2018, doi.org/10.1016/j.stem.2018.01.016).

[0669] Unlike T-cell receptors (TCRs) that are MHC restricted, CARs can potentially bind any cell surface-expressed antigen and can thus be more universally used to treat patients (see Irving et al., Engineering Chimeric Antigen Receptor T-Cells for Racing in Solid Tumors: Don't Forget the Fuel, Front. Immunol., 3 Apr. 2017, doi.org/10.3389/fimmu.2017.00267). In one embodiment, in the absence of endogenous T-cell infiltrate (e.g., due to aberrant antigen processing and presentation), which precludes the use of TIL therapy and immune checkpoint blockade, the transfer of CAR T-cells may be used to treat patients (see, e.g., Hinrichs C S, Rosenberg S A. Exploiting the curative potential of adoptive T-cell therapy for cancer. Immunol Rev (2014) 257(1):56-71. doi:10.1111/imr.12132).

[0670] Approaches such as the foregoing may be adapted to provide methods of treating and/or increasing survival of a subject having a disease, such as a neoplasia, for example by administering an effective amount of an immunoresponsive cell comprising an antigen recognizing receptor that binds a selected antigen, wherein the binding activates the immunoresponsive cell, thereby treating or preventing the disease (such as a neoplasia, a pathogen infection, an autoimmune disorder, or an allogeneic transplant reaction).

[0671] In one embodiment, the treatment can be administered after lymphodepleting pretreatment in the form of chemotherapy (typically a combination of cyclophosphamide and fludarabine) or radiation therapy. Initial studies in ACT had short lived responses and the transferred cells did not persist in vivo for very long (Houot et al., T-cell-based immunotherapy: adoptive cell transfer and checkpoint inhibition. Cancer Immunol Res (2015) 3(10):1115-22; and Kamta et al., Advancing Cancer Therapy with Present and Emerging Immuno-Oncology Approaches. Front. Oncol. (2017) 7:64). Immune suppressor cells like Tregs and MDSCs may attenuate the activity of transferred cells by outcompeting them for the necessary cytokines. Not being bound by a theory lymphodepleting pretreatment may eliminate the suppressor cells allowing the TILs to persist.

[0672] In one embodiment, the treatment can be administrated into patients undergoing an immunosuppressive treatment (e.g., glucocorticoid treatment). The cells or population of cells, may be made resistant to at least one immunosuppressive agent due to the inactivation of a gene encoding a receptor for such immunosuppressive agent. In one embodiment, the immunosuppressive treatment provides for the selection and expansion of the immunoresponsive T cells within the patient.

[0673] In one embodiment, the treatment can be administered before primary treatment (e.g., surgery or radiation therapy) to shrink a tumor before the primary treatment. In another embodiment, the treatment can be administered after primary treatment to remove any remaining cancer cells.

[0674] In one embodiment, immunometabolic barriers can be targeted therapeutically prior to and/or during ACT to enhance responses to ACT or CAR T-cell therapy and to support endogenous immunity (see, e.g., Irving et al., Engineering Chimeric Antigen Receptor T-Cells for Racing in Solid Tumors: Don't Forget the Fuel, Front. Immunol., 3 Apr. 2017, doi.org/10.3389/fimmu.2017.00267).

[0675] The administration of cells or population of cells, such as immune system cells or cell populations, such as more particularly immunoresponsive cells or cell populations, as disclosed herein may be carried out in any convenient manner, including by aerosol inhalation, injection, ingestion, transfusion, implantation or transplantation. The cells or population of cells may be administered to a patient subcutaneously, intradermally, intratumorally, intranodally, intramedullary, intramuscularly, intrathecally, by intravenous or intralymphatic injection, or intraperitoneally. In one embodiment, the disclosed CARs may be delivered or administered into a cavity formed by the resection of tumor tissue (i.e. intracavity delivery) or directly into a tumor prior to resection (i.e. intratumoral delivery). In one embodiment, the cell compositions of the present invention are preferably administered by intravenous injection.

[0676] The administration of the cells or population of cells can consist of the administration of 104-109 cells per kg body weight, preferably 105 to 106 cells/kg body weight including all integer values of cell numbers within those ranges. Dosing in CAR T cell therapies may for example involve administration of from 106 to 109 cells/kg, with or without a course of lymphodepletion, for example with cyclophosphamide. The cells or population of cells can be administrated in one or more doses. In another embodiment, the effective amount of cells are administrated as a single dose. In another embodiment, the effective amount of cells are administrated as more than one dose over a period time. Timing of administration is within the judgment of managing physician and depends on the clinical condition of the patient. The cells or population of cells may be obtained from any source, such as a blood bank or a donor. While individual needs vary, determination of optimal ranges of effective amounts of a given cell type for a particular disease or conditions are within the skill of one in the art. An effective amount means an amount which provides a therapeutic or prophylactic benefit. The dosage administrated will be dependent upon the age, health and weight of the recipient, kind of concurrent treatment, if any, frequency of treatment and the nature of the effect desired.

[0677] In another embodiment, the effective amount of cells or composition comprising those cells are administrated parenterally. The administration can be an intravenous administration. The administration can be directly done by injection within a tumor.

[0678] To guard against possible adverse reactions, engineered immunoresponsive cells may be equipped with a transgenic safety switch, in the form of a transgene that renders the cells vulnerable to exposure to a specific signal. For example, the herpes simplex viral thymidine kinase (TK) gene may be used in this way, for example by introduction into allogeneic T lymphocytes used as donor lymphocyte infusions following stem cell transplantation (Greco, et al., Improving the safety of cell therapy with the TK-suicide gene. Front. Pharmacol. 2015; 6: 95). In such cells, administration of a nucleoside prodrug such as ganciclovir or acyclovir causes cell death. Alternative safety switch constructs include inducible caspase 9, for example triggered by administration of a small-molecule dimerizer that brings together two nonfunctional icasp9 molecules to form the active enzyme. A wide variety of alternative approaches to implementing cellular proliferation controls have been described (see U.S. Patent Publication No. 20130071414; International Patent Publication WO 2011/146862; International Patent Publication WO 2014/011987; International Patent Publication WO 2013/040371; Zhou et al. BLOOD, 2014, 123/25:3895-3905; Di Stasi et al., The New England Journal of Medicine 2011; 365:1673-1683; Sadelain M, The New England Journal of Medicine 2011; 365:1735-173; Ramos et al., Stem Cells 28(6):1107-15 (2010)).

[0679] In a further refinement of adoptive therapies, genome editing may be used to tailor immunoresponsive cells to alternative implementations, for example providing edited CAR T cells (see Poirot et al., 2015, Multiplex genome edited T-cell manufacturing platform for “off-the-shelf” adoptive T-cell immunotherapies, Cancer Res 75 (18): 3853; Ren et al., 2017, Multiplex genome editing to generate universal CAR T cells resistant to PD1 inhibition, Clin Cancer Res. 2017 May 1; 23(9):2255-2266. doi: 10.1158/1078-0432.CCR-16-1300. Epub 2016 Nov. 4; Qasim et al., 2017, Molecular remission of infant B-ALL after infusion of universal TALEN gene-edited CAR T cells, Sci Transl Med. 2017 Jan. 25; 9(374); Legut, et al., 2018, CRISPR-mediated TCR replacement generates superior anticancer transgenic T cells. Blood, 131(3), 311-322; and Georgiadis et al., Long Terminal Repeat CRISPR-CAR-Coupled “Universal” T Cells Mediate Potent Anti-leukemic Effects, Molecular Therapy, In Press, Corrected Proof, Available online 6 Mar. 2018). Cells may be edited using any CRISPR system and method of use thereof as described herein. The composition and systems may be delivered to an immune cell by any method described herein. In preferred embodiments, cells are edited ex vivo and transferred to a subject in need thereof. Immunoresponsive cells, CAR T cells or any cells used for adoptive cell transfer may be edited. Editing may be performed for example to insert or knock-in an exogenous gene, such as an exogenous gene encoding a CAR or a TCR, at a preselected locus in a cell (e.g. TRAC locus); to eliminate potential alloreactive T-cell receptors (TCR) or to prevent inappropriate pairing between endogenous and exogenous TCR chains, such as to knock-out or knock-down expression of an endogenous TCR in a cell; to disrupt the target of a chemotherapeutic agent in a cell; to block an immune checkpoint, such as to knock-out or knock-down expression of an immune checkpoint protein or receptor in a cell; to knock-out or knock-down expression of other gene or genes in a cell, the reduced expression or lack of expression of which can enhance the efficacy of adoptive therapies using the cell; to knock-out or knock-down expression of an endogenous gene in a cell, said endogenous gene encoding an antigen targeted by an exogenous CAR or TCR; to knock-out or knock-down expression of one or more MHC constituent proteins in a cell; to activate a T cell; to modulate cells such that the cells are resistant to exhaustion or dysfunction; and/or increase the differentiation and/or proliferation of functionally exhausted or dysfunctional CD8+ T-cells (see International Patent Publication Nos. WO 2013/176915, WO 2014/059173, WO 2014/172606, WO 2014/184744, and WO 2014/191128).

[0680] In one embodiment, editing may result in inactivation of a gene. By inactivating a gene, it is intended that the gene of interest is not expressed in a functional protein form. In a particular embodiment, the system specifically catalyzes cleavage in one targeted gene thereby inactivating said targeted gene. The nucleic acid strand breaks caused are commonly repaired through the distinct mechanisms of homologous recombination or non-homologous end joining (NHEJ). However, NHEJ is an imperfect repair process that often results in changes to the DNA sequence at the site of the cleavage. Repair via non-homologous end joining (NHEJ) often results in small insertions or deletions (Indel) and can be used for the creation of specific gene knockouts. Cells in which a cleavage induced mutagenesis event has occurred can be identified and/or selected by well-known methods in the art. In one embodiment, homology directed repair (HDR) is used to concurrently inactivate a gene (e.g., TRAC) and insert an endogenous TCR or CAR into the inactivated locus.

[0681] Hence, In one embodiment, editing of cells, particularly cells intended for adoptive cell therapies, more particularly immunoresponsive cells such as T cells, may be performed to insert or knock-in an exogenous gene, such as an exogenous gene encoding a CAR or a TCR, at a preselected locus in a cell. Conventionally, nucleic acid molecules encoding CARs or TCRs are transfected or transduced to cells using randomly integrating vectors, which, depending on the site of integration, may lead to clonal expansion, oncogenic transformation, variegated transgene expression and/or transcriptional silencing of the transgene. Directing of transgene(s) to a specific locus in a cell can minimize or avoid such risks and advantageously provide for uniform expression of the transgene(s) by the cells. Without limitation, suitable ‘safe harbor’ loci for directed transgene integration include CCR5 or AAVS1. Homology-directed repair (HDR) strategies are known and described elsewhere in this specification allowing to insert transgenes into desired loci (e.g., TRAC locus).

[0682] Further suitable loci for insertion of transgenes, in particular CAR or exogenous TCR transgenes, include without limitation loci comprising genes coding for constituents of endogenous T-cell receptor, such as T-cell receptor alpha locus (TRA) or T-cell receptor beta locus (TRB), for example T-cell receptor alpha constant (TRAC) locus, T-cell receptor beta constant 1 (TRBC1) locus or T-cell receptor beta constant 2 (TRBC1) locus. Advantageously, insertion of a transgene into such locus can simultaneously achieve expression of the transgene, potentially controlled by the endogenous promoter, and knock-out expression of the endogenous TCR. This approach has been exemplified in Eyquem et al., (2017) Nature 543: 113-117, wherein the authors used CRISPR/Cas9 gene editing to knock-in a DNA molecule encoding a CD19-specific CAR into the TRAC locus downstream of the endogenous promoter; the CAR-T cells obtained by CRISPR were significantly superior in terms of reduced tonic CAR signaling and exhaustion.

[0683] T cell receptors (TCR) are cell surface receptors that participate in the activation of T cells in response to the presentation of antigen. The TCR is generally made from two chains, α and β, which assemble to form a heterodimer and associates with the CD3-transducing subunits to form the T cell receptor complex present on the cell surface. Each α and β chain of the TCR consists of an immunoglobulin-like N-terminal variable (V) and constant (C) region, a hydrophobic transmembrane domain, and a short cytoplasmic region. As for immunoglobulin molecules, the variable region of the α and β chains are generated by V(D)J recombination, creating a large diversity of antigen specificities within the population of T cells. However, in contrast to immunoglobulins that recognize intact antigen, T cells are activated by processed peptide fragments in association with an MHC molecule, introducing an extra dimension to antigen recognition by T cells, known as MHC restriction. Recognition of MHC disparities between the donor and recipient through the T cell receptor leads to T cell proliferation and the potential development of graft versus host disease (GVHD). The inactivation of TCRα or TCRβ can result in the elimination of the TCR from the surface of T cells preventing recognition of alloantigen and thus GVHD. However, TCR disruption generally results in the elimination of the CD3 signaling component and alters the means of further T cell expansion.

[0684] Hence, in one embodiment, editing of cells, particularly cells intended for adoptive cell therapies, more particularly immunoresponsive cells such as T cells, may be performed to knock-out or knock-down expression of an endogenous TCR in a cell. For example, NHEJ-based or HDR-based gene editing approaches can be employed to disrupt the endogenous TCR alpha and/or beta chain genes. For example, gene editing system or systems, such as TnpB system or systems, can be designed to target a sequence found within the TCR beta chain conserved between the beta 1 and beta 2 constant region genes (TRBC1 and TRBC2) and/or to target the constant region of the TCR alpha chain (TRAC) gene.

[0685] Allogeneic cells are rapidly rejected by the host immune system. It has been demonstrated that, allogeneic leukocytes present in non-irradiated blood products will persist for no more than 5 to 6 days (Boni, Muranski et al. 2008 Blood 1; 112(12):4746-54). Thus, to prevent rejection of allogeneic cells, the host's immune system usually has to be suppressed to some extent. However, in the case of adoptive cell transfer the use of immunosuppressive drugs also have a detrimental effect on the introduced therapeutic T cells. Therefore, to effectively use an adoptive immunotherapy approach in these conditions, the introduced cells would need to be resistant to the immunosuppressive treatment. Thus, in a particular embodiment, the present invention further comprises a step of modifying T cells to make them resistant to an immunosuppressive agent, preferably by inactivating at least one gene encoding a target for an immunosuppressive agent. An immunosuppressive agent is an agent that suppresses immune function by one of several mechanisms of action. An immunosuppressive agent can be, but is not limited to a calcineurin inhibitor, a target of rapamycin, an interleukin-2 receptor α-chain blocker, an inhibitor of inosine monophosphate dehydrogenase, an inhibitor of dihydrofolic acid reductase, a corticosteroid or an immunosuppressive antimetabolite. The present invention allows conferring immunosuppressive resistance to T cells for immunotherapy by inactivating the target of the immunosuppressive agent in T cells. As non-limiting examples, targets for an immunosuppressive agent can be a receptor for an immunosuppressive agent such as: CD52, glucocorticoid receptor (GR), a FKBP family gene member and a cyclophilin family gene member.

[0686] In one embodiment, editing of cells, particularly cells intended for adoptive cell therapies, more particularly immunoresponsive cells such as T cells, may be performed to block an immune checkpoint, such as to knock-out or knock-down expression of an immune checkpoint protein or receptor in a cell. Immune checkpoints are inhibitory pathways that slow down or stop immune reactions and prevent excessive tissue damage from uncontrolled activity of immune cells. In one embodiment, the immune checkpoint targeted is the programmed death-1 (PD-1 or CD279) gene (PDCD1). In other embodiments, the immune checkpoint targeted is cytotoxic T-lymphocyte-associated antigen (CTLA-4). In additional embodiments, the immune checkpoint targeted is another member of the CD28 and CTLA4 Ig superfamily such as BTLA, LAG3, ICOS, PDL1 or KIR. In further additional embodiments, the immune checkpoint targeted is a member of the TNFR superfamily such as CD40, OX40, CD137, GITR, CD27 or TIM-3.

[0687] Additional immune checkpoints include Src homology 2 domain-containing protein tyrosine phosphatase 1 (SHP-1) (Watson H A, et al., SHP-1: the next checkpoint target for cancer immunotherapy? Biochem Soc Trans. 2016 Apr. 15; 44(2):356-62). SHP-1 is a widely expressed inhibitory protein tyrosine phosphatase (PTP). In T-cells, it is a negative regulator of antigen-dependent activation and proliferation. It is a cytosolic protein, and therefore not amenable to antibody-mediated therapies, but its role in activation and proliferation makes it an attractive target for genetic manipulation in adoptive transfer strategies, such as chimeric antigen receptor (CAR) T cells. Immune checkpoints may also include T cell immunoreceptor with Ig and ITIM domains (TIGIT/Vstm3/WUCAM/VSIG9) and VISTA (Le Mercier I, et al., (2015) Beyond CTLA-4 and PD-1, the generation Z of negative checkpoint regulators. Front. Immunol. 6:418).

[0688] International Patent Publication No. WO 2014/172606 relates to the use of MT1 and/or MT2 inhibitors to increase proliferation and/or activity of exhausted CD8+ T-cells and to decrease CD8+ T-cell exhaustion (e.g., decrease functionally exhausted or unresponsive CD8+ immune cells). In one embodiment, metallothioneins are targeted by gene editing in adoptively transferred T cells.

[0689] In one embodiment, targets of gene editing may be at least one targeted locus involved in the expression of an immune checkpoint protein. Such targets may include, but are not limited to CTLA4, PPP2CA, PPP2CB, PTPN6, PTPN22, PDCD1, ICOS (CD278), PDL1, KIR, LAG3, HAVCR2, BTLA, CD160, TIGIT, CD96, CRTAM, LAIR1, SIGLEC7, SIGLEC9, CD244 (2B4), TNFRSF10B, TNFRSF10A, CASP8, CASP10, CASP3, CASP6, CASP7, FADD, FAS, TGFBRII, TGFRBRI, SMAD2, SMAD3, SMAD4, SMAD10, SKI, SKIL, TGIF1, IL10RA, IL10RB, HMOX2, IL6R, IL6ST, EIF2AK4, CSK, PAG1, SIT1, FOXP3, PRDM1, BATF, VISTA, GUCY1A2, GUCY1A3, GUCY1B2, GUCY1B3, MT1, MT2, CD40, OX40, CD137, GITR, CD27, SHP-1, TIM-3, CEACAM-1, CEACAM-3, or CEACAM-5. In preferred embodiments, the gene locus involved in the expression of PD-1 or CTLA-4 genes is targeted. In other preferred embodiments, combinations of genes are targeted, such as but not limited to PD-1 and TIGIT.

[0690] By means of an example and without limitation, International Patent Publication No. WO 2016/196388 concerns an engineered T cell comprising (a) a genetically engineered antigen receptor that specifically binds to an antigen, which receptor may be a CAR; and (b) a disrupted gene encoding a PD-L1, an agent for disruption of a gene encoding a PD-L1, and/or disruption of a gene encoding PD-L1, wherein the disruption of the gene may be mediated by a gene editing nuclease, a zinc finger nuclease (ZFN), CRISPR/Cas9 and/or TALEN. WO2015142675 relates to immune effector cells comprising a CAR in combination with an agent (such as the composition or system herein) that increases the efficacy of the immune effector cells in the treatment of cancer, wherein the agent may inhibit an immune inhibitory molecule, such as PD1, PD-L1, CTLA-4, TIM-3, LAG-3, VISTA, BTLA, TIGIT, LAIR1, CD160, 2B4, TGFR beta, CEACAM-1, CEACAM-3, or CEACAM-5. Ren et al., (2017) Clin Cancer Res 23 (9) 2255-2266 performed lentiviral delivery of CAR and electro-transfer of Cas9 mRNA and gRNAs targeting endogenous TCR, β-2 microglobulin (B2M) and PD1 simultaneously, to generate gene-disrupted allogeneic CAR T cells deficient of TCR, HLA class I molecule and PD1.

[0691] In one embodiment, cells may be engineered to express a CAR, wherein expression and/or function of methylcytosine dioxygenase genes (TET1, TET2 and/or TET3) in the cells has been reduced or eliminated, (such as the composition or system herein) (for example, as described in WO201704916).

[0692] In one embodiment, editing of cells, particularly cells intended for adoptive cell therapies, more particularly immunoresponsive cells such as T cells, may be performed to knock-out or knock-down expression of an endogenous gene in a cell, said endogenous gene encoding an antigen targeted by an exogenous CAR or TCR, thereby reducing the likelihood of targeting of the engineered cells. In one embodiment, the targeted antigen may be one or more antigen selected from the group consisting of CD38, CD138, CS-1, CD33, CD26, CD30, CD53, CD92, CD100, CD148, CD150, CD200, CD261, CD262, CD362, human telomerase reverse transcriptase (hTERT), survivin, mouse double minute 2 homolog (MDM2), cytochrome P450 1B1 (CYP1B), HER2/neu, Wilms' tumor gene 1 (WT1), livin, alphafetoprotein (AFP), carcinoembryonic antigen (CEA), mucin 16 (MUC16), MUC1, prostate-specific membrane antigen (PSMA), p53, cyclin (D1), B cell maturation antigen (BCMA), transmembrane activator and CAML Interactor (TACI), and B-cell activating factor receptor (BAFF-R) (for example, as described in International Patent Publication Nos. WO 2016/011210 and WO 2017/011804).

[0693] In one embodiment, editing of cells, particularly cells intended for adoptive cell therapies, more particularly immunoresponsive cells such as T cells, may be performed to knock-out or knock-down expression of one or more MHC constituent proteins, such as one or more HLA proteins and/or beta-2 microglobulin (B2M), in a cell, whereby rejection of non-autologous (e.g., allogeneic) cells by the recipient's immune system can be reduced or avoided. In preferred embodiments, one or more HLA class I proteins, such as HLA-A, B and/or C, and/or B2M may be knocked-out or knocked-down. Preferably, B2M may be knocked-out or knocked-down. By means of an example, Ren et al., (2017) Clin Cancer Res 23 (9) 2255-2266 performed lentiviral delivery of CAR and electro-transfer of Cas mRNA and gRNAs targeting endogenous TCR, 3-2 microglobulin (B2M) and PD1 simultaneously, to generate gene-disrupted allogeneic CAR T cells deficient of TCR, HLA class I molecule and PD1.

[0694] In other embodiments, at least two genes are edited. Pairs of genes may include, but are not limited to PD1 and TCRα, PD1 and TCRβ, CTLA-4 and TCRα, CTLA-4 and TCRβ, LAG3 and TCRα, LAG3 and TCRβ, Tim3 and TCRα, Tim3 and TCRβ, BTLA and TCRα, BTLA and TCRβ, BY55 and TCRα, BY55 and TCRβ, TIGIT and TCRα, TIGIT and TCRβ, B7H5 and TCRα, B7H5 and TCRβ, LAIR1 and TCRα, LAIR1 and TCRβ, SIGLEC10 and TCRα, SIGLEC10 and TCRβ, 2B4 and TCRα, 2B4 and TCRβ, B2M and TCRα, B2M and TCRβ.

[0695] In one embodiment, a cell may be multiplied edited (multiplex genome editing) as taught herein to (1) knock-out or knock-down expression of an endogenous TCR (for example, TRBC1, TRBC2 and/or TRAC), (2) knock-out or knock-down expression of an immune checkpoint protein or receptor (for example PD1, PD-L1 and/or CTLA4); and (3) knock-out or knock-down expression of one or more MHC constituent proteins (for example, HLA-A, B and/or C, and/or B2M, preferably B2M).

[0696] Whether prior to or after genetic modification of the T cells, the T cells can be activated and expanded generally using methods as described, for example, in U.S. Pat. Nos. 6,352,694; 6,534,055; 6,905,680; 5,858,358; 6,887,466; 6,905,681; 7,144,575; 7,232,566; 7,175,843; 5,883,223; 6,905,874; 6,797,514; 6,867,041; and 7,572,631. T cells can be expanded in vitro or in vivo.

[0697] Immune cells may be obtained using any method known in the art. In one embodiment, allogenic T cells may be obtained from healthy subjects. In one embodiment T cells that have infiltrated a tumor are isolated. T cells may be removed during surgery. T cells may be isolated after removal of tumor tissue by biopsy. T cells may be isolated by any means known in the art. In one embodiment, T cells are obtained by apheresis. In one embodiment, the method may comprise obtaining a bulk population of T cells from a tumor sample by any suitable method known in the art. For example, a bulk population of T cells can be obtained from a tumor sample by dissociating the tumor sample into a cell suspension from which specific cell populations can be selected. Suitable methods of obtaining a bulk population of T cells may include, but are not limited to, any one or more of mechanically dissociating (e.g., mincing) the tumor, enzymatically dissociating (e.g., digesting) the tumor, and aspiration (e.g., as with a needle).

[0698] The bulk population of T cells obtained from a tumor sample may comprise any suitable type of T cell. Preferably, the bulk population of T cells obtained from a tumor sample comprises tumor infiltrating lymphocytes (TILs).

[0699] The tumor sample may be obtained from any mammal. Unless stated otherwise, as used herein, the term “mammal” refers to any mammal including, but not limited to, mammals of the order Logomorpha, such as rabbits; the order Carnivora, including Felines (cats) and Canines (dogs); the order Artiodactyla, including Bovines (cows) and Swines (pigs); or of the order Perssodactyla, including Equines (horses). The mammals may be non-human primates, e.g., of the order Primates, Ceboids, or Simoids (monkeys) or of the order Anthropoids (humans and apes). In one embodiment, the mammal may be a mammal of the order Rodentia, such as mice and hamsters. Preferably, the mammal is a non-human primate or a human. An especially preferred mammal is the human.

[0700] T cells can be obtained from a number of sources, including peripheral blood mononuclear cells (PBMC), bone marrow, lymph node tissue, spleen tissue, and tumors. In one embodiment of the present invention, T cells can be obtained from a unit of blood collected from a subject using any number of techniques known to the skilled artisan, such as Ficoll separation. In one preferred embodiment, cells from the circulating blood of an individual are obtained by apheresis or leukapheresis. The apheresis product typically contains lymphocytes, including T cells, monocytes, granulocytes, B cells, other nucleated white blood cells, red blood cells, and platelets. In one embodiment, the cells collected by apheresis may be washed to remove the plasma fraction and to place the cells in an appropriate buffer or media for subsequent processing steps. In one embodiment of the invention, the cells are washed with phosphate buffered saline (PBS). In an alternative embodiment, the wash solution lacks calcium and may lack magnesium or may lack many if not all divalent cations. Initial activation steps in the absence of calcium lead to magnified activation. As those of ordinary skill in the art would readily appreciate a washing step may be accomplished by methods known to those in the art, such as by using a semi-automated “flow-through” centrifuge (for example, the Cobe 2991 cell processor) according to the manufacturer's instructions. After washing, the cells may be resuspended in a variety of biocompatible buffers, such as, for example, Ca-free, Mg-free PBS. Alternatively, the undesirable components of the apheresis sample may be removed and the cells directly resuspended in culture media.

[0701] In another embodiment, T cells are isolated from peripheral blood lymphocytes by lysing the red blood cells and depleting the monocytes, for example, by centrifugation through a PERCOLL™ gradient. A specific subpopulation of T cells, such as CD28+, CD4+, CDC, CD45RA+, and CD45RO+ T cells, can be further isolated by positive or negative selection techniques. For example, in one preferred embodiment, T cells are isolated by incubation with anti-CD3/anti-CD28 (i.e., 3×28)-conjugated beads, such as DYNABEADS® M-450 CD3/CD28 T, or XCYTE DYNABEADS™ for a time period sufficient for positive selection of the desired T cells. In one embodiment, the time period is about 30 minutes. In a further embodiment, the time period ranges from 30 minutes to 36 hours or longer and all integer values there between. In a further embodiment, the time period is at least 1, 2, 3, 4, 5, or 6 hours. In yet another preferred embodiment, the time period is 10 to 24 hours. In one preferred embodiment, the incubation time period is 24 hours. For isolation of T cells from patients with leukemia, use of longer incubation times, such as 24 hours, can increase cell yield. Longer incubation times may be used to isolate T cells in any situation where there are few T cells as compared to other cell types, such in isolating tumor infiltrating lymphocytes (TIL) from tumor tissue or from immunocompromised individuals. Further, use of longer incubation times can increase the efficiency of capture of CD8+ T cells.

[0702] Enrichment of a T cell population by negative selection can be accomplished with a combination of antibodies directed to surface markers unique to the negatively selected cells. A preferred method is cell sorting and/or selection via negative magnetic immunoadherence or flow cytometry that uses a cocktail of monoclonal antibodies directed to cell surface markers present on the cells negatively selected. For example, to enrich for CD4+ cells by negative selection, a monoclonal antibody cocktail typically includes antibodies to CD14, CD20, CD11b, CD16, HLA-DR, and CD8.

[0703] Further, monocyte populations (e.g., CD14+ cells) may be depleted from blood preparations by a variety of methodologies, including anti-CD14 coated beads or columns, or utilization of the phagocytotic activity of these cells to facilitate removal. Accordingly, in one embodiment, the invention uses paramagnetic particles of a size sufficient to be engulfed by phagocytotic monocytes. In one embodiment, the paramagnetic particles are commercially available beads, for example, those produced by Life Technologies under the trade name Dynabeads™. In one embodiment, other non-specific cells are removed by coating the paramagnetic particles with “irrelevant” proteins (e.g., serum proteins or antibodies). Irrelevant proteins and antibodies include those proteins and antibodies or fragments thereof that do not specifically target the T cells to be isolated. In one embodiment, the irrelevant beads include beads coated with sheep anti-mouse antibodies, goat anti-mouse antibodies, and human serum albumin.

[0704] In brief, such depletion of monocytes is performed by preincubating T cells isolated from whole blood, apheresed peripheral blood, or tumors with one or more varieties of irrelevant or non-antibody coupled paramagnetic particles at any amount that allows for removal of monocytes (approximately a 20:1 bead:cell ratio) for about 30 minutes to 2 hours at 22 to 37 degrees C., followed by magnetic removal of cells which have attached to or engulfed the paramagnetic particles. Such separation can be performed using standard methods available in the art. For example, any magnetic separation methodology may be used including a variety of which are commercially available, (e.g., DYNAL® Magnetic Particle Concentrator (DYNAL MPC®)). Assurance of requisite depletion can be monitored by a variety of methodologies known to those of ordinary skill in the art, including flow cytometric analysis of CD14 positive cells, before and after depletion.

[0705] For isolation of a desired population of cells by positive or negative selection, the concentration of cells and surface (e.g., particles such as beads) can be varied. In one embodiment, it may be desirable to significantly decrease the volume in which beads and cells are mixed together (i.e., increase the concentration of cells), to ensure maximum contact of cells and beads. For example, in one embodiment, a concentration of 2 billion cells/ml is used. In one embodiment, a concentration of 1 billion cells/ml is used. In a further embodiment, greater than 100 million cells/ml is used. In a further embodiment, a concentration of cells of 10, 15, 20, 25, 30, 35, 40, 45, or 50 million cells/ml is used. In yet another embodiment, a concentration of cells from 75, 80, 85, 90, 95, or 100 million cells/ml is used. In further embodiments, concentrations of 125 or 150 million cells/ml can be used. Using high concentrations can result in increased cell yield, cell activation, and cell expansion. Further, use of high cell concentrations allows more efficient capture of cells that may weakly express target antigens of interest, such as CD28-negative T cells, or from samples where there are many tumor cells present (i.e., leukemic blood, tumor tissue, etc). Such populations of cells may have therapeutic value and would be desirable to obtain. For example, using high concentration of cells allows more efficient selection of CD8+ T cells that normally have weaker CD28 expression.

[0706] In a related embodiment, it may be desirable to use lower concentrations of cells. By significantly diluting the mixture of T cells and surface (e.g., particles such as beads), interactions between the particles and cells is minimized. This selects for cells that express high amounts of desired antigens to be bound to the particles. For example, CD4+ T cells express higher levels of CD28 and are more efficiently captured than CD8+ T cells in dilute concentrations. In one embodiment, the concentration of cells used is 5×106/ml. In other embodiments, the concentration used can be from about 1×105/ml to 1×106/ml, and any integer value in between.

[0707] T cells can also be frozen. Wishing not to be bound by theory, the freeze and subsequent thaw step provides a more uniform product by removing granulocytes and to some extent monocytes in the cell population. After a washing step to remove plasma and platelets, the cells may be suspended in a freezing solution. While many freezing solutions and parameters are known in the art and will be useful in this context, one method involves using PBS containing 20% DMSO and 8% human serum albumin, or other suitable cell freezing media, the cells then are frozen to −80° C. at a rate of 1° per minute and stored in the vapor phase of a liquid nitrogen storage tank. Other methods of controlled freezing may be used as well as uncontrolled freezing immediately at −20° C. or in liquid nitrogen.

[0708] T cells for use in the present invention may also be antigen-specific T cells. For example, tumor-specific T cells can be used. In one embodiment, antigen-specific T cells can be isolated from a patient of interest, such as a patient afflicted with a cancer or an infectious disease. In one embodiment, neoepitopes are determined for a subject and T cells specific to these antigens are isolated. Antigen-specific cells for use in expansion may also be generated in vitro using any number of methods known in the art, for example, as described in U.S. Patent Publication No. US 20040224402 entitled, Generation and Isolation of Antigen-Specific T Cells, or in U.S. Pat. No. 6,040,177. Antigen-specific cells for use in the present invention may also be generated using any number of methods known in the art, for example, as described in Current Protocols in Immunology, or Current Protocols in Cell Biology, both published by John Wiley & Sons, Inc., Boston, Mass.

[0709] In a related embodiment, it may be desirable to sort or otherwise positively select (e.g. via magnetic selection) the antigen specific cells prior to or following one or two rounds of expansion. Sorting or positively selecting antigen-specific cells can be carried out using peptide-MHC tetramers (Altman, et al., Science. 1996 Oct. 4; 274(5284):94-6). In another embodiment, the adaptable tetramer technology approach is used (Andersen et al., 2012 Nat Protoc. 7:891-902). Tetramers are limited by the need to utilize predicted binding peptides based on prior hypotheses, and the restriction to specific HLAs. Peptide-MHC tetramers can be generated using techniques known in the art and can be made with any MHC molecule of interest and any antigen of interest as described herein. Specific epitopes to be used in this context can be identified using numerous assays known in the art. For example, the ability of a polypeptide to bind to MHC class I may be evaluated indirectly by monitoring the ability to promote incorporation of 125I labeled β2-microglobulin (β2m) into MHC class I/β2m/peptide heterotrimeric complexes (see Parker et al., J. Immunol. 152:163, 1994).

[0710] In one embodiment cells are directly labeled with an epitope-specific reagent for isolation by flow cytometry followed by characterization of phenotype and TCRs. In one embodiment, T cells are isolated by contacting with T cell specific antibodies. Sorting of antigen-specific T cells, or generally any cells of the present invention, can be carried out using any of a variety of commercially available cell sorters, including, but not limited to, MoFlo sorter (DakoCytomation, Fort Collins, Colo.), FACSAria™, FACSArray™, FACSVantage™, BD™ LSR II, and FACSCalibur™ (BD Biosciences, San Jose, Calif).

[0711] In a preferred embodiment, the method comprises selecting cells that also express CD3. The method may comprise specifically selecting the cells in any suitable manner. Preferably, the selecting is carried out using flow cytometry. The flow cytometry may be carried out using any suitable method known in the art. The flow cytometry may employ any suitable antibodies and stains. Preferably, the antibody is chosen such that it specifically recognizes and binds to the particular biomarker being selected. For example, the specific selection of CD3, CD8, TIM-3, LAG-3, 4-1BB, or PD-1 may be carried out using anti-CD3, anti-CD8, anti-TIM-3, anti-LAG-3, anti-4-1BB, or anti-PD-1 antibodies, respectively. The antibody or antibodies may be conjugated to a bead (e.g., a magnetic bead) or to a fluorochrome. Preferably, the flow cytometry is fluorescence-activated cell sorting (FACS). TCRs expressed on T cells can be selected based on reactivity to autologous tumors. Additionally, T cells that are reactive to tumors can be selected for based on markers using the methods described in patent publication Nos. WO2014133567 and WO2014133568, herein incorporated by reference in their entirety. Additionally, activated T cells can be selected for based on surface expression of CD107a.

[0712] In one embodiment of the invention, the method further comprises expanding the numbers of T cells in the enriched cell population. Such methods are described in U.S. Pat. No. 8,637,307 and is herein incorporated by reference in its entirety. The numbers of T cells may be increased at least about 3-fold (or 4-, 5-, 6-, 7-, 8-, or 9-fold), more preferably at least about 10-fold (or 20-, 30-, 40-, 50-, 60-, 70-, 80-, or 90-fold), more preferably at least about 100-fold, more preferably at least about 1,000 fold, or most preferably at least about 100,000-fold. The numbers of T cells may be expanded using any suitable method known in the art. Exemplary methods of expanding the numbers of cells are described in patent publication No. WO 2003/057171, U.S. Pat. No. 8,034,334, and U.S. Patent Publication No. 2012/0244133, each of which is incorporated herein by reference.

[0713] In one embodiment, ex vivo T cell expansion can be performed by isolation of T cells and subsequent stimulation or activation followed by further expansion. In one embodiment of the invention, the T cells may be stimulated or activated by a single agent. In another embodiment, T cells are stimulated or activated with two agents, one that induces a primary signal and a second that is a co-stimulatory signal. Ligands useful for stimulating a single signal or stimulating a primary signal and an accessory molecule that stimulates a second signal may be used in soluble form. Ligands may be attached to the surface of a cell, to an Engineered Multivalent Signaling Platform (EMSP), or immobilized on a surface. In a preferred embodiment both primary and secondary agents are co-immobilized on a surface, for example a bead or a cell. In one embodiment, the molecule providing the primary activation signal may be a CD3 ligand, and the co-stimulatory molecule may be a CD28 ligand or 4-1BB ligand.

[0714] In one embodiment, T cells comprising a CAR or an exogenous TCR, may be manufactured as described in International Patent Publication No. WO 2015/120096, by a method comprising enriching a population of lymphocytes obtained from a donor subject; stimulating the population of lymphocytes with one or more T-cell stimulating agents to produce a population of activated T cells, wherein the stimulation is performed in a closed system using serum-free culture medium; transducing the population of activated T cells with a viral vector comprising a nucleic acid molecule which encodes the CAR or TCR, using a single cycle transduction to produce a population of transduced T cells, wherein the transduction is performed in a closed system using serum-free culture medium; and expanding the population of transduced T cells for a predetermined time to produce a population of engineered T cells, wherein the expansion is performed in a closed system using serum-free culture medium. In one embodiment, T cells comprising a CAR or an exogenous TCR, may be manufactured as described in WO 2015/120096, by a method comprising: obtaining a population of lymphocytes; stimulating the population of lymphocytes with one or more stimulating agents to produce a population of activated T cells, wherein the stimulation is performed in a closed system using serum-free culture medium; transducing the population of activated T cells with a viral vector comprising a nucleic acid molecule which encodes the CAR or TCR, using at least one cycle transduction to produce a population of transduced T cells, wherein the transduction is performed in a closed system using serum-free culture medium; and expanding the population of transduced T cells to produce a population of engineered T cells, wherein the expansion is performed in a closed system using serum-free culture medium. The predetermined time for expanding the population of transduced T cells may be 3 days. The time from enriching the population of lymphocytes to producing the engineered T cells may be 6 days. The closed system may be a closed bag system. Further provided is population of T cells comprising a CAR or an exogenous TCR obtainable or obtained by said method, and a pharmaceutical composition comprising such cells.

[0715] In one embodiment, T cell maturation or differentiation in vitro may be delayed or inhibited by the method as described in International Patent Publication No. WO 2017/070395, comprising contacting one or more T cells from a subject in need of a T cell therapy with an AKT inhibitor (such as, e.g., one or a combination of two or more AKT inhibitors disclosed in claim 8 of WO2017070395) and at least one of exogenous Interleukin-7 (IL-7) and exogenous Interleukin-15 (IL-15), wherein the resulting T cells exhibit delayed maturation or differentiation, and/or wherein the resulting T cells exhibit improved T cell function (such as, e.g., increased T cell proliferation; increased cytokine production; and/or increased cytolytic activity) relative to a T cell function of a T cell cultured in the absence of an AKT inhibitor.

[0716] In one embodiment, a patient in need of a T cell therapy may be conditioned by a method as described in International Patent Publication No. WO 2016/191756 comprising administering to the patient a dose of cyclophosphamide between 200 mg/m2/day and 2000 mg/m2/day and a dose of fludarabine between 20 mg/m2/day and 900 mg/m2/day.

### Diseases

[0717] Genetic Diseases and Diseases with a Genetic and/or Epigenetic Aspect

[0718] The compositions, systems, or components thereof can be used to treat and/or prevent a genetic disease or a disease with a genetic and/or epigenetic aspect. The genes and conditions exemplified herein are not exhaustive. In one embodiment, a method of treating and/or preventing a genetic disease can include administering a composition, system, and/or one or more components thereof to a subject, where the composition, system, and/or one or more components thereof is capable of modifying one or more copies of one or more genes associated with the genetic disease or a disease with a genetic and/or epigenetic aspect in one or more cells of the subject. In one embodiment, modifying one or more copies of one or more genes associated with a genetic disease or a disease with a genetic and/or epigenetic aspect in the subject can eliminate a genetic disease or a symptom thereof in the subject. In one embodiment, modifying one or more copies of one or more genes associated with a genetic disease or a disease with a genetic and/or epigenetic aspect in the subject can decrease the severity of a genetic disease or a symptom thereof in the subject. In one embodiment, the compositions, systems, or components thereof can modify one or more genes or polynucleotides associated with one or more diseases, including genetic diseases and/or those having a genetic aspect and/or epigenetic aspect, including but not limited to, any one or more set forth in Table 4A. It will be appreciated that those diseases and associated genes listed herein are non-exhaustive and non-limiting. Further some genes play roles in the development of multiple diseases.

TABLE 4A
Exemplary Genetic and Other Diseases and Associated Genes

| | Primary | Additional | |
|---|---|---|---|
| | Tissues or | Tissues/ | |
| | System | Systems | |
| Disease Name | Affected | Affected | Genes |
| Achondroplasia | Bone and | | fibroblast growth factor receptor 3 |
| | Muscle | | (FGFR3) |
| Achromatopsia | eye | | CNGA3, CNGB3, GNAT2, PDE6C, |
| | | | PDE6H, ACHM2, ACHM3, |
| Acute Renal Injury | kidney | | NFkappaB, AATF, p85alpha, FAS, |
| | | | Apoptosis cascade elements (e.g. |
| | | | FASR, Caspase 2, 3, 4, 6, 7, 8, 9, 10, |
| | | | AKT, TNF alpha, IGF1, IGF1R, |
| | | | RIPK1), p53 |
| Age Related Macular | eye | | Abcr; CCL2; CC2; CP |
| Degeneration | | | (ceruloplasmin); Timp3; cathepsinD; |
| | | | VLDLR, CCR2 |
| AIDS | Immune System | | KIR3DL1, NKAT3, NKB1, AMB11, |
| | | | KIR3DS1, IFNG, CXCL12, SDF1 |
| Albinism (including | Skin, hair, eyes, | | TYR, OCA2, TYRP1, and SLC45A2, |
| oculocutaneous albinism (types | | | SLC24A5 and C10orf11 |
| 1-7) and ocular albinism) | | | |
| Alkaptonuria | Metabolism of | Tissues/organs | HGD |
| | amino acids | where | |
| | | homogentisic | |
| | | acid | |
| | | accumulates, | |
| | | particularly | |
| | | cartilage (joints), | |
| | | heart valves, | |
| | | kidneys | |
| alpha-1 antitrypsin deficiency | Lung | Liver, skin, | SERPINA1, those set forth in |
| (AATD or A1AD) | | vascular system, | WO2017165862, PiZ allele |
| | | kidneys, GI | |
| ALS | CNS | [0714] | SOD1; ALS2; ALS3; ALS5; |
| | | | ALS7; STEX; FUS; TARDBP; VEGF |
| | | | (VEGF-a; |
| | | | VEGF-b; VEGF-c); DPP6; NEFH, |
| | | | PTGS1, SLC1A2, TNFRSF10B, |
| | | | PRPH, HSP90AA1, CRIA2, IFNG, |
| | | | AMPA2 S100B, FGF2, AOX1, CS, |
| | | | TXN, RAPHJ1, MAP3K5, NBEAL1, |
| | | | GPX1, ICA1L, RAC1, MAPT, ITPR2, |
| | | | ALS2CR4, GLS, ALS2CR8, CNTFR, |
| | | | ALS2CR11, FOLH1, FAM117B, |
| | | | P4HB, CNTF, SQSTM1, STRADB, |
| | | | NAIP, NLR, YWHAQ, SLC33A1, |
| | | | TRAK2, SCA1, NIF3L1, NIF3, |
| | | | PARD3B, COX8A, CDK15, HECW1, |
| | | | HECT, C2, WW 15, NOS1, MET, |
| | | | SOD2, HSPB1, NEFL, CTSB, ANG, |
| | | | HSPA8, RNase A, VAPB, VAMP, |
| | | | SNCA, alpha HGF, CAT, ACTB, |
| | | | NEFM, TH, BCL2, FAS, CASP3, |
| | | | CLU, SMN1, G6PD, BAX, HSF1, |
| | | | RNF19A, JUN, ALS2CR12, HSPA5, |
| | | | MAPK14, APEX1, TXNRD1, NOS2, |
| | | | TIMP1, CASP9, XIAP, GLG1, EPO, |
| | | | VEGFA, ELN, GDNF, NFE2L2, |
| | | | SLC6A3, HSPA4, APOE, PSMB8, |
| | | | DCTN2, TIMP3, KIFAP3, SLC1A1, |
| | | | SMN2, CCNC, STUB1, ALS2, |
| | | | PRDX6, SYP, CABIN1, CASP1, |
| | | | GART, CDK5, ATXN3, RTN4, |
| | | | C1QB, VEGFC, HTT, PARK7, XDH, |
| | | | GFAP, MAP2, CYCS, FCGR3B, CCS, |
| | | | UBL5, MMP9m SLC18A3, TRPM7, |
| | | | HSPB2, AKT1, DEERL1, CCL2, |
| | | | NGRN, GSR, TPPP3, APAF1, |
| | | | BTBD10, GLUD1, CXCR4, S:C1A3, |
| | | | FLT1, PON1, AR, LIF, ERBB3, :GA:S1, |
| | | | CD44, TP53, TLR3, GRIA1, |
| | | | GAPDH, AMPA, GRIK1, DES, |
| | | | CHAT, FLT4, CHMP2B, BAG1, |
| | | | CRNA COMPONENT4, GSS, BAK1, |
| | | | KDR, GSTP1, OGG1, IL6 |
| Alzheimer's Disease | Brain | | E1; CHIP; UCH; UBB; Tau; LRP; |
| | | | PICALM; CLU; PS1; |
| | | | SORL1; CR1; VLDLR; UBA1; |
| | | | UBA3; CHIP28; AQP1; UCHL1; |
| | | | UCHL3; APP, AAA, CVAP, AD1, |
| | | | APOE, AD2, DCP1, ACE1, MPO, |
| | | | PACIP1, PAXIP1L, PTIP, A2M, |
| | | | BLMH, BMH, PSEN1, AD3, ALAS2, |
| | | | ABCA1, BIN1, BDNF, BTNL8, |
| | | | C1ORF49, CDH4, CHRNB2, |
| | | | CKLFSF2, CLEC4E, CR1L, CSF3R, |
| | | | CST3, CYP2C, DAPK1, ESR1, |
| | | | FCAR, FCGR3B, FFA2, FGA, GAB2, |
| | | | GALP, GAPDHS, GMPB, HP, HTR7, |
| | | | IDE, IF127, IFI6, IFIT2, IL1RN, IL- |
| | | | 1RA, IL8RA, IL8RB, JAG1, KCNJ15, |
| | | | LRP6, MAPT, MARK4, MPHOSPH1, |
| | | | MTHFR, NBN, NCSTN, NIACR2, |
| | | | NMNAT3, NTM, ORM1, P2RY13, |
| | | | PBEF1, PCK1, PICALM, PLAU, |
| | | | PLXNC1, PRNP, PSEN1, PSEN2, |
| | | | PTPRA, RALGPS2, RGSL2, |
| | | | SELENBP1, SLC25A37, SORL1, |
| | | | Mitoferrin-1, TF, TFAM, TNF, |
| | | | TNFRSF10C, UBE1C |
| Amyloidosis | | | APOA1, APP, AAA, CVAP, AD1, |
| | | | GSN, FGA, LYZ, TTR, PALB |
| Amyloid neuropathy | | | TTR, PALB |
| Anemia | Blood | | CDAN1, CDA1, RPS19, DBA, PKLR, |
| | | | PK1, NT5C3, UMPH1, PSN1, RHAG, |
| | | | RH50A, NRAMP2, SPTB, ALAS2, |
| | | | ANH1, ASB, ABCB7, ABC7, ASAT |
| Angelman Syndrome | Nervous system, | | UBE3A |
| | brain | | |
| Attention Deficit Hyperactivity | Brain | | PTCHD1 |
| Disorder (ADHD) | | | |
| Autoimmune lymphoproliferative | Immune system | | TNFRSF6, APT1, FAS, CD95, |
| syndrome | | | ALPS1A |
| Autism, Autism spectrum | Brain | | PTCHD1; Mecp2; BZRAP1; MDGA2; |
| disorders (ASDs), including | | | Sema5A; Neurexin 1; GLO1, RTT, |
| Asperger's and a general | | | PPMX, MRX16, RX79, NLGN3, |
| diagnostic category called | | | NLGN4, KIAA1260, AUTSX2, |
| Pervasive Developmental | | | FMR1, FMR2; FXR1; FXR2; |
| Disorders (PDDs) | | | MGLUR5, ATP10C, CDH10, GRM6, |
| | | | MGLUR6, CDH9, CNTN4, NLGN2, |
| | | | CNTNAP2, SEMA5A, DHCR7, |
| | | | NLGN4X, NLGN4Y, DPP6, NLGN5, |
| | | | EN2, NRCAM, MDGA2, NRXN1, |
| | | | FMR2, AFF2, FOXP2, OR4M2, |
| | | | OXTR, FXR1, FXR2, PAH, |
| | | | GABRA1, PTEN, GABRA5, PTPRZ1, |
| | | | GABRB3, GABRG1, HIRIP3, |
| | | | SEZ6L2, HOXA1, SHANK3, IL6, |
| | | | SHBZRAP1, LAMB1, SLC6A4, |
| | | | SERT, MAPK3, TAS2R1, MAZ, |
| | | | TSC1, MDGA2, TSC2, MECP2, |
| | | | UBE3A, WNT2, see also |
| | | | 20110023145 |
| autosomal dominant polycystic | kidney | liver | PKD1, PKD2 |
| kidney disease (ADPKD) - | | | |
| (includes diseases such as von | | | |
| Hippel-Lindau disease and | | | |
| tubreous sclerosis complex | | | |
| disease) | | | |
| Autosomal Recessive Polycystic | kidney | liver | PKDH1 |
| Kidney Disease (ARPKD) | | | |
| Ataxia-Telangiectasia (a.k.a | Nervous system, | various | ATM |
| Louis Bar syndrome) | immune system | | |
| B-Cell Non-Hodgkin Lymphoma | | | BCL7A, BCL7 |
| Bardet-Biedl syndrome | Eye, | Liver, ear, | ARL6, BBS1, BBS2, BBS4, BBS5, |
| | musculoskeletal | gastrointestinal | BBS7, BBS9, BBS10, BBS12, |
| | system, kidney, | system, brain | CEP290, INPP5E, LZTFL1, MKKS, |
| | reproductive | | MKS1, SDCCAG8, TRIM32, TTC8 |
| | organs | | |
| Bare Lymphocyte Syndrome | blood | | TAPBP, TPSN, TAP2, ABCB3, PSF2, |
| | | | RING11, MHC2TA, C2TA, RFX5, |
| | | | RFXAP, RFX5 |
| Bartter's Syndrome (types I, II, | kidney | | SLC12A1 (type I), KCNJ1 (type II), |
| III, IVA and B, and V) | | | CLCNKB (type III), BSND (type IV |
| | | | A), or both the CLCNKA CLCNKB |
| | | | genes (type IV B), CASR (type V). |
| Becker muscular dystrophy | Muscle | | DMD, BMD, MYF6 |
| Best Disease (Vitelliform | eye | | VMD2 |
| Macular Dystrophy type 2) | | | |
| Bleeding Disorders | blood | | TBXA2R, P2RX1, P2X1 |
| Blue Cone Monochromacy | eye | | OPN1LW, OPN1MW, and LCR |
| Breast Cancer | Breast tissue | | BRCA1, BRCA2, COX-2 |
| Bruton's Disease (aka X-linked | Immune system, | | BTK |
| Agammglobulinemia) | specifically B | | |
| | cells | | |
| Cancers (e.g., lymphoma, chronic | Various | | FAS, BID, CTLA4, PDCD1, CBLB, |
| lymphocytic leukemia (CLL), B | | | PTPN6, TRAC, TRBC, those |
| cell acute lymphocytic leukemia | | | described in WO2015048577 |
| (B-ALL), acute lymphoblastic | | | |
| leukemia, acute myeloid | | | |
| leukemia, non-Hodgkin's | | | |
| lymphoma (NHL), diffuse large | | | |
| cell lymphoma (DLCL), multiple | | | |
| myeloma, renal cell carcinoma | | | |
| (RCC), neuroblastoma, colorectal | | | |
| cancer, breast cancer, ovarian | | | |
| cancer, melanoma, sarcoma, | | | |
| prostate cancer, lung cancer, | | | |
| esophageal cancer, hepatocellular | | | |
| carcinoma, pancreatic cancer, | | | |
| astrocytoma, mesothelioma, head | | | |
| and neck cancer, and | | | |
| medulloblastoma | | | |
| Cardiovascular Diseases | heart | Vascular system | IL1B, XDH, TP53, PTGS, MB, IL4, |
| | | | ANGPT1, ABCGu8, CTSK, PTGIR, |
| | | | KCNJ11, INS, CRP, PDGFRB, |
| | | | CCNA2, PDGFB, KCNJ5, KCNN3, |
| | | | CAPN10, ADRA2B, ABCG5, |
| | | | PRDX2, CPAN5, PARP14, MEX3C, |
| | | | ACE, RNF, IL6, TNF, STN, |
| | | | SERPINE1, ALB, ADIPOQ, APOB, |
| | | | APOE, LEP, MTHFR, APOA1, |
| | | | EDN1, NPPB, NOS3, PPARG, PLAT, |
| | | | PTGS2, CETP, AGTR1, HMGCR, |
| | | | IGF1, SELE, REN, PPARA, PON1, |
| | | | KNG1, CCL2, LPL, VWF, F2, |
| | | | ICAM1, TGFB, NPPA, IL10, EPO, |
| | | | SOD1, VCAM1, IFNG, LPA, MPO, |
| | | | ESR1, MAPK, HP, F3, CST3, COG2, |
| | | | MMP9, SERPINC1, F8, HMOX1, |
| | | | APOC3, IL8, PROL1, CBS, NOS2, |
| | | | TLR4, SELP, ABCA1, AGT, LDLR, |
| | | | GPT, VEGFA, NR3C2, IL18, NOS1, |
| | | | NR3C1, FGB, HGF, ILIA, AKT1, |
| | | | LIPC, HSPD1, MAPK14, SPP1, |
| | | | ITGB3, CAT, UTS2, THBD, F10, CP, |
| | | | TNFRSF11B, EGFR, MMP2, PLG, |
| | | | NPY, RHOD, MAPK8, MYC, FN1, |
| | | | CMA1, PLAU, GNB3, ADRB2, |
| | | | SOD2, F5, VDR, ALOX5, HLA- |
| | | | DRB1, PARP1, CD40LG, PON2, |
| | | | AGER, IRS1, PTGS1, ECE1, F7, |
| | | | IRMN, EPHX2, IGFBP1, MAPK10, |
| | | | FAS, ABCB1, JUN, IGFBP3, CD14, |
| | | | PDE5A, AGTR2, CD40, LCAT, |
| | | | CCR5, MMP1, TIMP1, ADM, |
| | | | DYT10, STAT3, MMP3, ELN, USF1, |
| | | | CFH, HSPA4, MMP12, MME, F2R, |
| | | | SELL, CTSB, ANXA5, ADRB1, |
| | | | CYBA, FGA, GGT1, LIPG, HIF1A, |
| | | | CXCR4, PROC, SCARB1, CD79A, |
| | | | PLTP, ADD1, FGG, SAA1, KCNH2, |
| | | | DPP4, NPR1, VTN, KIAA0101, FOS, |
| | | | TLR2, PPIG, IL1R1, AR, CYP1A1, |
| | | | SERPINA1, MTR, RBP4, APOA4, |
| | | | CDKN2A, FGF2, EDNRB, ITGA2, |
| | | | VLA-2, CABIN1, SHBG, HMGB1, |
| | | | HSP90B2P, CYP3A4, GJA1, CAV1, |
| | | | ESR2, LTA, GDF15, BDNF, |
| | | | CYP2D6, NGF, SP1, TGIF1, SRC, |
| | | | EGF, PIK3CG, HLA-A, KCNQ1, |
| | | | CNR1, FBN1, CHKA, BEST1, |
| | | | CTNNB1, IL2, CD36, PRKAB1, TPO, |
| | | | ALDH7A1, CX3CR1, TH, F9, CH1, |
| | | | TF, HFE, IL17A, PTEN, GSTM1, |
| | | | DMD, GATA4, F13A1, TTR, FABP4, |
| | | | PON3, APOC1, INSR, TNFRSF1B, |
| | | | HTR2A, CSF3, CYP2C9, TXN, |
| | | | CYP11B2, PTH, CSF2, KDR, |
| | | | PLA2G2A, THBS1, GCG, RHOA, |
| | | | ALDH2, TCF7L2, NFE2L2, |
| | | | NOTCH1, UGT1A1, IFNA1, PPARD, |
| | | | SIRT1, GNHR1, PAPPA, ARR3, |
| | | | NPPC, AHSP, PTK2, IL13, MTOR, |
| | | | ITGB2, GSTT1, IL6ST, CPB2, |
| | | | CYP1A2, HNF4A, SLC64A, |
| | | | PLA2G6, TNFSF11, SLC8A1, F2RL1, |
| | | | AKR1A1, ALDH9A1, BGLAP, |
| | | | MTTP, MTRR, SULT1A3, RAGE, |
| | | | C4B, P2RY12, RNLS, CREB1, |
| | | | POMC, RAC1, LMNA, CD59, |
| | | | SCM5A, CYP1B1, MIF, MMP13, |
| | | | TIMP2, CYP19A1, CUP21A2, |
| | | | PTPN22, MYH14, MBL2, SELPLG, |
| | | | AOC3, CTSL1, PCNA, IGF2, ITGB1, |
| | | | CAST, CXCL12, IGHE, KCNE1, |
| | | | TFRC, COL1A1, COL1A2, IL2RB, |
| | | | PLA2G10, ANGPT2, PROCR, NOX4, |
| | | | HAMP, PTPN11, SLCA1, IL2RA, |
| | | | CCL5, IRF1, CF:AR, CA:CA, EIF4E, |
| | | | GSTP1, JAK2, CYP3A5, HSPG2, |
| | | | CCL3, MYD88, VIP, SOAT1, |
| | | | ADRBK1, NR4A2, MMP8, NPR2, |
| | | | GCH1, EPRS, PPARGC1A, F12, |
| | | | PECAM1, CCL4, CERPINA34, |
| | | | CASR, FABP2, TTF2, PROS1, CTF1, |
| | | | SGCB, YME1L1, CAMP, ZC3H12A, |
| | | | AKR1B1, MMP7, AHR, CSF1, |
| | | | HDAC9, CTGF, KCNMA1, UGT1A, |
| | | | PRKCA, COMT, S100B, EGR1, PRL, |
| | | | IL15, DRD4, CAMK2G, SLC22A2, |
| | | | CCL11, PGF, THPO, GP6, TACR1, |
| | | | NTS, HNF1A, SST, KCDN1, |
| | | | LOC646627, TBXAS1, CUP2J2, |
| | | | TBXA2R, ADH1C, ALOX12, AHSG, |
| | | | BHMT, GJA4, SLC25A4, ACLY, |
| | | | ALOX5AP, NUMA1, CYP27B1, |
| | | | CYSLTR2, SOD3, LTC4S, UCN, |
| | | | GHRL, APOC2, CLEC4A, |
| | | | KBTBD10, TNC, TYMS, SHC1, |
| | | | LRP1, SOCS3, ADH1B, KLK3, |
| | | | HSD11B1, VKORC1, SERPINB2, |
| | | | TNS1, RNF19A, EPOR, ITGAM, |
| | | | PITX2, MAPK7, FCGR3A, LEEPR, |
| | | | ENG, GPX1, GOT2, HRH1, NR112, |
| | | | CRH, HTR1A, VDAC1, HPSE, |
| | | | SFTPD, TAP2, RMF123, PTK2Bm |
| | | | NTRK2, IL6R, ACHE, GLP1R, GHR, |
| | | | GSR, NQO1, NR5A1, GJB2, |
| | | | SLC9A1, MAOA, PCSK9, FCGR2A, |
| | | | SERPINF1, EDN3, UCP2, TFAP2A, |
| | | | C4BPA, SERPINF2, TYMP, ALPP, |
| | | | CXCR2, SLC3A3, ABCG2, ADA, |
| | | | JAK3, HSPA1A, FASN, FGF1, F11, |
| | | | ATP7A, CR1, GFPA, ROCK1, |
| | | | MECP2, MYLK, BCHE, LIPE, |
| | | | ADORA1, WRN, CXCR3, CD81, |
| | | | SMAD7, LAMC2, MAP3K5, CHGA, |
| | | | IAPP, RHO, ENPP1, PTHLH, NRG1, |
| | | | VEGFC, ENPEP, CEBPB, NAGLU,. |
| | | | F2RL3, CX3CL1, BDKRB1, |
| | | | ADAMTS13, ELANE, ENPP2, CISH, |
| | | | GAST, MYOC, ATP1A2, NF1, GJB1, |
| | | | MEF2A, VCL, BMPR2, TUBB, |
| | | | CDC42, KRT18, HSF1, MYB, |
| | | | PRKAA2, ROCK2, TFP1, PRKG1, |
| | | | BMP2, CTNND1, CTH, CTSS, |
| | | | VAV2, NPY2R, IGFBP2, CD28, |
| | | | GSTA1, PPIA, APOH, S100A8, IL11, |
| | | | ALOX15, FBLN1, NR1H3, SCD, GIP, |
| | | | CHGB, PRKCB, SRD5A1, HSD11B2, |
| | | | CALCRL, GALNT2, ANGPTL4, |
| | | | KCNN4, PIK3C2A, HBEGF, |
| | | | CYP7A1, HLA-DRB5, BNIP3, |
| | | | GCKR, S100A12, PADI4, HSPA14, |
| | | | CXCR1, H19, KRTAP19-3, IDDM2, |
| | | | RAC2, YRY1, CLOCK, NGFR, DBH, |
| | | | CRNA COMPONENT4, CACNA1C, |
| | | | PRKAG2, CHAT, PTGDS, NR1H2, |
| | | | TEK, VEGFB, MEF2C, MAPKAPK2, |
| | | | TNFRSF11A, HSPA9, CYSLTR1, |
| | | | MATIA, OPRL1, IMPA1, CLCN2, |
| | | | DLD, PSMA6, PSMB8, CHI3L1, |
| | | | ALDH1B1, PARP2, STAR, LBP, |
| | | | ABCC6, RGS2, EFNB2, GJB6, |
| | | | APOA2, AMPD1, DYSF, |
| | | | FDFT1, EMD2, CCR6, GJB3, IL1RL1, |
| | | | ENTPD1, BBS4, CELSR2, F11R, |
| | | | RAPGEF3, HYAL1, ZNF259, |
| | | | ATOX1, ATF6, KHK, SAT1, GGH, |
| | | | TIMP4, SLC4A4, PDE2A, PDE3B, |
| | | | FADS1, FADS2, TMSB4X, TXNIP, |
| | | | LIMS1, RHOB, LY96, FOXO1, |
| | | | PNPLA2, TRH, GJC1, S:C17A5, FTO, |
| | | | GJD2, PRSC1, CASP12, GPBAR1, |
| | | | PXK, IL33, TRIB1, PBX4, NUPR1, |
| | | | 15-SEP, CILP2, TERC, GGT2, |
| | | | MTCO1, UOX, AVP |
| Cataract | eye | | CRYAA, CRYA1, CRYBB2, CRYB2, |
| | | | PITX3, BFSP2, CP49, CP47, CRYAA, |
| | | | CRYA1, PAX6, AN2, MGDA, |
| | | | CRYBA1, CRYB1, CRYGC, CRYG3, |
| | | | CCL, LIM2, MP19, CRYGD, CRYG4, |
| | | | BFSP2, CP49, CP47, HSF4, CTM, |
| | | | HSF4, CTM, MIP, AQP0, CRYAB, |
| | | | CRYA2, CTPP2, CRYBB1, CRYGD, |
| | | | CRYG4, CRYBB2, CRYB2, CRYGC, |
| | | | CRYG3, CCL, CRYAA, CRYA1, |
| | | | GJA8, CX50, CAE1, GJA3, CX46, |
| | | | CZP3, CAE3, CCM1, CAM, KRIT1 |
| CDKL-5 Deficiencies or | Brain, CNS | | CDKL5 |
| Mediated Diseases | | | |
| Charcot-Marie-Tooth (CMT) | Nervous system | Muscles | PMP22 (CMT1A and E), MPZ |
| disease (Types 1, 2, 3, 4,) | | (dystrophy) | (CMT1B), LITAF (CMT1C), EGR2 |
| | | | (CMT1D), NEFL (CMT1F), GJB1 |
| | | | (CMT1X), MFN2 (CMT2A), KIF1B |
| | | | (CMT2A2B), RAB7A (CMT2B), |
| | | | TRPV4 (CMT2C), GARS (CMT2D), |
| | | | NEFL (CMT2E), GAPD1 (CMT2K), |
| | | | HSPB8 (CMT2L), DYNC1H1, |
| | | | CMT2O), LRSAM1 (CMT2P), |
| | | | IGHMBP2 (CMT2S), MORC2 |
| | | | (CMT2Z), GDAP1 (CMT4A), |
| | | | MTMR2 or SBF2/MTMR13 |
| | | | (CMT4B), SH3TC2 (CMT4C), |
| | | | NDRG1 (CMT4D), PRX (CMT4F), |
| | | | FIG4 (CMT4J), NT-3 |
| Chédiak-Higashi Syndrome | Immune system | Skin, hair, eyes, | LYST |
| | | neurons | |
| Choroidermia | | | CHM, REP1, |
| Chorioretinal atrophy | eye | | PRDM13, RGR, TEAD1 |
| Chronic Granulomatous Disease | Immune system | | CYBA, CYBB, NCF1, NCF2, NCF4 |
| Chronic Mucocutaneous | Immune system | | AIRE, CARD9, CLEC7A IL12B, |
| Candidiasis | | | IL12B1, IL1F, IL17RA, IL17RC, |
| | | | RORC, STAT1, STAT3, TRAF31P2 |
| Cirrhosis | liver | | KRT18, KRT8, CIRH1A, NAIC, |
| | | | TEX292, KIAA1988 |
| Colon cancer (Familial | Gastrointestinal | | FAP: APC HNPCC: MSH2, |
| adenomatous polyposis (FAP) | | | MLH1, PMS2, SH6, PMS1 |
| and hereditary nonpolyposis | | | |
| colon cancer (HNPCC)) | | | |
| Combined Immunodeficiency | Immune System | | IL2RG, SCIDX1, SCIDX, IMD4); |
| | | | HIV-1 (CCL5, SCYA5, D17S136E, |
| | | | TCP228 |
| Cone(-rod) dystrophy | eye | | AIPL1, CRX, GUA1A, GUCY2D, |
| | | | PITPM3, PROM1, PRPH2, RIMS1, |
| | | | SEMA4A, ABCA4, ADAM9, ATF6, |
| | | | C21ORF2, C8ORF37, CACNA2D4, |
| | | | CDHR1, CERKL, CNGA3, CNGB3, |
| | | | CNNM4, CNAT2, IFT81, KCNV2, |
| | | | PDE6C, PDE6H, POC1B, RAX2, |
| | | | RDH5, RPGRIP1, TTLL5, RetCG1, |
| | | | GUCY2E |
| Congenital Stationary Night | eye | | CABP4, CACNA1F, CACNA2D4, |
| Blindness | | | GNAT1, CPR179, GRK1, GRM6, |
| | | | LRIT3, NYX, PDE6B, RDH5, RHO, |
| | | | RLBP1, RPE65, SAG, SLC24A1, |
| | | | TRPM1, |
| Congenital Fructose Intolerance | Metabolism | | ALDOB |
| Cori's Disease (Glycogen Storage | Various- | | AGL |
| Disease Type III) | wherever | | |
| | glycogen | | |
| | accumulates, | | |
| | particularly | | |
| | liver, heart, | | |
| | skeletal muscle | | |
| Corneal clouding and dystrophy | eye | | APOA1, TGFBI, CSD2, CDGG1, |
| | | | CSD, BIGH3, CDG2, TACSTD2, |
| | | | TROP2, M1S1, VSX1, RINX, PPCD, |
| | | | PPD, KTCN, COL8A2, FECD, |
| | | | PPCD2, PIP5K3, CFD |
| Cornea plana congenital | | | KERA, CNA2 |
| Cri du chat Syndrome, also | | | Deletions involving only band 5p15.2 |
| known as 5p syndrome and cat | | | to the entire short arm of chromosome |
| cry syndrome | | | 5, e.g. CTNND2, TERT, |
| Cystic Fibrosis (CF) | Lungs and | Pancreas, liver, | CTFR, ABCC7, CF, MRP7, SCNN1A, |
| | respiratory | digestive | those described in WO2015157070 |
| | system | system, | |
| | | reproductive | |
| | | system, | |
| | | exocrine, glands, | |
| Diabetic nephropathy | kidney | | Gremlin, 12/15- lipoxygenase, TIM44, |
| Dent Disease (Types 1 and 2) | Kidney | | Type 1: CLCN5, Type 2: ORCL |
| Dentatorubro-Pallidoluysian | CNS, brain, | | Atrophin-1 and Atn1 |
| Atrophy (DRPLA) (aka Haw | muscle | | |
| River and Naito-Oyanagi | | | |
| Disease) | | | |
| Down Syndrome | various | | Chromosome 21 trisomy |
| Drug Addiction | Brain | | Prkce; Drd2; Drd4; ABAT; |
| | | | GRIA2; Grm5; Grin1; Htr1b; Grin2a; |
| | | | Drd3; Pdyn; Gria1 |
| Duane syndrome (Types 1, 2, and | eye | | CHN1, indels on chromosomes 4 and 8 |
| 3, including subgroups A, B and | | | |
| C). Other names for this | | | |
| condition include: Duane's | | | |
| Retraction Syndrome (or DR | | | |
| syndrome), Eye Retraction | | | |
| Syndrome, Retraction Syndrome, | | | |
| Congenital retraction syndrome | | | |
| and Stilling-Turk-Duane | | | |
| Syndrome | | | |
| Duchenne muscular dystrophy | muscle | Cardiovascular, | DMD, BMD, dystrophin gene, intron |
| (DMD) | | respiratory | flanking exon 51 of DMD gene, exon |
| | | | 51 mutations in DMD gene, see also |
| | | | WO2013163628 and US Pat. Pub. |
| | | | 20130145487 |
| Edward's Syndrome | | | Complete or partial trisomy of |
| (Trisomy 18) | | | chromosome 18 |
| Ehlers-Danlos Syndrome (Types | Various | | COL5A1, COL5A2, COL1A1, |
| I-VI) | depending on | | COL3A1, TNXB, PLOD1, COL1A2, |
| | type: including | | FKBP14 and ADAMTS2 |
| | musculoskeletal, | | |
| | eye, vasculature, | | |
| | immune, and | | |
| | skin | | |
| Emery-Dreifuss muscular | muscle | | LMNA, LMN1, EMD2, FPLD, |
| dystrophy | | | CMD1A, HGPS, LGMD1B, LMNA, |
| | | | LMN1, EMD2, FPLD, CMD1A |
| Enhanced S-Cone Syndrome | eye | | NR2E3, NRL |
| Fabry's Disease | Various - | | GLA |
| | including skin, | | |
| | eyes, and | | |
| | gastrointestinal | | |
| | system, kidney, | | |
| | heart, brain, | | |
| | nervous system | | |
| Facioscapulohumeral muscular | muscles | | FSHMD1A, FSHD1A, FRG1, |
| dystrophy | | | |
| Factor H and Factor H-like 1 | blood | | HF1, CFH, HUS |
| Factor V Leiden thrombophilia | blood | | Factor V (F5) |
| and Factor V deficiency | | | |
| Factor V and Factor VII | blood | | MCFD2 |
| deficiency | | | |
| Factor VII deficiency | blood | | F7 |
| Factor X deficiency | blood | | F10 |
| Factor XI deficiency | blood | | F11 |
| Factor XII deficiency | blood | | F12, HAF |
| Factor XIIIA deficiency | blood | | F13A1, F13A |
| Factor XIIIB deficiency | blood | | F13B |
| Familial Hypercholestereolemia | Cardiovascular | | APOB, LDLR, PCSK9 |
| | system | | |
| Familial Mediterranean Fever | Various- | Heart, kidney, | MEFV |
| (FMF) also called recurrent | organs/tissues | brain/CNS, | |
| polyserositis or familial | with serous or | reproductive | |
| paroxysmal polyserositis | synovial | organs | |
| | membranes, | | |
| | skin, joints | | |
| Fanconi Anemia | Various - blood | | FANCA, FACA, FA1, FA, FAA, |
| | (anemia), | | FAAP95, FAAP90, FLJ34064, |
| | immune system, | | FANCC, FANCG, RAD51, BRCA1, |
| | cognitive, | | BRCA2, BRIP1, BACH1, FANCJ, |
| | kidneys, eyes, | | FANCB, FANCD1, FANCD2, |
| | musculoskeletal | | FANCD, FAD, FANCE, FACE, |
| | | | FANCF, FANCI, ERCC4, FANCL, |
| | | | FANCM, PALB2, RAD51C, SLX4, |
| | | | UBE2T, FANCB, XRCC9, PHF9, |
| | | | KIAA1596 |
| Fanconi Syndrome Types I | kidneys | | FRTS1, GATM |
| (Childhood onset) and II (Adult | | | |
| Onset) | | | |
| Fragile X syndrome and related | brain | | FMR1, FMR2; FXR1; FXR2; |
| disorders | | | mGLUR5 |
| Fragile XE Mental Retardation | Brain, nervous | | FMR1 |
| (aka Martin Bell syndrome) | system | | |
| Friedreich Ataxia (FRDA) | Brain, nervous | heart | FXN/X25 |
| | system | | |
| Fuchs endothelial corneal | Eye | | TCF4; COL8A2 |
| dystrophy | | | |
| Galactosemia | Carbohydrate | Various-where | GALT, GALK1, and GALE |
| | metabolism | galactose | |
| | disorder | accumulates - | |
| | | liver, brain, eyes | |
| Gastrointestinal Epithelial | | | CISH |
| Cancer, GI cancer | | | |
| Gaucher Disease (Types 1, 2, and | Fat metabolism | Various-liver, | GBA |
| 3, as well as other unusual forms | disorder | spleen, blood, | |
| that may not fit into these types) | | CNS, skeletal | |
| | | system | |
| Griscelli syndrome | | | |
| Glaucoma | eye | | MYOC, TIGR, GLC1A, JOAG, |
| | | | GPOA, OPTN, GLC1E, FIP2, HYPL, |
| | | | NRP, CYP1B1, GLC3A, OPA1, NTG, |
| | | | NPG, CYP1B1, GLC3A, those |
| | | | described in WO2015153780 |
| Glomerulo sclerosis | kidney | | CC chemokine ligand 2 |
| Glycogen Storage Diseases | Metabolism | | SLC2A2, GLUT2, G6PC, G6PT, |
| Types I-VI -See also Cori's | Diseases | | G6PT1, GAA, LAMP2, LAMPB, |
| Disease, Pompe's Disease, | | | AGL, GDE, GBE1, GYS2, PYGL, |
| McArdle's disease, Hers Disease, | | | PFKM, see also Cori's Disease, |
| and Von Gierke's disease | | | Pompe's Disease, McArdle's disease, |
| | | | Hers Disease, and Von Gierke's |
| | | | disease |
| RBC Glycolytic enzyme | blood | | any mutations in a gene for an enzyme |
| deficiency | | | in the glycolysis pathway including |
| | | | mutations in genes for hexokinases I |
| | | | and II, glucokinase, phosphoglucose |
| | | | isomerase, phosphofructokinase, |
| | | | aldolase Bm triosephosphate |
| | | | isomerease, glyceraldehydee-3- |
| | | | phosphate dehydrogenase, |
| | | | phosphoglycerokinase, |
| | | | phosphoglycerate mutase, enolase I, |
| | | | pyruvate kinase |
| Hartnup's disease | Malabsorption | Various- brain, | SLC6A19 |
| | disease | gastrointestinal, | |
| | | skin, | |
| Hearing Loss | ear | | NOX3, Hes5, BDNF, |
| Hemochromatosis (HH) | Iron absorption | Various- | HFE and H63D |
| | regulation | wherever iron | |
| | disease | accumulates, | |
| | | liver, heart, | |
| | | pancreas, joints, | |
| | | pituitary gland | |
| Hemophagocytic | blood | | PRF1, HPLH2, UNC13D, MUNC13- |
| lymphohistiocytosis disorders | | | 4, HPLH3, HLH3, FHL3 |
| Hemorrhagic disorders | blood | | PI, ATT, F5 |
| Hers disease (Glycogen storage | liver | muscle | PYGL |
| disease Type VI) | | | |
| Hereditary angioedema (HAE) | | | kalikrein B1 |
| Hereditary Hemorrhagic | Skin and | | ACVRL1, ENG and SMAD4 |
| Telangiectasia (Osler-Weber- | mucous | | |
| Rendu Syndrome) | membranes | | |
| Hereditary Spherocytosis | blood | | NK1, EPB42, SLC4A1, SPTA1, and |
| | | | SPTB |
| Hereditary Persistence of Fetal | blood | | HBG1, HBG2, BCL11A, promoter |
| Hemoglobin | | | region of HBG 1 and/or 2 (in the |
| | | | CCAAT box) |
| Hemophilia (hemophilia A | blood | | A: FVIII, F8C, HEMA |
| (Classic) a B (aka Christmas | | | B: FVIX, HEMB |
| disease) and C) | | | C: F9, F11 |
| Hepatic adenoma | liver | | TCF1, HNF1A, MODY3 |
| Hepatic failure, early onset, and | liver | | SCOD1, SCO1 |
| neurologic disorder | | | |
| Hepatic lipase deficiency | liver | | LIPC |
| Hepatoblastoma, cancer and | liver | | CTNNB1, PDGFRL, PDGRL, PRLTS, |
| carcinomas | | | AXIN1, AXIN, CTNNB1, TP53, P53, |
| | | | LFS1, IGF2R, MPRI, MET, CASP8, |
| | | | MCH5 |
| Hermansky-Pudlak syndrome | Skin, eyes, | | HPS1, HPS3, HPS4, HPS5, HPS6, |
| | blood, lung, | | HPS7, DTNBP1, BLOC1, BLOC1S2, |
| | kidneys, | | BLOC3 |
| | intestine | | |
| HIV susceptibility or infection | Immune system | | IL10, CSIF, CMKBR2, CCR2, |
| | | | CMKBR5, CCCKR5 (CCR5), those in |
| | | | WO2015148670A1 |
| Holoprosencephaly (HPE) | brain | | ACVRL1, ENG, SMAD4 |
| (Alobar, Semilobar, and Lobar) | | | |
| Homocystinuria | Metabolic | Various- | CBS, MTHFR, MTR, MTRR, and |
| | disease | connective | MMADHC |
| | | tissue, muscles, | |
| | | CNS, | |
| | | cardiovascular | |
| | | system | |
| HPV | | | HPV16 and HPV18 E6/E7 |
| HSV1, HSV2, and related | eye | | HSV1 genes (immediate early and late |
| keratitis | | | HSV-1 genes (UL1, 1.5, 5, 6, 8, 9, 12, |
| | | | 15, 16, 18, 19, 22, 23, 26, 26.5, 27, 28, |
| | | | 29, 30, 31, 32, 33, 34, 35, 36, 37, 38, |
| | | | 42, 48, 49.5, 50, 52, 54, S6, RL2, RS1, |
| | | | those described in WO2015153789, |
| | | | WO2015153791 |
| Hunter's Syndrome (aka | Lysosomal | Various- liver, | IDS |
| Mucopolysaccharidosis type II) | storage disease | spleen, eye, | |
| | | joint, heart, | |
| | | brain, skeletal | |
| Huntington's disease (HD) and | Brain, nervous | | HD, HTT, IT15, PRNP, PRIP, JPH3, |
| HD-like disorders | system | | JP3, HDL2, TBP, SCA17, PRKCE; |
| | | | IGF1; EP300; RCOR1; PRKCZ; |
| | | | HDAC4; and TGM2, and those |
| | | | described in WO2013130824, |
| | | | WO2015089354 |
| Hurler's Syndrome (aka | Lysosomal | Various- liver, | IDUA, α-L-iduronidase |
| mucopolysaccharidosis type I H, | storage disease | spleen, eye, | |
| MPS IH) | | joint, heart, | |
| | | brain, skeletal | |
| Hurler-Scheie syndrome (aka | Lysosomal | Various- liver, | IDUA, α-L-iduronidase |
| mucopolysaccharidosis type I H- | storage disease | spleen, eye, | |
| S, MPS I H-S) | | joint, heart, | |
| | | brain, skeletal | |
| hyaluronidase deficiency (aka | Soft and | | HYAL1 |
| MPS IX) | connective | | |
| | tissues | | |
| Hyper IgM syndrome | Immune system | | CD40L |
| Hyper- tension caused renal | kidney | | Mineral corticoid receptor |
| damage | | | |
| Immunodeficiencies | Immune System | | CD3E, CD3G, AICDA, AID, HIGM2, |
| | | | TNFRSF5, CD40, UNG, DGU, |
| | | | HIGM4, TNFSF5, CD40LG, HIGM1, |
| | | | IGM, FOXP3, IPEX, AIID, XPID, |
| | | | PIDX, TNFRSF14B, TACI |
| Inborn errors of metabolism: | Metabolism | Various organs | See also: Carbohydrate metabolism |
| including urea cycle disorders, | diseases, liver | and cells | disorders (e.g. galactosemia), Amino |
| organic acidemias), fatty acid | | | acid Metabolism disorders (e.g. |
| oxidation defects, amino | | | phenylketonuria), Fatty acid |
| acidopathies, carbohydrate | | | metabolism (e.g. MCAD deficiency), |
| disorders, mitochondrial | | | Urea Cycle disorders (e.g. |
| disorders | | | Citrullinemia), Organic acidemias (e.g. |
| | | | Maple Syrup Urine disease), |
| | | | Mitochondrial disorders (e.g. |
| | | | MELAS), peroxisomal disorders (e.g. |
| | | | Zellweger syndrome) |
| Inflammation | Various | | IL-10; IL-1 (IL-1a; IL-1b); IL-13; IL- |
| | | | 17 (IL-17a (CTLA8); IL- |
| | | | 17b; IL-17c; IL-17d; IL-17f); II-23; |
| | | | Cx3cr1; ptpn22; TNFa; |
| | | | NOD2/CARD15 for IBD; IL-6; IL-12 |
| | | | (IL-12a; IL-12b); |
| | | | CTLA4; Cx3cl1 |
| Inflammatory Bowel Diseases | Gastrointestinal | Joints, skin | NOD2, IRGM, LRRK2, ATG5, |
| (e.g. Ulcerative Colitis and | | | ATG16L1, IRGM, GATM, ECM1, |
| Chron's Disease) | | | CDH1, LAMB1, HNF4A, GNA12, |
| | | | IL10, CARD9/15. CCR6, IL2RA, |
| | | | MST1, TNFSF15, REL, STAT3, |
| | | | IL23R, IL12B, FUT2 |
| Interstitial renal fibrosis | kidney | | TGF-β type II receptor |
| Job's Syndrome (aka Hyper IgE | Immune System | | STAT3, DOCK8 |
| Syndrome) | | | |
| Juvenile Retinoschisis | eye | | RS1, XLRS1 |
| Kabuki Syndrome 1 | | | MLL4, KMT2D |
| Kennedy Disease (aka | Muscles, brain, | | SBMA/SMAX1/AR |
| Spinobulbar Muscular Atrophy) | nervous system | | |
| Klinefelter syndrome | Various- | | Extra X chromosome in males |
| | particularly | | |
| | those involved | | |
| | in development | | |
| | of male | | |
| | characteristics | | |
| Lafora Disease | Brain, CNS | | EMP2A and EMP2B |
| Leber Congenital Amaurosis | eye | | CRB1, RP12, CORD2, CRD, CRX, |
| | | | IMPDH1, OTX2, AIPL1, CABP4, |
| | | | CCT2, CEP290, CLUAP1, CRB1, |
| | | | CRX, DTHD1, GDF6, GUCY2D, |
| | | | IFT140, IQCB1, KCNJ13, LCA5, |
| | | | LRAT, NMNAT1, PRPH2, RD3, |
| | | | RDH12, RPE65, RP20, RPGRIP1, |
| | | | SPATA7, TULP1, LCA1, LCA4, |
| | | | GUC2D, CORD6, LCA3, |
| Lesch-Nyhan Syndrome | Metabolism | Various - joints, | HPRT1 |
| | disease | cognitive, brain, | |
| | | nervous system | |
| Leukocyte deficiencies and | blood | | ITGB2, CD18, LCAMB, LAD, |
| disorders | | | EIF2B1, EIF2BA, EIF2B2, EIF2B3, |
| | | | EIF2B5, LVWM, CACH, CLE, |
| | | | EIF2B4 |
| Leukemia | Blood | | TAL1, TCL5, SCL, TAL2, FLT3, |
| | | | NBS1, NBS, ZNFN1A1, IK1, LYF1, |
| | | | HOXD4, HOX4B, BCR, CML, PHL, |
| | | | ALL, ARNT, KRAS2, RASK2, |
| | | | GMPS, AF10, ARHGEF12, LARG, |
| | | | KIAA0382, CALM, CLTH, CEBPA, |
| | | | CEBP, CHIC2, BTL, FLT3, KIT, |
| | | | PBT, LPP, NPM1, NUP214, D9S46E, |
| | | | CAN, CAIN, RUNX1, CBFA2, |
| | | | AML1, WHSC1L1, NSD3, FLT3, |
| | | | AF1Q, NPM1, NUMA1, ZNF145, |
| | | | PLZF, PML, MYL, STAT5B, AF10, |
| | | | CALM, CLTH, ARL11, ARLTS1, |
| | | | P2RX7, P2X7, BCR, CML, PHL, |
| | | | ALL, GRAF, NF1, VRNF, WSS, |
| | | | NFNS, PTPN11, PTP2C, SHP2, NS1, |
| | | | BCL2, CCND1, PRAD1, BCL1, |
| | | | TCRA, GATA1, GF1, ERYF1, NFE1, |
| | | | ABL1, NQO1, DIA4, NMOR1, |
| | | | NUP214, D9S46E, CAN, CAIN |
| Limb-girdle muscular dystrophy | muscle | | LGMD |
| diseases | | | |
| Lowe syndrome | brain, eyes, | | OCRL |
| | kidneys | | |
| Lupus glomerulo- nephritis | kidney | | MAPK1 |
| Machado- | Brain, CNS, | | ATX3 |
| Joseph's Disease (also known as | muscle | | |
| Spinocerebellar ataxia Type 3) | | | |
| Macular degeneration | eye | | ABC4, CBC1, CHM1, APOE, |
| | | | C1QTNF5, C2, C3, CCL2, CCR2, |
| | | | CD36, CFB, CFH, CFHR1, CFHR3, |
| | | | CNGB3, CP, CRP, CST3, CTSD, |
| | | | CX3CR1, ELOVL4, ERCC6, FBLN5, |
| | | | FBLN6, FSCN2, HMCN1, HTRA1, |
| | | | IL6, IL8, PLEKHA1, PROM1, |
| | | | PRPH2, RPGR, SERPING1, TCOF1, |
| | | | TIMP3, TLR3 |
| Macular Dystrophy | eye | | BEST1, C1QTNF5, CTNNA1, |
| | | | EFEMP1, ELOVL4, FSCN2, |
| | | | GUCA1B, HMCN1, IMPG1, OTX2, |
| | | | PRDM13, PROM1, PRPH2, RP1L1, |
| | | | TIMP3, ABCA4, CFH, DRAM2, |
| | | | IMG1, MFSD8, ADMD, STGD2, |
| | | | STGD3, RDS, RP7, PRPH, AVMD, |
| | | | AOFMD, VMD2 |
| Malattia Leventinesse | eye | | EFEMP1, FBLN3 |
| Maple Syrup Urine Disease | Metabolism | | BCKDHA, BCKDHB, and DBT |
| | disease | | |
| Marfan syndrome | Connective | Musculoskeletal | FBN1 |
| | tissue | | |
| Maroteaux-Lamy Syndrome (aka | Musculoskeletal | Liver, spleen | ARSB |
| MPS VI) | system, nervous | | |
| | system | | |
| McArdle's Disease (Glycogen | Glycogen | muscle | PYGM |
| Storage Disease Type V) | storage disease | | |
| Medullary cystic kidney disease | kidney | | UMOD, HNFJ, FJHN, MCKD2, |
| | | | ADMCKD2 |
| Metachromatic leukodystrophy | Lysosomal | Nervous system | ARSA |
| | storage disease | | |
| Methylmalonic acidemia (MMA) | Metabolism | | MMAA, MMAB, MUT, MMACHC, |
| | disease | | MMADHC, LMBRD1 |
| Morquio Syndrome (aka MPS IV | Connective | heart | GALNS |
| A and B) | tissue, skin, | | |
| | bone, eyes | | |
| Mucopolysaccharidosis diseases | Lysosomal | | See also Hurler/Scheie syndrome, |
| (Types I H/S, I H, II, III A B and | storage disease - | | Hurler disease, Sanfilippo syndrome, |
| C, I S, IVA and B, IX, VII, and | affects various | | Scheie syndrome, Morquio syndrome, |
| VI) | organs/tissues | | hyaluronidase deficiency, Sly |
| | | | syndrome, and Maroteaux-Lamy |
| | | | syndrome |
| Muscular Atrophy | muscle | | VAPB, VAPC, ALS8, SMN1, SMA1, |
| | | | SMA2, SMA3, SMA4, BSCL2, |
| | | | SPG17, GARS, SMAD1, CMT2D, |
| | | | HEXB, IGHMBP2, SMUBP2, |
| | | | CATF1, SMARD1 |
| Muscular dystrophy | muscle | | FKRP, MDC1C, LGMD2I, LAMA2, |
| | | | LAMM, LARGE, KIAA0609, |
| | | | MDC1D, FCMD, TTID, MYOT, |
| | | | CAPN3, CANP3, DYSF, LGMD2B, |
| | | | SGCG, LGMD2C, DMDA1, SCG3, |
| | | | SGCA, ADL, DAG2, LGMD2D, |
| | | | DMDA2, SGCB, LGMD2E, SGCD, |
| | | | SGD, LGMD2F, CMD1L, TCAP, |
| | | | LGMD2G, CMD1N, TRIM32, HT2A, |
| | | | LGMD2H, FKRP, MDC1C, LGMD2I, |
| | | | TTN, CMD1G, TMD, LGMD2J, |
| | | | POMT1, CAV3, LGMD1C, SEPN1, |
| | | | SELN, RSMD1, PLEC1, PLTN, EBS1 |
| Myotonic dystrophy (Type 1 and | Muscles | Eyes, heart, | CNBP (Type 2) and DMPK (Type 1) |
| Type 2) | | endocrine | |
| Neoplasia | | | PTEN; ATM; ATR; EGFR; ERBB2; |
| | | | ERBB3; ERBB4; |
| | | | Notch1; Notch2; Notch3; Notch4; |
| | | | AKT; AKT2; AKT3; HIF; |
| | | | HIF1a; HIF3a; Met; HRG; Bcl2; |
| | | | PPAR alpha; PPAR |
| | | | gamma; WT1 (Wilms Tumor); FGF |
| | | | Receptor Family |
| | | | members (5 members: 1, 2, 3, 4, 5); |
| | | | CDKN2a; APC; RB |
| | | | (retinoblastoma); MEN1; VHL; |
| | | | BRCA1; BRCA2; AR |
| | | | (Androgen Receptor); TSG101; IGF; |
| | | | IGF Receptor; Igf1 (4 |
| | | | variants); Igf2 (3 variants); Igf 1 |
| | | | Receptor; Igf 2 Receptor; |
| | | | Bax; Bcl2; caspases family (9 |
| | | | members: |
| | | | 1, 2, 3, 4, 6, 7, 8, 9, 12); Kras; Apc |
| Neurofibromatosis (NF) (NF1, | brain, spinal | | NF1, NF2 |
| formerly Recklinghausen's NF, | cord, nerves, | | |
| and NF2) | and skin | | |
| Niemann-Pick Lipidosis (Types | Lysosomal | Various- where | Types A and B: SMPD1; Type C: |
| A, B, and C) | Storage Disease | sphingomyelin | NPC1 or NPC2 |
| | | accumulates, | |
| | | particularly | |
| | | spleen, liver, | |
| | | blood, CNS | |
| Noonan Syndrome | Various - | | PTPN11, SOS1, RAF1 and KRAS |
| | musculoskeletal, | | |
| | heart, eyes, | | |
| | reproductive | | |
| | organs, blood | | |
| Norrie Disease or X-linked | eye | | NDP |
| Familial Exudative | | | |
| Vitreoretinopathy | | | |
| North Carolina Macular | eye | | MCDR1 |
| Dystrophy | | | |
| Osteogenesis imperfecta (OI) | bones, | | COL1A1, COL1A2, CRTAP, P3H |
| (Types I, II, III, IV, V, VI, VII) | musculoskeletal | | |
| Osteopetrosis | bones | | LRP5, BMND1, LRP7, LR3, OPPG, |
| | | | VBCH2, CLCN7, CLC7, OPTA2, |
| | | | OSTM1, GL, TCIRG1, TIRC7, |
| | | | OC116, OPTB1 |
| Patau's Syndrome | Brain, heart, | | Additional copy of chromosome 13 |
| (Trisomy 13) | skeletal system | | |
| Parkinson's disease (PD) | Brain, nervous | | SNCA (PARK1), UCHL1 (PARK 5), |
| | system | | and LRRK2 (PARK8), (PARK3), |
| | | | PARK2, PARK4, PARK7 (PARK7), |
| | | | PINK1 (PARK6); x-Synuclein, DJ-1, |
| | | | Parkin, NR4A2, NURR1, NOT, |
| | | | TINUR, SNCAIP, TBP, SCA17, |
| | | | NCAP, PRKN, PDJ, DBH, NDUFV2 |
| Pattern Dystrophy of the RPE | eye | | RDS/peripherin |
| Phenylketonuria (PKU) | Metabolism | Various due to | PAH, PKU1, QDPR, DHPR, PTS |
| | disorder | build-up of | |
| | | phenylalanine, | |
| | | phenyl ketones | |
| | | in tissues and | |
| | | CNS | |
| Polycystic kidney and hepatic | Kidney, liver | | FCYT, PKHD1, ARPKD, PKD1, |
| disease | | | PKD2, PKD4, PKDTS, PRKCSH, |
| | | | G19P1, PCLD, SEC63 |
| Pompe's Disease | Glycogen | Various - heart, | GAA |
| | storage disease | liver, spleen | |
| Porphyria (actually refers to a | Various- | | ALAD, ALAS2, CPOX, FECH, |
| group of different diseases all | wherever heme | | HMBS, PPOX, UROD, or UROS |
| having a specific heme | precursors | | |
| production process abnormality) | accumulate | | |
| posterior polymorphous corneal | eyes | | TCF4; COL8A2 |
| dystrophy | | | |
| Primary Hyperoxaluria (e.g. type | Various - eyes, | | LDHA (lactate dehydrogenase A) and |
| 1) | heart, kidneys, | | hydroxyacid oxidase 1 (HAO1) |
| | skeletal system | | |
| Primary Open Angle Glaucoma | eyes | | MYOC |
| (POAG) | | | |
| Primary sclerosing cholangitis | Liver, | | TCF4; COL8A2 |
| | gallbladder | | |
| Progeria (also called Hutchinson- | All | | LMNA |
| Gilford progeria syndrome) | | | |
| Prader-Willi Syndrome | Musculoskeletal | | Deletion of region of short arm of |
| | system, brain, | | chromosome 15, including UBE3A |
| | reproductive | | |
| | and endocrine | | |
| | system | | |
| Prostate Cancer | prostate | | HOXB13, MSMB, GPRC6A, TP53 |
| Pyruvate Dehydrogenase | Brain, nervous | | PDHA1 |
| Deficiency | system | | |
| Kidney/Renal carcinoma | kidney | | RLIP76, VEGF |
| Rett Syndrome | Brain | | MECP2, RTT, PPMX, MRX16, |
| | | | MRX79, CDKL5, STK9, MECP2, |
| | | | RTT, PPMX, MRX16, MRX79, x- |
| | | | Synuclein, DJ-1 |
| Retinitis pigmentosa (RP) | eye | | ADIPOR1, ABCA4, AGBL5, |
| | | | ARHGEF18, ARL2BP, ARL3, ARL6, |
| | | | BEST1, BBS1, BBS2, C2ORF71, |
| | | | C8ORF37, CA4, CERKL, CLRN1, |
| | | | CNGA1, CMGB1, CRB1, CRX, |
| | | | CYP4V2, DHDDS, DHX38, EMC1, |
| | | | EYS, FAM161A, FSCN2, GPR125, |
| | | | GUCA1B, HK1, HPRPF3, HGSNAT, |
| | | | IDH3B, IMPDH1, IMPG2, IFT140, |
| | | | IFT172, KLHL7, KIAA1549, KIZ, |
| | | | LRAT, MAK, MERTK, MVK, NEK2, |
| | | | NUROD1, NR2E3, NRL, OFD1, |
| | | | PDE6A, PDE6B, PDE6G, POMGNT1, |
| | | | PRCD, PROM1, PRPF3, PRPF4, |
| | | | PRPF6, PRPF8, PRPF31, PRPH2, |
| | | | RPB3, RDH12, REEP6, RP39, RGR, |
| | | | RHO, RLBP1, ROM1, RP1, RP1L1, |
| | | | RPY, RP2, RP9, RPE65, RPGR, |
| | | | SAMD11, SAG, SEMA4A, SLC7A14, |
| | | | SNRNP200, SPP2, SPATA7, TRNT1, |
| | | | TOPORS, TTC8, TULP1, USH2A, |
| | | | ZFN408, ZNF513, see also |
| | | | 20120204282 |
| Scheie syndrome (also known as | Various- liver, | | IDUA, α-L-iduronidase |
| mucopolysaccharidosis type I | spleen, eye, | | |
| S(MPS I-S)) | joint, heart, | | |
| | brain, skeletal | | |
| Schizophrenia | Brain | | Neuregulin1 (Nrg1); Erb4 (receptor for |
| | | | Neuregulin); |
| | | | Complexin1 (Cplx1); Tph1 |
| | | | Tryptophan hydroxylase; Tph2 |
| | | | Tryptophan hydroxylase 2; Neurexin |
| | | | 1; GSK3; GSK3a; |
| | | | GSK3b; 5-HTT (Slc6a4); COMT; |
| | | | DRD (Drd1a); SLC6A3; DAOA; |
| | | | DTNBP1; Dao (Dao1); TCF4; |
| | | | COL8A2 |
| Secretase Related Disorders | Various | | APH-1 (alpha and beta); PSEN1; |
| | | | NCSTN; PEN-2; Nos1, Parp1, Nat1, |
| | | | Nat2, CTSB, APP, APH1B, PSEN2, |
| | | | PSENEN, BACE1, ITM2B, CTSD, |
| | | | NOTCH1, TNF, INS, DYT10, |
| | | | ADAM17, APOE, ACE, STN, TP53, |
| | | | IL6, NGFR, IL1B, ACHE, CTNNB1, |
| | | | IGF1, IFNG, NRG1, CASP3, MAPK1, |
| | | | CDH1, APBB1, HMGCR, CREB1, |
| | | | PTGS2, HES1, CAT, TGFB1, ENO2, |
| | | | ERBB4, TRAPPC10, MAOB, NGF, |
| | | | MMP12, JAG1, CD40LG, PPARG, |
| | | | FGF2, LRP1, NOTCH4, MAPK8, |
| | | | PREP, NOTCH3, PRNP, CTSG, EGF, |
| | | | REN, CD44, SELP, GHR, ADCYAP1, |
| | | | INSR, GFAP, MMP3, MAPK10, SP1, |
| | | | MYC, CTSE, PPARA, JUN, TIMP1, |
| | | | IL5, IL1A, MMP9, HTR4, HSPG2, |
| | | | KRAS, CYCS, SMG1, IL1R1, |
| | | | PROK1, MAPK3, NTRK1, IL13, |
| | | | MME, TKT, CXCR2, CHRM1, |
| | | | ATXN1, PAWR, NOTCJ2, M6PR, |
| | | | CYP46A1, CSNK1D, MAPK14, |
| | | | PRG2, PRKCA, L1 CAM, CD40, |
| | | | NR1I2, JAG2, CTNND1, CMA1, |
| | | | SORT1, DLK1, THEM4, JUP, CD46, |
| | | | CCL11, CAV3, RNASE3, HSPA8, |
| | | | CASP9, CYP3A4, CCR3, TFAP2A, |
| | | | SCP2, CDK4, JOF1A, TCF7L2, |
| | | | B3GALTL, MDM2, RELA, CASP7, |
| | | | IDE, FANP4, CASK, ADCYAP1R1, |
| | | | ATF4, PDGFA, C21ORF33, SCG5, |
| | | | RMF123, NKFB1, ERBB2, CAV1, |
| | | | MMP7, TGFA, RXRA, STX1A, |
| | | | PSMC4, P2RY2, TNFRSF21, DLG1, |
| | | | NUMBL, SPN, PLSCR1, UBQLN2, |
| | | | UBQLN1, PCSK7, SPON1, SILV, |
| | | | QPCT, HESS, GCC1 |
| Selective IgA Deficiency | Immune system | | Type 1: MSH5; Type 2: TNFRSF13B |
| Severe Combined | Immune system | | JAK3, JAKL, DCLRE1C, ARTEMIS, |
| Immunodeficiency (SCID) and | | | SCIDA, RAG1, RAG2, ADA, PTPRC, |
| SCID-XI, and ADA-SCID | | | CD45, LCA, IL7R, CD3D, T3D, |
| | | | IL2RG, SCIDX1, SCIDX, IMD4, |
| | | | those identified in US Pat. App. Pub. |
| | | | 20110225664, 20110091441, |
| | | | 20100229252, 20090271881 and |
| | | | 20090222937; |
| Sickle cell disease | blood | | HBB, BCL11A, BCL11Ae, cis- |
| | | | regulatory elements of the B-globin |
| | | | locus, HBG 1/2 promoter, HBG distal |
| | | | CCAAT box region between −92 and −130 |
| | | | of the HBG Transcription Start |
| | | | Site, those described in |
| | | | WO2015148863, WO 2013/126794, |
| | | | US Pat. Pub. 20110182867 |
| Sly Syndrome (aka MPS VII) | | | GUSB |
| Spinocerebellar Ataxias (SCA | | | ATXN1, ATXN2, ATX3 |
| types 1, 2, 3, 6, 7, 8, 12 and 17) | | | |
| Sorsby Fundus Dystrophy | eye | | TIMP3 |
| Stargardt disease | eye | | ABCR, ELOVL4, ABCA4, PROM1 |
| Tay-Sachs Disease | Lysosomal | Various - CNS, | HEX-A |
| | Storage disease | brain, eye | |
| Thalassemia (Alpha, Beta, Delta) | blood | | HBA1, HBA2 (Alpha), HBB (Beta), |
| | | | HBB and HBD (delta), LCRB, |
| | | | BCL11A, BCL11Ae, cis-regulatory |
| | | | elements of the B-globin locus, HBG |
| | | | 1/2 promoter, those described in |
| | | | WO2015148860, US Pat. Pub. |
| | | | 20110182867, 2015/148860 |
| Thymic Aplasia (DiGeorge | Immune system, | | deletion of 30 to 40 genes in the |
| Syndrome; 22q11.2 deletion | thymus | | middle of chromosome 22 at |
| syndrome) | | | a location known as 22q11.2, including |
| | | | TBX1, DGCR8 |
| Transthyretin amyloidosis | liver | | TTR (transthyretin) |
| (ATTR) | | | |
| trimethylaminuria | Metabolism | | FMO3 |
| | disease | | |
| Trinucleotide Repeat Disorders | Various | | HTT; SBMA/SMAX1/AR; |
| (generally) | | | FXN/X25 ATX3; |
| | | | ATXN1; ATXN2; |
| | | | DMPK; Atrophin-1 and Atn1 |
| | | | (DRPLA Dx); CBP (Creb-BP - global |
| | | | instability); VLDLR; Atxn7; Atxn10; |
| | | | FEN1, TNRC6A, PABPN1, JPH3, |
| | | | MED15, ATXN1, ATXN3, TBP, |
| | | | CACNA1A, ATXN80S, PPP2R2B, |
| | | | ATXN7, TNRC6B, TNRC6C, CELF3, |
| | | | MAB21L1, MSH2, TMEM185A, |
| | | | SIX5, CNPY3, RAXE, GNB2, RPL14, |
| | | | ATXN8, ISR, TTR, EP400, GIGYF2, |
| | | | OGG1, STC1, CNDP1, C10ORF2, |
| | | | MAML3, DKC1, PAXIP1, CASK, |
| | | | MAPT, SP1, POLG, AFF2, THBS1, |
| | | | TP53, ESR1, CGGBP1, ABT1, KLK3, |
| | | | PRNP, JUN, KCNN3, BAX, FRAXA, |
| | | | KBTBD10, MBNL1, RAD51, |
| | | | NCOA3, ERDA1, TSC1, COMP, |
| | | | GGLC, RRAD, MSH3, DRD2, CD44, |
| | | | CTCF, CCND1, CLSPN, MEF2A, |
| | | | PTPRU, GAPDH, TRIM22, WT1, |
| | | | AHR, GPX1, TPMT, NDP, ARX, |
| | | | TYR, EGR1, UNG, NUMBL, FABP2, |
| | | | EN2, CRYGC, SRP14, CRYGB, |
| | | | PDCD1, HOXA1, ATXN2L, PMS2, |
| | | | GLA, CBL, FTH1, IL12RB2, OTX2, |
| | | | HOXA5, POLG2, DLX2, AHRR, |
| | | | MANF, RMEM158, see also |
| | | | 20110016540 |
| Turner's Syndrome (XO) | Various - | | Monosomy X |
| | reproductive | | |
| | organs, and sex | | |
| | characteristics, | | |
| | vasculature | | |
| Tuberous Sclerosis | CNS, heart, | | TSC1, TSC2 |
| | kidneys | | |
| Usher syndrome (Types I, II, and | Ears, eyes | | ABHD12, CDH23, CIB2, CLRN1, |
| III) | | | DFNB31, GPR98, HARS, MYO7A, |
| | | | PCDH15, USH1C, USH1G, USH2A, |
| | | | USH11A, those described in |
| | | | WO2015134812A1 |
| Velocardiofacial syndrome (aka | Various - | | Many genes are deleted, COM, TBX1, |
| 22q11.2 deletion syndrome, | skeletal, heart, | | and other are associated with |
| DiGeorge syndrome, conotruncal | kidney, immune | | symptoms |
| anomaly face syndrome (CTAF), | system, brain | | |
| autosomal dominant Opitz G/BB | | | |
| syndrome or Cayler cardiofacial | | | |
| syndrome) | | | |
| Von Gierke's Disease (Glycogen | Glycogen | Various - liver, | G6PC and SLC37A4 |
| Storage Disease type I) | Storage disease | kidney | |
| Von Hippel-Lindau Syndrome | Various - cell | CNS, Kidney, | VHL |
| | growth | Eye, visceral | |
| | regulation | organs | |
| | disorder | | |
| Von Willebrand Disease (Types | blood | | VWF |
| I, II and III) | | | |
| Wilson Disease | Various - | Liver, brains, | ATP7B |
| | Copper Storage | eyes, other | |
| | Disease | tissues where | |
| | | copper builds up | |
| Wiskott-Aldrich Syndrome | Immune System | | WAS |
| Xeroderma Pigmentosum | Skin | Nervous system | POLH |
| XXX Syndrome | Endocrine, brain | | X chromosome trisomy |

[0719] In one embodiment, the compositions, systems, or components thereof can be used treat or prevent a disease in a subject by modifying one or more genes associated with one or more cellular functions, such as any one or more of those in Table 4B. In one embodiment, the disease is a genetic disease or disorder. In some of embodiments, the composition, system, or component thereof can modify one or more genes or polynucleotides associated with one or more genetic diseases such as any set forth in Table 4B.

TABLE 4B
Exemplary Genes controlling Cellular Functions

| CELLULAR FUNCTION | GENES |
|---|---|
| PI3K/AKT Signaling | PRKCE; ITGAM; ITGA5; IRAK1; PRKAA2; EIF2AK2; |
| | PTEN; EIF4E; PRKCZ; GRK6; MAPK1; TSC1; PLK1; |
| | AKT2; IKBKB; PIK3CA; CDK8; CDKN1B; NFKB2; BCL2; |
| | PIK3CB; PPP2R1A; MAPK8; BCL2L1; MAPK3; TSC2; |
| | ITGA1; KRAS; EIF4EBP1; RELA; PRKCD; NOS3; |
| | PRKAA1; MAPK9; CDK2; PPP2CA; PIM1; ITGB7; |
| | YWHAZ; ILK; TP53; RAF1; IKBKG; RELB; DYRK1A; |
| | CDKN1A; ITGB1; MAP2K2; JAK1; AKT1; JAK2; PIK3R1; |
| | CHUK; PDPK1; PPP2R5C; CTNNB1; MAP2K1; NFKB1; |
| | PAK3; ITGB3; CCND1; GSK3A; FRAP1; SFN; ITGA2; |
| | TTK; CSNK1A1; BRAF; GSK3B; AKT3; FOXO1; SGK; |
| | HSP90AA1; RPS6KB1 |
| ERK/MAPK Signaling | PRKCE; ITGAM; ITGA5; HSPB1; IRAK1; PRKAA2; |
| | EIF2AK2; RAC1; RAP1A; TLN1; EIF4E; ELK1; GRK6; |
| | MAPK1; RAC2; PLK1; AKT2; PIK3CA; CDK8; CREB1; |
| | PRKCI; PTK2; FOS; RPS6KA4; PIK3CB; PPP2R1A; |
| | PIK3C3; MAPK8; MAPK3; ITGA1; ETS1; KRAS; MYCN; |
| | EIF4EBP1; PPARG; PRKCD; PRKAA1; MAPK9; SRC; |
| | CDK2; PPP2CA; PIM1; PIK3C2A; ITGB7; YWHAZ; |
| | PPP1CC; KSR1; PXN; RAF1; FYN; DYRK1A; ITGB1; |
| | MAP2K2; PAK4; PIK3R1; STAT3; PPP2R5C; MAP2K1; |
| | PAK3; ITGB3; ESR1; ITGA2; MYC; TTK; CSNK1A1; |
| | CRKL; BRAF; ATF4; PRKCA; SRF; STAT1; SGK |
| Glucocorticoid Receptor | RAC1; TAF4B; EP300; SMAD2; TRAF6; PCAF; ELK1; |
| Signaling | MAPK1; SMAD3; AKT2; IKBKB; NCOR2; UBE2I; |
| | PIK3CA; CREB1; FOS; HSPA5; NFKB2; BCL2; |
| | MAP3K14; STAT5B; PIK3CB; PIK3C3; MAPK8; BCL2L1; |
| | MAPK3; TSC22D3; MAPK10; NRIP1; KRAS; MAPK13; |
| | RELA; STAT5A; MAPK9; NOS2A; PBX1; NR3C1; |
| | PIK3C2A; CDKN1C; TRAF2; SERPINE1; NCOA3; |
| | MAPK14; TNF; RAF1; IKBKG; MAP3K7; CREBBP; |
| | CDKN1A; MAP2K2; JAK1; IL8; NCOA2; AKT1; JAK2; |
| | PIK3R1; CHUK; STAT3; MAP2K1; NFKB1; TGFBR1; |
| | ESR1; SMAD4; CEBPB; JUN; AR; AKT3; CCL2; MMP1; |
| | STAT1; IL6; HSP90AA1 |
| Axonal Guidance Signaling | PRKCE; ITGAM; ROCK1; ITGA5; CXCR4; ADAM12; |
| | IGF1; RAC1; RAP1A; EIF4E; PRKCZ; NRP1; NTRK2; |
| | ARHGEF7; SMO; ROCK2; MAPK1; PGF; RAC2; |
| | PTPN11; GNAS; AKT2; PIK3CA; ERBB2; PRKCI; PTK2; |
| | CFL1; GNAQ; PIK3CB; CXCL12; PIK3C3; WNT11; |
| | PRKD1; GNB2L1; ABL1; MAPK3; ITGA1; KRAS; RHOA; |
| | PRKCD; PIK3C2A; ITGB7; GLI2; PXN; VASP; RAF1; |
| | FYN; ITGB1; MAP2K2; PAK4; ADAM17; AKT1; PIK3R1; |
| | GLI1; WNT5A; ADAM10; MAP2K1; PAK3; ITGB3; |
| | CDC42; VEGFA; ITGA2; EPHA8; CRKL; RND1; GSK3B; |
| | AKT3; PRKCA |
| Ephrin Receptor Signaling | PRKCE; ITGAM; ROCK1; ITGA5; CXCR4; IRAK1; |
| Actin Cytoskeleton | PRKAA2; EIF2AK2; RAC1; RAP1A; GRK6; ROCK2; |
| Signaling | MAPK1; PGF; RAC2; PTPN11; GNAS; PLK1; AKT2; |
| | DOK1; CDK8; CREB1; PTK2; CFL1; GNAQ; MAP3K14; |
| | CXCL12; MAPK8; GNB2L1; ABL1; MAPK3; ITGA1; |
| | KRAS; RHOA; PRKCD; PRKAA1; MAPK9; SRC; CDK2; |
| | PIM1; ITGB7; PXN; RAF1; FYN; DYRK1A; ITGB1; |
| | MAP2K2; PAK4; AKT1; JAK2; STAT3; ADAM10; |
| | MAP2K1; PAK3; ITGB3; CDC42; VEGFA; ITGA2; |
| | EPHA8; TTK; CSNK1A1; CRKL; BRAF; PTPN13; ATF4; |
| | AKT3; SGK |
| | ACTN4; PRKCE; ITGAM; ROCK1; ITGA5; IRAK1; |
| | PRKAA2; EIF2AK2; RAC1; INS; ARHGEF7; GRK6; |
| | ROCK2; MAPK1; RAC2; PLK1; AKT2; PIK3CA; CDK8; |
| | PTK2; CFL1; PIK3CB; MYH9; DIAPH1; PIK3C3; MAPK8; |
| | F2R; MAPK3; SLC9A1; ITGA1; KRAS; RHOA; PRKCD; |
| | PRKAA1; MAPK9; CDK2; PIM1; PIK3C2A; ITGB7; |
| | PPP1CC; PXN; VIL2; RAF1; GSN; DYRK1A; ITGB1; |
| | MAP2K2; PAK4; PIP5K1A; PIK3R1; MAP2K1; PAK3; |
| | ITGB3; CDC42; APC; ITGA2; TTK; CSNK1A1; CRKL; |
| | BRAF; VAV3; SGK |
| Huntington's Disease | PRKCE; IGF1; EP300; RCOR1; PRKCZ; HDAC4; TGM2; |
| Signaling | MAPK1; CAPNS1; AKT2; EGFR; NCOR2; SP1; CAPN2; |
| | PIK3CA; HDAC5; CREB1; PRKCI; HSPA5; REST; |
| | GNAQ; PIK3CB; PIK3C3; MAPK8; IGF1R; PRKD1; |
| | GNB2L1; BCL2L1; CAPN1; MAPK3; CASP8; HDAC2; |
| | HDAC7A; PRKCD; HDAC11; MAPK9; HDAC9; PIK3C2A; |
| | HDAC3; TP53; CASP9; CREBBP; AKT1; PIK3R1; |
| | PDPK1; CASP1; APAF1; FRAP1; CASP2; JUN; BAX; |
| | ATF4; AKT3; PRKCA; CLTC; SGK; HDAC6; CASP3 |
| Apoptosis Signaling | PRKCE; ROCK1; BID; IRAK1; PRKAA2; EIF2AK2; BAK1; |
| | BIRC4; GRK6; MAPK1; CAPNS1; PLK1; AKT2; IKBKB; |
| | CAPN2; CDK8; FAS; NFKB2; BCL2; MAP3K14; MAPK8; |
| | BCL2L1; CAPN1; MAPK3; CASP8; KRAS; RELA; |
| | PRKCD; PRKAA1; MAPK9; CDK2; PIM1; TP53; TNF; |
| | RAF1; IKBKG; RELB; CASP9; DYRK1A; MAP2K2; |
| | CHUK; APAF1; MAP2K1; NFKB1; PAK3; LMNA; CASP2; |
| | BIRC2; TTK; CSNK1A1; BRAF; BAX; PRKCA; SGK; |
| | CASP3; BIRC3; PARP1 |
| B Cell Receptor Signaling | RAC1; PTEN; LYN; ELK1; MAPK1; RAC2; PTPN11; |
| | AKT2; IKBKB; PIK3CA; CREB1; SYK; NFKB2; CAMK2A; |
| | MAP3K14; PIK3CB; PIK3C3; MAPK8; BCL2L1; ABL1; |
| | MAPK3; ETS1; KRAS; MAPK13; RELA; PTPN6; MAPK9; |
| | EGR1; PIK3C2A; BTK; MAPK14; RAF1; IKBKG; RELB; |
| | MAP3K7; MAP2K2; AKT1; PIK3R1; CHUK; MAP2K1; |
| | NFKB1; CDC42; GSK3A; FRAP1; BCL6; BCL10; JUN; |
| | GSK3B; ATF4; AKT3; VAV3; RPS6KB1 |
| Leukocyte Extravasation | ACTN4; CD44; PRKCE; ITGAM; ROCK1; CXCR4; CYBA; |
| Signaling | RAC1; RAP1A; PRKCZ; ROCK2; RAC2; PTPN11; |
| | MMP14; PIK3CA; PRKCI; PTK2; PIK3CB; CXCL12; |
| | PIK3C3; MAPK8; PRKD1; ABL1; MAPK10; CYBB; |
| | MAPK13; RHOA; PRKCD; MAPK9; SRC; PIK3C2A; BTK; |
| | MAPK14; NOX1; PXN; VIL2; VASP; ITGB1; MAP2K2; |
| | CTNND1; PIK3R1; CTNNB1; CLDN1; CDC42; F11R; ITK; |
| | CRKL; VAV3; CTTN; PRKCA; MMP1; MMP9 |
| Integrin Signaling | ACTN4; ITGAM; ROCK1; ITGA5; RAC1; PTEN; RAP1A; |
| | TLN1; ARHGEF7; MAPK1; RAC2; CAPNS1; AKT2; |
| | CAPN2; PIK3CA; PTK2; PIK3CB; PIK3C3; MAPK8; |
| | CAV1; CAPN1; ABL1; MAPK3; ITGA1; KRAS; RHOA; |
| | SRC; PIK3C2A; ITGB7; PPP1CC; ILK; PXN; VASP; |
| | RAF1; FYN; ITGB1; MAP2K2; PAK4; AKT1; PIK3R1; |
| | TNK2; MAP2K1; PAK3; ITGB3; CDC42; RND3; ITGA2; |
| | CRKL; BRAF; GSK3B; AKT3 |
| Acute Phase Response | IRAK1; SOD2; MYD88; TRAF6; ELK1; MAPK1; PTPN11; |
| Signaling | AKT2; IKBKB; PIK3CA; FOS; NFKB2; MAP3K14; |
| | PIK3CB; MAPK8; RIPK1; MAPK3; IL6ST; KRAS; |
| | MAPK13; IL6R; RELA; SOCS1; MAPK9; FTL; NR3C1; |
| | TRAF2; SERPINE1; MAPK14; TNF; RAF1; PDK1; |
| | IKBKG; RELB; MAP3K7; MAP2K2; AKT1; JAK2; PIK3R1; |
| | CHUK; STAT3; MAP2K1; NFKB1; FRAP1; CEBPB; JUN; |
| | AKT3; IL1R1; IL6 |
| PTEN Signaling | ITGAM; ITGA5; RAC1; PTEN; PRKCZ; BCL2L11; |
| | MAPK1; RAC2; AKT2; EGFR; IKBKB; CBL; PIK3CA; |
| | CDKN1B; PTK2; NFKB2; BCL2; PIK3CB; BCL2L1; |
| | MAPK3; ITGA1; KRAS; ITGB7; ILK; PDGFRB; INSR; |
| | RAF1; IKBKG; CASP9; CDKN1A; ITGB1; MAP2K2; |
| | AKT1; PIK3R1; CHUK; PDGFRA; PDPK1; MAP2K1; |
| | NFKB1; ITGB3; CDC42; CCND1; GSK3A; ITGA2; |
| | GSK3B; AKT3; FOXO1; CASP3; RPS6KB1 |
| p53 Signaling | PTEN; EP300; BBC3; PCAF; FASN; BRCA1; GADD45A; |
| Aryl Hydrocarbon Receptor | BIRC5; AKT2; PIK3CA; CHEK1; TP53INP1; BCL2; |
| Signaling | PIK3CB; PIK3C3; MAPK8; THBS1; ATR; BCL2L1; E2F1; |
| | PMAIP1; CHEK2; TNFRSF10B; TP73; RB1; HDAC9; |
| | CDK2; PIK3C2A; MAPK14; TP53; LRDD; CDKN1A; |
| | HIPK2; AKT1; PIK3R1; RRM2B; APAF1; CTNNB1; |
| | SIRT1; CCND1; PRKDC; ATM; SFN; CDKN2A; JUN; |
| | SNAI2; GSK3B; BAX; AKT3 |
| | HSPB1; EP300; FASN; TGM2; RXRA; MAPK1; NQO1; |
| | NCOR2; SP1; ARNT; CDKN1B; FOS; CHEK1; |
| | SMARCA4; NFKB2; MAPK8; ALDH1A1; ATR; E2F1; |
| | MAPK3; NRIP1; CHEK2; RELA; TP73; GSTP1; RB1; |
| | SRC; CDK2; AHR; NFE2L2; NCOA3; TP53; TNF; |
| | CDKN1A; NCOA2; APAF1; NFKB1; CCND1; ATM; ESR1; |
| | CDKN2A; MYC; JUN; ESR2; BAX; IL6; CYP1B1; |
| | HSP90AA1 |
| Xenobiotic Metabolism | PRKCE; EP300; PRKCZ; RXRA; MAPK1; NQO1; |
| Signaling | NCOR2; PIK3CA; ARNT; PRKCI; NFKB2; CAMK2A; |
| | PIK3CB; PPP2R1A; PIK3C3; MAPK8; PRKD1; |
| | ALDH1A1; MAPK3; NRIP1; KRAS; MAPK13; PRKCD; |
| | GSTP1; MAPK9; NOS2A; ABCB1; AHR; PPP2CA; FTL; |
| | NFE2L2; PIK3C2A; PPARGC1A; MAPK14; TNF; RAF1; |
| | CREBBP; MAP2K2; PIK3R1; PPP2R5C; MAP2K1; |
| | NFKB1; KEAP1; PRKCA; EIF2AK3; IL6; CYP1B1; |
| | HSP90AA1 |
| SAPK/JNK Signaling | PRKCE; IRAK1; PRKAA2; EIF2AK2; RAC1; ELK1; |
| | GRK6; MAPK1; GADD45A; RAC2; PLK1; AKT2; PIK3CA; |
| | FADD; CDK8; PIK3CB; PIK3C3; MAPK8; RIPK1; |
| | GNB2L1; IRS1; MAPK3; MAPK10; DAXX; KRAS; |
| | PRKCD; PRKAA1; MAPK9; CDK2; PIM1; PIK3C2A; |
| | TRAF2; TP53; LCK; MAP3K7; DYRK1A; MAP2K2; |
| | PIK3R1; MAP2K1; PAK3; CDC42; JUN; TTK; CSNK1A1; |
| | CRKL; BRAF; SGK |
| PPAr/RXR Signaling | PRKAA2; EP300; INS; SMAD2; TRAF6; PPARA; FASN; |
| | RXRA; MAPK1; SMAD3; GNAS; IKBKB; NCOR2; |
| | ABCA1; GNAQ; NFKB2; MAP3K14; STAT5B; MAPK8; |
| | IRS1; MAPK3; KRAS; RELA; PRKAA1; PPARGC1A; |
| | NCOA3; MAPK14; INSR; RAF1; IKBKG; RELB; MAP3K7; |
| | CREBBP; MAP2K2; JAK2; CHUK; MAP2K1; NFKB1; |
| | TGFBR1; SMAD4; JUN; IL1R1; PRKCA; IL6; HSP90AA1; |
| | ADIPOQ |
| NF-KB Signaling | IRAK1; EIF2AK2; EP300; INS; MYD88; PRKCZ; TRAF6; |
| | TBK1; AKT2; EGFR; IKBKB; PIK3CA; BTRC; NFKB2; |
| | MAP3K14; PIK3CB; PIK3C3; MAPK8; RIPK1; HDAC2; |
| | KRAS; RELA; PIK3C2A; TRAF2; TLR4; PDGFRB; TNF; |
| | INSR; LCK; IKBKG; RELB; MAP3K7; CREBBP; AKT1; |
| | PIK3R1; CHUK; PDGFRA; NFKB1; TLR2; BCL10; |
| | GSK3B; AKT3; TNFAIP3; IL1R1 |
| Neuregulin Signaling | ERBB4; PRKCE; ITGAM; ITGA5; PTEN; PRKCZ; ELK1; |
| Wnt & Beta catenin | MAPK1; PTPN11; AKT2; EGFR; ERBB2; PRKCI; |
| Signaling | CDKN1B; STAT5B; PRKD1; MAPK3; ITGA1; KRAS; |
| | PRKCD; STAT5A; SRC; ITGB7; RAF1; ITGB1; MAP2K2; |
| | ADAM17; AKT1; PIK3R1; PDPK1; MAP2K1; ITGB3; |
| | EREG; FRAP1; PSEN1; ITGA2; MYC; NRG1; CRKL; |
| | AKT3; PRKCA; HSP90AA1; RPS6KB1 |
| | CD44; EP300; LRP6; DVL3; CSNK1E; GJA1; SMO; |
| | AKT2; PIN1; CDH1; BTRC; GNAQ; MARK2; PPP2R1A; |
| | WNT11; SRC; DKK1; PPP2CA; SOX6; SFRP2; ILK; |
| | LEF1; SOX9; TP53; MAP3K7; CREBBP; TCF7L2; AKT1; |
| | PPP2R5C; WNT5A; LRP5; CTNNB1; TGFBR1; CCND1; |
| | GSK3A; DVL1; APC; CDKN2A; MYC; CSNK1A1; GSK3B; |
| | AKT3; SOX2 |
| Insulin Receptor Signaling | PTEN; INS; EIF4E; PTPN1; PRKCZ; MAPK1; TSC1; |
| | PTPN11; AKT2; CBL; PIK3CA; PRKCI; PIK3CB; PIK3C3; |
| | MAPK8; IRS1; MAPK3; TSC2; KRAS; EIF4EBP1; |
| | SLC2A4; PIK3C2A; PPP1CC; INSR; RAF1; FYN; |
| | MAP2K2; JAK1; AKT1; JAK2; PIK3R1; PDPK1; MAP2K1; |
| | GSK3A; FRAP1; CRKL; GSK3B; AKT3; FOXO1; SGK; |
| | RPS6KB1 |
| IL-6 Signaling | HSPB1; TRAF6; MAPKAPK2; ELK1; MAPK1; PTPN11; |
| | IKBKB; FOS; NFKB2; MAP3K14; MAPK8; MAPK3; |
| | MAPK10; IL6ST; KRAS; MAPK13; IL6R; RELA; SOCS1; |
| | MAPK9; ABCB1; TRAF2; MAPK14; TNF; RAF1; IKBKG; |
| | RELB; MAP3K7; MAP2K2; IL8; JAK2; CHUK; STAT3; |
| | MAP2K1; NFKB1; CEBPB; JUN; IL1R1; SRF; IL6 |
| Hepatic Cholestasis | PRKCE; IRAK1; INS; MYD88; PRKCZ; TRAF6; PPARA; |
| | RXRA; IKBKB; PRKCI; NFKB2; MAP3K14; MAPK8; |
| | PRKD1; MAPK10; RELA; PRKCD; MAPK9; ABCB1; |
| | TRAF2; TLR4; TNF; INSR; IKBKG; RELB; MAP3K7; IL8; |
| | CHUK; NR1H2; TJP2; NFKB1; ESR1; SREBF1; FGFR4; |
| | JUN; IL1R1; PRKCA; IL6 |
| IGF-1 Signaling | IGF1; PRKCZ; ELK1; MAPK1; PTPN11; NEDD4; AKT2; |
| | PIK3CA; PRKCI; PTK2; FOS; PIK3CB; PIK3C3; MAPK8; |
| | IGF1R; IRS1; MAPK3; IGFBP7; KRAS; PIK3C2A; |
| | YWHAZ; PXN; RAF1; CASP9; MAP2K2; AKT1; PIK3R1; |
| | PDPK1; MAP2K1; IGFBP2; SFN; JUN; CYR61; AKT3; |
| | FOXO1; SRF; CTGF; RPS6KB1 |
| NRF2-mediated Oxidative | PRKCE; EP300; SOD2; PRKCZ; MAPK1; SQSTM1; |
| Stress Response | NQO1; PIK3CA; PRKCI; FOS; PIK3CB; PIK3C3; MAPK8; |
| | PRKD1; MAPK3; KRAS; PRKCD; GSTP1; MAPK9; FTL; |
| | NFE2L2; PIK3C2A; MAPK14; RAF1; MAP3K7; CREBBP; |
| | MAP2K2; AKT1; PIK3R1; MAP2K1; PPIB; JUN; KEAP1; |
| | GSK3B; ATF4; PRKCA; EIF2AK3; HSP90AA1 |
| Hepatic Fibrosis/Hepatic | EDN1; IGF1; KDR; FLT1; SMAD2; FGFR1; MET; PGF; |
| Stellate Cell Activation | SMAD3; EGFR; FAS; CSF1; NFKB2; BCL2; MYH9; |
| | IGF1R; IL6R; RELA; TLR4; PDGFRB; TNF; RELB; IL8; |
| | PDGFRA; NFKB1; TGFBR1; SMAD4; VEGFA; BAX; |
| | IL1R1; CCL2; HGF; MMP1; STAT1; IL6; CTGF; MMP9 |
| PPAR Signaling | EP300; INS; TRAF6; PPARA; RXRA; MAPK1; IKBKB; |
| | NCOR2; FOS; NFKB2; MAP3K14; STAT5B; MAPK3; |
| | NRIP1; KRAS; PPARG; RELA; STAT5A; TRAF2; |
| | PPARGC1A; PDGFRB; TNF; INSR; RAF1; IKBKG; |
| | RELB; MAP3K7; CREBBP; MAP2K2; CHUK; PDGFRA; |
| | MAP2K1; NFKB1; JUN; IL1R1; HSP90AA1 |
| Fc Epsilon RI Signaling | PRKCE; RAC1; PRKCZ; LYN; MAPK1; RAC2; PTPN11; |
| | AKT2; PIK3CA; SYK; PRKCI; PIK3CB; PIK3C3; MAPK8; |
| | PRKD1; MAPK3; MAPK10; KRAS; MAPK13; PRKCD; |
| | MAPK9; PIK3C2A; BTK; MAPK14; TNF; RAF1; FYN; |
| | MAP2K2; AKT1; PIK3R1; PDPK1; MAP2K1; AKT3; |
| | VAV3; PRKCA |
| G-Protein Coupled | PRKCE; RAP1A; RGS16; MAPK1; GNAS; AKT2; IKBKB; |
| Receptor Signaling | PIK3CA; CREB1; GNAQ; NFKB2; CAMK2A; PIK3CB; |
| | PIK3C3; MAPK3; KRAS; RELA; SRC; PIK3C2A; RAF1; |
| | IKBKG; RELB; FYN; MAP2K2; AKT1; PIK3R1; CHUK; |
| | PDPK1; STAT3; MAP2K1; NFKB1; BRAF; ATF4; AKT3; |
| | PRKCA |
| Inositol Phosphate | PRKCE; IRAK1; PRKAA2; EIF2AK2; PTEN; GRK6; |
| Metabolism | MAPK1; PLK1; AKT2; PIK3CA; CDK8; PIK3CB; PIK3C3; |
| | MAPK8; MAPK3; PRKCD; PRKAA1; MAPK9; CDK2; |
| | PIM1; PIK3C2A; DYRK1A; MAP2K2; PIP5K1A; PIK3R1; |
| | MAP2K1; PAK3; ATM; TTK; CSNK1A1; BRAF; SGK |
| PDGF Signaling | EIF2AK2; ELK1; ABL2; MAPK1; PIK3CA; FOS; PIK3CB; |
| | PIK3C3; MAPK8; CAV1; ABL1; MAPK3; KRAS; SRC; |
| | PIK3C2A; PDGFRB; RAF1; MAP2K2; JAK1; JAK2; |
| | PIK3R1; PDGFRA; STAT3; SPHK1; MAP2K1; MYC; |
| | JUN; CRKL; PRKCA; SRF; STAT1; SPHK2 |
| VEGF Signaling | ACTN4; ROCK1; KDR; FLT1; ROCK2; MAPK1; PGF; |
| | AKT2; PIK3CA; ARNT; PTK2; BCL2; PIK3CB; PIK3C3; |
| | BCL2L1; MAPK3; KRAS; HIF1A; NOS3; PIK3C2A; PXN; |
| | RAF1; MAP2K2; ELAVL1; AKT1; PIK3R1; MAP2K1; SFN; |
| | VEGFA; AKT3; FOXO1; PRKCA |
| Natural Killer Cell Signaling | PRKCE; RAC1; PRKCZ; MAPK1; RAC2; PTPN11; |
| | KIR2DL3; AKT2; PIK3CA; SYK; PRKCI; PIK3CB; |
| | PIK3C3; PRKD1; MAPK3; KRAS; PRKCD; PTPN6; |
| | PIK3C2A; LCK; RAF1; FYN; MAP2K2; PAK4; AKT1; |
| | PIK3R1; MAP2K1; PAK3; AKT3; VAV3; PRKCA |
| Cell Cycle: G1/S | HDAC4; SMAD3; SUV39H1; HDAC5; CDKN1B; BTRC; |
| Checkpoint Regulation | ATR; ABL1; E2F1; HDAC2; HDAC7A; RB1; HDAC11; |
| | HDAC9; CDK2; E2F2; HDAC3; TP53; CDKN1A; CCND1; |
| | E2F4; ATM; RBL2; SMAD4; CDKN2A; MYC; NRG1; |
| | GSK3B; RBL1; HDAC6 |
| T Cell Receptor Signaling | RAC1; ELK1; MAPK1; IKBKB; CBL; PIK3CA; FOS; |
| | NFKB2; PIK3CB; PIK3C3; MAPK8; MAPK3; KRAS; |
| | RELA; PIK3C2A; BTK; LCK; RAF1; IKBKG; RELB; FYN; |
| | MAP2K2; PIK3R1; CHUK; MAP2K1; NFKB1; ITK; BCL10; |
| | JUN; VAV3 |
| Death Receptor Signaling | CRADD; HSPB1; BID; BIRC4; TBK1; IKBKB; FADD; |
| | FAS; NFKB2; BCL2; MAP3K14; MAPK8; RIPK1; CASP8; |
| | DAXX; TNFRSF10B; RELA; TRAF2; TNF; IKBKG; RELB; |
| | CASP9; CHUK; APAF1; NFKB1; CASP2; BIRC2; CASP3; |
| | BIRC3 |
| FGF Signaling | RAC1; FGFR1; MET; MAPKAPK2; MAPK1; PTPN11; |
| | AKT2; PIK3CA; CREB1; PIK3CB; PIK3C3; MAPK8; |
| | MAPK3; MAPK13; PTPN6; PIK3C2A; MAPK14; RAF1; |
| | AKT1; PIK3R1; STAT3; MAP2K1; FGFR4; CRKL; ATF4; |
| | AKT3; PRKCA; HGF |
| GM-CSF Signaling | LYN; ELK1; MAPK1; PTPN11; AKT2; PIK3CA; CAMK2A; |
| | STAT5B; PIK3CB; PIK3C3; GNB2L1; BCL2L1; MAPK3; |
| | ETS1; KRAS; RUNX1; PIM1; PIK3C2A; RAF1; MAP2K2; |
| | AKT1; JAK2; PIK3R1; STAT3; MAP2K1; CCND1; AKT3; |
| | STAT1 |
| Amyotrophic Lateral | BID; IGF1; RAC1; BIRC4; PGF; CAPNS1; CAPN2; |
| Sclerosis Signaling | PIK3CA; BCL2; PIK3CB; PIK3C3; BCL2L1; CAPN1; |
| | PIK3C2A; TP53; CASP9; PIK3R1; RAB5A; CASP1; |
| | APAF1; VEGFA; BIRC2; BAX; AKT3; CASP3; BIRC3 |
| JAK/Stat Signaling | PTPN1; MAPK1; PTPN11; AKT2; PIK3CA; STAT5B; |
| | PIK3CB; PIK3C3; MAPK3; KRAS; SOCS1; STAT5A; |
| | PTPN6; PIK3C2A; RAF1; CDKN1A; MAP2K2; JAK1; |
| | AKT1; JAK2; PIK3R1; STAT3; MAP2K1; FRAP1; AKT3; |
| | STAT1 |
| Nicotinate and Nicotinamide | PRKCE; IRAK1; PRKAA2; EIF2AK2; GRK6; MAPK1; |
| Metabolism | PLK1; AKT2; CDK8; MAPK8; MAPK3; PRKCD; PRKAA1; |
| | PBEF1; MAPK9; CDK2; PIM1; DYRK1A; MAP2K2; |
| | MAP2K1; PAK3; NT5E; TTK; CSNK1A1; BRAF; SGK |
| Chemokine Signaling | CXCR4; ROCK2; MAPK1; PTK2; FOS; CFL1; GNAQ; |
| | CAMK2A; CXCL12; MAPK8; MAPK3; KRAS; MAPK13; |
| | RHOA; CCR3; SRC; PPP1CC; MAPK14; NOX1; RAF1; |
| | MAP2K2; MAP2K1; JUN; CCL2; PRKCA |
| IL-2 Signaling | ELK1; MAPK1; PTPN11; AKT2; PIK3CA; SYK; FOS; |
| | STAT5B; PIK3CB; PIK3C3; MAPK8; MAPK3; KRAS; |
| | SOCS1; STAT5A; PIK3C2A; LCK; RAF1; MAP2K2; |
| | JAK1; AKT1; PIK3R1; MAP2K1; JUN; AKT3 |
| Synaptic Long Term | PRKCE; IGF1; PRKCZ; PRDX6; LYN; MAPK1; GNAS; |
| Depression | PRKCI; GNAQ; PPP2R1A; IGF1R; PRKD1; MAPK3; |
| | KRAS; GRN; PRKCD; NOS3; NOS2A; PPP2CA; |
| | YWHAZ; RAF1; MAP2K2; PPP2R5C; MAP2K1; PRKCA |
| Estrogen Receptor | TAF4B; EP300; CARMI; PCAF; MAPK1; NCOR2; |
| Signaling | SMARCA4; MAPK3; NRIP1; KRAS; SRC; NR3C1; |
| | HDAC3; PPARGC1A; RBM9; NCOA3; RAF1; CREBBP; |
| | MAP2K2; NCOA2; MAP2K1; PRKDC; ESR1; ESR2 |
| Protein Ubiquitination | TRAF6; SMURF1; BIRC4; BRCA1; UCHL1; NEDD4; |
| Pathway | CBL; UBE2I; BTRC; HSPA5; USP7; USP10; FBXW7; |
| | USP9X; STUB1; USP22; B2M; BIRC2; PARK2; USP8; |
| | USP1; VHL; HSP90AA1; BIRC3 |
| IL-10 Signaling | TRAF6; CCR1; ELK1; IKBKB; SP1; FOS; NFKB2; |
| | MAP3K14; MAPK8; MAPK13; RELA; MAPK14; TNF; |
| | IKBKG; RELB; MAP3K7; JAK1; CHUK; STAT3; NFKB1; |
| | JUN; IL1R1; IL6 |
| VDR/RXR Activation | PRKCE; EP300; PRKCZ; RXRA; GADD45A; HES1; |
| | NCOR2; SP1; PRKCI; CDKN1B; PRKD1; PRKCD; |
| | RUNX2; KLF4; YY1; NCOA3; CDKN1A; NCOA2; SPP1; |
| | LRP5; CEBPB; FOXO1; PRKCA |
| TGF-beta Signaling | EP300; SMAD2; SMURF1; MAPK1; SMAD3; SMAD1; |
| | FOS; MAPK8; MAPK3; KRAS; MAPK9; RUNX2; |
| | SERPINE1; RAF1; MAP3K7; CREBBP; MAP2K2; |
| | MAP2K1; TGFBR1; SMAD4; JUN; SMAD5 |
| Toll-like Receptor Signaling | IRAK1; EIF2AK2; MYD88; TRAF6; PPARA; ELK1; |
| | IKBKB; FOS; NFKB2; MAP3K14; MAPK8; MAPK13; |
| | RELA; TLR4; MAPK14; IKBKG; RELB; MAP3K7; CHUK; |
| | NFKB1; TLR2; JUN |
| p38 MAPK Signaling | HSPB1; IRAK1; TRAF6; MAPKAPK2; ELK1; FADD; FAS; |
| | CREB1; DDIT3; RPS6KA4; DAXX; MAPK13; TRAF2; |
| | MAPK14; TNF; MAP3K7; TGFBR1; MYC; ATF4; IL1R1; |
| | SRF; STAT1 |
| Neurotrophin/TRK Signaling | NTRK2; MAPK1; PTPN11; PIK3CA; CREB1; FOS; |
| | PIK3CB; PIK3C3; MAPK8; MAPK3; KRAS; PIK3C2A; |
| | RAF1; MAP2K2; AKT1; PIK3R1; PDPK1; MAP2K1; |
| | CDC42; JUN; ATF4 |
| FXR/RXR Activation | INS; PPARA; FASN; RXRA; AKT2; SDC1; MAPK8; |
| | APOB; MAPK10; PPARG; MTTP; MAPK9; PPARGC1A; |
| | TNF; CREBBP; AKT1; SREBF1; FGFR4; AKT3; FOXO1 |
| Synaptic Long Term | PRKCE; RAP1A; EP300; PRKCZ; MAPK1; CREB1; |
| Potentiation | PRKCI; GNAQ; CAMK2A; PRKD1; MAPK3; KRAS; |
| | PRKCD; PPP1CC; RAF1; CREBBP; MAP2K2; MAP2K1; |
| | ATF4; PRKCA |
| Calcium Signaling | RAP1A; EP300; HDAC4; MAPK1; HDAC5; CREB1; |
| | CAMK2A; MYH9; MAPK3; HDAC2; HDAC7A; HDAC11; |
| | HDAC9; HDAC3; CREBBP; CALR; CAMKK2; ATF4; |
| | HDAC6 |
| EGF Signaling | ELK1; MAPK1; EGFR; PIK3CA; FOS; PIK3CB; PIK3C3; |
| | MAPK8; MAPK3; PIK3C2A; RAF1; JAK1; PIK3R1; |
| | STAT3; MAP2K1; JUN; PRKCA; SRF; STAT1 |
| Hypoxia Signaling in the | EDN1; PTEN; EP300; NQO1; UBE2I; CREB1; ARNT; |
| Cardiovascular System | HIF1A; SLC2A4; NOS3; TP53; LDHA; AKT1; ATM; |
| | VEGFA; JUN; ATF4; VHL; HSP90AA1 |
| LPS/IL-1 Mediated Inhibition | IRAK1; MYD88; TRAF6; PPARA; RXRA; ABCA1; |
| of RXR Function | MAPK8; ALDH1A1; GSTP1; MAPK9; ABCB1; TRAF2; |
| | TLR4; TNF; MAP3K7; NR1H2; SREBF1; JUN; IL1R1 |
| LXR/RXR Activation | FASN; RXRA; NCOR2; ABCA1; NFKB2; IRF3; RELA; |
| | NOS2A; TLR4; TNF; RELB; LDLR; NR1H2; NFKB1; |
| | SREBF1; IL1R1; CCL2; IL6; MMP9 |
| Amyloid Processing | PRKCE; CSNK1E; MAPK1; CAPNS1; AKT2; CAPN2; |
| | CAPN1; MAPK3; MAPK13; MAPT; MAPK14; AKT1; |
| | PSEN1; CSNK1A1; GSK3B; AKT3; APP |
| IL-4 Signaling | AKT2; PIK3CA; PIK3CB; PIK3C3; IRS1; KRAS; SOCS1; |
| | PTPN6; NR3C1; PIK3C2A; JAK1; AKT1; JAK2; PIK3R1; |
| | FRAP1; AKT3; RPS6KB1 |
| Cell Cycle: G2/M DNA | EP300; PCAF; BRCA1; GADD45A; PLK1; BTRC; |
| Damage Checkpoint | CHEK1; ATR; CHEK2; YWHAZ; TP53; CDKN1A; |
| Regulation | PRKDC; ATM; SFN; CDKN2A |
| Nitric Oxide Signaling in the | KDR; FLT1; PGF; AKT2; PIK3CA; PIK3CB; PIK3C3; |
| Cardiovascular System | CAV1; PRKCD; NOS3; PIK3C2A; AKT1; PIK3R1; |
| | VEGFA; AKT3; HSP90AA1 |
| Purine Metabolism | NME2; SMARCA4; MYH9; RRM2; ADAR; EIF2AK4; |
| | PKM2; ENTPD1; RAD51; RRM2B; TJP2; RAD51C; |
| | NT5E; POLDI; NME1 |
| cAMP-mediated Signaling | RAP1A; MAPK1; GNAS; CREB1; CAMK2A; MAPK3; |
| | SRC; RAF1; MAP2K2; STAT3; MAP2K1; BRAF; ATF4 |
| Mitochondrial Dysfunction | SOD2; MAPK8; CASP8; MAPK10; MAPK9; CASP9; |
| Notch Signaling | PARK7; PSEN1; PARK2; APP; CASP3 |
| | HES1; JAG1; NUMB; NOTCH4; ADAM17; NOTCH2; |
| | PSEN1; NOTCH3; NOTCH1; DLL4 |
| Endoplasmic Reticulum | HSPA5; MAPK8; XBP1; TRAF2; ATF6; CASP9; ATF4; |
| Stress Pathway | EIF2AK3; CASP3 |
| Pyrimidine Metabolism | NME2; AICDA; RRM2; EIF2AK4; ENTPD1; RRM2B; |
| | NT5E; POLD1; NME1 |
| Parkinson's Signaling | UCHL1; MAPK8; MAPK13; MAPK14; CASP9; PARK7; |
| | PARK2; CASP3 |
| Cardiac & Beta Adrenergic | GNAS; GNAQ; PPP2R1A; GNB2L1; PPP2CA; PPP1CC; |
| Signaling | PPP2R5C |
| Glycolysis/Gluconeogenesis | HK2; GCK; GPI; ALDH1A1; PKM2; LDHA; HK1 |
| Interferon Signaling | IRF1; SOCS1; JAK1; JAK2; IFITM1; STAT1; IFIT3 |
| Sonic Hedgehog Signaling | ARRB2; SMO; GLI2; DYRK1A; GLI1; GSK3B; DYRK1B |
| Glycerophospholipid | PLD1; GRN; GPAM; YWHAZ; SPHK1; SPHK2 |
| Metabolism | |
| Phospholipid Degradation | PRDX6; PLD1; GRN; YWHAZ; SPHK1; SPHK2 |
| Tryptophan Metabolism | SIAH2; PRMT5; NEDD4; ALDH1A1; CYP1B1; SIAH1 |
| Lysine Degradation | SUV39H1; EHMT2; NSD1; SETD7; PPP2R5C |
| Nucleotide Excision Repair | ERCC5; ERCC4; XPA; XPC; ERCC1 |
| Pathway | |
| Starch and Sucrose | UCHL1; HK2; GCK; GPI; HK1 |
| Metabolism | |
| Aminosugars Metabolism | NQO1; HK2; GCK; HK1 |
| Arachidonic Acid | PRDX6; GRN; YWHAZ; CYP1B1 |
| Metabolism | |
| Circadian Rhythm Signaling | CSNK1E; CREB1; ATF4; NR1D1 |
| Coagulation System | BDKRB1; F2R; SERPINE1; F3 |
| Dopamine Receptor | PPP2R1A; PPP2CA; PPP1CC; PPP2R5C |
| Signaling | |
| Glutathione Metabolism | IDH2; GSTP1; ANPEP; IDH1 |
| Glycerolipid Metabolism | ALDH1A1; GPAM; SPHK1; SPHK2 |
| Linoleic Acid Metabolism | PRDX6; GRN; YWHAZ; CYP1B1 |
| Methionine Metabolism | DNMT1; DNMT3B; AHCY; DNMT3A |
| Pyruvate Metabolism | GLO1; ALDH1A1; PKM2; LDHA |
| Arginine and Proline | ALDH1A1; NOS3; NOS2A |
| Metabolism | |
| Eicosanoid Signaling | PRDX6; GRN; YWHAZ |
| Fructose and Mannose | HK2; GCK; HK1 |
| Metabolism | |
| Galactose Metabolism | HK2; GCK; HK1 |
| Stilbene, Coumarine and | PRDX6; PRDX1; TYR |
| Lignin Biosynthesis | |
| Antigen Presentation | CALR; B2M |
| Pathway | |
| Biosynthesis of Steroids | NQO1; DHCR7 |
| Butanoate Metabolism | ALDH1A1; NLGN1 |
| Citrate Cycle | IDH2; IDH1 |
| Fatty Acid Metabolism | ALDH1A1; CYP1B1 |
| Glycerophospholipid | PRDX6; CHKA |
| Metabolism | |
| Histidine Metabolism | PRMT5; ALDH1A1 |
| Inositol Metabolism | EROIL; APEX1 |
| Metabolism of Xenobiotics | GSTP1; CYP1B1 |
| by Cytochrome p450 | |
| Methane Metabolism | PRDX6; PRDX1 |
| Phenylalanine Metabolism | PRDX6; PRDX1 |
| Propanoate Metabolism | ALDH1A1; LDHA |
| Selenoamino Acid | PRMT5; AHCY |
| Metabolism | |
| Sphingolipid Metabolism | SPHK1; SPHK2 |
| Aminophosphonate | PRMT5 |
| Metabolism | |
| Androgen and Estrogen | PRMT5 |
| Metabolism | |
| Ascorbate and Aldarate | ALDH1A1 |
| Metabolism | |
| Bile Acid Biosynthesis | ALDH1A1 |
| Cysteine Metabolism | LDHA |
| Fatty Acid Biosynthesis | FASN |
| Glutamate Receptor | GNB2L1 |
| Signaling | |
| NRF2-mediated Oxidative | PRDX1 |
| Stress Response | |
| Pentose Phosphate | GPI |
| Pathway | |
| Pentose and Glucuronate | UCHL1 |
| Interconversions | |
| Retinol Metabolism | ALDH1A1 |
| Riboflavin Metabolism | TYR |
| Tyrosine Metabolism | PRMT5, TYR |
| Ubiquinone Biosynthesis | PRMT5 |
| Valine, Leucine and | ALDH1A1 |
| Isoleucine Degradation | |
| Glycine, Serine and | CHKA |
| Threonine Metabolism | |
| Lysine Degradation | ALDH1A1 |
| Pain/Taste | TRPM5; TRPA1 |
| Pain | TRPM7; TRPC5; TRPC6; TRPC1; Cnr1; crn2; Grk2; |
| | Trpa1; Pomc; Cgrp; Crf; Pka; Era; Nr2b; TRPM5; Prkaca; |
| | Prkacb; Prkar1a; Prkar2a |
| Mitochondrial Function | AIF; CytC; SMAC (Diablo); Aifm-1; Aifm-2 |
| Developmental Neurology | BMP-4; Chordin (Chrd); Noggin (Nog); WNT (Wnt2; |
| | Wnt2b; Wnt3a; Wnt4; Wnt5a; Wnt6; Wnt7b; Wnt8b; |
| | Wnt9a; Wnt9b; Wnt10a; Wnt10b; Wnt16); beta-catenin; |
| | Dkk-1; Frizzled related proteins; Otx-2; Gbx2; FGF-8; |
| | Reelin; Dab1; unc-86 (Pou4f1 orBm3a); Numb; Reln |

[0720] In an aspect, the invention provides a method of individualized or personalized treatment of a genetic disease in a subject in need of such treatment comprising: (a) introducing one or more mutations ex vivo in a tissue, organ or a cell line, or in vivo in a transgenic non-human mammal, comprising delivering to cell(s) of the tissue, organ, cell or mammal a composition comprising the particle delivery system or the delivery system or the virus particle of any one of the above embodiment or the cell of any one of the above embodiment, wherein the specific mutations or precise sequence substitutions are or have been correlated to the genetic disease; (b) testing treatment(s) for the genetic disease on the cells to which the vector has been delivered that have the specific mutations or precise sequence substitutions correlated to the genetic disease; and (c) treating the subject based on results from the testing of treatment(s) of step (b).

### Infectious Diseases

[0721] In one embodiment, the composition, system(s) or component(s) thereof can be used to diagnose, prognose, treat, and/or prevent an infectious disease caused by a microorganism, such as bacteria, virus, fungi, parasites, or combinations thereof.

[0722] In one embodiment, the system(s) or component(s) thereof can be capable of targeting specific microorganism within a mixed population. Exemplary methods of such techniques are described in e.g. Gomaa A A, Klumpe H E, Luo M L, Selle K, Barrangou R, Beisel C L. 2014. Programmable removal of bacterial strains by use of genome-targeting composition, systems, mBio 5:e00928-13; Citorik R J, Mimee M, Lu T K. 2014. Sequence-specific antimicrobials using efficiently delivered RNA-guided nucleases. Nat Biotechnol 32:1141-1145, the teachings of which can be adapted for use with the compositions, systems, and components thereof described herein.

[0723] In one embodiment, the composition, system(s) and/or components thereof can be capable of targeting pathogenic and/or drug-resistant microorganisms, such as bacteria, virus, parasites, and fungi. In one embodiment, the composition, system(s) and/or components thereof can be capable of targeting and modifying one or more polynucleotides in a pathogenic microorganism such that the microorganism is less virulent, killed, inhibited, or is otherwise rendered incapable of causing disease and/or infecting and/or replicating in a host cell.

[0724] In one embodiment, the pathogenic bacteria that can be targeted and/or modified by the composition, system(s) and/or component(s) thereof described herein include, but are not limited to, those of the genus Actinomyces (e.g. A. israelii), Bacillus (e.g. B. anthracis, B. cereus), Bactereoides (e.g. B. fragilis), Bartonella (B. henselae, B. quintana), Bordetella (B. pertussis), Borrelia (e.g. B. burgdorferi, B. garinii, B. afzelii, and B. recurreentis), Brucella (e.g. B. abortus, B. canis, B. melitensis, and B. suis), Campylobacter (e.g. C. jejuni), Chlamydia (e.g. C. pneumoniae and C. trachomatis), Chlamydophila (e.g. C. psittaci), Clostridium (e.g. C. botulinum, C. difficile, C. perfringens. C. tetani), Corynebacterium (e.g. C. diptheriae), Enterococcus (e.g. E. Faecalis, E. faecium), Ehrlichia (E. canis and E. chaffensis) Escherichia (e.g. E. coli), Francisella (e.g. F. tularensis), Haemophilus (e.g. H. influenzae), Helicobacter (H. pylori), Klebsiella (E.g. K. pneumoniae), Legionella (e.g. L. pneumophila), Leptospira (e.g. L. interrogans, L. santarosai, L. weilii, L. noguchii), Listereia (e.g. L. monocytogeenes), Mycobacterium (e.g. M. leprae, M. tuberculosis, M. ulcerans), Mycoplasma (M. pneumoniae), Neisseria (N. gonorrhoeae and N. menigitidis), Nocardia (e.g. N. asteeroides), Pseudomonas (P. aeruginosa), Rickettsia (R. rickettsia), Salmonella (S. typhi and S. typhimurium), Shigella (S. sonnei and S. dysenteriae), Staphylococcus (S. aureus, S. epidermidis, and S. saprophyticus), Streptococcus (S. agalactiaee, S. pneumoniae, S. pyogenes), Treponema (T. pallidum), Ureeaplasma (e.g. U. urealyticum), Vibrio (e.g. V. cholerae), Yersinia (e.g. Y. pestis, Y. enteerocolitica, and Y. pseudotuberculosis).

[0725] In one embodiment, the pathogenic virus that can be targeted and/or modified by the composition, system(s) and/or component(s) thereof described herein include, but are not limited to, a double-stranded DNA virus, a partly double-stranded DNA virus, a single-stranded DNA virus, a positive single-stranded RNA virus, a negative single-stranded RNA virus, or a double stranded RNA virus. In one embodiment, the pathogenic virus can be from the family Adenoviridae (e.g. Adenovirus), Herpeesviridae (e.g. Herpes simplex, type 1, Herpes simplex, type 2, Varicella-zoster virus, Epstein-Barr virus, Human cytomegalovirus, Human herpesvirus, type 8), Papillomaviridae (e.g. Human papillomavirus), Polyomaviridae (e.g. BK virus, JC virus), Poxviridae (e.g. smallpox), Hepadnaviridae (e.g. Hepatitis B), Parvoviridae (e.g. Parvovirus B19), Astroviridae (e.g. Human astrovirus), Caliciviridae (e.g. Norwalk virus), Picornaviridae (e.g. coxsackievirus, hepatitis A virus, poliovirus, rhinovirus), Coronaviridae (e.g. Severe acute respiratory syndrome-related coronavirus, strains: Severe acute respiratory syndrome virus, Severe acute respiratory syndrome coronavirus 2 (COVID-19)), Flaviviridae (e.g. Hepatitis C virus, yellow fever virus, dengue virus, West Nile virus, TBE virus), Togaviridae (e.g. Rubella virus), Hepeviridae (e.g. Hepatitis E virus), Retroviridae (Human immunodeficiency virus (HIV)), Orthomyxoviridae (e.g. Influenza virus), Arenaviridae (e.g. Lassa virus), Bunyaviridae (e.g. Crimean-Congo hemorrhagic fever virus, Hantaan virus), Filoviridae (e.g. Ebola virus and Marburg virus), Paramyxoviridae (e.g. Measles virus, Mumps virus, Parainfluenza virus, Respiratory syncytial virus), Rhabdoviridae (Rabies virus), Hepatits D virus, Reoviridae (e.g. Rotavirus, Orbivirus, Coltivirus, Banna virus).

[0726] In one embodiment, the pathogenic fungi that can be targeted and/or modified by the composition, system(s) and/or component(s) thereof described herein include, but are not limited to, those of the genus Candida (e.g. C. albicans), Aspergillus (e.g. A. fumigatus, A. flavus, A. clavatus), Cryptococcus (e.g. C. neoformans, C. gattii), Histoplasma (H. capsulatum), Pneumocystis (e.g. P. jiroveecii), Stachybotrys (e.g. S. chartarum).

[0727] In one embodiment, the pathogenic parasites that can be targeted and/or modified by the composition, system(s) and/or component(s) thereof described herein include, but are not limited to, protozoa, helminths, and ectoparasites. In one embodiment, the pathogenic protozoa that can be targeted and/or modified by the composition, system(s) and/or component(s) thereof described herein include, but are not limited to, those from the groups Sarcodina (e.g. ameba such as Entamoeba), Mastigophora (e.g. flagellates such as Giardia and Leishmania), Cilophora (e.g. ciliates such as Balantidum), and sporozoa (e.g. plasmodium and cryptosporidium). In one embodiment, the pathogenic helminths that can be targeted and/or modified by the composition, system(s) and/or component(s) thereof described herein include, but are not limited to, flatworms (platyhelminths), thorny-headed worms (acanthoceephalins), and roundworms (nematodes). In one embodiment, the pathogenic ectoparasites that can be targeted and/or modified by the composition, system(s) and/or component(s) thereof described herein include, but are not limited to, ticks, fleas, lice, and mites.

[0728] In one embodiment, the pathogenic parasite that can be targeted and/or modified by the composition, system(s) and/or component(s) thereof described herein include, but are not limited to, Acanthamoeba spp., Balamuthia mandrillaris, Babesiosis spp. (e.g. Babesia B. divergens, B. bigemina, B. equi, B. microfti, B. duncani), Balantidiasis spp. (e.g. Balantidium coli), Blastocystis spp., Cryptosporidium spp., Cyclosporiasis spp. (e.g. Cyclospora cayetanensis), Dientamoebiasis spp. (e.g. Dientamoeba fragilis), Amoebiasis spp. (e.g. Entamoeba histolytica), Giardiasis spp. (e.g. Giardia lamblia), Isosporiasis spp. (e.g. Isospora belli), Leishmania spp., Naegleria spp. (e.g. Naegleria fowleri), Plasmodium spp. (e.g. Plasmodium falciparum, Plasmodium vivax, Plasmodium ovale curtisi, Plasmodium ovale wallikeri, Plasmodium malariae, Plasmodium knowlesi), Rhinosporidiosis spp. (e.g. Rhinosporidium seeberi), Sarcocystosis spp. (e.g. Sarcocystis bovihominis, Sarcocystis suihominis), Toxoplasma spp. (e.g. Toxoplasma gondii), Trichomonas spp. (e.g. Trichomonas vaginalis), Trypanosoma spp. (e.g. Trypanosoma brucei), Trypanosoma spp. (e.g. Trypanosoma cruzi), Tapeworm (e.g. Cestoda, Taenia multiceps, Taenia saginata, Taenia solium), Diphyllobothrium latum spp., Echinococcus spp. (e.g. Echinococcus granulosus, Echinococcus multilocularis, E. vogeli, E. oligarthrus), Hymenolepis spp. (e.g. Hymenolepis nana, Hymenolepis diminuta), Bertiella spp. (e.g. Bertiella mucronata, Bertiella studeri), Spirometra (e.g. Spirometra erinaceieuropaei), Clonorchis spp. (e.g. Clonorchis sinensis; Clonorchis viverrini), Dicrocoelium spp. (e.g. Dicrocoelium dendriticum), Fasciola spp. (e.g. Fasciola hepatica, Fasciolagigantica), Fasciolopsis spp. (e.g. Fasciolopsis buski), Metagonimus spp. (e.g. Metagonimus yokogawai), Metorchis spp. (e.g. Metorchis conjunctus), Opisthorchis spp. (e.g. Opisthorchis viverrini, Opisthorchis felineus), Clonorchis spp. (e.g. Clonorchis sinensis), Paragonimus spp. (e.g. Paragonimus westermani; Paragonimus africanus; Paragonimus caliensis; Paragonimus kellicotti; Paragonimus skrjabini; Paragonimus uterobilateralis), Schistosoma sp., Schistosoma spp. (e.g. Schistosoma mansoni, Schistosoma haematobium, Schistosoma japonicum, Schistosoma mekongi, and Schistosoma intercalatum), Echinostoma spp. (e.g. E. echinatum), Trichobilharzia spp. (e.g. Trichobilharzia regent), Ancylostoma spp. (e.g. Ancylostoma duodenale), Necator spp. (e.g. Necator americanus), Angiostrongylus spp., Anisakis spp., Ascaris spp. (e.g. Ascaris lumbricoides), Baylisascaris spp. (e.g. Baylisascaris procyonis), Brugia spp. (e.g. Brugia malayi, Brugia timori), Dioctophyme spp. (e.g. Dioctophyme renale), Dracunculus spp. (e.g. Dracunculus medinensis), Enterobius spp. (e.g. Enterobius vermicularis, Enterobius gregorii), Gnathostoma spp. (e.g. Gnathostoma spinigerum, Gnathostoma hispidum), Halicephalobus spp. (e.g. Halicephalobus gingivalis), Loa loa spp. (e.g. Loa loa filaria), Mansonella spp. (e.g. Mansonella streptocerca), Onchocerca spp. (e.g. Onchocerca volvulus), Strongyloides spp. (e.g. Strongyloides stercoralis), Thelazia spp. (e.g. Thelazia calforniensis, Thelazia callipaeda), Toxocara spp. (e.g. Toxocara canis, Toxocara cati, Toxascaris leonine), Trichinella spp. (e.g. Trichinella spiralis, Trichinella britovi, Trichinella nelsoni, Trichinella nativa), Trichuris spp. (e.g. Trichuris trichiura, Trichuris vulpis), Wuchereria spp. (e.g. Wuchereria bancrofti), Dermatobia spp. (e.g. Dermatobia hominis), Tunga spp. (e.g. Tunga penetrans), Cochliomyia spp. (e.g. Cochliomyia hominivorax), Linguatula spp. (e.g. Linguatula serrata), Archiacanthocephala sp., Moniliformis sp. (e.g. Monilformis monilformis), Pediculus spp. (e.g. Pediculus humanus capitis, Pediculus humanus humanus), Pthirus spp. (e.g. Pthirus pubis), Arachnida spp. (e.g. Trombiculidae, Ixodidae, Argaside), Siphonaptera spp (e.g. Siphonaptera: Pulicinae), Cimicidae spp. (e.g. Cimex lectularius and Cimex hemipterus), Diptera spp., Demodex spp. (e.g. Demodex folliculorum brevis canis), Sarcoptes spp. (e.g. Sarcoptes scabiei), Dermanyssus spp. (e.g. Dermanyssus gallinae), Ornithonyssus spp. (e.g. Ornithonyssus sylviarum, Ornithonyssus bursa, Ornithonyssus bacoti), Laelaps spp. (e.g. Laelaps echidnina), Liponyssoides spp. (e.g. Liponyssoides sanguineus).

[0729] In one embodiment the gene targets can be any of those as set forth in Table 1 of Strich and Chertow, 2019. J. Clin. Microbio. 57:4 e01307-18, which is incorporated herein as if expressed in its entirety herein.

[0730] In one embodiment, the method can include delivering a composition, system, and/or component thereof to a pathogenic organism described herein, allowing the composition, system, and/or component thereof to specifically bind and modify one or more targets in the pathogenic organism, whereby the modification kills, inhibits, reduces the pathogenicity of the pathogenic organism, or otherwise renders the pathogenic organism non-pathogenic. In one embodiment, delivery of the composition, system, occurs in vivo (i.e. in the subject being treated). In one embodiment occurs by an intermediary, such as microorganism or phage that is non-pathogenic to the subject but is capable of transferring polynucleotides and/or infecting the pathogenic microorganism. In one embodiment, the intermediary microorganism can be an engineered bacteria, virus, or phage that contains the composition, system(s) and/or component(s) thereof and/or vectors and/or vector systems. The method can include administering an intermediary microorganism containing the composition, system(s) and/or component(s) thereof and/or vectors and/or vector systems to the subject to be treated. The intermediary microorganism can then produce the compositions and/or component thereof or transfer a composition, system, polynucleotide to the pathogenic organism. In embodiments, where the compositions and/or component thereof, vector, or vector system is transferred to the pathogenic microorganism, the composition, system, or component thereof is then produced in the pathogenic microorganism and modifies the pathogenic microorganism such that it is less virulent, killed, inhibited, or is otherwise rendered incapable of causing disease and/or infecting and/or replicating in a host or cell thereof.

[0731] In one embodiment, where the pathogenic microorganism inserts its genetic material into the host cell's genome (e.g. a virus), the composition, system, can be designed such that it modifies the host cell's genome such that the viral DNA or cDNA cannot be replicated by the host cell's machinery into a functional virus. In one embodiment, where the pathogenic microorganism inserts its genetic material into the host cell's genome (e.g. a virus), the composition, system, can be designed such that it modifies the host cell's genome such that the viral DNA or cDNA is deleted from the host cell's genome.

[0732] It will be appreciated that inhibiting or killing the pathogenic microorganism, the disease and/or condition that its infection causes in the subject can be treated or prevented. Thus, also provided herein are methods of treating and/or preventing one or more diseases or symptoms thereof caused by any one or more pathogenic microorganisms, such as any of those described herein.

### Mitochondrial Diseases

[0733] Some of the most challenging mitochondrial disorders arise from mutations in mitochondrial DNA (mtDNA), a high copy number genome that is maternally inherited. In one embodiment, mtDNA mutations can be modified using a composition, system, described herein. In one embodiment, the mitochondrial disease that can be diagnosed, prognosed, treated, and/or prevented can be MELAS (mitochondrial myopathy encephalopathy, and lactic acidosis and stroke-like episodes), CPEO/PEO (chronic progressive external ophthalmoplegia syndrome/progressive external ophthalmoplegia), KSS (Kearns-Sayre syndrome), MIDD (maternally inherited diabetes and deafness), MERRF (myoclonic epilepsy associated with ragged red fibers), NIDDM (noninsulin-dependent diabetes mellitus), LHON (Leber hereditary optic neuropathy), LS (Leigh Syndrome) an aminoglycoside induced hearing disorder, NARP (neuropathy, ataxia, and pigmentary retinopathy), Extrapyramidal disorder with akinesia-rigidity, psychosis and SNHL, Nonsyndromic hearing loss a cardiomyopathy, an encephalomyopathy, Pearson's syndrome, or a combination thereof.

[0734] In one embodiment, the mtDNA of a subject can be modified in vivo or ex vivo. In one embodiment, where the mtDNA is modified ex vivo, after modification the cells containing the modified mitochondria can be administered back to the subject. In one embodiment, the composition, system, or component thereof can be capable of correcting an mtDNA mutation, or a combination thereof.

[0735] In one embodiment, at least one of the one or more mtDNA mutations is selected from the group consisting of: A3243G, C3256T, T3271C, G1019A, A1304T, A15533G, C1494T, C4467A, T1658C, G12315A, A3421G, A8344G, T8356C, G8363A, A13042T, T3200C, G3242A, A3252G, T3264C, G3316A, T3394C, T14577C, A4833G, G3460A, G9804A, G11778A, G14459A, A14484G, G15257A, T8993C, T8993G, G10197A, G13513A, T1095C, C1494T, A1555G, G1541A, C1634T, A3260G, A4269G, T7587C, A8296G, A8348G, G8363A, T9957C, T9997C, G12192A, C12297T, A14484G, G15059A, duplication of CCCCCTCCCC-tandem (SEQ ID NO: 64,307) repeats at positions 305-314 and/or 956-965, deletion at positions from 8,469-13,447, 4,308-14,874, and/or 4,398-14,822, 961ins/delC, the mitochondrial common deletion (e.g. mtDNA 4,977 bp deletion), and combinations thereof.

[0736] In one embodiment, the mitochondrial mutation can be any mutation as set forth in or as identified by use of one or more bioinformatic tools available at Mitomap available at mitomap.org. Such tools include, but are not limited to, “Variant Search, aka Market Finder”, Find Sequences for Any Haplogroup, aka “Sequence Finder”, “Variant Info”, “POLG Pathogenicity Prediction Server”, “MITOMASTER”, “Allele Search”, “Sequence and Variant Downloads”, “Data Downloads”. MitoMap contains reports of mutations in mtDNA that can be associated with disease and maintains a database of reported mitochondrial DNA Base Substitution Diseases: rRNA/tRNA mutations.

[0737] In one embodiment, the method includes delivering a composition, system, and/or a component thereof to a cell, and more specifically one or more mitochondria in a cell, allowing the composition, system, and/or component thereof to modify one or more target polynucleotides in the cell, and more specifically one or more mitochondria in the cell. The target polynucleotides can correspond to a mutation in the mtDNA, such as any one or more of those described herein. In one embodiment, the modification can alter a function of the mitochondria such that the mitochondria functions normally or at least is/are less dysfunctional as compared to an unmodified mitochondria. Modification can occur in vivo or ex vivo. Where modification is performed ex vivo, cells containing modified mitochondria can be administered to a subject in need thereof in an autologous or allogenic manner.

### Microbiome Modification

[0738] Microbiomes play important roles in health and disease. For example, the gut microbiome can play a role in health by controlling digestion, preventing growth of pathogenic microorganisms and have been suggested to influence mood and emotion. Imbalanced microbiomes can promote disease and are suggested to contribute to weight gain, unregulated blood sugar, high cholesterol, cancer, and other disorders. A healthy microbiome has a series of joint characteristics that can be distinguished from non-healthy individuals, thus detection and identification of the disease-associated microbiome can be used to diagnose and detect disease in an individual. The compositions, systems, and components thereof can be used to screen the microbiome cell population and be used to identify a disease associated microbiome. Cell screening methods utilizing compositions, systems, and components thereof are described elsewhere herein and can be applied to screening a microbiome, such as a gut, skin, vagina, and/or oral microbiome, of a subject.

[0739] In one embodiment, the microbe population of a microbiome in a subject can be modified using a composition, system, and/or component thereof described herein. In one embodiment, the composition, system, and/or component thereof can be used to identify and select one or more cell types in the microbiome and remove them from the microbiome population. Exemplary methods of selecting cells using a composition, system, and/or component thereof are described elsewhere herein. In this way the make-up or microorganism profile of the microbiome can be altered. In one embodiment, the alteration causes a change from a diseased microbiome composition to a healthy microbiome composition. In this way the ratio of one type or species of microorganism to another can be modified, such as going from a diseased ratio to a healthy ratio. In one embodiment, the cells selected are pathogenic microorganisms.

[0740] In one embodiment, the compositions and systems described herein can be used to modify a polynucleotide in a microorganism of a microbiome in a subject. In one embodiment, the microorganism is a pathogenic microorganism. In one embodiment, the microorganism is a commensal and non-pathogenic microorganism. Methods of modifying polynucleotides in a cell in the subject are described elsewhere herein and can be applied to these embodiments.

### Models of Diseases and Conditions

[0741] In an aspect, the invention provides a method of modeling a disease associated with a genomic locus in a eukaryotic organism or a non-human organism comprising manipulation of a target sequence within a coding, non-coding or regulatory element of said genomic locus comprising delivering a non-naturally occurring or engineered composition comprising a viral vector system comprising one or more viral vectors operably encoding a composition for expression thereof, wherein the composition comprises particle delivery system or the delivery system or the virus particle of any one of the above embodiments or the cell of any one of the above embodiment.

[0742] In one aspect, the invention provides a method of generating a model eukaryotic cell that can include one or more a mutated disease genes and/or infectious microorganisms. In one embodiment, a disease gene is any gene associated an increase in the risk of having or developing a disease. In one embodiment, the method includes (a) introducing one or more vectors into a eukaryotic cell, wherein the one or more vectors comprise a composition, system, and/or component thereof and/or a vector or vector system that is capable of driving expression of a composition, system, and/or component thereof including, but not limited to: a nucleic acid component molecule sequence, one or more TnpB polypeptides, and combinations thereof and (b) allowing a composition, system, or complex to bind to one or more target polynucleotides, e.g., to effect cleavage, nicking, or other modification of the target polynucleotide within said disease gene, wherein the composition, system, or complex is composed of one or more TnpB polypeptide complexed with (1) one or more nucleic acid component molecule sequences that is/are hybridized to the target sequence(s) within the target polynucleotide(s), and optionally (2) the nucleic acid component scaffold sequence(s), thereby generating a model eukaryotic cell comprising one or more mutated disease gene(s). Thus, In one embodiment the composition and system, contains nucleic acid molecules for and drives expression of one or more of: a TnpB polypeptide, a nucleic acid component molecule sequence and/or a Homologous Recombination template and/or a stabilizing ligand if the TnpB polypeptide has a destabilization domain. In one embodiment, said cleavage comprises cleaving one or two strands at the location of the target sequence by the TnpB polypeptide. In one embodiment, nicking comprises nicking one or two strands at the location of the target sequence by the TnpB polypeptide. In one embodiment, said cleavage or nicking results in modified transcription of a target polynucleotide. In one embodiment, modification results in decreased transcription of the target polynucleotide. In one embodiment, the method further comprises repairing said cleaved or nicked target polynucleotide by homologous recombination with an recombination template polynucleotide, wherein said repair results in a mutation comprising an insertion, deletion, or substitution of one or more nucleotides of said target polynucleotide. In one embodiment, said mutation results in one or more amino acid changes in a protein expression from a gene comprising the target sequence.

[0743] The disease modeled can be any disease with a genetic or epigenetic component. In one embodiment, the disease modeled can be any as discussed elsewhere herein.

### In Situ Disease Detection

[0744] The compositions, systems, and/or components thereof can be used for diagnostic methods of detection such as in CASFISH (see e.g. Deng et al. 2015. PNAS USA 112(38): 11870-11875), CRISPR-Live FISH (see e.g. Wang et al. 2020. Science; 365(6459):1301-1305), sm-FISH (Lee and Jefcoate. 2017. Front. Endocrinol. doi.org/10.3389/fendo.2017.00289), sequential FISH CRISPRainbow (Ma et al. Nat Biotechnol, 34 (2016), pp. 528-530), CRISPR-Sirius (Nat Methods, 15 (2018), pp. 928-931), Casilio (Cheng et al. Cell Res, 26 (2016), pp. 254-257), Halo-Tag based genomic loci visualization techniques (e.g. Deng et al. 2015. PNAS USA 112(38): 11870-11875; Knight et al., Science, 350 (2015), pp. 823-826), RNA-aptamer based methods (e.g. Ma et al., J Cell Biol, 214 (2016), pp. 529-537), molecular beacon-based methods (e.g. Zhao et al. Biomaterials, 100 (2016), pp. 172-183; Wu et al. Nucleic Acids Res (2018)), Quantum Dot-based systems (e.g. Ma et al. Anal Chem, 89 (2017), pp. 12896-12901), multiplexed methods (e.g. Ma et al., Proc Natl Acad Sci USA, 112 (2015), pp. 3002-3007; Fu et al. Nat Commun, 7 (2016), p. 11707; Ma et al. Nat Biotechnol, 34 (2016), pp. 528-530; Shao et al. Nucleic Acids Res, 44 (2016), Article e86); Wang et al. Sci Rep, 6 (2016), p. 26857), and other in situ CRISPR-hybridization based methods (e.g. Chen et al. Cell, 155 (2013), pp. 1479-1491; Gu et al. Science, 359 (2018), pp. 1050-1055; Tanebaum et al. Cell, 159 (2014), pp. 635-646; Ye et al. Protein Cell, 8 (2017), pp. 853-855; Chen et al. Nat Commun, 9 (2018), p. 5065; Shao et al. ACS Synth Biol (2017); Fu et al. Nat Commun, 7 (2016), p. 11707; Shao et al. Nucleic Acids Res, 44 (2016), Article e86; Wang et al., Sci Rep, 6 (2016), p. 26857), all of which are incorporated by reference herein as if expressed in their entirety and whose teachings can be adapted to the compositions, systems, and components thereof described herein in view of the description herein.

[0745] In one embodiment, the composition, system, or component thereof can be used in a detection method, such as an in situ detection method described herein. In one embodiment, the composition, system, or component thereof can include a catalytically inactive TnpB polypeptide described herein and use this system in detection methods such as fluorescence in situ hybridization (FISH) or any other described herein. In one embodiment, the inactivated TnpB polypeptide, which lacks the ability to produce DNA double-strand breaks may be fused with a marker, such as fluorescent protein, such as the enhanced green fluorescent protein (eEGFP) and co-expressed with small nucleic acid component molecules to target pericentric, centric and telomeric repeats in vivo. The dead TnpB polypeptide or system thereof can be used to visualize both repetitive sequences and individual genes in the human genome. Such new applications of labelled dead TnpB polypeptide and compositions, systems, thereof can be important in imaging cells and studying the functional nuclear architecture, especially in cases with a small nucleus volume or complex 3-D structures.

### Cell Selection

[0746] In one embodiment, the compositions, systems, and/or components thereof described herein can be used in a method to screen and/or select cells. In one embodiment, composition, system-based screening/selection method can be used to identify diseased cells in a cell population. In one embodiment, selection of the cells results in a modification in the cells such that the selected cells die. In this way, diseased cells can be identified, and removed from the healthy cell population. In one embodiment, the diseased cells can be a cancer cell, pre-cancerous cell, a virus or other pathogenic organism infected cells, or otherwise abnormal cell. In one embodiment, the modification can impart another detectable change in the cells to be selected (e.g. a functional change and/or genomic barcode) that facilitates selection of the desired cells. In one embodiment a negative selection scheme can be used to obtain a desired cell population. In these embodiments, the cells to be selected against are modified, thus can be removed from the cell population based on their death or identification or sorting based the detectable change imparted on the cells. Thus, in these embodiments, the remaining cells after selection are the desired cell population.

[0747] In one embodiment, a method of selecting one or more cell(s) containing a polynucleotide modification can include: introducing one or more composition, system(s) and/or components thereof, and/or vectors or vector systems into the cell(s), wherein the composition, system(s) and/or components thereof, and/or vectors or vector systems contains and/or is capable of expressing one or more of: a TnpB polypeptide, an nucleic acid component sequence, and an recombination template; wherein, for example that which is being expressed is within and expressed in vivo by the composition, system, vector or vector system and/or the recombination template comprises the one or more mutations that abolish TnpB polypeptide cleavage; allowing homologous recombination of the recombination template with the target polynucleotide in the cell(s) to be selected; allowing a composition, system, or complex to bind to a target polynucleotide to effect cleavage of the target polynucleotide within said gene, wherein the AAV-complex comprises the TnpB polypeptide complexed with (1) the nucleic acid component molecule sequence that is hybridized to the target sequence within the target polynucleotide, and (2) the nucleic acid component scaffold, wherein binding of the complex to the target polynucleotide induces cell death or imparts some other detectable change to the cell, thereby allowing one or more cell(s) in which one or more mutations have been introduced to be selected. In one embodiment, the cell to be selected may be a eukaryotic cell. In one embodiment, the cell to be selected may be a prokaryotic cell. Selection of specific cells via the methods herein can be performed without requiring a selection marker or a two-step process that may include a counter-selection system.

### Therapeutic Agent Development

[0748] The compositions, systems, and components thereof described herein can be used to develop TnpB polypeptide-based biologically active agents, such as small molecule therapeutics. Thus, described herein are methods for developing a biologically active agent that modulates a cell function and/or signaling event associated with a disease and/or disease gene. In one embodiment, the method comprises (a) contacting a test compound with a diseased cell and/or a cell containing a disease gene cell; and (b) detecting a change in a readout that is indicative of a reduction or an augmentation of a cell signaling event or other cell functionality associated with said disease or disease gene, thereby developing said biologically active agent that modulates said cell signaling event or other functionality associated with said disease gene. In one embodiment, the diseased cell is a model cell described elsewhere herein. In one embodiment, the diseased cell is a diseased cell isolated from a subject in need of treatment. In one embodiment, the test compound is a small molecule agent. In one embodiment, test compound is a small molecule agent. In one embodiment, the test compound is a biologic molecule agent.

[0749] In one embodiment, the method involves developing a therapeutic based on the composition, system, described herein. In particular embodiments, the therapeutic comprises a TnpB polypeptide and/or a nucleic acid component with a reprogrammable spacer capable of hybridizing to a target sequence of interest. In particular embodiments, the therapeutic is a vector or vector system that can contain a) a first regulatory element operably linked to a nucleotide sequence encoding the TnpB polypeptide; and b) a second regulatory element operably linked to one or more nucleotide sequences encoding one or more nucleic acid molecules comprising a nucleic acid component comprising a reprogrammable spacer sequence, a conserved RNA sequence; wherein components (a) and (b) are located on same or different vectors. In particular embodiments, the biologically active agent is a composition comprising a delivery system operably configured to deliver composition, system, or components thereof, and/or or one or more polynucleotide sequences, vectors, or vector systems containing or encoding said components into a cell and capable of forming a complex with the components of the composition and system herein, and wherein said complex is operable in the cell. In one embodiment, the complex can include the TnpB polypeptide as described herein, nucleic acid component scaffold comprising the guide sequence (reprogrammable spacer sequence), and a conserved nucleotide sequence. In any such compositions, the delivery system can be a yeast system, a lipofection system, a microinjection system, a biolistic system, virosomes, liposomes, immunoliposomes, polycations, lipid:nucleic acid conjugates or artificial virions, or any other system as described herein. In particular embodiments, the delivery is via a particle, a nanoparticle, a lipid or a cell penetrating peptide (CPP).

[0750] Also described herein are methods for developing or designing a composition, system, optionally a composition, system, based therapy or therapeutic, comprising (a) selecting for a (therapeutic) locus of interest nucleic acid component target sites, wherein said target sites have minimal sequence variation across a population, and from said selected target sites subselecting target sites, wherein a nucleic acid component directed against said target sites recognizes a minimal number of off-target sites across said population, or (b) selecting for a (therapeutic) locus of interest nucleic acid component target sites, wherein said target sites have minimal sequence variation across a population, or selecting for a (therapeutic) locus of interest nucleic acid component target sites, wherein a nucleic acid component directed against said target sites recognizes a minimal number of off-target sites across said population, and optionally estimating the number of (sub)selected target sites needed to treat or otherwise modulate or manipulate a population, and optionally validating one or more of the (sub)selected target sites for an individual subject, optionally designing one or more nucleic acid component recognizing one or more of said (sub)selected target sites.

[0751] In one embodiment, the method for developing or designing a nucleic acid component for use in a composition, system, optionally a composition, system, based therapy or therapeutic, can include (a) selecting for a (therapeutic) locus of interest nucleic acid component target sites, wherein said target sites have minimal sequence variation across a population, and from said selected target sites subselecting target sites, wherein a nucleic acid component molecule directed against said target sites recognizes a minimal number of off-target sites across said population, or (b) selecting for a (therapeutic) locus of interest nucleic acid component molecule target sites, wherein said target sites have minimal sequence variation across a population, or selecting for a (therapeutic) locus of interest nucleic acid component molecule target sites, wherein a nucleic acid component molecule directed against said target sites recognizes a minimal number of off-target sites across said population, and optionally estimating the number of (sub)selected target sites needed to treat or otherwise modulate or manipulate a population, optionally validating one or more of the (sub)selected target sites for an individual subject, optionally designing one or more nucleic acid component molecule recognizing one or more of said (sub)selected target sites.

[0752] In one embodiment, the method for developing or designing a composition, system, optionally a composition, system, based therapy or therapeutic in a population, can include (a) selecting for a (therapeutic) locus of interest reprogrammable spacer target sites, wherein said target sites have minimal sequence variation across a population, and from said selected target sites subselecting target sites, wherein a nucleic acid component directed against said target sites recognizes a minimal number of off-target sites across said population, or (b) selecting for a (therapeutic) locus of interest nucleic acid component reprogrammable spacer target sites, wherein said target sites have minimal sequence variation across a population, or selecting for a (therapeutic) locus of interest nucleic acid component reprogrammable spacer target sites, wherein a nucleic acid component directed against said target sites recognizes a minimal number of off-target sites across said population, and optionally estimating the number of (sub)selected target sites needed to treat or otherwise modulate or manipulate a population, optionally validating one or more of the (sub)selected target sites for an individual subject, optionally designing one or more nucleic acid component recognizing one or more of said (sub)selected target sites.

[0753] In one embodiment the method for developing or designing a nucleic acid component molecule for use in a composition, system, optionally a composition, system, based therapy or therapeutic in a population, can include (a) selecting for a (therapeutic) locus of interest nucleic acid component molecule target sites, wherein said target sites have minimal sequence variation across a population, and from said selected target sites subselecting target sites, wherein a nucleic acid component molecule directed against said target sites recognizes a minimal number of off-target sites across said population, or (b) selecting for a (therapeutic) locus of interest nucleic acid component molecule target sites, wherein said target sites have minimal sequence variation across a population, or selecting for a (therapeutic) locus of interest nucleic acid component molecule target sites, wherein a nucleic acid component molecule directed against said target sites recognizes a minimal number of off-target sites across said population, and optionally estimating the number of (sub)selected target sites needed to treat or otherwise modulate or manipulate a population, optionally validating one or more of the (sub)selected target sites for an individual subject, optionally designing one or more nucleic acid component reprogrammable spacer recognizing one or more of said (sub)selected target sites.

[0754] In one embodiment, the method for developing or designing a composition, system, such as a composition, system, based therapy or therapeutic, optionally in a population; or for developing or designing a nucleic acid component reprogrammable spacer for use in a composition, system, optionally a composition, system, based therapy or therapeutic, optionally in a population, can include selecting a set of target sequences for one or more loci in a target population, wherein the target sequences do not contain variants occurring above a threshold allele frequency in the target population (i.e. platinum target sequences); removing from said selected (platinum) target sequences any target sequences having high frequency off-target candidates (relative to other (platinum) targets in the set) to define a final target sequence set; preparing one or more, such as a set of compositions, systems, based on the final target sequence set, optionally wherein a number of composition prepared is based (at least in part) on the size of a target population.

[0755] In one embodiment, off-target candidates/off-targets, TAMrestrictiveness, target cleavage efficiency, or effector protein specificity is identified or determined using a sequencing-based double-strand break (DSB) detection assay, such as described herein elsewhere. In one embodiment, off-target candidates/off-targets are identified or determined using a sequencing-based double-strand break (DSB) detection assay, such as described herein elsewhere. In one embodiment, off-targets, or off target candidates have at least 1, preferably 1-3, mismatches or (distal) TAMmismatches, such as 1 or more, such as 1, 2, 3, or more (distal) TAMmismatches. In one embodiment, sequencing-based DSB detection assay comprises labeling a site of a DSB with an adapter comprising a primer binding site, labeling a site of a DSB with a barcode or unique molecular identifier, or combination thereof, as described herein elsewhere.

[0756] It will be understood that the reprogrammable spacer sequence of the nucleic acid component is 100% complementary to the target site, i.e. does not comprise any mismatch with the target site. It will be further understood that “recognition” of an (off-)target site by a reprogrammable spacer presupposes composition, system, functionality, i.e. an (off-)target site is only recognized by a reprogrammable spacer RNA if binding of the reprogrammable spacer RNA to the (off-)target site leads to composition, system, activity (such as induction of single or double strand DNA cleavage, transcriptional modulation, etc.).

[0757] In one embodiment, the target sites having minimal sequence variation across a population are characterized by absence of sequence variation in at least 99%, preferably at least 99.9%, more preferably at least 99.99% of the population. In one embodiment, optimizing target location comprises selecting target sequences or loci having an absence of sequence variation in at least 99%, %, preferably at least 99.9%, more preferably at least 99.99% of a population. These targets are referred to herein elsewhere also as “platinum targets”. In one embodiment, said population comprises at least 1000 individuals, such as at least 5000 individuals, such as at least 10000 individuals, such as at least 50000 individuals.

[0758] In one embodiment, the off-target sites are characterized by at least one mismatch between the off-target site and the nucleic acid component. In one embodiment, the off-target sites are characterized by at most five, preferably at most four, more preferably at most three mismatches between the off-target site and the nucleic acid component. In one embodiment, the off-target sites are characterized by at least one mismatch between the off-target site and the nucleic acid component and by at most five, preferably at most four, more preferably at most three mismatches between the off-target site and the nucleic acid component.

[0759] In one embodiment, said minimal number of off-target sites across said population is determined for high-frequency haplotypes in said population. In one embodiment, said minimal number of off-target sites across said population is determined for high-frequency haplotypes of the off-target site locus in said population. In one embodiment, said minimal number of off-target sites across said population is determined for high-frequency haplotypes of the target site locus in said population. In one embodiment, the high-frequency haplotypes are characterized by occurrence in at least 0.1% of the population.

[0760] In one embodiment, the number of (sub)selected target sites needed to treat a population is estimated based on based low frequency sequence variation, such as low frequency sequence variation captured in large scale sequencing datasets. In one embodiment, the number of (sub)selected target sites needed to treat a population of a given size is estimated.

[0761] In one embodiment, the method further comprises obtaining genome sequencing data of a subject to be treated; and treating the subject with a composition, system, selected from the set of compositions, systems, wherein the composition, system, selected is based (at least in part) on the genome sequencing data of the individual. In one embodiment, the ((sub)selected) target is validated by genome sequencing, preferably whole genome sequencing.

[0762] In one embodiment, target sequences or loci as described herein are (further) selected based on optimization of one or more parameters, such as TAMtype (natural or modified), TAMnucleotide content, TAMlength, target sequence length, TAMrestrictiveness, target cleavage efficiency, and target sequence position within a gene, a locus or other genomic region. Methods of optimization are discussed in greater detail elsewhere herein.

[0763] In one embodiment, target sequences or loci as described herein are (further) selected based on optimization of one or more of target loci location, target length, target specificity, and TAMcharacteristics. As used herein, TAMcharacteristics may comprise for instance TAMsequence, TAMlength, and/or TAM GC contents. In one embodiment, optimizing TAMcharacteristics comprises optimizing nucleotide content of aTAM. In one embodiment, optimizing nucleotide content of TAMis selecting a TAM with a motif that maximizes abundance in the one or more target loci, minimizes mutation frequency, or both. Minimizing mutation frequency can for instance be achieved by selecting TAMsequences devoid of or having low or minimal CpG.

[0764] In one embodiment, the effector protein for each composition and system, in the set of compositions, systems, is selected based on optimization of one or more parameters selected from the group consisting of, effector protein size, ability of effector protein to access regions of high chromatin accessibility, degree of uniform enzyme activity across genomic targets, epigenetic tolerance, mismatch/budge tolerance, effector protein specificity, effector protein stability or half-life, effector protein immunogenicity or toxicity. Methods of optimization are discussed in greater detail elsewhere herein.

### Optimization of the Systems

[0765] The methods of the present invention can involve optimization of selected parameters or variables associated with the composition, system, and/or its functionality, as described herein further elsewhere. Optimization of the composition, system, in the methods as described herein may depend on the target(s), such as the therapeutic target or therapeutic targets, the mode or type of composition, system, modulation, such as composition, system, based therapeutic target(s) modulation, modification, or manipulation, as well as the delivery of the composition, system, components. One or more targets may be selected, depending on the genotypic and/or phenotypic outcome. For instance, one or more therapeutic targets may be selected, depending on (genetic) disease etiology or the desired therapeutic outcome. The (therapeutic) target(s) may be a single gene, locus, or other genomic site, or may be multiple genes, loci or other genomic sites. As is known in the art, a single gene, locus, or other genomic site may be targeted more than once, such as by use of multiple nucleic acid components, or nucleic acid component scaffold and multiple reprogrammable spacers.

[0766] The activity of the composition and/or system, such as TnpB polypeptide-based therapy or therapeutics may involve target disruption, such as target mutation, such as leading to gene knockout. The activity of the composition and/or system, such as TnpB polypeptide-based therapy or therapeutics may involve replacement of particular target sites, such as leading to target correction. TnpB polypeptide based therapy or therapeutics may involve removal of particular target sites, such as leading to target deletion. The activity of the composition and/or system, such as TnpB polypeptide-based therapy or therapeutics may involve modulation of target site functionality, such as target site activity or accessibility, leading for instance to (transcriptional and/or epigenetic) gene or genomic region activation or gene or genomic region silencing. The skilled person will understand that modulation of target site functionality may involve TnpB polypeptide mutation (such as for instance generation of a catalytically inactive TnpB polypeptide) and/or functionalization (such as for instance fusion of the TnpB polypeptide with a heterologous functional domain, such as a transcriptional activator or repressor), as described herein elsewhere.

[0767] Accordingly, in an aspect, the invention relates to a method as described herein, comprising selection of one or more (therapeutic) target, selecting one or more functionality of the composition and/or system, and optimization of selected parameters or variables associated with the composition and/or its functionality. In a related aspect, the invention relates to a method as described herein, comprising (a) selecting one or more (therapeutic) target loci, (b) selecting one or more composition functionalities, (c) optionally selecting one or more modes of delivery, and preparing, developing, or designing a composition herein selected based on steps (a)-(c).

[0768] In one embodiment, the functionality of the composition and/or system comprises genomic mutation. In one embodiment, the functionality of the composition and/or system comprises single genomic mutation. In one embodiment, the functionality of the composition and/or system functionality comprises multiple genomic mutation. In one embodiment, the functionality of the composition and/or system comprises gene knockout. In one embodiment, the functionality of the composition and/or system comprises single gene knockout. In one embodiment, the functionality of the composition and/or system comprises multiple gene knockout. In one embodiment, the functionality of the composition and/or system comprises gene correction. In one embodiment, the functionality of the composition and/or system comprises single gene correction. In one embodiment, the functionality of the composition and/or system comprises multiple gene correction. In one embodiment, the functionality of the composition and/or system comprises genomic region correction. In one embodiment, the functionality of the composition and/or system comprises single genomic region correction. In one embodiment, the functionality of the composition and/or system comprises multiple genomic region correction. In one embodiment, the functionality of the composition and/or system comprises gene deletion. In one embodiment, the functionality of the composition and/or system comprises single gene deletion. In one embodiment, the functionality of the composition and/or system comprises multiple gene deletion. In one embodiment, the functionality of the composition and/or system comprises genomic region deletion. In one embodiment, the functionality of the composition and/or system comprises single genomic region deletion. In one embodiment, the functionality of the composition and/or system comprises multiple genomic region deletion. In one embodiment, the functionality of the composition and/or system comprises modulation of gene or genomic region functionality. In one embodiment, the functionality of the composition and/or system comprises modulation of single gene or genomic region functionality. In one embodiment, the functionality of the composition and/or system comprises modulation of multiple gene or genomic region functionality. In one embodiment, the functionality of the composition and/or system comprises gene or genomic region functionality, such as gene or genomic region activity. In one embodiment, the functionality of the composition and/or system comprises single gene or genomic region functionality, such as gene or genomic region activity. In one embodiment, the functionality of the composition and/or system comprises multiple gene or genomic region functionality, such as gene or genomic region activity. In one embodiment, the functionality of the composition and/or system comprises modulation gene activity or accessibility optionally leading to transcriptional and/or epigenetic gene or genomic region activation or gene or genomic region silencing. In one embodiment, the functionality of the composition and/or system comprises modulation single gene activity or accessibility optionally leading to transcriptional and/or epigenetic gene or genomic region activation or gene or genomic region silencing. In one embodiment, the functionality of the composition and/or system comprises modulation multiple gene activity or accessibility optionally leading to transcriptional and/or epigenetic gene or genomic region activation or gene or genomic region silencing.

[0769] Optimization of selected parameters or variables in the methods as described herein may result in optimized or improved the system, such as TnpB polypeptide-based therapy or therapeutic, specificity, efficacy, and/or safety. In one embodiment, one or more of the following parameters or variables are taken into account, are selected, or are optimized in the methods of the invention as described herein: TnpB polypeptide allosteric interactions, TnpB polypeptide functional domains and functional domain interactions, TnpB polypeptide specificity, nucleic acid component specificity, composition specificity, TAMrestrictiveness, TAMtype (natural or modified), TAMnucleotide content, TAMlength, TnpB polypeptide activity, nucleic acid component activity, TnpB polypeptide/nucleic acid component molecule complex activity, target cleavage efficiency, target site selection, target sequence length, ability of effector protein to access regions of high chromatin accessibility, degree of uniform enzyme activity across genomic targets, epigenetic tolerance, mismatch/budge tolerance, TnpB polypeptide stability, TnpB polypeptide mRNA stability, nucleic acid component molecule stability, TnpB polypeptide complex stability, TnpB polypeptide protein or mRNA immunogenicity or toxicity, nucleic acid component molecule immunogenicity or toxicity, TnpB polypeptide immunogenicity or toxicity, TnpB polypeptide or mRNA dose or titer, nucleic acid component molecule dose or titer, dose or titer, TnpB polypeptide protein size, TnpB polypeptide expression level, nucleic acid component molecule expression level, TnpB polypeptide expression level, TnpB polypeptide spatiotemporal expression, nucleic acid component molecule spatiotemporal expression, TnpB polypeptide/nucleic acid component spatiotemporal expression.

[0770] By means of example, and without limitation, parameter or variable optimization may be achieved as follows. TnpB polypeptide specificity may be optimized by selecting the most specific TnpB polypeptide, e.g. TnpB. This may be achieved for instance by selecting the most specific TnpB polypeptide orthologue or by specific TnpB polypeptide mutations which increase specificity. nucleic acid component specificity may be optimized by selecting the most specific nucleic acid component. This can be achieved for instance by selecting nucleic acid component having low homology, i.e. at least one or preferably more, such as at least 2, or preferably at least 3, mismatches to off-target sites. The specificity may be optimized by increasing TnpB polypeptide specificity and/or nucleic acid component specificity as above.

[0771] Target length or target sequence length may be optimized, for instance, by selecting the appropriate TnpB polypeptide, such as the appropriate TnpB polypeptide recognizing a desired target or target sequence nucleotide length. Alternatively, or in addition, the target (sequence) length may be optimized by providing a target having a length deviating from the target (sequence) length typically associated with the TnpB polypeptide, such as the naturally occurring TnpB polypeptide. The TnpB polypeptide or target (sequence) length may be naturally occurring or may for instance be optimized based on TnpB polypeptide mutants having an altered target (sequence) length recognition, or target (sequence) length recognition repertoire. For instance, increasing or decreasing target (sequence) length may influence target recognition and/or off-target recognition. TnpB polypeptide activity may be optimized by selecting the most active TnpB polypeptide. This may be achieved for instance by selecting the most active TnpB polypeptide ortholog or by specific TnpB polypeptide mutations which increase activity. The ability of the TnpB polypeptide protein to access regions of high chromatin accessibility, may be optimized by selecting the appropriate TnpB polypeptide or mutant thereof, and can consider the size of the TnpB polypeptide, charge, or other dimensional variables etc. The degree of uniform TnpB polypeptide activity may be optimized by selecting the appropriate TnpB polypeptide or mutant thereof, and can consider TnpB polypeptide specificity and/or activity, TAMspecificity, target length, mismatch tolerance, epigenetic tolerance, TnpB polypeptide and/or nucleic acid component stability and/or half-life, TnpB polypeptide and/or nucleic acid component immunogenicity and/or toxicity, etc. nucleic acid component activity may be optimized by selecting the most active nucleic acid component. In one embodiment, this can be achieved by increasing nucleic acid component stability through RNA modification. compositions activity may be optimized by increasing TnpB polypeptide activity and/or nucleic acid component activity as above.

[0772] The target site selection may be optimized by selecting the optimal position of the target site within a gene, locus or other genomic region. The target site selection may be optimized by optimizing target location comprises selecting a target sequence with a gene, locus, or other genomic region having low variability. This may be achieved for instance by selecting a target site in an early and/or conserved exon or domain (i.e. having low variability, such as polymorphisms, within a population).

[0773] In one embodiment, optimizing target (sequence) length comprises selecting a target sequence within one or more target loci between 5 and 25 nucleotides. In one embodiment, a target sequence is 20 nucleotides.

[0774] In one embodiment, optimizing target specificity comprises selecting targets loci that minimize off-target candidates.

[0775] In one embodiment, the target site may be selected by minimization of off-target effects (e.g. off-targets qualified as having 1-5, 1-4, or preferably 1-3 mismatches compared to target, preferably also considering variability within a population. TnpB polypeptide stability may be optimized by selecting TnpB polypeptide having appropriate half-life, such as preferably a short half-life while still capable of maintaining sufficient activity. In one embodiment, this can be achieved by selecting an appropriate TnpB polypeptide orthologue having a specific half-life or by specific TnpB polypeptide mutations or modifications which affect half-life or stability, such as inclusion (e.g. fusion) of stabilizing or destabilizing domains or sequences. TnpB polypeptide mRNA stability may be optimized by increasing or decreasing TnpB polypeptide mRNA stability. In one embodiment, this can be achieved by increasing or TnpB polypeptide mRNA stability through mRNA modification. nucleic acid component stability may be optimized by increasing or decreasing nucleic acid component stability. In one embodiment, this can be achieved by increasing or decreasing nucleic acid component stability through RNA modification. The stability may be optimized by increasing or decreasing TnpB polypeptide stability and/or nucleic acid component molecule stability as above. TnpB polypeptide protein or mRNA immunogenicity or toxicity may be optimized by decreasing TnpB polypeptide or mRNA immunogenicity or toxicity. In one embodiment, this can be achieved by mRNA or protein modifications. Similarly, in case of DNA based expression systems, DNA immunogenicity or toxicity may be decreased. nucleic acid component immunogenicity or toxicity may be optimized by decreasing nucleic acid component immunogenicity or toxicity. In one embodiment, this can be achieved by nucleic acid component modifications. Similarly, in case of DNA based expression systems, DNA immunogenicity or toxicity may be decreased. The immunogenicity or toxicity may be optimized by decreasing TnpB polypeptide immunogenicity or toxicity and/or nucleic acid component immunogenicity or toxicity as above, or by selecting the least immunogenic or toxic TnpB polypeptide/nucleic acid component combination. Similarly, in case of DNA based expression systems, DNA immunogenicity or toxicity may be decreased. TnpB polypeptide protein or mRNA dose or titer may be optimized by selecting dosage or titer to minimize toxicity and/or maximize specificity and/or efficacy. nucleic acid component dose or titer may be optimized by selecting dosage or titer to minimize toxicity and/or maximize specificity and/or efficacy. The composition dose or titer may be optimized by selecting dosage or titer to minimize toxicity and/or maximize specificity and/or efficacy. The TnpB polypeptide size may be optimized by selecting minimal protein size to increase efficiency of delivery, in particular for virus mediated delivery. TnpB polypeptide, nucleic acid component, or complex thereof expression level may be optimized by limiting (or extending) the duration of expression and/or limiting (or increasing) expression level. This may be achieved for instance by using self-inactivating compositions, systems, such as including a self-targeting (e.g. TnpB polypeptide targeting) nucleic acid component molecule, by using viral vectors having limited expression duration, by using appropriate promoters for low (or high) expression levels, by combining different delivery methods for individual TnpB system components, such as virus mediated delivery of TnpB polypeptide encoding nucleic acid combined with non-virus mediated delivery of nucleic acid component, or virus mediated delivery of nucleic acid component combined with non-virus mediated delivery of TnpB polypeptide or mRNA. TnpB polypeptide, nucleic acid component, or TnpB complex spatiotemporal expression may be optimized by appropriate choice of conditional and/or inducible expression systems, including controllable TnpB polypeptide activity optionally a destabilized TnpB polypeptide and/or a split TnpB polypeptide, and/or cell- or tissue-specific expression systems.

[0776] In an aspect, the invention relates to a method as described herein, comprising selection of one or more (therapeutic) target, selecting the functionality of the composition and/or system, selecting composition mode of delivery, selecting composition delivery vehicle or expression system, and optimization of selected parameters or variables associated with the composition and/or its functionality, optionally wherein the parameters or variables are one or more selected from TnpB polypeptide specificity, nucleic acid component specificity, TnpB complex specificity, TnpB polypeptide activity, nucleic acid component molecule activity, TnpB polypeptide/nucleic acid component complex activity, target cleavage efficiency, target site selection, target sequence length, ability of effector protein to access regions of high chromatin accessibility, degree of uniform enzyme activity across genomic targets, epigenetic tolerance, mismatch/budge tolerance, TnpB polypeptide stability, TnpB polypeptide mRNA stability, nucleic acid component stability, TnpB complex stability, TnpB polypeptide protein or mRNA immunogenicity or toxicity, nucleic acid component immunogenicity or toxicity, TnpB polypeptide/nucleic acid component complex immunogenicity or toxicity, TnpB polypeptide protein or mRNA dose or titer, nucleic acid component dose or titer, TnpB complex dose or titer, TnpB polypeptide protein size, TnpB polypeptide expression level, nucleic acid component expression level, TnpB polypeptide/nucleic acid component molecule complex expression level, TnpB polypeptide spatiotemporal expression, nucleic acid component spatiotemporal expression, TnpB polypeptide/nucleic acid component complex spatiotemporal expression.

[0777] It will be understood that the parameters or variables to be optimized as well as the nature of optimization may depend on the (therapeutic) target, the functionality of the composition and/or system, the system mode of delivery, and/or the composition delivery vehicle or expression system.

[0778] In an aspect, the invention relates to a method as described herein, comprising optimization of nucleic acid component specificity at the population level. Preferably, said optimization of nucleic acid component specificity comprises minimizing nucleic acid component target site sequence variation across a population and/or minimizing nucleic acid component off-target incidence across a population.

[0779] In one embodiment, optimization can result in selection of a TnpB polypeptide that is naturally occurring or is modified. In one embodiment, optimization can result in selection of a TnpB polypeptide that has nuclease, nickase, deaminase, transposase, and/or has one or more effector functionalities deactivated or eliminated. In one embodiment, optimizing a TAMspecificity can include selecting a TnpB polypeptide with a modified TAMspecificity. In one embodiment, optimizing can include selecting a TnpB polypeptide having a minimal size. In one embodiment, optimizing effector protein stability comprises selecting an effector protein having a short half-life while maintaining sufficient activity, such as by selecting an appropriate TnpB polypeptide orthologue having a specific half-life or stability. In one embodiment, optimizing immunogenicity or toxicity comprises minimizing effector protein immunogenicity or toxicity by protein modifications. In one embodiment, optimizing functional specific comprises selecting a protein effector with reduced tolerance of mismatches and/or bulges between the nucleic acid component molecule and one or more target loci.

[0780] In one embodiment, optimizing efficacy comprises optimizing overall efficiency, epigenetic tolerance, or both. In one embodiment, maximizing overall efficiency comprises selecting an effector protein with uniform enzyme activity across target loci with varying chromatin complexity, selecting an effector protein with enzyme activity limited to areas of open chromatin accessibility. In one embodiment, chromatin accessibility is measured using one or more of ATAC-seq, or a DNA-proximity ligation assay. In one embodiment, optimizing epigenetic tolerance comprises optimizing methylation tolerance, epigenetic mark competition, or both. In one embodiment, optimizing methylation tolerance comprises selecting an effector protein that modify methylated DNA. In one embodiment, optimizing epigenetic tolerance comprises selecting an effector protein unable to modify silenced regions of a chromosome, selecting an effector protein able to modify silenced regions of a chromosome, or selecting target loci not enriched for epigenetic markers

[0781] In one embodiment, selecting an optimized nucleic acid component molecule comprises optimizing stability, immunogenicity, or both, or other associated parameters or variables as described herein elsewhere.

[0782] In one embodiment, optimizing nucleic acid component molecule stability and/or nucleic acid component molecule immunogenicity comprises RNA modification, or other nucleic acid component molecule associated parameters or variables as described herein elsewhere. In one embodiment, the modification comprises removing 1-3 nucleotides form the 3′ end of a target complementarity region of the nucleic acid component molecule. In one embodiment, modification comprises an extended nucleic acid component molecule and/or trans RNA/DNA element that create stable structures in the nucleic acid component molecule that compete with nucleic acid component molecule base pairing at a target of off-target loci, or extended complimentary nucleotides between the nucleic acid component molecule and target sequence, or both.

[0783] In one embodiment, the mode of delivery comprises delivering nucleic acid component molecule and/or TnpB polypeptide, delivering nucleic acid component molecule and/or TnpB polypeptide mRNA, or delivery nucleic acid component molecule and/or TnpB polypeptide as a DNA based expression system. In one embodiment, the mode of delivery further comprises selecting a delivery vehicle and/or expression systems from the group consisting of liposomes, lipid particles, nanoparticles, biolistics, or viral-based expression/delivery systems. In one embodiment, expression is spatiotemporal expression is optimized by choice of conditional and/or inducible expression systems, including controllable TnpB polypeptide activity optionally a destabilized TnpB polypeptide and/or a split TnpB polypeptide, and/or cell- or tissue-specific expression system.

[0784] The methods as described herein may further involve selection of the mode of delivery. In one embodiment, nucleic acid component and/or TnpB polypeptide are or are to be delivered. In one embodiment, nucleic acid component and/or TnpB polypeptide mRNA are or are to be delivered. In one embodiment, nucleic acid component and/or TnpB polypeptide provided in a DNA-based expression system are or are to be delivered. In one embodiment, delivery of the individual system components comprises a combination of the above modes of delivery. In one embodiment, delivery comprises delivering nucleic acid component and/or TnpB polypeptide protein, delivering nucleic acid component and/or TnpB polypeptide mRNA, or delivering nucleic acid component and/or TnpB polypeptide as a DNA based expression system.

[0785] The methods as described herein may further involve selection of the composition delivery vehicle and/or expression system. Delivery vehicles and expression systems are described herein elsewhere. By means of example, delivery vehicles of nucleic acids and/or proteins include nanoparticles, liposomes, etc. Delivery vehicles for DNA, such as DNA-based expression systems include for instance biolistics, viral based vector systems (e.g. adenoviral, AAV, lentiviral), etc. the skilled person will understand that selection of the mode of delivery, as well as delivery vehicle or expression system may depend on for instance the cell or tissues to be targeted. In one embodiment, the delivery vehicle and/or expression system for delivering the compositions, systems, or components thereof comprises liposomes, lipid particles, nanoparticles, biolistics, or viral-based expression/delivery systems.

### Considerations for Therapeutic Applications

[0786] A consideration in genome editing therapy is the choice of sequence-specific nuclease, such as a variant of a TnpB polypeptide. Each nuclease variant may possess its own unique set of strengths and weaknesses, many of which must be balanced in the context of treatment to maximize therapeutic benefit. For a specific editing therapy to be efficacious, a sufficiently high level of modification must be achieved in target cell populations to reverse disease symptoms. This therapeutic modification ‘threshold’ is determined by the fitness of edited cells following treatment and the amount of gene product necessary to reverse symptoms. With regard to fitness, editing creates three potential outcomes for treated cells relative to their unedited counterparts: increased, neutral, or decreased fitness. In the case of increased fitness, corrected cells may be able and expand relative to their diseased counterparts to mediate therapy. In this case, where edited cells possess a selective advantage, even low numbers of edited cells can be amplified through expansion, providing a therapeutic benefit to the patient. Where the edited cells possess no change in fitness, an increase the therapeutic modification threshold can be warranted. As such, significantly greater levels of editing may be needed to treat diseases, where editing creates a neutral fitness advantage, relative to diseases where editing creates increased fitness for target cells. If editing imposes a fitness disadvantage, as would be the case for restoring function to a tumor suppressor gene in cancer cells, modified cells would be outcompeted by their diseased counterparts, causing the benefit of treatment to be low relative to editing rates. This may be overcome with supplemental therapies to increase the potency and/or fitness of the edited cells relative to the diseased counterparts.

[0787] In addition to cell fitness, the amount of gene product necessary to treat disease can also influence the minimal level of therapeutic genome editing that can treat or prevent a disease or a symptom thereof. In cases where a small change in the gene product levels can result in significant changes in clinical outcome, the minimal level of therapeutic genome editing is less relative to cases where a larger change in the gene product levels are needed to gain a clinically relevant response. In one embodiment, the minimal level of therapeutic genome editing can range from 0.1 to 1%, 1-5%, 5-10%, 10-15%, 15-20%, 20-25%, 25-30%, 30-35%, 35-40%, 40-45%. 45-50%, or 50-55%. Thus, where a small change in gene product levels can influence clinical outcomes and diseases where there is a fitness advantage for edited cells, are ideal targets for genome editing therapy, as the therapeutic modification threshold is low enough to permit a high chance of success.

[0788] The activity of NHEJ and HDR DSB repair can vary by cell type and cell state. NHEJ is not highly regulated by the cell cycle and is efficient across cell types, allowing for high levels of gene disruption in accessible target cell populations. In contrast, HDR acts primarily during S/G2 phase, and is therefore restricted to cells that are actively dividing, limiting treatments that require precise genome modifications to mitotic cells [Ciccia, A. & Elledge, S. J. Molecular cell 40, 179-204 (2010); Chapman, J. R., et al. Molecular cell 47, 497-510 (2012)].

[0789] The efficiency of correction via HDR may be controlled by the epigenetic state or sequence of the targeted locus, or the specific repair template configuration (single vs. double stranded, long vs. short homology arms) used [Hacein-Bey-Abina, S., et al. The New England journal of medicine 346, 1185-1193 (2002); Gaspar, H. B., et al. Lancet 364, 2181-2187 (2004); Beumer, K. J., et al. G3 (2013)]. The relative activity of NHEJ and HDR machineries in target cells may also affect gene correction efficiency, as these pathways may compete to resolve DSBs [Beumer, K. J., et al. Proceedings of the National Academy of Sciences of the United States of America 105, 19821-19826 (2008)]. HDR also imposes a delivery challenge not seen with NHEJ strategies, as it uses the concurrent delivery of nucleases and repair templates. Thus, these differences can be kept in mind when designing, optimizing, and/or selecting a TnpB polypeptide based therapeutic as described in greater detail elsewhere herein.

[0790] TnpB polypeptide-based polynucleotide modification application can include combinations of proteins, small RNA molecules, and/or repair templates, and can make, In one embodiment, delivery of these multiple parts substantially more challenging than, for example, traditional small molecule therapeutics. Two main strategies for delivery of compositions, systems, and components thereof have been developed: ex vivo and in vivo. In one embodiment of ex vivo treatments, diseased cells are removed from a subject, edited and then transplanted back into the patient. In other embodiments, cells from a healthy allogeneic donor are collected, modified using a composition or component thereof, to impart various functionalities and/or reduce immunogenicity, and administered to an allogeneic recipient in need of treatment. Ex vivo editing has the advantage of allowing the target cell population to be well defined and the specific dosage of therapeutic molecules delivered to cells to be specified. The latter consideration may be particularly important when off-target modifications are a concern, as titrating the amount of nuclease may decrease such mutations (Hsu et al., 2013). Another advantage of ex vivo approaches is the typically high editing rates that can be achieved, due to the development of efficient delivery systems for proteins and nucleic acids into cells in culture for research and gene therapy applications.

[0791] In vivo polynucleotide modification via compositions, systems, and/or components thereof involves direct delivery of the compositions, systems, and/or components thereof to cell types in their native tissues. In vivo polynucleotide modification via compositions, systems, and/or components thereof allows diseases in which the affected cell population is not amenable to ex vivo manipulation to be treated. Furthermore, delivering compositions, systems, and/or components thereof to cells in situ allows for the treatment of multiple tissue and cell types.

[0792] In one embodiment, such as those where viral vector systems are used to generate viral particles to deliver the composition and/or component thereof to a cell, the total cargo size of the composition and/or component thereof should be considered as vector systems can have limits on the size of a polynucleotide that can be expressed therefrom and/or packaged into cargo inside of a viral particle. In one embodiment, the tropism of a vector system, such as a viral vector system, should be considered as it can impact the cell type to which the composition or component thereof can be efficiently and/or effectively delivered.

[0793] When delivering a system or component thereof via a viral-based system, it can be important to consider the amount of viral particles that will be needed to achieve a therapeutic effect so as to account for the potential immune response that can be elicited by the viral particles when delivered to a subject or cell(s). When delivering a system or component thereof via a viral based system, it can be important to consider mechanisms of controlling the distribution and/or dosage of the system in vivo. Generally, to reduce the potential for off-target effects, it is optimal but not necessarily required, that the amount of the system be as close to the minimum or least effective dose. In practice this can be challenging to do.

[0794] In one embodiment, it can be important to consider the immunogenicity of the system or component thereof. In embodiments, where the immunogenicity of the system or component thereof is of concern, the immunogenicity system or component thereof can be reduced. By way of example only, the immunogenicity of the system or component thereof can be reduced using the approach set out in Tangri et al. Accordingly, directed evolution or rational design may be used to reduce the immunogenicity of the TnpB polypeptide in the host species (human or other species).

### Xenotransplantation

[0795] The present invention also contemplates use of the composition described herein, e.g. TnpB polypeptide protein systems, to provide RNA-guided DNA nucleases adapted to be used to provide modified tissues for transplantation. For example, RNA-guided DNA nucleases may be used to knockout, knockdown or disrupt selected genes in an animal, such as a transgenic pig (such as the human heme oxygenase-1 transgenic pig line), for example by disrupting expression of genes that encode epitopes recognized by the human immune system, i.e. xenoantigen genes. Candidate porcine genes for disruption may for example include α(1,3)-galactosyltransferase and cytidine monophosphate-N-acetylneuraminic acid hydroxylase genes (see PCT Patent Publication WO 2014/066505). In addition, genes encoding endogenous retroviruses may be disrupted, for example the genes encoding all porcine endogenous retroviruses (see Yang et al., 2015, Genome-wide inactivation of porcine endogenous retroviruses (PERVs), Science 27 Nov. 2015: Vol. 350 no. 6264 pp. 1101-1104). In addition, RNA-guided DNA nucleases may be used to target a site for integration of additional genes in xenotransplant donor animals, such as a human CD55 gene to improve protection against hyperacute rejection.

[0796] Embodiments of the invention also relate to methods and compositions related to knocking out genes, amplifying genes and repairing particular mutations associated with DNA repeat instability and neurological disorders (Robert D. Wells, Tetsuo Ashizawa, Genetic Instabilities and Neurological Diseases, Second Edition, Academic Press, Oct. 13, 2011—Medical). Specific aspects of tandem repeat sequences have been found to be responsible for more than twenty human diseases (New insights into repeat instability: role of RNA⋅DNA hybrids. McIvor E I, Polak U, Napierala M. RNA Biol. 2010 September-October; 7(5):551-8). The present effector protein systems may be harnessed to correct these defects of genomic instability.

[0797] Several further aspects of the invention relate to correcting defects associated with a wide range of genetic diseases which are further described on the website of the National Institutes of Health under the topic subsection Genetic Disorders (website at health.nih.gov/topic/GeneticDisorders). The genetic brain diseases may include but are not limited to Adrenoleukodystrophy, Agenesis of the Corpus Callosum, Aicardi Syndrome, Alpers' Disease, Alzheimer's Disease, Barth Syndrome, Batten Disease, CADASIL, Cerebellar Degeneration, Fabry's Disease, Gerstmann-Straussler-Scheinker Disease, Huntington's Disease and other Triplet Repeat Disorders, Leigh's Disease, Lesch-Nyhan Syndrome, Menkes Disease, Mitochondrial Myopathies and NINDS Colpocephaly. These diseases are further described on the website of the National Institutes of Health under the subsection Genetic Brain Disorders.

### Applications in Plants and Fungi

[0798] The compositions, systems, and methods described herein can be used to perform gene or genome interrogation or editing or manipulation in plants and fungi. For example, the applications include investigation and/or selection and/or interrogations and/or comparison and/or manipulations and/or transformation of plant genes or genomes; e.g., to create, identify, develop, optimize, or confer trait(s) or characteristic(s) to plant(s) or to transform a plant or fugus genome. There can accordingly be improved production of plants, new plants with new combinations of traits or characteristics or new plants with enhanced traits. The compositions, systems, and methods can be used with regard to plants in Site-Directed Integration (SDI) or Gene Editing (GE) or any Near Reverse Breeding (NRB) or Reverse Breeding (RB) techniques.

[0799] The compositions, systems, and methods herein may be used to confer desired traits (e.g., enhanced nutritional quality, increased resistance to diseases and resistance to biotic and abiotic stress, and increased production of commercially valuable plant products or heterologous compounds) on essentially any plants and fungi, and their cells and tissues. The compositions, systems, and methods may be used to modify endogenous genes or to modify their expression without the permanent introduction into the genome of any foreign gene.

[0800] In one embodiment, compositions, systems, and methods may be used in genome editing in plants or where RNAi or similar genome editing techniques have been used previously; see, e.g., Nekrasov, “Plant genome editing made easy: targeted mutagenesis in model and crop plants using the CRISPR-Cas system,” Plant Methods 2013, 9:39 (doi:10.1186/1746-4811-9-39); Brooks, “Efficient gene editing in tomato in the first generation using the CRISPR-Cas9 system,” Plant Physiology September 2014 pp 114.247577; Shan, “Targeted genome modification of crop plants using a CRISPR-Cas system,” Nature Biotechnology 31, 686-688 (2013); Feng, “Efficient genome editing in plants using a CRISPR/Cas system,” Cell Research (2013) 23:1229-1232. doi:10.1038/cr.2013.114; published online 20 Aug. 2013; Xie, “RNA-guided genome editing in plants using a CRISPR-Cas system,” Mol Plant. 2013 November; 6(6):1975-83. doi: 10.1093/mp/sst119. Epub 2013 Aug. 17; Xu, “Gene targeting using the Agrobacterium tumefaciens-mediated CRISPR-Cas system in rice,” Rice 2014, 7:5 (2014), Zhou et al., “Exploiting SNPs for biallelic CRISPR mutations in the outcrossing woody perennial Populus reveals 4-coumarate: CoA ligase specificity and Redundancy,” New Phytologist (2015) (Forum) 1-4 (available online only at www.newphytologist.com); Caliando et al, “Targeted DNA degradation using a CRISPR device stably carried in the host genome, NATURE COMMUNICATIONS 6:6989, DOI: 10.1038/ncomms7989, www.nature.com/naturecommunications DOI: 10.1038/ncomms7989; U.S. Pat. No. 6,603,061—Agrobacterium-Mediated Plant Transformation Method; U.S. Pat. No. 7,868,149—Plant Genome Sequences and Uses Thereof and US 2009/0100536—Transgenic Plants with Enhanced Agronomic Traits, Morrell et al “Crop genomics: advances and applications,” Nat Rev Genet. 2011 Dec. 29; 13(2):85-96, all the contents and disclosure of each of which are herein incorporated by reference in their entirety. Aspects of utilizing the compositions, systems, and methods may be analogous to the use of the composition in plants, and mention is made of the University of Arizona website “CRISPR-PLANT” (genome.arizona.edu/crispr/) (supported by Penn State and AGI) for direction as to nucleic acid modification in plant systems.

[0801] The compositions, systems, and methods may also be used on protoplasts. A “protoplast” refers to a plant cell that has had its protective cell wall completely or partially removed using, for example, mechanical or enzymatic means resulting in an intact biochemical competent unit of living plant that can reform their cell wall, proliferate and regenerate grow into a whole plant under proper growing conditions.

[0802] The compositions, systems, and methods may be used for screening genes (e.g., endogenous, mutations) of interest. In some examples, genes of interest include those encoding enzymes involved in the production of a component of added nutritional value or generally genes affecting agronomic traits of interest, across species, phyla, and plant kingdom. By selectively targeting e.g. genes encoding enzymes of metabolic pathways, the genes responsible for certain nutritional aspects of a plant can be identified. Similarly, by selectively targeting genes which may affect a desirable agronomic trait, the relevant genes can be identified. Accordingly, the present invention encompasses screening methods for genes encoding enzymes involved in the production of compounds with a particular nutritional value and/or agronomic traits.

[0803] It is also understood that reference herein to animal cells may also apply, mutatis mutandis, to plant or fungal cells unless otherwise apparent; and, the enzymes herein having reduced off-target effects and systems employing such enzymes can be used in plant applications, including those mentioned herein.

[0804] In some cases, nucleic acids introduced to plants and fungi may be codon optimized for expression in the plants and fungi. Methods of codon optimization include those described in Kwon K C, et al., Codon Optimization to Enhance Expression Yields Insights into Chloroplast Translation, Plant Physiol. 2016 September; 172(1):62-77.

[0805] The components (e.g., TnpB polypeptide) in the compositions and systems may further comprise one or more functional domains described herein. In some examples, the functional domains may be an exonuclease. Such exonuclease may increase the efficiency of the TnpB polypeptide’ function, e.g., mutagenesis efficiency. An example of the functional domain is Trex2, as described in Weiss T et al., www.biorxiv.org/content/10.1101/2020.04.11.037572v1, doi: doi.org/10.1101/2020.04.11.037572.

### Examples of Plants

[0806] The compositions, systems, and methods herein can be used to confer desired traits on essentially any plant. A wide variety of plants and plant cell systems may be engineered for the desired physiological and agronomic characteristics. In general, the term “plant” relates to any various photosynthetic, eukaryotic, unicellular or multicellular organism of the kingdom Plantae characteristically growing by cell division, containing chloroplasts, and having cell walls comprised of cellulose. The term plant encompasses monocotyledonous and dicotyledonous plants.

[0807] The compositions, systems, and methods may be used over a broad range of plants, such as for example with dicotyledonous plants belonging to the orders Magniolales, Illiciales, Laurales, Piperales, Aristochiales, Nymphaeales, Ranunculales, Papeverales, Sarraceniaceae, Trochodendrales, Hamamelidales, Eucomiales, Leitneriales, Myricales, Fagales, Casuarinales, Caryophyllales, Batales, Polygonales, Plumbaginales, Dilleniales, Theales, Malvales, Urticales, Lecythidales, Violales, Salicales, Capparales, Ericales, Diapensales, Ebenales, Primulales, Rosales, Fabales, Podostemales, Haloragales, Myrtales, Cornales, Proteales, San tales, Rafflesiales, Celastrales, Euphorbiales, Rhamnales, Sapindales, Juglandales, Geraniales, Polygalales, Umbellales, Gentianales, Polemoniales, Lamiales, Plantaginales, Scrophulariales, Campanulales, Rubiales, Dipsacales, and Asterales; monocotyledonous plants such as those belonging to the orders Alismatales, Hydrocharitales, Najadales, Triuridales, Commelinales, Eriocaulales, Restionales, Poales, Juncales, Cyperales, Typhales, Bromeliales, Zingiberales, Arecales, Cyclanthales, Pandanales, Arales, Lilliales, and Orchid ales, or with plants belonging to Gymnospermae, e.g., those belonging to the orders Pinales, Ginkgoales, Cycadales, Araucariales, Cupressales and Gnetales.

[0808] The compositions, systems, and methods herein can be used over a broad range of plant species, included in the non-limitative list of dicot, monocot or gymnosperm genera hereunder: Atropa, Alseodaphne, Anacardium, Arachis, Beilschmiedia, Brassica, Carthamus, Cocculus, Croton, Cucumis, Citrus, Citrullus, Capsicum, Catharanthus, Cocos, Coffea, Cucurbita, Daucus, Duguetia, Eschscholzia, Ficus, Fragaria, Glaucium, Glycine, Gossypium, Helianthus, Hevea, Hyoscyamus, Lactuca, Landolphia, Linum, Litsea, Lycopersicon, Lupinus, Manihot, Majorana, Malus, Medicago, Nicotiana, Olea, Parthenium, Papaver, Persea, Phaseolus, Pistacia, Pisum, Pyrus, Prunus, Raphanus, Ricinus, Senecio, Sinomenium, Stephania, Sinapis, Solanum, Theobroma, Trifolium, Trigonella, Vicia, Vinca, Vilis, and Vigna; and the genera Allium, Andropogon, Aragrostis, Asparagus, Avena, Cynodon, Elaeis, Festuca, Festulolium, Heterocallis, Hordeum, Lemna, Lolium, Musa, Oryza, Panicum, Pannesetum, Phleum, Poa, Secale, Sorghum, Triticum, Zea, Abies, Cunninghamia, Ephedra, Picea, Pinus, and Pseudotsuga.

[0809] In one embodiment, target plants and plant cells for engineering include those monocotyledonous and dicotyledonous plants, such as crops including grain crops (e.g., wheat, maize, rice, millet, barley), fruit crops (e.g., tomato, apple, pear, strawberry, orange), forage crops (e.g., alfalfa), root vegetable crops (e.g., carrot, potato, sugar beets, yam), leafy vegetable crops (e.g., lettuce, spinach); flowering plants (e.g., petunia, rose, chrysanthemum), conifers and pine trees (e.g., pine fir, spruce); plants used in phytoremediation (e.g., heavy metal accumulating plants); oil crops (e.g., sunflower, rape seed) and plants used for experimental purposes (e.g., Arabidopsis). Specifically, the plants are intended to comprise without limitation angiosperm and gymnosperm plants such as acacia, alfalfa, amaranth, apple, apricot, artichoke, ash tree, asparagus, avocado, banana, barley, beans, beet, birch, beech, blackberry, blueberry, broccoli, Brussel's sprouts, cabbage, canola, cantaloupe, carrot, cassava, cauliflower, cedar, a cereal, celery, chestnut, cherry, Chinese cabbage, citrus, clementine, clover, coffee, corn, cotton, cowpea, cucumber, cypress, eggplant, elm, endive, eucalyptus, fennel, figs, fir, geranium, grape, grapefruit, groundnuts, ground cherry, gum hemlock, hickory, kale, kiwifruit, kohlrabi, larch, lettuce, leek, lemon, lime, locust, pine, maidenhair, maize, mango, maple, melon, millet, mushroom, mustard, nuts, oak, oats, oil palm, okra, onion, orange, an ornamental plant or flower or tree, papaya, palm, parsley, parsnip, pea, peach, peanut, pear, peat, pepper, persimmon, pigeon pea, pine, pineapple, plantain, plum, pomegranate, potato, pumpkin, radicchio, radish, rapeseed, raspberry, rice, rye, sorghum, safflower, sallow, soybean, spinach, spruce, squash, strawberry, sugar beet, sugarcane, sunflower, sweet potato, sweet corn, tangerine, tea, tobacco, tomato, trees, triticale, turf grasses, turnips, vine, walnut, watercress, watermelon, wheat, yams, yew, and zucchini.

[0810] The term plant also encompasses Algae, which are mainly photoautotrophs unified primarily by their lack of roots, leaves and other organs that characterize higher plants. The compositions, systems, and methods can be used over a broad range of “algae” or “algae cells.” Examples of algae include eukaryotic phyla, including the Rhodophyta (red algae), Chlorophyta (green algae), Phaeophyta (brown algae), Bacillariophyta (diatoms), Eustigmatophyta and dinoflagellates as well as the prokaryotic phylum Cyanobacteria (blue-green algae). Examples of algae species include those of Amphora, Anabaena, Anikstrodesmis, Botryococcus, Chaetoceros, Chlamydomonas, Chlorella, Chlorococcum, Cyclotella, Cylindrotheca, Dunaliella, Emiliana, Euglena, Hematococcus, Isochrysis, Monochrysis, Monoraphidium, Nannochloris, Nannnochloropsis, Navicula, Nephrochloris, Nephroselmis, Nitzschia, Nodularia, Nostoc, Oochromonas, Oocystis, Oscillartoria, Pavlova, Phaeodactylum, Playtmonas, Pleurochrysis, Porhyra, Pseudoanabaena, Pyramimonas, Stichococcus, Synechococcus, Synechocystis, Tetraselmis, Thalassiosira, and Trichodesmium.

### Plant Promoters

[0811] In order to ensure appropriate expression in a plant cell, the components of the components and systems herein may be placed under control of a plant promoter. A plant promoter is a promoter operable in plant cells. A plant promoter is capable of initiating transcription in plant cells, whether or not its origin is a plant cell. The use of different types of promoters is envisaged.

[0812] In some examples, the plant promoter is a constitutive plant promoter, which is a promoter that is able to express the open reading frame (ORF) that it controls in all or nearly all of the plant tissues during all or nearly all developmental stages of the plant (referred to as “constitutive expression”). One example of a constitutive promoter is the cauliflower mosaic virus 35S promoter. In some examples, the plant promoter is a regulated promoter, which directs gene expression not constitutively, but in a temporally- and/or spatially-regulated manner, and includes tissue-specific, tissue-preferred and inducible promoters. Different promoters may direct the expression of a gene in different tissues or cell types, or at different stages of development, or in response to different environmental conditions. In some examples, the plant promoter is a tissue-preferred promoters, which can be utilized to target enhanced expression in certain cell types within a particular plant tissue, for instance vascular cells in leaves or roots or in specific cells of the seed.

[0813] Exemplary plant promoters include those obtained from plants, plant viruses, and bacteria such as Agrobacterium or Rhizobium which comprise genes expressed in plant cells. Additional examples of promoters include those described in Kawamata et al., (1997) Plant Cell Physiol 38:792-803; Yamamoto et al., (1997) Plant J 12:255-65; Hire et al, (1992) Plant Mol Biol 20:207-18, Kuster et al, (1995) Plant Mol Biol 29:759-72, and Capana et al., (1994) Plant Mol Biol 25:681-91.

[0814] In some examples, a plant promoter may be an inducible promoter, which is inducible and allows for spatiotemporal control of gene editing or gene expression may use a form of energy. The form of energy may include sound energy, electromagnetic radiation, chemical energy and/or thermal energy. Examples of inducible systems include tetracycline inducible promoters (Tet-On or Tet-Off), small molecule two-hybrid transcription activations systems (FKBP, ABA, etc.), or light inducible systems (Phytochrome, LOV domains, or cryptochrome), such as a Light Inducible Transcriptional Effector (LITE) that direct changes in transcriptional activity in a sequence-specific manner. In a particular example, of the components of a light inducible system include a TnpB polypeptide, a light-responsive cytochrome heterodimer (e.g. from Arabidopsis thaliana), and a transcriptional activation/repression domain.

[0815] In some examples, the promoter may be a chemical-regulated promotor (where the application of an exogenous chemical induces gene expression) or a chemical-repressible promoter (where application of the chemical represses gene expression). Examples of chemical-inducible promoters include maize ln2-2 promoter (activated by benzene sulfonamide herbicide safeners), the maize GST promoter (activated by hydrophobic electrophilic compounds used as pre-emergent herbicides), the tobacco PR-1 a promoter (activated by salicylic acid), promoters regulated by antibiotics (such as tetracycline-inducible and tetracycline-repressible promoters).

### Stable Integration in the Genome of Plants

[0816] In one embodiment, polynucleotides encoding the components of the compositions and systems may be introduced for stable integration into the genome of a plant cell. In some cases, vectors or expression systems may be used for such integration. The design of the vector or the expression system can be adjusted depending on for when, where and under what conditions the nucleic acid component molecule and/or the TnpB polypeptide gene are expressed. In some cases, the polynucleotides may be integrated into an organelle of a plant, such as a plastid, mitochondrion or a chloroplast. The elements of the expression system may be on one or more expression constructs which are either circular such as a plasmid or transformation vector, or non-circular such as linear double stranded DNA.

[0817] In one embodiment, the method of integration generally comprises the steps of selecting a suitable host cell or host tissue, introducing the construct(s) into the host cell or host tissue, and regenerating plant cells or plants therefrom. In some examples, the expression system for stable integration into the genome of a plant cell may contain one or more of the following elements: a promoter element that can be used to express the RNA and/or TnpB polypeptide in a plant cell; a 5′ untranslated region to enhance expression; an intron element to further enhance expression in certain cells, such as monocot cells; a multiple-cloning site to provide convenient restriction sites for inserting the nucleic acid component molecule and/or the TnpB polypeptide gene sequences and other desired elements; and a 3′ untranslated region to provide for efficient termination of the expressed transcript.

### Transient Expression in Plants

[0818] In one embodiment, the components of the compositions and systems may be transiently expressed in the plant cell. In some examples, the compositions and systems may modify a target nucleic acid only when both the nucleic acid component molecule and the TnpB polypeptide are present in a cell, such that genomic modification can further be controlled. As the expression of the TnpB polypeptide is transient, plants regenerated from such plant cells typically contain no foreign DNA. In certain examples, the TnpB polypeptide is stably expressed and the nucleic acid component molecule sequence is transiently expressed.

[0819] DNA and/or RNA (e.g., mRNA) may be introduced to plant cells for transient expression. In such cases, the introduced nucleic acid may be provided in sufficient quantity to modify the cell but do not persist after a contemplated period of time has passed or after one or more cell divisions.

[0820] The transient expression may be achieved using suitable vectors. Exemplary vectors that may be used for transient expression include a pEAQ vector (may be tailored for Agrobacterium-mediated transient expression) and Cabbage Leaf Curl virus (CaLCuV), and vectors described in Sainsbury F. et al., Plant Biotechnol J. 2009 September; 7(7):682-93; and Yin K et al., Scientific Reports volume 5, Article number: 14926 (2015).

[0821] Combinations of the different methods described above are also envisaged.

Translocation to and/or Expression in Specific Plant Organelles

[0822] The compositions and systems herein may comprise elements for translocation to and/or expression in a specific plant organelle.

### Chloroplast Targeting

[0823] In one embodiment, it is envisaged that the compositions and systems are used to specifically modify chloroplast genes or to ensure expression in the chloroplast. The compositions and systems (e.g., TnpB polypeptide, nucleic acid components, or their encoding polynucleotides) may be transformed, compartmentalized, and/or targeted to the chloroplast. In an example, the introduction of genetic modifications in the plastid genome can reduce biosafety issues such as gene flow through pollen.

[0824] Examples of methods of chloroplast transformation include Particle bombardment, PEG treatment, and microinjection, and the translocation of transformation cassettes from the nuclear genome to the plastid. In some examples, targeting of chloroplasts may be achieved by incorporating in chloroplast localization sequence, and/or the expression construct a sequence encoding a chloroplast transit peptide (CTP) or plastid transit peptide, operably linked to the 5′ region of the sequence encoding the components of the compositions and systems. Additional examples of transforming, targeting and localization of chloroplasts include those described in WO2010061186, Protein Transport into Chloroplasts, 2010, Annual Review of Plant Biology, Vol. 61: 157-180, and US 20040142476, which are incorporated by reference herein in their entireties.

### Exemplary Applications in Plants

[0825] The compositions, systems, and methods may be used to generate genetic variation(s) in a plant (e.g., crop) of interest. One or more, e.g., a library of, nucleic acid components targeting one or more locations in a genome may be provided and introduced into plant cells together with the TnpB polypeptide. For example, a collection of genome-scale point mutations and gene knock-outs can be generated. In some examples, the compositions, systems, and methods may be used to generate a plant part or plant from the cells so obtained and screening the cells for a trait of interest. The target genes may include both coding and non-coding regions. In some cases, the trait is stress tolerance and the method is a method for the generation of stress-tolerant crop varieties.

[0826] In one embodiment, the compositions, systems, and methods are used to modify endogenous genes or to modify their expression. The expression of the components may induce targeted modification of the genome, either by direct activity of the TnpB polypeptide and optionally introduction of recombination template DNA, or by modification of genes targeted. The different strategies described herein above allow TnpB polypeptide-mediated targeted genome editing without requiring the introduction of the components into the plant genome.

[0827] In some cases, the modification may be performed without the permanent introduction into the genome of the plant of any foreign gene, including those encoding components of the composition herein, so as to avoid the presence of foreign DNA in the genome of the plant. This can be of interest as the regulatory requirements for non-transgenic plants are less rigorous. Components which are transiently introduced into the plant cell are typically removed upon crossing.

[0828] For example, the modification may be performed by transient expression of the components of the compositions and systems. The transient expression may be performed by delivering the components of the compositions and systems with viral vectors, delivery into protoplasts, with the aid of particulate molecules such as nanoparticles or CPPs.

Generation of Plants with Desired Traits

[0829] The compositions, systems, and methods herein may be used to introduce desired traits to plants. The approaches include introduction of one or more foreign genes to confer a trait of interest, editing or modulating endogenous genes to confer a trait of interest.

### Agronomic Traits

[0830] In one embodiment, crop plants can be improved by influencing specific plant traits. Examples of the traits include improved agronomic traits such as herbicide resistance, disease resistance, abiotic stress tolerance, high yield, and superior quality, pesticide-resistance, disease resistance, insect and nematode resistance, resistance against parasitic weeds, drought tolerance, nutritional value, stress tolerance, self-pollination voidance, forage digestibility biomass, and grain yield.

[0831] In one embodiment, genes that confer resistance to pests or diseases may be introduced to plants. In cases there are endogenous genes that confer such resistance in a plants, their expression and function may be enhanced (e.g., by introducing extra copies, modifications that enhance expression and/or activity).

[0832] Examples of genes that confer resistance include plant disease resistance genes (e.g., Cf-9, Pto, RSP2, SlDMR6-1), genes conferring resistance to a pest (e.g., those described in WO96/30517), Bacillus thuringiensis proteins, lectins, Vitamin-binding proteins (e.g., avidin), enzyme inhibitors (e.g., protease or proteinase inhibitors or amylase inhibitors), insect-specific hormones or pheromones (e.g., ecdysteroid or a juvenile hormone, variant thereof, a mimetic based thereon, or an antagonist or agonist thereof) or genes involved in the production and regulation of such hormone and pheromones, insect-specific peptides or neuropeptide, Insect-specific venom (e.g., produced by a snake, a wasp, etc., or analog thereof), Enzymes responsible for a hyperaccumulation of a monoterpene, a sesquiterpene, a steroid, hydroxamic acid, a phenylpropanoid derivative or another nonprotein molecule with insecticidal activity, Enzymes involved in the modification of biologically active molecule (e.g., a glycolytic enzyme, a proteolytic enzyme, a lipolytic enzyme, a nuclease, a cyclase, a transaminase, an esterase, a hydrolase, a phosphatase, a kinase, a phosphorylase, a polymerase, an elastase, a chitinase and a glucanase, whether natural or synthetic), molecules that stimulates signal transduction, Viral-invasive proteins or a complex toxin derived therefrom, Developmental-arrestive proteins produced in nature by a pathogen or a parasite, a developmental-arrestive protein produced in nature by a plant, or any combination thereof.

[0833] The compositions, systems, and methods may be used to identify, screen, introduce or remove mutations or sequences lead to genetic variability that give rise to susceptibility to certain pathogens, e.g., host specific pathogens. Such approach may generate plants that are non-host resistance, e.g., the host and pathogen are incompatible or there can be partial resistance against all races of a pathogen, typically controlled by many genes and/or also complete resistance to some races of a pathogen but not to other races.

[0834] In one embodiment, the compositions, systems, and methods may be used to modify genes involved in plant diseases. Such genes may be removed, inactivated, or otherwise regulated or modified. Examples of plant diseases include those described in [0045]-[0080] of US20140213619A1, which is incorporated by reference herein in its entirety.

[0835] In one embodiment, genes that confer resistance to herbicides may be introduced to plants. Examples of genes that confer resistance to herbicides include genes conferring resistance to herbicides that inhibit the growing point or meristem, such as an imidazolinone or a sulfonylurea, genes conferring glyphosate tolerance (e.g., resistance conferred by, e.g., mutant 5-enolpyruvylshikimate-3-phosphate synthase genes, aroA genes and glyphosate acetyl transferase (GAT) genes, respectively), or resistance to other phosphono compounds such as by glufosinate (phosphinothricin acetyl transferase (PAT) genes from Streptomyces species, including Streptomyces hygroscopicus and Streptomyces viridichromo genes), and to pyridinoxy or phenoxy proprionic acids and cyclohexones by ACCase inhibitor-encoding genes), genes conferring resistance to herbicides that inhibit photosynthesis (such as a triazine (psbA and gs+ genes) or a benzonitrile (nitrilase gene), and glutathione S-transferase), genes encoding enzymes detoxifying the herbicide or a mutant glutamine synthase enzyme that is resistant to inhibition, genes encoding a detoxifying enzyme is an enzyme encoding a phosphinothricin acetyltransferase (such as the bar or pat protein from Streptomyces species), genes encoding hydroxyphenylpyruvatedioxygenases (HPPD) inhibitors, e.g., naturally occurring HPPD resistant enzymes, and genes encoding a mutated or chimeric HPPD enzyme.

[0836] In one embodiment, genes involved in Abiotic stress tolerance may be introduced to plants. Examples of genes include those capable of reducing the expression and/or the activity of poly(ADP-ribose) polymerase (PARP) gene, transgenes capable of reducing the expression and/or the activity of the PARG encoding genes, genes coding for a plant-functional enzyme of the nicotineamide adenine dinucleotide salvage synthesis pathway including nicotinamidase, nicotinate phosphoribosyltransferase, nicotinic acid mononucleotide adenyl transferase, nicotinamide adenine dinucleotide synthetase or nicotine amide phosphorybosyltransferase, enzymes involved in carbohydrate biosynthesis, enzymes involved in the production of polyfructose (e.g., the inulin and levan-type), the production of alpha-1,6 branched alpha-1,4-glucans, the production of alternan, the production of hyaluronan.

[0837] In one embodiment, genes that improve drought resistance may be introduced to plants. Examples of genes Ubiquitin Protein Ligase protein (UPL) protein (UPL3), DR02, DR03, ABC transporter, and DREB1A.

### Nutritionally Improved Plants

[0838] In one embodiment, the compositions, systems, and methods may be used to produce nutritionally improved plants. In some examples, such plants may provide functional foods, e.g., a modified food or food ingredient that may provide a health benefit beyond the traditional nutrients it contains. In certain examples, such plants may provide nutraceuticals foods, e.g., substances that may be considered a food or part of a food and provides health benefits, including the prevention and treatment of disease. The nutraceutical foods may be useful in the prevention and/or treatment of diseases in animals and humans, e.g., cancers, diabetes, cardiovascular disease, and hypertension.

[0839] An improved plant may naturally produce one or more desired compounds and the modification may enhance the level or activity or quality of the compounds. In some cases, the improved plant may not naturally produce the compound(s), while the modification enables the plant to produce such compound(s). In some cases, the compositions, systems, and methods used to modify the endogenous synthesis of these compounds indirectly, e.g. by modifying one or more transcription factors that controls the metabolism of this compound.

[0840] Examples of nutritionally improved plants include plants comprising modified protein quality, content and/or amino acid composition, essential amino acid contents, oils and fatty acids, carbohydrates, vitamins and carotenoids, functional secondary metabolites, and minerals. In some examples, the improved plants may comprise or produce compounds with health benefits. Examples of nutritionally improved plants include those described in Newell-McGloughlin, Plant Physiology, July 2008, Vol. 147, pp. 939-953.

[0841] Examples of compounds that can be produced include carotenoids (e.g., α-Carotene or β-Carotene), lutein, lycopene, Zeaxanthin, Dietary fiber (e.g., insoluble fibers, β-Glucan, soluble fibers, fatty acids (e.g., ω-3 fatty acids, Conjugated linoleic acid, GLA), Flavonoids (e.g., Hydroxycinnamates, flavonols, catechins and tannins), Glucosinolates, indoles, isothiocyanates (e.g., Sulforaphane), Phenolics (e.g., stilbenes, caffeic acid and ferulic acid, epicatechin), Plant stanols/sterols, Fructans, inulins, fructo-oligosaccharides, Saponins, Soybean proteins, Phytoestrogens (e.g., isoflavones, lignans), Sulfides and thiols such as diallyl sulphide, Allyl methyl trisulfide, dithiolthiones, Tannins, such as proanthocyanidins, or any combination thereof.

[0842] The compositions, systems, and methods may also be used to modify protein/starch functionality, shelf life, taste/aesthetics, fiber quality, and allergen, antinutrient, and toxin reduction traits.

[0843] Examples of genes and nucleic acids that can be modified to introduce the traits include stearyl-ACP desaturase, DNA associated with the single allele which may be responsible for maize mutants characterized by low levels of phytic acid, Tf RAP2.2 and its interacting partner SINAT2, Tf Dof1, and DOF Tf AtDof1.1 (OBP2).

### Modification of Polyploid Plants

[0844] The compositions, systems, and methods may be used to modify polyploid plants. Polyploid plants carry duplicate copies of their genomes (e.g. as many as six, such as in wheat). In some cases, the compositions, systems, and methods may be multiplexed to affect all copies of a gene, or to target dozens of genes at once. For instance, the compositions, systems, and methods may be used to simultaneously ensure a loss of function mutation in different genes responsible for suppressing defenses against a disease. The modification may be simultaneous suppression the expression of the TaMLO-Al, TaMLO-Bl and TaMLO-Dl nucleic acid sequence in a wheat plant cell and regenerating a wheat plant therefrom, in order to ensure that the wheat plant is resistant to powdery mildew (e.g., as described in WO2015109752).

### Regulation of Fruit-Ripening

[0845] The compositions, systems, and methods may be used to regulate ripening of fruits. Ripening is a normal phase in the maturation process of fruits and vegetables. Only a few days after it starts it may render a fruit or vegetable inedible, which can bring significant losses to both farmers and consumers.

[0846] In one embodiment, the compositions, systems, and methods are used to reduce ethylene production. In some examples, the compositions, systems, and methods may be used to suppress the expression and/or activity of ACC synthase, insert a ACC deaminase gene or a functional fragment thereof, insert a SAM hydrolase gene or functional fragment thereof, suppress ACC oxidase gene expression

[0847] Alternatively or additionally, the compositions, systems, and methods may be used to modify ethylene receptors (e.g., suppressing ETR1) and/or Polygalacturonase (PG). Suppression of a gene may be achieved by introducing a mutation, an antisense sequence, and/or a truncated copy of the gene to the genome.

### Increasing Storage Life of Plants

[0848] In one embodiment, the compositions, systems, and methods are used to modify genes involved in the production of compounds which affect storage life of the plant or plant part. The modification may be in a gene that prevents the accumulation of reducing sugars in potato tubers. Upon high-temperature processing, these reducing sugars react with free amino acids, resulting in brown, bitter-tasting products and elevated levels of acrylamide, which is a potential carcinogen. In particular embodiments, the methods provided herein are used to reduce or inhibit expression of the vacuolar invertase gene (VInv), which encodes a protein that breaks down sucrose to glucose and fructose.

### Reducing Allergens in Plants

[0849] In one embodiment, the compositions, systems, and methods are used to generate plants with a reduced level of allergens, making them safer for consumers. To this end, the compositions, systems, and methods may be used to identify and modify (e.g., suppress) one or more genes responsible for the production of plant allergens. Examples of such genes include Lol p5, as well as those in peanuts, soybeans, lentils, peas, lupin, green beans, mung beans, such as those described in Nicolaou et al., Current Opinion in Allergy and Clinical Immunology 2011; 11(3):222), which is incorporated by reference herein in its entirety.

### Generation of Male Sterile Plants

[0850] The compositions, systems, and methods may be used to generate male sterile plants. Hybrid plants typically have advantageous agronomic traits compared to inbred plants. However, for self-pollinating plants, the generation of hybrids can be challenging. In different plant types (e.g., maize and rice), genes have been identified which are important for plant fertility, more particularly male fertility. Plants that are as such genetically altered can be used in hybrid breeding programs.

[0851] The compositions, systems, and methods may be used to modify genes involved male fertility, e.g., inactivating (such as by introducing mutations to) genes required for male fertility. Examples of the genes involved in male fertility include cytochrome P450-like gene (MS26) or the meganuclease gene (MS45), and those described in Wan X et al., Mol Plant. 2019 Mar. 4; 12(3):321-342; and Kim Y J, et al., Trends Plant Sci. 2018 January; 23(1):53-65.

### Increasing the Fertility Stage in Plants

[0852] In one embodiment, the compositions, systems, and methods may be used to prolong the fertility stage of a plant such as of a rice. For instance, a rice fertility stage gene such as Ehd3 can be targeted in order to generate a mutation in the gene and plantlets can be selected for a prolonged regeneration plant fertility stage.

### Production of Early Yield of Products

[0853] In one embodiment, the compositions, systems, and methods may be used to produce early yield of the product. For example, flowering process may be modulated, e.g., by mutating flowering repressor gene such as SP5G. Examples of such approaches include those described in Soyk S, et al., Nat Genet. 2017 January; 49(1):162-168.

### Oil and Biofuel Production

[0854] The compositions, systems, and methods may be used to generate plants for oil and biofuel production. Biofuels include fuels made from plant and plant-derived resources. Biofuels may be extracted from organic matter whose energy has been obtained through a process of carbon fixation or are made through the use or conversion of biomass. This biomass can be used directly for biofuels or can be converted to convenient energy containing substances by thermal conversion, chemical conversion, and biochemical conversion. This biomass conversion can result in fuel in solid, liquid, or gas form. Biofuels include bioethanol and biodiesel. Bioethanol can be produced by the sugar fermentation process of cellulose (starch), which may be derived from maize and sugar cane. Biodiesel can be produced from oil crops such as rapeseed, palm, and soybean. Biofuels can be used for transportation.

### Generation of Plants for Production of Vegetable Oils and Biofuels

[0855] The compositions, systems, and methods may be used to generate algae (e.g., diatom) and other plants (e.g., grapes) that express or overexpress high levels of oil or biofuels.

[0856] In some cases, the compositions, systems, and methods may be used to modify genes involved in the modification of the quantity of lipids and/or the quality of the lipids. Examples of such genes include those involved in the pathways of fatty acid synthesis, e.g., acetyl-CoA carboxylase, fatty acid synthase, 3-ketoacyl_acyl-carrier protein synthase III, glycerol-3-phospate deshydrogenase (G3PDH), Enoyl-acyl carrier protein reductase (Enoyl-ACP-reductase), glycerol-3-phosphate acyltransferase, lysophosphatidic acyl transferase or diacylglycerol acyltransferase, phospholipid:diacylglycerol acyltransferase, phoshatidate phosphatase, fatty acid thioesterase such as palmitoyi protein thioesterase, or malic enzyme activities.

[0857] In further embodiments, it is envisaged to generate diatoms that have increased lipid accumulation. This can be achieved by targeting genes that decrease lipid catabolization. Examples of genes include those involved in the activation of triacylglycerol and free fatty acids, β-oxidation of fatty acids, such as genes of acyl-CoA synthetase, 3-ketoacyl-CoA thiolase, acyl-CoA oxidase activity and phosphoglucomutase.

[0858] In some examples, algae may be modified for production of oil and biofuels, including fatty acids (e.g., fatty esters such as acid methyl esters (FAME) and fatty acid ethyl esters (FAEE)). Examples of methods of modifying microalgae include those described in Stovicek et al. Metab. Eng. Comm., 2015; 2:1; U.S. Pat. No. 8,945,839; and International Patent Publication No. WO 2015/086795.

[0859] In some examples, one or more genes may be introduced (e.g., overexpressed) to the plants (e.g., algae) to produce oils and biofuels (e.g., fatty acids) from a carbon source (e.g., alcohol). Examples of the genes include genes encoding acyl-CoA synthases, ester synthases, thioesterases (e.g., tesA, ‘tesA, tesB, fatB, fatB2, fatB3, fatAl, or fatA), acyl-CoA synthases (e.g., fadD, JadK, BH3103, pfl-4354, EAV15023, fadD1, fadD2, RPC_4074, fadDD35, fadDD22, faa39), ester synthases (e.g., synthase/acyl-CoA:diacylglycerl acyltransferase from Simmondsia chinensis, Acinetobacter sp. ADP, Alcanivorax borkumensis, Pseudomonas aeruginosa, Fundibacter jadensis, Arabidopsis thaliana, or Alkaligenes eutrophus, or variants thereof).

[0860] Additionally or alternatively, one or more genes in the plants (e.g., algae) may be inactivated (e.g., expression of the genes is decreased). For examples, one or more mutations may be introduced to the genes. Examples of such genes include genes encoding acyl-CoA dehydrogenases (e.g., fade), outer membrane protein receptors, and transcriptional regulator (e.g., repressor) of fatty acid biosynthesis (e.g., fabR), pyruvate formate lyases (e.g., pflB), lactate dehydrogenases (e.g., IdhA).

### Organic Acid Production

[0861] In one embodiment, plants may be modified to produce organic acids such as lactic acid. The plants may produce organic acids using sugars, pentose or hexose sugars. To this end, one or more genes may be introduced (e.g., and overexpressed) in the plants. An example of such genes include LDH gene.

[0862] In some examples, one or more genes may be inactivated (e.g., expression of the genes is decreased). For examples, one or more mutations may be introduced to the genes. The genes may include those encoding proteins involved an endogenous metabolic pathway which produces a metabolite other than the organic acid of interest and/or wherein the endogenous metabolic pathway consumes the organic acid.

[0863] Examples of genes that can be modified or introduced include those encoding pyruvate decarboxylases (pdc), fumarate reductases, alcohol dehydrogenases (adh), acetaldehyde dehydrogenases, phosphoenolpyruvate carboxylases (ppc), D-lactate dehydrogenases (d-ldh), L-lactate dehydrogenases (l-ldh), lactate 2-monooxygenases, lactate dehydrogenase, cytochrome-dependent lactate dehydrogenases (e.g., cytochrome B2-dependent L-lactate dehydrogenases).

### Enhancing Plant Properties for Biofuel Production

[0864] In one embodiment, the compositions, systems, and methods are used to alter the properties of the cell wall of plants to facilitate access by key hydrolyzing agents for a more efficient release of sugars for fermentation. By reducing the proportion of lignin in a plant the proportion of cellulose can be increased. In particular embodiments, lignin biosynthesis may be downregulated in the plant so as to increase fermentable carbohydrates.

[0865] In some examples, one or more lignin biosynthesis genes may be down regulated. Examples of such genes include 4-coumarate 3-hydroxylases (C3H), phenylalanine ammonia-lyases (PAL), cinnamate 4-hydroxylases (C4H), hydroxycinnamoyl transferases (HCT), caffeic acid O-methyltransferases (COMT), caffeoyl CoA 3-O-methyltransferases (CCoAOMT), ferulate 5-hydroxylases (F5H), cinnamyl alcohol dehydrogenases (CAD), cinnamoyl CoA-reductases (CCR), 4-coumarate-CoA ligases (4CL), monolignol-lignin-specific glycosyltransferases, and aldehyde dehydrogenases (ALDH), and those described in WO 2008064289.

[0866] In some examples, plant mass that produces lower level of acetic acid during fermentation may be reduced. To this end, genes involved in polysaccharide acetylation (e.g., Cas1L and those described in WO 2010096488) may be inactivated.

### Other Microorganisms for Oils and Biofuel Production

[0867] In one embodiment, microorganisms other than plants may be used for production of oils and biofuels using the compositions, systems, and methods herein. Examples of the microorganisms include those of the genus of Escherichia, Bacillus, Lactobacillus, Rhodococcus, Synechococcus, Synechoystis, Pseudomonas, Aspergillus, Trichoderma, Neurospora, Fusarium, Humicola, Rhizomucor, Kluyveromyces, Pichia, Mucor, Myceliophtora, Penicillium, Phanerochaete, Pleurotus, Trametes, Chrysosporium, Saccharomyces, Stenotrophamonas, Schizosaccharomyces, Yarrowia, or Streptomyces.

### Plant Cultures and Regeneration

[0868] In one embodiment, the modified plants or plant cells may be cultured to regenerate a whole plant which possesses the transformed or modified genotype and thus the desired phenotype. Examples of regeneration techniques include those relying on manipulation of certain phytohormones in a tissue culture growth medium, relying on a biocide and/or herbicide marker which has been introduced together with the desired nucleotide sequences, obtaining from cultured protoplasts, plant callus, explants, organs, pollens, embryos or parts thereof.

### Detecting Modifications in the Plant Genome-Selectable Markers

[0869] When the compositions, systems, and methods are used to modify a plant, suitable methods may be used to confirm and detect the modification made in the plant. In some examples, when a variety of modifications are made, one or more desired modifications or traits resulting from the modifications may be selected and detected. The detection and confirmation may be performed by biochemical and molecular biology techniques such as Southern analysis, PCR, Northern blot, S1 RNase protection, primer-extension or reverse transcriptase-PCR, enzymatic assays, ribozyme activity, gel electrophoresis, Western blot, immunoprecipitation, enzyme-linked immunoassays, in situ hybridization, enzyme staining, and immunostaining.

[0870] In some cases, one or more markers, such as selectable and detectable markers, may be introduced to the plants. Such markers may be used for selecting, monitoring, isolating cells and plants with desired modifications and traits. A selectable marker can confer positive or negative selection and is conditional or non-conditional on the presence of external substrates. Examples of such markers include genes and proteins that confer resistance to antibiotics, such as hygromycin (hpt) and kanamycin (nptII), and genes that confer resistance to herbicides, such as phosphinothricin (bar) and chlorosulfuron (als), enzyme capable of producing or processing a colored substances (e.g., the β-glucuronidase, luciferase, B or C1 genes).

### Applications in Fungi

[0871] The compositions, systems, and methods described herein can be used to perform efficient and cost effective gene or genome interrogation or editing or manipulation in fungi or fungal cells, such as yeast. The approaches and applications in plants may be applied to fungi as well.

[0872] A fungal cell may be any type of eukaryotic cell within the kingdom of fungi, such as phyla of Ascomycota, Basidiomycota, Blastocladiomycota, Chytridiomycota, Glomeromycota, Microsporidia, and Neocallimastigomycota. Examples of fungi or fungal cells in include yeasts, molds, and filamentous fungi.

[0873] In one embodiment, the fungal cell is a yeast cell. A yeast cell refers to any fungal cell within the phyla Ascomycota and Basidiomycota. Examples of yeasts include budding yeast, fission yeast, and mold, S. cerervisiae, Kluyveromyces marxianus, Issatchenkia orientalis, Candida spp. (e.g., Candida albicans), Yarrowia spp. (e.g., Yarrowia lipolytica), Pichia spp. (e.g., Pichia pastoris), Kluyveromyces spp. (e.g., Kluyveromyces lactis and Kluyveromyces marxianus), Neurospora spp. (e.g., Neurospora crassa), Fusarium spp. (e.g., Fusarium oxysporum), and Issatchenkia spp. (e.g., Issatchenkia orientalis, Pichia kudriavzevii and Candida acidothermophilum).

[0874] In one embodiment, the fungal cell is a filamentous fungal cell, which grow in filaments, e.g., hyphae or mycelia. Examples of filamentous fungal cells include Aspergillus spp. (e.g., Aspergillus niger), Trichoderma spp. (e.g., Trichoderma reesei), Rhizopus spp. (e.g., Rhizopus oryzae), and Mortierella spp. (e.g., Mortierella isabellina).

[0875] In one embodiment, the fungal cell is of an industrial strain. Industrial strains include any strain of fungal cell used in or isolated from an industrial process, e.g., production of a product on a commercial or industrial scale. Industrial strain may refer to a fungal species that is typically used in an industrial process, or it may refer to an isolate of a fungal species that may be also used for non-industrial purposes (e.g., laboratory research). Examples of industrial processes include fermentation (e.g., in production of food or beverage products), distillation, biofuel production, production of a compound, and production of a polypeptide. Examples of industrial strains include, without limitation, JAY270 and ATCC4124.

[0876] In one embodiment, the fungal cell is a polyploid cell whose genome is present in more than one copy. Polyploid cells include cells naturally found in a polyploid state, and cells that has been induced to exist in a polyploid state (e.g., through specific regulation, alteration, inactivation, activation, or modification of meiosis, cytokinesis, or DNA replication). A polyploid cell may be a cell whose entire genome is polyploid, or a cell that is polyploid in a particular genomic locus of interest. In some examples, the abundance of nucleic acid component molecule may more often be a rate-limiting component in genome engineering of polyploid cells than in haploid cells, and thus the methods using the composition described herein may take advantage of using certain fungal cell types.

[0877] In one embodiment, the fungal cell is a diploid cell, whose genome is present in two copies. Diploid cells include cells naturally found in a diploid state, and cells that have been induced to exist in a diploid state (e.g., through specific regulation, alteration, inactivation, activation, or modification of meiosis, cytokinesis, or DNA replication). A diploid cell may refer to a cell whose entire genome is diploid, or it may refer to a cell that is diploid in a particular genomic locus of interest.

[0878] In one embodiment, the fungal cell is a haploid cell, whose genome is present in one copy. Haploid cells include cells naturally found in a haploid state, or cells that have been induced to exist in a haploid state (e.g., through specific regulation, alteration, inactivation, activation, or modification of meiosis, cytokinesis, or DNA replication). A haploid cell may refer to a cell whose entire genome is haploid, or it may refer to a cell that is haploid in a particular genomic locus of interest.

[0879] The compositions and systems, and nucleic acid encoding thereof may be introduced to fungi cells using the delivery systems and methods herein. Examples of delivery systems include lithium acetate treatment, bombardment, electroporation, and those described in Kawai et al., 2010, Bioeng Bugs. 2010 November-December; 1(6): 395-403.

[0880] In some examples, a yeast expression vector (e.g., those with one or more regulatory elements) may be used. Examples of such vectors include a centromeric (CEN) sequence, an autonomous replication sequence (ARS), a promoter, such as an RNA Polymerase III promoter, operably linked to a sequence or gene of interest, a terminator such as an RNA polymerase III terminator, an origin of replication, and a marker gene (e.g., auxotrophic, antibiotic, or other selectable markers). Examples of expression vectors for use in yeast may include plasmids, yeast artificial chromosomes, 2 plasmids, yeast integrative plasmids, yeast replicative plasmids, shuttle vectors, and episomal plasmids.

### Biofuel and Materials Production by Fungi

[0881] In one embodiment, the compositions, systems, and methods may be used for generating modified fungi for biofuel and material productions. For instance, the modified fungi for production of biofuel or biopolymers from fermentable sugars and optionally to be able to degrade plant-derived lignocellulose derived from agricultural waste as a source of fermentable sugars. Foreign genes required for biofuel production and synthesis may be introduced in to fungi In some examples, the genes may encode enzymes involved in the conversion of pyruvate to ethanol or another product of interest, degrade cellulose (e.g., cellulase), endogenous metabolic pathways which compete with the biofuel production pathway.

[0882] In some examples, the compositions, systems, and methods may be used for generating and/or selecting yeast strains with improved xylose or cellobiose utilization, isoprenoid biosynthesis, and/or lactic acid production. One or more genes involved in the metabolism and synthesis of these compounds may be modified and/or introduced to yeast cells. Examples of the methods and genes include lactate dehydrogenase, PDC1 and PDC5, and those described in Ha, S. J., et al. (2011) Proc. Natl. Acad. Sci. USA 108(2):504-9 and Galazka, J. M., et al. (2010) Science 330(6000):84-6; Jakočiūnas T et al., Metab Eng. 2015 March; 28:213-222; Stovicek V, et al., FEMS Yeast Res. 2017 Aug. 1; 17(5).

### Improved Plants and Yeast Cells

[0883] The present disclosure further provides improved plants and fungi. The improved and fungi may comprise one or more genes introduced, and/or one or more genes modified by the compositions, systems, and methods herein. The improved plants and fungi may have increased food or feed production (e.g., higher protein, carbohydrate, nutrient or vitamin levels), oil and biofuel production (e.g., methanol, ethanol), tolerance to pests, herbicides, drought, low or high temperatures, excessive water, etc.

[0884] The plants or fungi may have one or more parts that are improved, e.g., leaves, stems, roots, tubers, seeds, endosperm, ovule, and pollen. The parts may be viable, nonviable, regeneratable, and/or non-regeneratable.

[0885] The improved plants and fungi may include gametes, seeds, embryos, either zygotic or somatic, progeny and/or hybrids of improved plants and fungi. The progeny may be a clone of the produced plant or fungi, or may result from sexual reproduction by crossing with other individuals of the same species to introgress further desirable traits into their offspring. The cell may be in vivo or ex vivo in the cases of multicellular organisms, particularly plants.

### Further Applications in Plants

[0886] Further applications of the compositions, systems, and methods on plants and fungi include visualization of genetic element dynamics (e.g., as described in Chen B, et al., Cell. 2013 Dec. 19; 155(7):1479-91), targeted gene disruption positive-selection in vitro and in vivo (as described in Malina A et al., Genes Dev. 2013 Dec. 1; 27(23):2602-14), epigenetic modification such as using fusion of TnpB polypeptide and histone-modifying enzymes (e.g., as described in Rusk N, Nat Methods. 2014 January; 11(1):28), identifying transcription regulators (e.g., as described in Waldrip Z J, Epigenetics. 2014 September; 9(9):1207-11), anti-virus treatment for both RNA and DNA viruses (e.g., as described in Price A A, et al., Proc Natl Acad Sci USA. 2015 May 12; 112(19):6164-9; Ramanan V et al., Sci Rep. 2015 Jun. 2; 5:10833), alteration of genome complexity such as chromosome numbers (e.g., as described in Karimi-Ashtiyani R et al., Proc Natl Acad Sci USA. 2015 Sep. 8; 112(36):11211-6; Anton T, et al., Nucleus. 2014 March-April; 5(2):163-72), self-cleavage of the composition for controlled inactivation/activation (e.g., as described Sugano S S et al., Plant Cell Physiol. 2014 March; 55(3):475-81), multiplexed gene editing (as described in Kabadi A M et al., Nucleic Acids Res. 2014 Oct. 29; 42(19):e147), development of kits for multiplex genome editing (as described in Xing H L et al., BMC Plant Biol. 2014 Nov. 29; 14:327), starch production (as described in Hebelstrup K H et al., Front Plant Sci. 2015 Apr. 23; 6:247), targeting multiple genes in a family or pathway (e.g., as described in Ma X et al., Mol Plant. 2015 August; 8(8):1274-84), regulation of non-coding genes and sequences (e.g., as described in Lowder L G, et al., Plant Physiol. 2015 October; 169(2):971-85), editing genes in trees (e.g., as described in Belhaj K et al., Plant Methods. 2013 Oct. 11; 9(1):39; Harrison M M, et al., Genes Dev. 2014 Sep. 1; 28(17):1859-72; Zhou X et al., New Phytol. 2015 October; 208(2):298-301), introduction of mutations for resistance to host-specific pathogens and pests.

[0887] Additional examples of modifications of plants and fungi that may be performed using the compositions, systems, and methods include analogous modifications described in International Patent Publication Nos. WO2016/099887, WO2016/025131, WO2016/073433, WO2017/066175, WO2017/100158, WO 2017/105991, WO2017/106414, WO2016/100272, WO2016/100571, WO 2016/100568, WO 2016/100562, and WO 2017/019867.

### Applications in Non-Human Animals

[0888] The compositions, systems, and methods may be used to study and modify non-human animals, e.g., introducing desirable traits and disease resilience, treating diseases, facilitating breeding, etc. In one embodiment, the compositions, systems, and methods may be used to improve breeding and introducing desired traits, e.g., increasing the frequency of trait-associated alleles, introgression of alleles from other breeds/species without linkage drag, and creation of de novo favorable alleles. Genes and other genetic elements that can be targeted may be screened and identified. Examples of application and approaches include those described in Tait-Burkard C, et al., Livestock 2.0—genome editing for fitter, healthier, and more productive farmed animals. Genome Biol. 2018 Nov. 26; 19(1):204; Lillico S, Agricultural applications of genome editing in farmed animals. Transgenic Res. 2019 August; 28(Suppl 2):57-60; Houston R D, et al., Harnessing genomics to fast-track genetic improvement in aquaculture. Nat Rev Genet. 2020 Apr. 16. doi: 10.1038/s41576-020-0227-y, which are incorporated herein by reference in their entireties. Applications described in other sections such as therapeutic, diagnostic, etc. can also be used on the animals herein.

[0889] The compositions, systems, and methods may be used on animals such as fish, amphibians, reptiles, mammals, and birds. The animals may be farm and agriculture animals, or pets. Examples of farm and agriculture animals include horses, goats, sheep, swine, cattle, llamas, alpacas, and birds, e.g., chickens, turkeys, ducks, and geese. The animals may be a non-human primate, e.g., baboons, capuchin monkeys, chimpanzees, lemurs, macaques, marmosets, tamarins, spider monkeys, squirrel monkeys, and vervet monkeys. Examples of pets include dogs, cats horses, wolfs, rabbits, ferrets, gerbils, hamsters, chinchillas, fancy rats, guinea pigs, canaries, parakeets, and parrots.

[0890] In one embodiment, one or more genes may be introduced (e.g., overexpressed) in the animals to obtain or enhance one or more desired traits. Growth hormones, insulin-like growth factors (IGF-1) may be introduced to increase the growth of the animals, e.g., pigs or salmon (such as described in Pursel V G et al., J Reprod Fertil Suppl. 1990; 40:235-45; Waltz E, Nature. 2017; 548:148). Fat-1 gene (e.g., from C. elegans) may be introduced for production of larger ratio of n-3 to n-6 fatty acids may be induced, e.g. in pigs (such as described in Li M, et al., Genetics. 2018; 8:1747-54). Phytase (e.g., from E. coli) xylanase (e.g., from Aspergillus niger), beta-glucanase (e.g., from Bacillus lichenformis) may be introduced to reduce the environmental impact through phosphorous and nitrogen release reduction, e.g. in pigs (such as described in Golovan S P, et al., Nat Biotechnol. 2001; 19:741-5; Zhang X et al., elife. 2018). snucleic acid component decoy may be introduced to induce avian influenza resilience e.g. in chicken (such as described in Lyall et al., Science. 2011; 331:223-6). Lysozyme or lysostaphin may be introduced to induce mastitis resilience e.g., in goat and cow (such as described in Maga E A et al., Foodborne Pathog Dis. 2006; 3:384-92; Wall R J, et al., Nat Biotechnol. 2005; 23:445-51). Histone deacetylase such as HDAC6 may be introduced to induce PRRSV resilience, e.g., in pig (such as described in Lu T., et al., PLoS One. 2017; 12:e0169317). CD163 may be modified (e.g., inactivated or removed) to introduce PRRSV resilience in pigs (such as described in Prather R S et al., Sci Rep. 2017 Oct. 17; 7(1):13371). Similar approaches may be used to inhibit or remove viruses and bacteria (e.g., Swine Influenza Virus (SIV) strains which include influenza C and the subtypes of influenza A known as H1N1, H1N2, H2N1, H3N1, H3N2, and H2N3, as well as pneumonia, meningitis and oedema) that may be transmitted from animals to humans.

[0891] In one embodiment, one or more genes may be modified or edited for disease resistance and production traits. Myostatin (e.g., GDF8) may be modified to increase muscle growth, e.g., in cow, sheep, goat, catfish, and pig (such as described in Crispo M et al., PLoS One. 2015; 10:e0136690; Wang X, et al., Anim Genet. 2018; 49:43-51; Khalil K, et al., Sci Rep. 2017; 7:7301; Kang J-D, et al., RSC Adv. 2017; 7:12541-9). Pc POLLED may be modified to induce horlessness, e.g., in cow (such as described in Carlson D F et al., Nat Biotechnol. 2016; 34:479-81). KISSIR may be modified to induce boretaint (hormone release during sexual maturity leading to undesired meat taste), e.g., in pigs. Dead end protein (dnd) may be modified to induce sterility, e.g., in salmon (such as described in Wargelius A, et al., Sci Rep. 2016; 6:21284). Nano2 and DDX may be modified to induce sterility (e.g., in surrogate hosts), e.g., in pigs and chicken (such as described Park K-E, et al., Sci Rep. 2017; 7:40176; Taylor L et al., Development. 2017; 144:928-34). CD163 may be modified to induce PRRSV resistance, e.g., in pigs (such as described in Whitworth K M, et al., Nat Biotechnol. 2015; 34:20-2). RELA may be modified to induce ASFV resilience, e.g., in pigs (such as described in Lillico S G, et al., Sci Rep. 2016; 6:21645). CD18 may be modified to induce Mannheimia (Pasteurella) haemolytica resilience, e.g., in cows (such as described in Shanthalingam S, et al., roc Natl Acad Sci USA. 2016; 113:13186-90). NRAMP1 may be modified to induce tuberculosis resilience, e.g., in cows (such as described in Gao Y et al., Genome Biol. 2017; 18:13). Endogenous retrovirus genes may be modified or removed for xenotransplantation such as described in Yang L, et al. Science. 2015; 350:1101-4; Niu D et al., Science. 2017; 357:1303-7). Negative regulators of muscle mass (e.g., Myostatin) may be modified (e.g., inactivated) to increase muscle mass, e.g., in dogs (as described in Zou Q et al., J Mol Cell Biol. 2015 December; 7(6):580-3).

[0892] Animals such as pigs with severe combined immunodeficiency (SCID) may generated (e.g., by modifying RAG2) to provide useful models for regenerative medicine, xenotransplantation (discussed also elsewhere herein), and tumor development. Examples of methods and approaches include those described Lee K, et al., Proc Natl Acad Sci USA. 2014 May 20; 111(20):7260-5; and Schomberg et al. FASEB Journal, April 2016; 30(1):Suppl 571.1.

[0893] SNPs in the animals may be modified. Examples of methods and approaches include those described Tan W. et al., Proc Natl Acad Sci USA. 2013 Oct. 8; 110(41):16526-31; Mali P, et al., Science. 2013 Feb. 15; 339(6121):823-6.

[0894] Stem cells (e.g., induced pluripotent stem cells) may be modified and differentiated into desired progeny cells, e.g., as described in Heo Y T et al., Stem Cells Dev. 2015 Feb. 1; 24(3):393-402.

[0895] Profile analysis (such as Igenity) may be performed on animals to screen and identify genetic variations related to economic traits. The genetic variations may be modified to introduce or improve the traits, such as carcass composition, carcass quality, maternal and reproductive traits and average daily gain.

### Detection Compositions and Methods of Detection

[0896] In another aspect, embodiments disclosed herein are directed to polynucleotide detection compositions, systems and methods. The detection composition may comprise any of the TnpB polypeptides and any one or more ωRNAs discussed above. In the addition, the compositions and system may comprise a detection construct. In one example embodiment, the detection construct comprises at least a portion of single-stranded polynucleotide. The one or more ωRNAs are configured to bind a target sequence on a target polypeptide. Binding of the TnpB complex to the target sequence activates TnpB cleavage activity and may further activate TnpB collateral activity whereby TnpB subsequently cleaves non-target single-stranded polynucleotides in an ωRNA-independent fashion. Accordingly, the detection construct can be configured so that a detectable signal is generated upon cleavage of the single-stranded portion of the detection constructs thereby indicating the present of the target sequence in a sample. Example detection constructs are discussed in further detail below. In further example embodiments, the compositions may further comprise amplification reagents. Amplification reagents may comprise primers and polymerase and/or reverse transcriptases needed to amplify the target sequence. In on example embodiment, the amplification reagents are isothermal amplification reagents. In other example embodiments, the compositions and systems may further comprise quick extraction solutions that allow for detection of target sequences in crude samples or with minimal purification prior to amplification and/or detection.

### Detection Construct

[0897] The systems and methods described herein comprise a detection construct. As used herein, a “detection construct” refers to a molecule that can be cleaved or otherwise deactivated by an activated TnpB system protein described herein. The term “detection construct” may also be referred to in the alternative as a “masking construct.” Depending on the nuclease activity of the TnpB protein and the methods utilized, the masking construct may be a RNA-based masking construct or a DNA-based masking construct. The Nucleic Acid-based masking constructs comprises a nucleic acid element that is cleavable by a TnpB protein. Cleavage of the nucleic acid element releases agents or produces conformational changes that allow a detectable signal to be produced. Example constructs demonstrating how the nucleic acid element may be used to prevent or mask generation of detectable signal are described below and embodiments of the invention comprise variants of the same. Prior to cleavage, or when the masking construct is in an ‘active’ state, the masking construct blocks the generation or detection of a positive detectable signal. In one embodiment, detection constructs are designed for cutting motifs of particular TnpB proteins.

[0898] It will be understood that in certain example embodiments a minimal background signal may be produced in the presence of an active masking construct. A positive detectable signal may be any signal that can be detected using optical, fluorescent, chemiluminescent, electrochemical or other detection methods known in the art. The term “positive detectable signal” is used to differentiate from other detectable signals that may be detectable in the presence of the masking construct. For example, In one embodiment a first signal may be detected when the masking agent is present or when a TnpB system has not been activated (i.e. a negative detectable signal), which then converts to a second signal (e.g. the positive detectable signal) upon detection of the target molecules and cleavage or deactivation of the masking agent, or upon activation of the TnpB protein. The positive detectable signal, then, is a signal detected upon activation of the TnpB protein, and may be, in a colorimetric or fluorescent assay, a decrease in fluorescence or color relative to a control or an increase in fluorescence or color relative to a control, depending on the configuration of the lateral flow substrate, and as described further herein.

[0899] In certain example embodiments, the masking construct may comprise a HCR initiator sequence and a cutting motif, or a cleavable structural element, such as a loop or hairpin, that prevents the initiator from initiating the HCR reaction. The cutting motif may be preferentially cut by one of the activated TnpB effector proteins. Upon cleavage of the cutting motif or structure element by an activated TnpB protein, the initiator is then released to trigger the HCR reaction, detection thereof indicating the presence of one or more targets in the sample. In certain example embodiments, the masking construct comprises a hairpin with a RNA loop. When an activated TnpB protein cuts the RNA loop, the initiator can be released to trigger the HCR reaction.

[0900] In certain example embodiments, the masking construct may suppress generation of a gene product. The gene product may be encoded by a reporter construct that is added to the sample. The masking construct may be an interfering RNA involved in a RNA interference pathway, such as a short hairpin RNA (shRNA) or small interfering RNA (siRNA). The masking construct may also comprise microRNA (miRNA). While present, the masking construct suppresses expression of the gene product. The gene product may be a fluorescent protein or other RNA transcript or proteins that would otherwise be detectable by a labeled probe, aptamer, or antibody but for the presence of the masking construct. Upon activation of the effector protein the masking construct is cleaved or otherwise silenced allowing for expression and detection of the gene product as the positive detectable signal. In preferred embodiments, the masking constructs comprise two or more detectable signals, for example, fluorescent signals, that can be read on different channels of a fluorimeter.

[0901] In specific embodiments, the masking construct comprises a silencing RNA that suppresses generation of a gene product encoded by a reporting construct, wherein the gene product generates the detectable positive signal when expressed.

[0902] In certain example embodiments, the masking construct may sequester one or more reagents needed to generate a detectable positive signal such that release of the one or more reagents from the masking construct results in generation of the detectable positive signal. The one or more reagents may combine to produce a colorimetric signal, a chemiluminescent signal, a fluorescent signal, or any other detectable signal and may comprise any reagents known to be suitable for such purposes. In certain example embodiments, the one or more reagents are sequestered by RNA aptamers that bind the one or more reagents. The one or more reagents are released when the effector protein is activated upon detection of a target molecule and the RNA or DNA aptamers are degraded.

[0903] In certain example embodiments, the masking construct may be immobilized on a solid substrate in an individual discrete volume (defined further below) and sequesters a single reagent. For example, the reagent may be a bead comprising a dye. When sequestered by the immobilized reagent, the individual beads are too diffuse to generate a detectable signal, but upon release from the masking construct are able to generate a detectable signal, for example by aggregation or simple increase in solution concentration. In certain example embodiments, the immobilized masking agent is a RNA- or DNA-based aptamer that can be cleaved by the activated effector protein upon detection of a target molecule.

[0904] In certain other example embodiments, the masking construct binds to an immobilized reagent in solution thereby blocking the ability of the reagent to bind to a separate labeled binding partner that is free in solution. Thus, upon application of a washing step to a sample, the labeled binding partner can be washed out of the sample in the absence of a target molecule. However, if the effector protein is activated, the masking construct is cleaved to a degree sufficient to interfere with the ability of the masking construct to bind the reagent thereby allowing the labeled binding partner to bind to the immobilized reagent. Thus, the labeled binding partner remains after the wash step indicating the presence of the target molecule in the sample. In certain aspects, the masking construct that binds the immobilized reagent is a DNA or RNA aptamer. The immobilized reagent may be a protein and the labeled binding partner may be a labeled antibody. Alternatively, the immobilized reagent may be streptavidin and the labeled binding partner may be labeled biotin. The label on the binding partner used in the above embodiments may be any detectable label known in the art. In addition, other known binding partners may be used in accordance with the overall design described herein.

[0905] In certain example embodiments, the masking construct may comprise a ribozyme. Ribozymes are RNA molecules having catalytic properties. Ribozymes, both naturally and engineered, comprise or consist of RNA that may be targeted by the effector proteins disclosed herein. The ribozyme may be selected or engineered to catalyze a reaction that either generates a negative detectable signal or prevents generation of a positive control signal. Upon deactivation of the ribozyme by the activated effector protein the reaction generating a negative control signal, or preventing generation of a positive detectable signal, is removed thereby allowing a positive detectable signal to be generated. In one example embodiment, the ribozyme may catalyze a colorimetric reaction causing a solution to appear as a first color. When the ribozyme is deactivated the solution then turns to a second color, the second color being the detectable positive signal. An example of how ribozymes can be used to catalyze a colorimetric reaction are described in Zhao et al. “Signal amplification of glucosamine-6-phosphate based on ribozyme glmS,” Biosens Bioelectron. 2014; 16:337-42, and provide an example of how such a system could be modified to work in the context of the embodiments disclosed herein. Alternatively, ribozymes, when present can generate cleavage products of, for example, RNA transcripts. Thus, detection of a positive detectable signal may comprise detection of non-cleaved RNA transcripts that are only generated in the absence of the ribozyme.

[0906] In one embodiment, the masking construct may be a ribozyme that generates a negative detectable signal, and wherein a positive detectable signal is generated when the ribozyme is deactivated.

[0907] In certain example embodiments, the one or more reagents is a protein, such as an enzyme, capable of facilitating generation of a detectable signal, such as a colorimetric, chemiluminescent, or fluorescent signal, that is inhibited or sequestered such that the protein cannot generate the detectable signal by the binding of one or more DNA or RNA aptamers to the protein. Upon activation of the effector proteins disclosed herein, the DNA or RNA aptamers are cleaved or degraded to an extent that they no longer inhibit the protein's ability to generate the detectable signal. In certain example embodiments, the aptamer is a thrombin inhibitor aptamer. In certain example embodiments the thrombin inhibitor aptamer has a sequence of GGGAACAAAGCUGAAGUACUUACCC (SEQ ID NO: 64,308). When this aptamer is cleaved, thrombin will become active and will cleave a peptide colorimetric or fluorescent substrate. In certain example embodiments, the colorimetric substrate is para-nitroanilide (pNA) covalently linked to the peptide substrate for thrombin. Upon cleavage by thrombin, pNA is released and becomes yellow in color and easily visible to the eye. In certain example embodiments, the fluorescent substrate is 7-amino-4-methylcoumarin a blue fluorophore that can be detected using a fluorescence detector. Inhibitory aptamers may also be used for horseradish peroxidase (HRP), beta-galactosidase, or calf alkaline phosphatase (CAP) and within the general principals laid out above.

[0908] In one embodiment, RNAse or DNAse activity is detected colorimetrically via cleavage of enzyme-inhibiting aptamers. One potential mode of converting DNAse or RNAse activity into a colorimetric signal is to couple the cleavage of a DNA or RNA aptamer with the re-activation of an enzyme that is capable of producing a colorimetric output. In the absence of RNA or DNA cleavage, the intact aptamer will bind to the enzyme target and inhibit its activity. The advantage of this readout system is that the enzyme provides an additional amplification step: once liberated from an aptamer via collateral activity (e.g. TnpB collateral activity), the colorimetric enzyme will continue to produce colorimetric product, leading to a multiplication of signal.

[0909] In one embodiment, an existing aptamer that inhibits an enzyme with a colorimetric readout is used. Several aptamer/enzyme pairs with colorimetric readouts exist, such as thrombin, protein C, neutrophil elastase, and subtilisin. These proteases have colorimetric substrates based upon pNA and are commercially available. In one embodiment, a novel aptamer targeting a common colorimetric enzyme is used. Common and robust enzymes, such as beta-galactosidase, horseradish peroxidase, or calf intestinal alkaline phosphatase, could be targeted by engineered aptamers designed by selection strategies such as SELEX. Such strategies allow for quick selection of aptamers with nanomolar binding efficiencies and could be used for the development of additional enzyme/aptamer pairs for colorimetric readout.

[0910] In one embodiment, the masking construct may be a DNA or RNA aptamer and/or may comprise a DNA or RNA-tethered inhibitor.

[0911] In one embodiment, the masking construct may comprise a DNA or RNA oligonucleotide to which a detectable ligand and a masking component are attached.

[0912] In one embodiment, RNAse or DNase activity is detected colorimetrically via cleavage of RNA-tethered inhibitors. Many common colorimetric enzymes have competitive, reversible inhibitors: for example, beta-galactosidase can be inhibited by galactose. Many of these inhibitors are weak, but their effect can be increased by increases in local concentration. By linking local concentration of inhibitors to DNase RNAse activity, colorimetric enzyme and inhibitor pairs can be engineered into DNase and RNAse sensors. The colorimetric DNase or RNAse sensor based upon small-molecule inhibitors involves three components: the colorimetric enzyme, the inhibitor, and a bridging RNA or DNA that is covalently linked to both the inhibitor and enzyme, tethering the inhibitor to the enzyme. In the uncleaved configuration, the enzyme is inhibited by the increased local concentration of the small molecule; when the DNA or RNA is cleaved (e.g. by TnpB collateral cleavage), the inhibitor will be released and the colorimetric enzyme will be activated.

[0913] In one embodiment, the aptamer or DNA- or RNA-tethered inhibitor may sequester an enzyme, wherein the enzyme generates a detectable signal upon release from the aptamer or DNA or RNA tethered inhibitor by acting upon a substrate. In one embodiment, the aptamer may be an inhibitor aptamer that inhibits an enzyme and prevents the enzyme from catalyzing generation of a detectable signal from a substance. In one embodiment, the DNA- or RNA-tethered inhibitor may inhibit an enzyme and may prevent the enzyme from catalyzing generation of a detectable signal from a substrate.

[0914] In one embodiment, RNAse activity is detected colorimetrically via formation and/or activation of G-quadruplexes. G quadruplexes in DNA can complex with heme (iron (III)-protoporphyrin IX) to form a zDNAzyme with peroxidase activity. When supplied with a peroxidase substrate (e.g. ABTS: (2,2′-Azinobis [3-ethylbenzothiazoline-6-sulfonic acid]-diammonium salt)), the G-quadruplex-heme complex in the presence of hydrogen peroxide causes oxidation of the substrate, which then forms a green color in solution. An example G-quadruplex forming DNA sequence is: GGGTAGGGCGGGTTGGGA (SEQ ID NO: 64,309). By hybridizing an additional DNA or RNA sequence, referred to herein as a “staple,” to this DNA aptamer, formation of the G-quadraplex structure will be limited. Upon collateral activation, the staple will be cleaved allowing the G quadraplex to form and heme to bind. This strategy is particularly appealing because color formation is enzymatic, meaning there is additional amplification beyond collateral activation.

[0915] In one embodiment, the masking construct may comprise an RNA oligonucleotide designed to bind a G-quadruplex forming sequence, wherein a G-quadruplex structure is formed by the G-quadruplex forming sequence upon cleavage of the masking construct, and wherein the G-quadruplex structure generates a detectable positive signal.

[0916] In certain example embodiments, the masking construct may be immobilized on a solid substrate in an individual discrete volume (defined further below) and sequesters a single reagent. For example, the reagent may be a bead comprising a dye. When sequestered by the immobilized reagent, the individual beads are too diffuse to generate a detectable signal, but upon release from the masking construct are able to generate a detectable signal, for example by aggregation or simple increase in solution concentration. In certain example embodiments, the immobilized masking agent is a DNA- or RNA-based aptamer that can be cleaved by the activated effector protein upon detection of a target molecule.

[0917] In one example embodiment, the masking construct comprises a detection agent that changes color depending on whether the detection agent is aggregated or dispersed in solution. For example, certain nanoparticles, such as colloidal gold, undergo a visible purple to red color shift as they move from aggregates to dispersed particles. Accordingly, in certain example embodiments, such detection agents may be held in aggregate by one or more bridge molecules. At least a portion of the bridge molecule comprises RNA or DNA. Upon activation of the effector proteins disclosed herein, the RNA or DNA portion of the bridge molecule is cleaved allowing the detection agent to disperse and resulting in the corresponding change in color. In certain example embodiments, the detection agent is a colloidal metal. The colloidal metal material may include water-insoluble metal particles or metallic compounds dispersed in a liquid, a hydrosol, or a metal sol. The colloidal metal may be selected from the metals in groups IA, IB, IIB and IIIB of the periodic table, as well as the transition metals, especially those of group VIII. Preferred metals include gold, silver, aluminum, ruthenium, zinc, iron, nickel and calcium. Other suitable metals also include the following in all of their various oxidation states: lithium, sodium, magnesium, potassium, scandium, titanium, vanadium, chromium, manganese, cobalt, copper, gallium, strontium, niobium, molybdenum, palladium, indium, tin, tungsten, rhenium, platinum, and gadolinium. The metals are preferably provided in ionic form, derived from an appropriate metal compound, for example the Al3+, Ru3+, Zn2+, Fe3+, Ni2+ and Ca2+ ions.

[0918] When the RNA or DNA bridge is cut by the activated TnpB polypeptide, the aforementioned color shift is observed. In certain example embodiments the particles are colloidal metals. In certain other example embodiments, the colloidal metal is a colloidal gold. In certain example embodiments, the colloidal nanoparticles are 15 nm gold nanoparticles (AuNPs). Due to the unique surface properties of colloidal gold nanoparticles, maximal absorbance is observed at 520 nm when fully dispersed in solution and appear red in color to the naked eye. Upon aggregation of AuNPs, they exhibit a red-shift in maximal absorbance and appear darker in color, eventually precipitating from solution as a dark purple aggregate. In certain example embodiments the nanoparticles are modified to include DNA linkers extending from the surface of the nanoparticle. Individual particles are linked together by single-stranded RNA (ssRNA) or single-stranded DNA (ssDNA) bridges that hybridize on each end to at least a portion of the DNA linkers. Thus, the nanoparticles will form a web of linked particles and aggregate, appearing as a dark precipitate. Upon activation of the TnpB polypeptides disclosed herein, the ssRNA or ssDNA bridge will be cleaved, releasing the AU NPS from the linked mesh and produce a visible red color. Example DNA linkers and bridge sequences are listed below. Thiol linkers on the end of the DNA linkers may be used for surface conjugation to the AuNPS. Other forms of conjugation may be used. In certain example embodiments, two populations of AuNPs may be generated, one for each DNA linker. This will help facilitate proper binding of the ssRNA bridge with proper orientation. In certain example embodiments, a first DNA linker is conjugated by the 3′ end while a second DNA linker is conjugated by the 5′ end.

[0919] In certain other example embodiments, the masking construct may comprise an RNA or DNA oligonucleotide to which are attached a detectable label and a masking agent of that detectable label. An example of such a detectable label/masking agent pair is a fluorophore and a quencher of the fluorophore. Quenching of the fluorophore can occur as a result of the formation of a non-fluorescent complex between the fluorophore and another fluorophore or non-fluorescent molecule. This mechanism is known as ground-state complex formation, static quenching, or contact quenching. Accordingly, the RNA or DNA oligonucleotide may be designed so that the fluorophore and quencher are in sufficient proximity for contact quenching to occur. Fluorophores and their cognate quenchers are known in the art and can be selected for this purpose by one having ordinary skill in the art. The particular fluorophore/quencher pair is not critical in the context of this invention, only that selection of the fluorophore/quencher pairs ensures masking of the fluorophore. Upon activation of the effector proteins disclosed herein, the RNA or DNA oligonucleotide is cleaved thereby severing the proximity between the fluorophore and quencher needed to maintain the contact quenching effect. Accordingly, detection of the fluorophore may be used to determine the presence of a target molecule in a sample.

[0920] In certain other example embodiments, the masking construct may comprise one or more RNA oligonucleotides to which are attached one or more metal nanoparticles, such as gold nanoparticles. In one embodiment, the masking construct comprises a plurality of metal nanoparticles crosslinked by a plurality of RNA or DNA oligonucleotides forming a closed loop. In one embodiment, the masking construct comprises three gold nanoparticles crosslinked by three RNA or DNA oligonucleotides forming a closed loop. In one embodiment, the cleavage of the RNA or DNA oligonucleotides by the TnpB protein leads to a detectable signal produced by the metal nanoparticles.

[0921] In certain other example embodiments, the masking construct may comprise one or more RNA or DNA oligonucleotides to which are attached one or more quantum dots. In one embodiment, the cleavage of the RNA or DNA oligonucleotides by the TnpB protein leads to a detectable signal produced by the quantum dots.

[0922] In one example embodiment, the masking construct may comprise a quantum dot. The quantum dot may have multiple linker molecules attached to the surface. At least a portion of the linker molecule comprises RNA or DNA. The linker molecule is attached to the quantum dot at one end and to one or more quenchers along the length or at terminal ends of the linker such that the quenchers are maintained in sufficient proximity for quenching of the quantum dot to occur. The linker may be branched. As above, the quantum dot/quencher pair is not critical, only that selection of the quantum dot/quencher pair ensures masking of the fluorophore. Quantum dots and their cognate quenchers are known in the art and can be selected for this purpose by one having ordinary skill in the art. Upon activation of the effector proteins disclosed herein, the RNA or DNA portion of the linker molecule is cleaved thereby eliminating the proximity between the quantum dot and one or more quenchers needed to maintain the quenching effect. In certain example embodiments the quantum dot is streptavidin conjugated. RNA or DNA are attached via biotin linkers and recruit quenching molecules with the sequences /5Biosg/UCUCGUACGUUC/3IAbRQSp/ (SEQ ID NO: 64,310) or /5Biosg/UCUCGUACGUUCUCUCGUACGUUC/3IAbRQSp/ (SEQ ID NO: 64,311) where /5Biosg/ is a biotin tag and /31AbRQSp/ is an Iowa black quencher (Iowa Black FQ). Upon cleavage, by the activated effectors disclosed herein the quantum dot will fluoresce visibly.

[0923] In specific embodiments, the detectable ligand may be a fluorophore and the masking component may be a quencher molecule.

[0924] In a similar fashion, fluorescence energy transfer (FRET) may be used to generate a detectable positive signal. FRET is a non-radiative process by which a photon from an energetically excited fluorophore (i.e. “donor fluorophore”) raises the energy state of an electron in another molecule (i.e. “the acceptor”) to higher vibrational levels of the excited singlet state. The donor fluorophore returns to the ground state without emitting a fluoresce characteristic of that fluorophore. The acceptor can be another fluorophore or non-fluorescent molecule. If the acceptor is a fluorophore, the transferred energy is emitted as fluorescence characteristic of that fluorophore. If the acceptor is a non-fluorescent molecule the absorbed energy is loss as heat. Thus, in the context of the embodiments disclosed herein, the fluorophore/quencher pair is replaced with a donor fluorophore/acceptor pair attached to the oligonucleotide molecule. When intact, the masking construct generates a first signal (negative detectable signal) as detected by the fluorescence or heat emitted from the acceptor. Upon activation of the effector proteins disclosed herein the RNA oligonucleotide is cleaved and FRET is disrupted such that fluorescence of the donor fluorophore is now detected (positive detectable signal).

[0925] In certain example embodiments, the masking construct comprises the use of intercalating dyes which change their absorbance in response to cleavage of long RNAs or DNAs to short nucleotides. Several such dyes exist. For example, pyronine-Y will complex with RNA and form a complex that has an absorbance at 572 nm. Cleavage of the RNA results in loss of absorbance and a color change. Methylene blue may be used in a similar fashion, with changes in absorbance at 688 nm upon RNA cleavage. Accordingly, in certain example embodiments the masking construct comprises a RNA and intercalating dye complex that changes absorbance upon the cleavage of RNA by the effector proteins disclosed herein.

[0926] In certain example embodiments, the masking construct may comprise an initiator for an HCR reaction. See e.g. Dirks and Pierce. PNAS 101, 15275-15728 (2004). HCR reactions utilize the potential energy in two hairpin species. When a single-stranded initiator having a portion of complementary to a corresponding region on one of the hairpins is released into the previously stable mixture, it opens a hairpin of one speces. This process, in turn, exposes a single-stranded region that opens a hairpin of the other species. This process, in turn, exposes a single stranded region identical to the original initiator. The resulting chain reaction may lead to the formation of a nicked double helix that grows until the hairpin supply is exhausted. Detection of the resulting products may be done on a gel or colorimetrically. Example colorimetric detection methods include, for example, those disclosed in Lu et al. “Ultra-sensitive colorimetric assay system based on the hybridization chain reaction-triggered enzyme cascade amplification ACS Appl Mater Interfaces, 2017, 9(1):167-175, Wang et al. “An enzyme-free colorimetric assay using hybridization chain reaction amplification and split aptamers” Analyst 2015, 150, 7657-7662, and Song et al. “Non-covalent fluorescent labeling of hairpin DNA probe coupled with hybridization chain reaction for sensitive DNA detection.” Applied Spectroscopy, 70(4): 686-694 (2016).

[0927] In certain example embodiments, the masking construct suppresses generation of a detectable positive signal until cleaved, or modified by an activated TnpB protein. In one embodiment, the masking construct may suppress generation of a detectable positive signal by masking the detectable positive signal, or generating a detectable negative signal instead.

### Amplification Reagents

[0928] In certain example embodiments, target RNAs and/or DNAs may be amplified prior to activating the CRISPR effector protein. Any suitable RNA or DNA amplification technique may be used. In certain example embodiments, the RNA or DNA amplification is an isothermal amplification. In certain example embodiments, the isothermal amplification may be nucleic-acid sequenced-based amplification (NASBA), recombinase polymerase amplification (RPA), loop-mediated isothermal amplification (LAMP), strand displacement amplification (SDA), helicase-dependent amplification (HDA), or nicking enzyme amplification reaction (NEAR). In certain example embodiments, non-isothermal amplification methods may be used which include, but are not limited to, PCR, multiple displacement amplification (MDA), rolling circle amplification (RCA), ligase chain reaction (LCR), or ramification amplification method (RAM).

[0929] In certain example embodiments, the RNA or DNA amplification is NASBA, which is initiated with reverse transcription of target RNA by a sequence-specific reverse primer to create a RNA/DNA duplex. RNase H is then used to degrade the RNA template, allowing a forward primer containing a promoter, such as the T7 promoter, to bind and initiate elongation of the complementary strand, generating a double-stranded DNA product. The RNA polymerase promoter-mediated transcription of the DNA template then creates copies of the target RNA sequence. Importantly, each of the new target RNAs can be detected by the guide RNAs thus further enhancing the sensitivity of the assay. Binding of the target RNAs by the guide RNAs then leads to activation of the CRISPR effector protein and the methods proceed as outlined above. The NASBA reaction has the additional advantage of being able to proceed under moderate isothermal conditions, for example at approximately 41° C., making it suitable for systems and devices deployed for early and direct detection in the field and far from clinical laboratories.

[0930] In certain other example embodiments, a recombinase polymerase amplification (RPA) reaction may be used to amplify the target nucleic acids. RPA reactions employ recombinases which are capable of pairing sequence-specific primers with homologous sequence in duplex DNA. If target DNA is present, DNA amplification is initiated and no other sample manipulation such as thermal cycling or chemical melting is required. The entire RPA amplification system is stable as a dried formulation and can be transported safely without refrigeration. RPA reactions may also be carried out at isothermal temperatures with an optimum reaction temperature of 37-42° C. The sequence specific primers are designed to amplify a sequence comprising the target nucleic acid sequence to be detected. In certain example embodiments, a RNA polymerase promoter, such as a T7 promoter, is added to one of the primers. This results in an amplified double-stranded DNA product comprising the target sequence and a RNA polymerase promoter. After, or during, the RPA reaction, a RNA polymerase is added that will produce RNA from the double-stranded DNA templates. The amplified target RNA can then in turn be detected by the CRISPR effector system. In this way target DNA can be detected using the embodiments disclosed herein. RPA reactions can also be used to amplify target RNA. The target RNA is first converted to cDNA using a reverse transcriptase, followed by second strand DNA synthesis, at which point the RPA reaction proceeds as outlined above.

[0931] In an embodiment of the invention may comprise nickase-based amplification. The nicking enzyme may be a CRISPR protein. Accordingly, the introduction of nicks into dsDNA can be programmable and sequence-specific. FIG. 115 depicts an embodiment of the invention, which starts with two guides designed to target opposite strands of a dsDNA target. According to the invention, the nickase can be Cpf1, C2c1, Cas9 or any ortholog or CRISPR protein that cleaves or is engineered to cleave a single strand of a DNA duplex. The nicked strands may then be extended by a polymerase. In an embodiment, the locations of the nicks are selected such that extension of the strands by a polymerase is towards the central portion of the target duplex DNA between the nick sites. In certain embodiments, primers are included in the reaction capable of hybridizing to the extended strands followed by further polymerase extension of the primers to regenerate two dsDNA pieces: a first dsDNA that includes the first strand Cpf1 guide site or both the first and second strand Cpf1 guide sites, and a second dsDNA that includes the second strand Cpf1 guide site or both the first and second strand Cprf guide sites. These pieces continue to be nicked and extended in a cyclic reaction that exponentially amplifies the region of the target between nicking sites.

[0932] The amplification can be isothermal and selected for temperature. In one embodiment, the amplification proceeds rapidly at 37 degrees. In other embodiments, the temperature of the isothermal amplification may be chosen by selecting a polymerase (e.g. Bsu, Bst, Phi29, klenow fragment etc.). operable at a different temperature.

[0933] Thus, whereas nicking isothermal amplification techniques use nicking enzymes with fixed sequence preference (e.g. in nicking enzyme amplification reaction or NEAR), which requires denaturing of the original dsDNA target to allow annealing and extension of primers that add the nicking substrate to the ends of the target, use of a CRISPR nickase wherein the nicking sites can be programed via guide RNAs means that no denaturing step is necessary, enabling the entire reaction to be truly isothermal. This also simplifies the reaction because these primers that add the nicking substrate are different than the primers that are used later in the reaction, meaning that NEAR requires two primer sets (i.e. 4 primers) while Cpf1 nicking amplification only requires one primer set (i.e. two primers). This makes nicking Cpf1 amplification much simpler and easier to operate without complicated instrumentation to perform the denaturation and then cooling to the isothermal temperature.

[0934] Accordingly, in certain example embodiments the systems disclosed herein may include amplification reagents. Different components or reagents useful for amplification of nucleic acids are described herein. For example, an amplification reagent as described herein may include a buffer, such as a Tris buffer. A Tris buffer may be used at any concentration appropriate for the desired application or use, for example including, but not limited to, a concentration of 1 mM, 2 mM, 3 mM, 4 mM, 5 mM, 6 mM, 7 mM, 8 mM, 9 mM, 10 mM, 11 mM, 12 mM, 13 mM, 14 mM, 15 mM, 25 mM, 50 mM, 75 mM, 1 M, or the like. One of skill in the art will be able to determine an appropriate concentration of a buffer such as Tris for use with the present invention.

[0935] Other components of a biological or chemical reaction may include a cell lysis component in order to break open or lyse a cell for analysis of the materials therein. A cell lysis component may include, but is not limited to, a detergent, a salt as described above, such as NaCl, KCl, ammonium sulfate [(NH4)2SO4], or others. Detergents that may be appropriate for the invention may include Triton X-100, sodium dodecyl sulfate (SDS), CHAPS (3-[(3-cholamidopropyl)dimethylammonio]-1-propanesulfonate), ethyl trimethyl ammonium bromide, nonyl phenoxypolyethoxylethanol (NP-40). Concentrations of detergents may depend on the particular application, and may be specific to the reaction in some cases. Amplification reactions may include dNTPs and nucleic acid primers used at any concentration appropriate for the invention, such as including, but not limited to, a concentration of 100 nM, 150 nM, 200 nM, 250 nM, 300 nM, 350 nM, 400 nM, 450 nM, 500 nM, 550 nM, 600 nM, 650 nM, 700 nM, 750 nM, 800 nM, 850 nM, 900 nM, 950 nM, 1 mM, 2 mM, 3 mM, 4 mM, 5 mM, 6 mM, 7 mM, 8 mM, 9 mM, 10 mM, 20 mM, 30 mM, 40 mM, 50 mM, 60 mM, 70 mM, 80 mM, 90 mM, 100 mM, 150 mM, 200 mM, 250 mM, 300 mM, 350 mM, 400 mM, 450 mM, 500 mM, or the like. Likewise, a polymerase useful in accordance with the invention may be any specific or general polymerase known in the art and useful or the invention, including Taq polymerase, Q5 polymerase, or the like.

[0936] In some embodiments, amplification reagents as described herein may be appropriate for use in hot-start amplification. Hot start amplification may be beneficial in some embodiments to reduce or eliminate dimerization of adaptor molecules or oligos, or to otherwise prevent unwanted amplification products or artifacts and obtain optimum amplification of the desired product. Many components described herein for use in amplification may also be used in hot-start amplification. In some embodiments, reagents or components appropriate for use with hot-start amplification may be used in place of one or more of the composition components as appropriate. For example, a polymerase or other reagent may be used that exhibits a desired activity at a particular temperature or other reaction condition. In some embodiments, reagents may be used that are designed or optimized for use in hot-start amplification, for example, a polymerase may be activated after transposition or after reaching a particular temperature. Such polymerases may be antibody-based or aptamer-based. Polymerases as described herein are known in the art. Examples of such reagents may include, but are not limited to, hot-start polymerases, hot-start dNTPs, and photo-caged dNTPs. Such reagents are known and available in the art. One of skill in the art will be able to determine the optimum temperatures as appropriate for individual reagents.

[0937] Amplification of nucleic acids may be performed using specific thermal cycle machinery or equipment, and may be performed in single reactions or in bulk, such that any desired number of reactions may be performed simultaneously. In some embodiments, amplification may be performed using microfluidic or robotic devices, or may be performed using manual alteration in temperatures to achieve the desired amplification. In some embodiments, optimization may be performed to obtain the optimum reactions conditions for the particular application or materials. One of skill in the art will understand and be able to optimize reaction conditions to obtain sufficient amplification.

[0938] In certain embodiments, detection of DNA with the methods or systems of the invention requires transcription of the (amplified) DNA into RNA prior to detection.

[0939] It will be evident that detection methods of the invention can involve nucleic acid amplification and detection procedures in various combinations. The nucleic acid to be detected can be any naturally occurring or synthetic nucleic acid, including but not limited to DNA and RNA, which may be amplified by any suitable method to provide an intermediate product that can be detected. Detection of the intermediate product can be by any suitable method including but not limited to binding and activation of a CRISPR protein which produces a detectable signal moiety by direct or collateral activity.

### LAMP-Based Isothermal Amplification

[0940] In certain example embodiments, the LAMP amplification reagents may include primers to SARS-COV2. LAMP reagents may further comprise colorimetric and/or fluorescent detection reagents, such as hydroxy napthol blue (see, e.g. Goto, M., et al., Colorimetric detection of loop-mediated isothermal amplification reaction by using hydroxy naphthol blue. Biotechniques, 2009. 46(3): p. 167-72.) leuco triphenylmethane dyes (see, e.g. Miyamoto, S., et al., Method for colorimetric detection of double-stranded nucleic acid using leuco triphenylmethane dyes. Anal Biochem, 2015. 473: p. 28-33) and pH-sensitive dyes (see, e.g. Tanner, N. A., Y. Zhang, and T. C. Evans, Jr., Visual detection of isothermal nucleic acid amplification using pH-sensitive dyes. Biotechniques, 2015. 58(2): p. 59-68); as well as fluorescent detection (see, e.g. Yu et al., Clinical Chemistry, hvaa102, doi:10.1093/clinchem/hvaa102 12 May 2020), including use of quenching probes (see, e.g. Shirato et al., J Virol Methods. 2018 August; 258:41-48. doi: 10.1016/j.jviromet.2018.05.006). An overview of LAMP methods, including OSD-LAMP, for sequence-specific detection is described in Becherer et al., Anal. Methods, 2020, 12, 717-746, doi: 10.1039/C9AY02246E, incorporated herein by reference.

[0941] In embodiments, the LAMP amplification reagents can comprise oligonucleotide strand displacement (OSD) probes. As used herein, oligonucleotide strand displacement probes are also referred to herein as oligonucleotide strand exchange probes or one-step strand displacement probes. The general concept of the use of OSD exchange is depicted in FIG. 1 of Bhadra et al., High-surety isothermal amplification and detection of SARS-CoV-2, including with crude enzymes, doi:10.1101/2020.04.13.039941. OSD probes rely on the binding enthalpy between the target-binding probe and amplicon of the LAMP reaction yielding a strand exchange reaction, leading to an easily read change in fluorescent signal. As a result, the results of a LAMP reaction can be visually or optically read fluorogenic OSD probes.

[0942] In an aspect, the OSD probes comprise a sequence specific for a target molecule. The OSD probes may comprise a pre-hybridized nucleic acid sequence, strand wherein the target sequence is 5, 6, 7, 8, 9, 10, 11, 12 or 13 nucleotides longer than the strand to which it is hybridized, allowing for sequence-specific interaction with a complementary target, with the OSD undergoing strand exchange and yielding a change in fluorescent signal.

[0943] In an aspect, the OSD probes are provided at a concentration of about 50 nM to 200 nM, about 75 nM to 150 nM, less than or equal to 200 nM, 190 nM, 180 nM, 170 nM, 160 nM, 150 nM, 140 nM, 130 nM, 120 nM, 110 nM, 100 nM, 90 nM, 80 nM, 75 nM, 65 nM, or 50 nM. Probes can be designed to be complementary to the loop region between the F1c and F2 primer binding sites for the LAMP primers, this can be referred to as the long toehold region. The complementary portion can be between about 9 and 14 nucleotides long, more preferably 11-12 nucleotides long. In an aspect, the longer strand of the OSD is labeled with a fluorescent molecule at the 5′ or 3′ end of the strand. In an aspect, the label is provided on the end opposite the designed complementary target region (long toehold region). The short strand is prepared with a quencher on one end of the probe, and can be designed to comprise a region complementary to a portion of the long strand. The OSD probes can be provided as part of LAMP reagents as described herein, which may comprise their use on any of the devices, cartridges or in any of the compositions as provided herein, including being provided as a lyophilized reagent in some instances.

### Extraction Solutions

[0944] In certain aspects, embodiments disclosed herein are directed to compositions and kits that consolidate extraction-free lysis and amplification of target nucleic acids into a single reaction volume. In certain example embodiments, the extraction-free lysis reagents can be used to extract nucleic acids from cells and/or viral particles. In contrast to existing protocols, the extraction-free lysis solution does not require isolation of the nucleic acid prior to further amplification. The extraction-free lysis reagents may be mixed with amplification reagents such as standard RT-PCR amplification reactions.

[0945] In one embodiment, extraction-free lysis solution and isothermal amplification reagents may be lyophilized in a single reaction volume, to be reconstituted by addition of a sample to be assayed. In certain other embodiments, the extraction-free lysis solution and isothermal amplification reagents may be lyophilized and stored on a cartridge or lateral flow strip, as discussed in further detail below.

[0946] In certain example embodiments, the single lysis reaction compositions and kits may further comprise one or more TnpB proteins possessing collateral activity and a detection construct. Pairing with one or more TnpB proteins may increase sensitivity or specificity of the assay. In certain example embodiments, the one or more TnpB proteins may be thermostable TnpB proteins. Example TnpB proteins are disclosed in further detail below.

[0947] In certain example embodiments, the single lysis amplification reaction compositions and kits may comprise optimized primers and/or one or more additives. In an aspect, the design optimizes the primers used in the amplification, In particular aspects, the isothermal amplification is used alone. In another aspect, the isothermal amplification is used with TnpB systems. In either approach, design considerations can follow a rational design for optimization of the reactions. In an example, varying additives with specific primers, target, TnpB protein, temperature, and other additive concentrations within the reaction can be identified. Optimization can be made with the goal of reducing the number of steps and buffer exchanges that have to occur in the reaction, simplifying the reaction and reducing the risks of contamination at transfer steps. In an aspect, addition of inhibitors, such as proteinase K can be considered so that buffer exchanges can be reduced. Similarly, optimizing the salt levels as well as the type of salt utilized can further facilitate and optimize the one-pot detections disclosed herein. In an aspect, potassium chloride can be utilized rather than sodium chloride when such amplification approaches are used with bead concentration in a lysis step.

[0948] In one embodiment, the compositions and kits may further comprise nucleic acid binding bead. The bead may be used to capture, concentrate or otherwise enrich for particular material. The bead may be magnetic, and may be provided to capture nucleic acid material. In another aspect, the bead is a silica bead. Beads may be utilized in an extraction step of the methods disclosed herein. Beads can be optionally used with the methods described herein, including with the one-pot methods that allow for concentration of viral nucleic acids from large volume samples, such as saliva or swab samples to allow for a single one-pot reaction method. Concentration of desired target molecules can be increased by about 10-fold, 50-fold, 100-fold, 200-fold, 500-fold, 800-fold, 1000-fold, 1500-fold, 2000-fold, 2500-fold, 3000-fold, or more.

[0949] Magnetic beads in a PEG and salt solution are preferred in an aspect, and in embodiments bind to viral RNA and/or DNA which allows for concentration and lysis concurrently. Silica beads can be used in another aspect. Capture moieties such as oligonucleotide functionalized beads are envisioned for use. The beads may be using with the extraction reagents, allowed to incubate with a sample and the lysis/extraction buffer, thereby concrrating target molecules on the beads. When used with a cartridge device detailed elsewhere herein, a magnet can be activated and the beads collected, with optional flushing of the extraction buffer and one or more washes performed. Advantageously, the beads can be used in the one-pot methods and systems without additional washings of the beads, allowing for a more efficient process without increased risks of contamination in multi-step processes. Beads can be utilized with the isothermal amplifications detailed herein, and the beads can flow into an amplification chamber of the cartridge or be maintained in the pot for the amplification step. Upon heating, nucleic acid can be released off the beads.

### Diagnostic Devices

[0950] The systems described herein can be embodied on diagnostic devices. A number of substrates and configurations may be used. The devices may be capable of defining multiple individual discrete volumes within the device. As used herein an “individual discrete volume” refers to a discrete space, such as a container, receptacle, or other defined volume or space that can be defined by properties that prevent and/or inhibit migration of target molecules, for example a volume or space defined by physical properties such as walls, for example the walls of a well, tube, or a surface of a droplet, which may be impermeable or semipermeable, or as defined by other means such as chemical, diffusion rate limited, electro-magnetic, or light illumination, or any combination thereof that can contain a sample within a defined space. Individual discrete volumes may be identified by molecular tags, such as nucleic acid barcodes. By “diffusion rate limited” (for example diffusion defined volumes) is meant spaces that are only accessible to certain molecules or reactions because diffusion constraints effectively defining a space or volume as would be the case for two parallel laminar streams where diffusion will limit the migration of a target molecule from one stream to the other. By “chemical” defined volume or space is meant spaces where only certain target molecules can exist because of their chemical or molecular properties, such as size, where for example gel beads may exclude certain species from entering the beads but not others, such as by surface charge, matrix size or other physical property of the bead that can allow selection of species that may enter the interior of the bead. By “electro-magnetically” defined volume or space is meant spaces where the electro-magnetic properties of the target molecules or their supports such as charge or magnetic properties can be used to define certain regions in a space such as capturing magnetic particles within a magnetic field or directly on magnets. By “optically” defined volume is meant any region of space that may be defined by illuminating it with visible, ultraviolet, infrared, or other wavelengths of light such that only target molecules within the defined space or volume may be labeled. One advantage to the use of non-walled, or semipermeable discrete volumes is that some reagents, such as buffers, chemical activators, or other agents may be passed through the discrete volume, while other materials, such as target molecules, may be maintained in the discrete volume or space. Typically, a discrete volume will include a fluid medium, (for example, an aqueous solution, an oil, a buffer, and/or a media capable of supporting cell growth) suitable for labeling of the target molecule with the indexable nucleic acid identifier under conditions that permit labeling. Exemplary discrete volumes or spaces useful in the disclosed methods include droplets (for example, microfluidic droplets and/or emulsion droplets), hydrogel beads or other polymer structures (for example poly-ethylene glycol di-acrylate beads or agarose beads), tissue slides (for example, fixed formalin paraffin embedded tissue slides with particular regions, volumes, or spaces defined by chemical, optical, or physical means), microscope slides with regions defined by depositing reagents in ordered arrays or random patterns, tubes (such as, centrifuge tubes, microcentrifuge tubes, test tubes, cuvettes, conical tubes, and the like), bottles (such as glass bottles, plastic bottles, ceramic bottles, Erlenmeyer flasks, scintillation vials and the like), wells (such as wells in a plate), plates, pipettes, or pipette tips among others. In certain embodiments, the compartment is an aqueous droplet in a water-in-oil emulsion. In specific embodiments, any of the applications, methods, or systems described herein requiring exact or uniform volumes may employ the use of an acoustic liquid dispenser.

[0951] In some embodiments, the individual discrete volumes may be droplets.

[0952] In certain example embodiments, the device comprises a flexible material substrate on which a number of spots may be defined. Flexible substrate materials suitable for use in diagnostics and biosensing are known within the art. The flexible substrate materials may be made of plant derived fibers, such as cellulosic fibers, or may be made from flexible polymers such as flexible polyester films and other polymer types. Within each defined spot, reagents of the system described herein are applied to the individual spots. Each spot may contain the same reagents except for a different guide RNA or set of guide RNAs, or where applicable, a different detection aptamer to screen for multiple targets at once. Thus, the systems and devices herein may be able to screen samples from multiple sources (e.g. multiple clinical samples from different individuals) for the presence of the same target, or a limited number of targets, or aliquots of a single sample (or multiple samples from the same source) for the presence of multiple different targets in the sample. In certain example embodiments, the elements of the systems described herein are freeze dried onto the paper or cloth substrate. Example flexible material based substrates that may be used in certain example devices are disclosed in Pardee et al. Cell. 2016, 165(5):1255-66 and Pardee et al. Cell. 2014, 159(4):950-54. Suitable flexible material-based substrates for use with biological fluids, including blood are disclosed in International Patent Application Publication No. WO/2013/071301 entitled “Paper based diagnostic test” to Shevkoplyas et al. U.S. Patent Application Publication No. 2011/0111517 entitled “Paper-based microfluidic systems” to Siegel et al. and Shafiee et al. “Paper and Flexible Substrates as Materials for Biosensing Platforms to Detect Multiple Biotargets” Scientific Reports 5:8719 (2015). Further flexible based materials, including those suitable for use in wearable diagnostic devices are disclosed in Wang et al. “Flexible Substrate-Based Devices for Point-of-Care Diagnostics” Cell 34(11):909-21 (2016). Further flexible based materials may include nitrocellulose, polycarbonate, methylethyl cellulose, polyvinylidene fluoride (PVDF), polystyrene, or glass (see e.g., US20120238008). In certain embodiments, discrete volumes are separated by a hydrophobic surface, such as but not limited to wax, photoresist, or solid ink.

[0953] In some embodiments, a dosimeter or badge may be provided that serves as a sensor or indicator such that the wearer is notified of exposure to certain microbes or other agents. For example, the systems described herein may be used to detect a particular pathogen. Likewise, aptamer based embodiments disclosed above may be used to detect both polypeptide as well as other agents, such as chemical agents, to which a specific aptamer may bind. Such a device may be useful for surveillance of soldiers or other military personnel, as well as clinicians, researchers, hospital staff, and the like, in order to provide information relating to exposure to potentially dangerous agents as quickly as possible, for example for biological or chemical warfare agent detection. In other embodiments, such a surveillance badge may be used for preventing exposure to dangerous microbes or pathogens in immunocompromised patients, burn patients, patients undergoing chemotherapy, children, or elderly individuals.

[0954] In specific embodiments, each individual discrete volume further comprises one or more detection aptamers comprising a masked RNA polymerase promoter binding site or a masked primer binding site. As such, each individual discrete volume may further comprise nucleic acid amplification reagents.

[0955] In specific embodiments, the target molecule may be a target DNA and the individual discrete volumes further comprise a primer that binds the target DNA and comprises an RNA polymerase promoter.

[0956] Samples sources that may be analyzed using the systems and devices described herein include biological samples of a subject or environmental samples. Environmental samples may include surfaces or fluids. The biological samples may include, but are not limited to, saliva, blood, plasma, sera, stool, urine, sputum, mucous, lymph, synovial fluid, spinal fluid, cerebrospinal fluid, a swab from skin or a mucosal membrane, or combination thereof. In an example embodiment, the environmental sample is taken from a solid surface, such as a surface used in the preparation of food or other sensitive compositions and materials.

[0957] In other example embodiments, the elements of the systems described herein may be place on a single use substrate, such as swab or cloth that is used to swab a surface or sample fluid. For example, the system could be used to test for the presence of a pathogen on a food by swabbing the surface of a food product, such as a fruit or vegetable. Similarly, the single use substrate may be used to swab other surfaces for detection of certain microbes or agents, such as for use in security screening. Single use substrates may also have applications in forensics, where the CRISPR systems are designed to detect, for example identifying DNA SNPs that may be used to identify a suspect, or certain tissue or cell markers to determine the type of biological matter present in a sample. Likewise, the single use substrate could be used to collect a sample from a patient—such as a saliva sample from the mouth—or a swab of the skin. In other embodiments, a sample or swab may be taken of a meat product on order to detect the presence of absence of contaminants on or within the meat product.

[0958] Near-real-time microbial diagnostics are needed for food, clinical, industrial, and other environmental settings (see e.g., Lu T K, Bowers J, and Koeris M S., Trends Biotechnol. 2013 June; 31(6):325-7). In certain embodiments, the present invention is used for rapid detection of foodborne pathogens using guide RNAs specific to a pathogen (e.g., Campylobacter jejuni, Clostridium perfringens, Salmonella spp., Escherichia coli, Bacillus cereus, Listeria monocytogenes, Shigella spp., Staphylococcus aureus, Staphylococcal enteritis, Streptococcus, Vibrio cholerae, Vibrio parahaemolyticus, Vibrio vulnificus, Yersinia enterocolitica and Yersinia pseudotuberculosis, Brucella spp., Corynebacterium ulcerans, Coxiella burnetii, or Plesiomonas shigelloides).

[0959] In certain embodiments, the device is or comprises a flow strip. For instance, a lateral flow strip allows for detection by color. The reporter is modified to have a first molecule (such as for instance FITC) attached to the 5′ end and a second molecule (such as for instance biotin) attached to the 3′ end (or vice versa). The lateral flow strip is designed to have two capture lines with anti-first molecule (e.g. anti-FITC) antibodies hybridized at the first line and anti-second molecule (e.g. anti-biotin) antibodies at the second downstream line. As the reaction flows down the strip, uncleaved reporter will bind to anti-first molecule antibodies at the first capture line, while cleaved reporters will liberate the second molecule and allow second molecule binding at the second capture line. Second molecule sandwich antibodies, for instance conjugated to nanoparticles, such as gold nanoparticles, will bind any second molecule at the first or second line and result in a strong readout/signal (e.g. color). As more reporter is cleaved, more signal will accumulate at the second capture line and less signal will appear at the first line. In certain aspects, the invention relates to the use of a follow strip as described herein for detecting nucleic acids or polypeptides. In certain aspects, the invention relates to a method for detecting nucleic acids or polypeptides with a flow strip as defined herein, e.g. (lateral) flow tests or (lateral) flow immunochromatographic assays.

[0960] The embodiments disclosed herein are directed to lateral flow detection devices that comprise TnpB systems. The device may comprise a lateral flow substrate for detecting a TnpB collateral reaction. Substrates suitable for use in lateral flow assays are known in the art. These may include, but are not necessarily limited to membranes or pads made of cellulose and/or glass fiber, polyesters, nitrocellulose, or absorbent pads (J Saudi Chem Soc 19(6):689-705; 2015). The TnpB system, i.e. one or more TnpB systems and corresponding reporter constructs are added to the lateral flow substrate at a defined reagent portion of the lateral flow substrate, typically on one end of the lateral flow substrate. Reporting constructs used within the context of the present invention comprise a first molecule and a second molecule linked by anDNA linker. The lateral flow substrate further comprises a sample portion. The sample portion may be equivalent to, continuous with, or adjacent to the reagent portion. The lateral flow strip further comprises a first capture line, typically a horizontal line running across the device, but other configurations are possible. The first capture region is proximate to and on the same end of the lateral flow substrate as the sample loading portion. A first binding agent that specifically binds the first molecule of the reporter construct is fixed or otherwise immobilized to the fist capture region. The second capture region is located towards the opposite end of the lateral flow substrate from the first binding region. A second binding agent is fixed or otherwise immobilized at the second capture region. The second binding agent specifically binds the second molecule of the reporter construct, or the second binding agent may bind a detectable ligand. For example, the detectable ligand may be a particle, such as a colloidal particle, that when it aggregates can be detected visually. The particle may be modified with an antibody that specifically binds the second molecule on the reporter construct. If the reporter construct is not cleaved it will facilitate accumulation of the detectable ligand at the first binding region. If the reporter construct is cleaved the detectable ligand is released to flow to the second binding region. In such an embodiment, the second binding agent is an agent capable of specifically or non-specifically binding the detectable ligand on the antibody on the detectable ligand. Examples of suitable binding agents for such an embodiment include, but are not limited to, protein A and protein G.

[0961] Lateral support substrates may be located within a housing (see for example, “Rapid Lateral Flow Test Strips” Merck Millipore 2013). The housing may comprise at least one opening for loading samples and a second single opening or separate openings that allow for reading of detectable signal generated at the first and second capture regions.

[0962] The TnpB system may be freeze-dried to the lateral flow substrate and packaged as a ready to use device, or the TnpB system may be added to the reagent portion of the lateral flow substrate at the time of using the device. Samples to be screened are loaded at the sample loading portion of the lateral flow substrate. The samples must be liquid samples or samples dissolved in an appropriate solvent, usually aqueous. The liquid sample reconstitutes the TnpB reagents such that a TnpB reaction can occur. The liquid sample begins to flow from the sample portion of the substrate towards the first and second capture regions. Intact reporter construct is bound at the first capture region by binding between the first binding agent and the first molecule. Likewise, the detection agent will begin to collect at the first binding region by binding to the second molecule on the intact reporter construct. If target molecule(s) are present in the sample, the TnpB collateral effect is activated. As activated TnpB comes into contact with the bound reporter construct, the reporter constructs are cleaved, releasing the second molecule to flow further down the lateral flow substrate towards the second binding region. The released second molecule is then captured at the second capture region by binding to the second binding agent, where additional detection agent may also accumulate by binding to the second molecule. Accordingly, if the target molecule(s) is not present in the sample, a detectable signal will appear at the first capture region, and if the target molecule(s) is present in the sample, a detectable signal will appear at the location of the second capture region.

[0963] Specific binding-integrating molecules comprise any members of binding pairs that can be used in the present invention. Such binding pairs are known to those skilled in the art and include, but are not limited to, antibody-antigen pairs, enzyme-substrate pairs, receptor-ligand pairs, and streptavidin-biotin. In addition to such known binding pairs, novel binding pairs may be specifically designed. A characteristic of binding pairs is the binding between the two members of the binding pair.

[0964] Oligonucleotide Linkers having molecules on either end may comprise DNA if the TnpB has DNA collateral activity. Oligonucleotide linkers may be single stranded or double stranded, and in certain embodiments, they could contain both RNA and DNA regions. Oligonucleotide linkers may be of varying lengths, such as 5-10 nucleotides, 10-20 nucleotides, 20-50 nucleotides, or more.

[0965] In some embodiments, the polypeptide identifier elements include affinity tags, such as hemagglutinin (HA) tags, Myc tags, FLAG tags, V5 tags, chitin binding protein (CBP) tags, maltose-binding protein (MBP) tags, GST tags, poly-His tags, and fluorescent proteins (for example, green fluorescent protein (GFP), yellow fluorescent protein (YFP), cyan fluorescent protein (CFP), dsRed, mCherry, Kaede, Kindling, and derivatives thereof, FLAG tags, Myc tags, AU1 tags, T7 tags, OLLAS tags, Glu-Glu tags, VSV tags, or a combination thereof. Other Affinity tags are well known in the art. Such labels can be detected and/or isolated using methods known in the art (for example, by using specific binding agents, such as antibodies, that recognize a particular affinity tag). Such specific binding agents (for example, antibodies) can further contain, for example, detectable labels, such as isotope labels and/or nucleic acid barcodes such as those described herein.

[0966] In certain example embodiments, a lateral flow device comprises a lateral flow substrate comprising a first end for application of a sample. The first region is loaded with a detectable ligand, such as those disclosed herein, for example a gold nanoparticle. The gold nanoparticle may be modified with a first antibody, such as an anti-FITC antibody. The first region also comprises a detection construct. In one example embodiment, a DNA detection construct and a TnpB system as disclosed herein. In one example embodiment, and for purposes of further illustration, the DNA construct may comprise a FAM molecule on a first end of the detection construction and a biotin on a second end of the detection construct. Upstream of the flow of solution from the first end of the lateral flow substrate is a first test band. The test band may comprise a biotin ligand. Accordingly, when the DNA detection construct is present it its initial state, i.e. in the absence of target, the FAM molecule on the first end will bind the anti-FITC antibody on the gold nanoparticle, and the biotin on the second end of the DNA construct will bind the biotin ligand allowing for the detectable ligand to accumulate at the first test, generating a detectable signal. Generation of a detectable signal at the first band indicate the absence of the target ligand. In the presence of target, the TnpB complex forms and the TnpB is activated resulting in cleavage of the DNA detection construct. In the absence of intact DNA detection construct the colloidal gold will flow past the second strip. The lateral flow device may comprise a second band, upstream of the first band. The second band may comprise a molecule capable of binding the antibody-labeled colloidal gold molecule, for example an anti-rabbit antibody capable of binding a rabbit anti-FTIC antibody on the colloidal gold. Therefore, in the presence of one or more targets, the detectable ligand will accumulate at the second band, indicating the presence of the one or more targets in the sample.

[0967] In certain example embodiments, the device is a microfluidic device that generates and/or merges different droplets (i.e. individual discrete volumes). For example, a first set of droplets may be formed containing samples to be screened and a second set of droplets formed containing the elements of the systems described herein. The first and second set of droplets are then merged and then diagnostic methods as described herein are carried out on the merged droplet set. Microfluidic devices disclosed herein may be silicone-based chips and may be fabricated using a variety of techniques, including, but not limited to, hot embossing, molding of elastomers, injection molding, LIGA, soft lithography, silicon fabrication and related thin film processing techniques. Suitable materials for fabricating the microfluidic devices include, but are not limited to, cyclic olefin copolymer (COC), polycarbonate, poly(dimethylsiloxane) (PDMS), and poly(methylacrylate) (PMMA). In one embodiment, soft lithography in PDMS may be used to prepare the microfluidic devices. For example, a mold may be made using photolithography which defines the location of flow channels, valves, and filters within a substrate. The substrate material is poured into a mold and allowed to set to create a stamp. The stamp is then sealed to a solid support, such as but not limited to, glass. Due to the hydrophobic nature of some polymers, such as PDMS, which absorbs some proteins and may inhibit certain biological processes, a passivating agent may be necessary (Schoffner et al. Nucleic Acids Research, 1996, 24:375-379). Suitable passivating agents are known in the art and include, but are not limited to, silanes, parylene, n-Dodecyl-b-D-matoside (DDM), pluronic, Tween-20, other similar surfactants, polyethylene glycol (PEG), albumin, collagen, and other similar proteins and peptides.

[0968] In certain example embodiments, the system and/or device may be adapted for conversion to a flow-cytometry readout in or allow to all of sensitive and quantitative measurements of millions of cells in a single experiment and improve upon existing flow-based methods, such as the PrimeFlow assay. In certain example embodiments, cells may be cast in droplets containing unpolymerized gel monomer, which can then be cast into single-cell droplets suitable for analysis by flow cytometry. A detection construct comprising a fluorescent detectable label may be cast into the droplet comprising unpolymerized gel monomer. Upon polymerization of the gel monomer to form a bead within a droplet. Because gel polymerization is through free-radical formation, the fluorescent reporter becomes covalently bound to the gel. The detection construct may be further modified to comprise a linker, such as an amine. A quencher may be added post-gel formation and will bind via the linker to the reporter construct. Thus, the quencher is not bound to the gel and is free to diffuse away when the reporter is cleaved by the TnpB. Amplification of signal in droplet may be achieved by coupling the detection construct to a hybridization chain reaction (HCR initiator) amplification. DNA/RNA hybrid hairpins may be incorporated into the gel which may comprise a hairpin loop that has a RNase sensitive domain. By protecting a strand displacement toehold within a hairpin loop that has a RNase sensitive domain, HCR initiators may be selectively deprotected following cleavage of the hairpin loop by the TnpB system. Following deprotection of HCR initiators via toehold mediated strand displacement, fluorescent HCR monomers may be washed into the gel to enable signal amplification where the initiators are deprotected.

[0969] An example of microfluidic device that may be used in the context of the invention is described in Hour et al. “Direct Detection and drug-resistance profiling of bacteremias using inertial microfluidics” Lap Chip. 15(10):2297-2307 (2016).

[0970] In systems described herein, may further be incorporated into wearable medical devices that assess biological samples, such as biological fluids, of a subject outside the clinic setting and report the outcome of the assay remotely to a central server accessible by a medical care professional. The device may include the ability to self-sample blood, such as the devices disclosed in U.S. Patent Application Publication No. 2015/0342509 entitled “Needle-free Blood Draw to Peeters et al., U.S. Patent Application Publication No. 2015/0065821 entitled “Nanoparticle Phoresis” to Andrew Conrad.

[0971] In some embodiments, the individual discrete volumes are microwells.

[0972] In certain example embodiments, the device may comprise individual wells, such as microplate wells. The size of the microplate wells may be the size of standard 6, 24, 96, 384, 1536, 3456, or 9600 sized wells. In certain example embodiments, the elements of the systems described herein may be freeze dried and applied to the surface of the well prior to distribution and use.

[0973] The devices disclosed herein may further comprise inlet and outlet ports, or openings, which in turn may be connected to valves, tubes, channels, chambers, and syringes and/or pumps for the introduction and extraction of fluids into and from the device. The devices may be connected to fluid flow actuators that allow directional movement of fluids within the microfluidic device. Example actuators include, but are not limited to, syringe pumps, mechanically actuated recirculating pumps, electroosmotic pumps, bulbs, bellows, diaphragms, or bubbles intended to force movement of fluids. In certain example embodiments, the devices are connected to controllers with programmable valves that work together to move fluids through the device. In certain example embodiments, the devices are connected to the controllers discussed in further detail below. The devices may be connected to flow actuators, controllers, and sample loading devices by tubing that terminates in metal pins for insertion into inlet ports on the device.

[0974] As shown herein the elements of the system are stable when freeze dried, therefore embodiments that do not require a supporting device are also contemplated, i.e. the system may be applied to any surface or fluid that will support the reactions disclosed herein and allow for detection of a positive detectable signal from that surface or solution. In addition to freeze-drying, the systems may also be stably stored and utilized in a pelletized form. Polymers useful in forming suitable pelletized forms are known in the art.

[0975] In some embodiments, the individual discrete volumes are defined on a solid substrate. In some embodiments, the individual discrete volumes are spots defined on a substrate. In some embodiments, the substrate may be a flexible materials substrate, for example, including, but not limited to, a paper substrate, a fabric substrate, or a flexible polymer-based substrate. In specific embodiments, the flexible materials substrate is a paper substrate or a flexible polymer based substrate.

[0976] In certain embodiments, the TnpB is bound to each discrete volume in the device. Each discrete volume may comprise a different ωRNA specific for a different target molecule. In certain embodiments, a sample is exposed to a solid substrate comprising more than one discrete volume each comprising a ωRNA specific for a target molecule. Not being bound by a theory, each ωRNA will capture its target molecule from the sample and the sample does not need to be divided into separate assays. Thus, a valuable sample may be preserved. The effector protein may be a fusion protein comprising an affinity tag. Affinity tags are well known in the art (e.g., HA tag, Myc tag, Flag tag, His tag, biotin). The effector protein may be linked to a biotin molecule and the discrete volumes may comprise streptavidin. In other embodiments, the CRISPR effector protein is bound by an antibody specific for the effector protein. Methods of binding a CRISPR enzyme has been described previously (see, e.g., US20140356867A1).

[0977] The devices disclosed herein may also include elements of point of care (POC) devices known in the art for analyzing samples by other methods. See, for example St John and Price, “Existing and Emerging Technologies for Point-of-Care Testing” (Clin Biochem Rev. 2014 August; 35(3): 155-167).

[0978] The present invention may be used with a wireless lab-on-chip (LOC) diagnostic sensor system (see e.g., U.S. Pat. No. 9,470,699 “Diagnostic radio frequency identification sensors and applications thereof”). In certain embodiments, the present invention is performed in a LOC controlled by a wireless device (e.g., a cell phone, a personal digital assistant (PDA), a tablet) and results are reported to said device.

[0979] Radio frequency identification (RFID) tag systems include an RFID tag that transmits data for reception by an RFID reader (also referred to as an interrogator). In a typical RFID system, individual objects (e.g., store merchandise) are equipped with a relatively small tag that contains a transponder. The transponder has a memory chip that is given a unique electronic product code. The RFID reader emits a signal activating the transponder within the tag through the use of a communication protocol. Accordingly, the RFID reader is capable of reading and writing data to the tag. Additionally, the RFID tag reader processes the data according to the RFID tag system application. Currently, there are passive and active type RFID tags. The passive type RFID tag does not contain an internal power source, but is powered by radio frequency signals received from the RFID reader. Alternatively, the active type RFID tag contains an internal power source that enables the active type RFID tag to possess greater transmission ranges and memory capacity. The use of a passive versus an active tag is dependent upon the particular application.

[0980] Lab-on-the chip technology is well described in the scientific literature and consists of multiple microfluidic channels, input or chemical wells. Reactions in wells can be measured using radio frequency identification (RFID) tag technology since conductive leads from RFID electronic chip can be linked directly to each of the test wells. An antenna can be printed or mounted in another layer of the electronic chip or directly on the back of the device. Furthermore, the leads, the antenna and the electronic chip can be embedded into the LOC chip, thereby preventing shorting of the electrodes or electronics. Since LOC allows complex sample separation and analyses, this technology allows LOC tests to be done independently of a complex or expensive reader. Rather a simple wireless device such as a cell phone or a PDA can be used. In one embodiment, the wireless device also controls the separation and control of the microfluidics channels for more complex LOC analyses. In one embodiment, a LED and other electronic measuring or sensing devices are included in the LOC-RFID chip. Not being bound by a theory, this technology is disposable and allows complex tests that require separation and mixing to be performed outside of a laboratory.

[0981] In preferred embodiments, the LOC may be a microfluidic device. The LOC may be a passive chip, wherein the chip is powered and controlled through a wireless device. In certain embodiments, the LOC includes a microfluidic channel for holding reagents and a channel for introducing a sample. In certain embodiments, a signal from the wireless device delivers power to the LOC and activates mixing of the sample and assay reagents. Specifically, in the case of the present invention, the system may include a masking agent, CRISPR effector protein, and guide RNAs specific for a target molecule. Upon activation of the LOC, the microfluidic device may mix the sample and assay reagents. Upon mixing, a sensor detects a signal and transmits the results to the wireless device. In certain embodiments, the unmasking agent is a conductive RNA molecule. The conductive RNA molecule may be attached to the conductive material. Conductive molecules can be conductive nanoparticles, conductive proteins, metal particles that are attached to the protein or latex or other beads that are conductive. In certain embodiments, if DNA or RNA is used then the conductive molecules can be attached directly to the matching DNA or RNA strands. The release of the conductive molecules may be detected across a sensor. The assay may be a one step process.

[0982] Since the electrical conductivity of the surface area can be measured precisely quantitative results are possible on the disposable wireless RFID electro-assays. Furthermore, the test area can be very small allowing for more tests to be done in a given area and therefore resulting in cost savings. In certain embodiments, separate sensors each associated with a different CRISPR effector protein and guide RNA immobilized to a sensor are used to detect multiple target molecules. Not being bound by a theory, activation of different sensors may be distinguished by the wireless device.

[0983] In addition to the conductive methods described herein, other methods may be used that rely on RFID or Bluetooth as the basic low cost communication and power platform for a disposable RFID assay. For example, optical means may be used to assess the presence and level of a given target molecule. In certain embodiments, an optical sensor detects unmasking of a fluorescent masking agent.

[0984] In certain embodiments, the device of the present invention may include handheld portable devices for diagnostic reading of an assay (see e.g., Vashist et al., Commercial Smartphone-Based Devices and Smart Applications for Personalized Healthcare Monitoring and Management, Diagnostics 2014, 4(3), 104-128; mReader from Mobile Assay; and Holomic Rapid Diagnostic Test Reader).

[0985] As noted herein, certain embodiments allow detection via colorimetric change which has certain attendant benefits when embodiments are utilized in POC situations and or in resource poor environments where access to more complex detection equipment to readout the signal may be limited. However, portable embodiments disclosed herein may also be coupled with hand-held spectrophotometers that enable detection of signals outside the visible range. An example of a hand-held spectrophotometer device that may be used in combination with the present invention is described in Das et al. “Ultra-portable, wireless smartphone spectrophotometer for rapid, non-destructive testing of fruit ripeness.” Nature Scientific Reports. 2016, 6:32504, DOI: 10.1038/srep32504. Finally, in certain embodiments utilizing quantum dot-based masking constructs, use of a hand held UV light, or other suitable device, may be successfully used to detect a signal owing to the near complete quantum yield provided by quantum dots.

### Methods for Detecting Nucleic Acids

[0986] The low cost and adaptability of the assay platform lends itself to a number of applications including (i) general RNA/DNA quantitation, (ii) rapid, multiplexed RNA/DNA and protein expression detection, and (iii) sensitive detection of target nucleic acids, peptides, and proteins in both clinical and environmental samples. Additionally, the systems disclosed herein may be adapted for detection of transcripts within biological settings, such as cells. Given the highly specific nature of the CRISPR effectors described herein, it may possible to track allelic specific expression of transcripts or disease-associated mutations in live cells.

[0987] In some embodiments, methods include detecting target nucleic acids in samples, comprising distributing a sample or set of samples into one or more individual discrete volumes comprising a TnpB system as described hereinof. The sample or set of samples may then be incubated under conditions sufficient to allow binding of the one or more ωRNAs to one or more target molecules, and the TnpB protein may be activated via binding of the one or more ωRNA to the one or more target molecules, wherein activating the CRISPR effector protein results in modification of the detection construct such that a detectable positive signal is generated. The one or more detectable positive signals may then be detected, with detection indicating the presence of one or more target molecules in the sample.

[0988] In some embodiments, methods of the invention include detecting polypeptides in samples, comprising distributing a sample or set of samples into a set of individual discrete volumes comprising peptide detection aptamers and a TnpB as described herein. The sample or set of samples may then be incubated under conditions sufficient to allow binding of the peptide detection aptamers to the one or more target molecules, wherein binding of the aptamer to a corresponding target molecule exposes the RNA polymerase binding site or primer binding site resulting in generation of a trigger RNA. The TnpB may then be activated via binding of the one or more ωRNAs to the trigger RNA, wherein activating the TnpB protein results in modification of the detection construct such that a detectable positive signal is produced. The detectable positive signal may then be detected, with detection of the detectable positive signal indicating the presence of one or more target molecules in a sample.

[0989] In certain example embodiments, a single guide sequence specific to a single target is placed in separate volumes. Each volume may then receive a different sample or aliquot of the same sample. In certain example embodiments, multiple ωRNAs each to separate target may be placed in a single well such that multiple targets may be screened in a different well. In order to detect multiple ωRNA in a single volume, in certain example embodiments, multiple TnpB proteins with different specificities may be used.

[0990] In embodiments, different TnpB orthologs with different sequence specificities may be used. Cutting motifs may be used to take advantage of the sequence specificities of different orthologs. The detection construct can comprise a cutting motif preferentially cut by a given TnpB ortholog. A cutting motif sequence can be a particular nucleotide base, a repeat nucleotide base in a homopolymer, or a heteropolymer of bases. The cutting motif can be a dinucleotide sequence, a trinucleotide sequence or more complex motifs comprising 4, 5, 6, 7, 8, 9, or 10 nucleotide motifs. For example, one orthologue may preferentially cut A, while others preferentially cut C, G, U/T. Accordingly, detection constructs completely comprising, or comprised of a substantial portion, of a single nucleotide may be generated, each with a different fluorophore that can be detected at differing wavelengths. In this way up to four different targets may be screened in a single individual discrete volume. In certain other example embodiments, different orthologues with different nucleotide editing preferences may be used such as TnpBs in combination with a Cas13 or Cas12.

[0991] In addition to single base editing preferences, additional detection constructs can be designed based on other motif cutting preferences of TnpB, Cas12, and Cas13 orthologs. For example, Cas13 or Cas12 orthologs may preferentially cut a dinucleotide sequence, a trinucleotide sequence or more complex motifs comprising 4, 5, 6, 7, 8, 9, or 10 nucleotide motifs. As an example, LwaCas13a showed strong preference for a hexanucleotide motif sequences, with CcaCas13b showing strong preference for other hexanucleotide motifs. Thus the upper bound for multiplex assays using the embodiments disclosed herein is primarily limited by the number of distinguishable detectable labels and the detection channels needed to detect them. In certain example embodiments, 2, 3, 4, 5, 6, 7, 8, 9, 10, 11, 12, 13, 14, 15, 16, 17, 18, 19, 20, 21, 22, 23, 24, 25, 25, 27, 28, 29, or 30 different targets are detected. Example methods for identifying such motifs are further disclosed in the Working Examples below.

[0992] In specific embodiments, the target molecule may be a target DNA and the method may further comprise binding the target DNA with a primer comprising an RNA polymerase site, as described herein.

[0993] In specific embodiments, the one or more ωRNA may be designed to detect a single nucleotide polymorphism in a target RNA or DNA, or a splice variant of an RNA transcript.

[0994] A sample for use with the invention may be a biological or environmental sample, such as a food sample (fresh fruits or vegetables, meats), a beverage sample, a paper surface, a fabric surface, a metal surface, a wood surface, a plastic surface, a soil sample, a freshwater sample, a wastewater sample, a saline water sample, exposure to atmospheric air or other gas sample, or a combination thereof. For example, household/commercial/industrial surfaces made of any materials including, but not limited to, metal, wood, plastic, rubber, or the like, may be swabbed and tested for contaminants. Soil samples may be tested for the presence of pathogenic bacteria or parasites, or other microbes, both for environmental purposes and/or for human, animal, or plant disease testing. Water samples such as freshwater samples, wastewater samples, or saline water samples can be evaluated for cleanliness and safety, and/or potability, to detect the presence of, for example, Cryptosporidium parvum, Giardia lamblia, or other microbial contamination. In further embodiments, a biological sample may be obtained from a source including, but not limited to, a tissue sample, saliva, blood, plasma, sera, stool, urine, sputum, mucous, lymph, synovial fluid, cerebrospinal fluid, ascites, pleural effusion, seroma, pus, bile, aqueous or vitreous humor, transudate, exudate, or swab of skin or a mucosal membrane surface. In some particular embodiments, an environmental sample or biological samples may be crude samples and/or the one or more target molecules may not be purified or amplified from the sample prior to application of the method. Identification of microbes may be useful and/or needed for any number of applications, and thus any type of sample from any source deemed appropriate by one of skill in the art may be used in accordance with the invention.

[0995] In some embodiments, the one or more ωRNAs may be designed to bind to cell free nucleic acids. In some embodiments, the one or more ωRNAs may be designed to detect a single nucleotide polymorphism in a target RNA or DNA, or a splice variant of an RNA transcript. In some embodiments, the one or more guide RNAs are designed to bind to one or more target molecules that are diagnostic for a disease state, as described herein.

[0996] In some embodiments, the disease state may be an infection, an organ disease, a blood disease, an immune system disease, a cancer, a brain and nervous system disease, an endocrine disease, a pregnancy or childbirth-related disease, an inherited disease, or an environmentally-acquired disease.

[0997] In certain example embodiments, the systems, devices, and methods, disclosed herein are directed to detecting the presence of one or more microbial agents in a sample, such as a biological sample obtained from a subject. In certain example embodiments, the microbe may be a bacterium, a fungus, a yeast, a protozoa, a parasite, or a virus. Accordingly, the methods disclosed herein can be adapted for use in other methods (or in combination) with other methods that require quick identification of microbe species, monitoring the presence of microbial proteins (antigens), antibodies, antibody genes, detection of certain phenotypes (e.g. bacterial resistance), monitoring of disease progression and/or outbreak, and antibiotic screening. Because of the rapid and sensitive diagnostic capabilities of the embodiments disclosed here, detection of microbe species type, down to a single nucleotide difference, and the ability to be deployed as a POC device, the embodiments disclosed herein may be used guide therapeutic regimens, such as selection of the appropriate antibiotic or antiviral. The embodiments disclosed herein may also be used to screen environmental samples (air, water, surfaces, food etc.) for the presence of microbial contamination.

[0998] Disclosed is a method to identify microbial species, such as bacterial, viral, fungal, yeast, or parasitic species, or the like. Particular embodiments disclosed herein describe methods and systems that will identify and distinguish microbial species within a single sample, or across multiple samples, allowing for recognition of many different microbes. The present methods allow the detection of pathogens and distinguishing between two or more species of one or more organisms, e.g., bacteria, viruses, yeast, protozoa, and fungi or a combination thereof, in a biological or environmental sample, by detecting the presence of a target nucleic acid sequence in the sample. A positive signal obtained from the sample indicates the presence of the microbe. Multiple microbes can be identified simultaneously using the methods and systems of the invention, by employing the use of more than one effector protein, wherein each effector protein targets a specific microbial target sequence. In this way, a multi-level analysis can be performed for a particular subject in which any number of microbes can be detected at once. In some embodiments, simultaneous detection of multiple microbes may be performed using a set of probes that can identify one or more microbial species.

[0999] Multiplex analysis of samples enables large-scale detection of samples, reducing the time and cost of analyses. However, multiplex analyses are often limited by the availability of a biological sample. In accordance with the invention, however, alternatives to multiplex analysis may be performed such that multiple effector proteins can be added to a single sample and each masking construct may be combined with a separate quencher dye. In this case, positive signals may be obtained from each quencher dye separately for multiple detection in a single sample.

[1000] Disclosed herein are methods for distinguishing between two or more species of one or more organisms in a sample. The methods are also amenable to detecting one or more species of one or more organisms in a sample.

[1001] In some embodiments, the methods provide for detection of disease states that are characterized by the presence or absence of an antibiotic or drug resistance or susceptibility gene or transcript or polypeptide, preferably in a pathogen or a cell.

### Devices for Detection Assays

[1002] In one embodiment, the detection assay can be provided on a cartridge or chip. In an aspect, the cartridge can comprise one or more ampoules and one or more wells that are communicatively coupled, allowing for the transfer, exchange or movement of reagents and sample with or without the use of beads through the chambers of the cartridge and facilitating detection assays utilizing systems/devices for facilitating the detection assay on the cartridge.

### Cartridge

[1003] The cartridge, also referred to herein as a chip, according to the present invention comprises a series of components of ampoules and chambers that are communicatively coupled with one or more other components on the cartridge. The coupling is typically a fluidic communication, for example, via channels. The cartridge may comprise a membrane that seals one or more of the chambers and/or ampoules. In an aspect, the membrane allows for storage of reagents, buffers and other solid or fluid components which cover and seal the cartridge. The membrane can be configured to be punctured, pierced or otherwise released from sealing or covering one or more components of the cartridge by a means for releasing reagents.

[1004] As noted above, certain embodiments enable the use of nucleic acid binding beads to concentrate target nucleic acid but that do not require elution of the isolated nucleic acid. Thus, in certain example embodiments, the cartridge may further comprise an activatable magnet, such as an electro-magnet. A means for activating the magnet may be located on the device, or the means for supplying the magnet or activating the magnet on the cartridge may be provided by a second device, such as those disclosed in further detail below.

### Ampoules

[1005] The ampoules, also referred to as blisters, allow for storage and release of reagents throughout the cartridge. Ampoules can include liquid or solid reagents, for example, lysis reagents in one ampoule and reaction reagents in another ampoule. The reagents can be as described elsewhere herein, and can be adapted for the use in the cartridge. The ampoule may be sealed by a film that allows for the bursting, puncture or other release of the contents of the ampoules. See, e.g. Becker, H. & Gartner, C. Microfluidics-enabled diagnostic systems: markets, challenges, and examples. In Microchip Diagnostics: Methods and Protocols (eds Taly, V. et al.) (Springer, New York, 2017); Czurratis et al., doi: 10.1088/0960-1317/25/4/045002. Considerations for ampoules can include as discussed in, for example, Smith, S., et al., Blister pouches for effective reagent storage on microfluidic chips for blood cell counting. Microfluid Nanofluid 20, 163 (2016). DOI:10.1007/s10404-016-1830-2. In an aspect, the seal is a frangible seal formed of a composite-layer film that is assembled to the cartridge main body. While referred to herein as an ampoule, the ampoule may comprise a cavity on a chip which comprises a sealed film that is opened by the release means.

### Chambers

[1006] The chambers on the chip may located and sized for fluidic communication via channels or other communication means with ampoules and/or other chambers on the chip.

### Means for Reading the Results of the Assay

[1007] A means for reading the results of the assay can be provided in the system. The means for reading the results of the assay will depend in part on the type of detectable signal generated by the assay. In particular embodiments, the assay generates a detectable fluorescent or color readout. In these instances, the means for reading the results of the assay will be an optic means, for example a single channel or multi-channel optical means such as a fluorimeter, colorimeter or other spectroscopic sensor.

[1008] A combination of means for reading the results of the assay can be utilized, and may include readings such as turbidity, temperature, magnetic, radio, or electrical properties and or optical properties, including scattering, polarization effects, etc.

[1009] The system may further comprise a user interface for programming the device and/or readout of the results of the assay. The user interface may comprise an LED screen. The system can be further configured for a USB port that can allow for docking of four or more devices.

[1010] In an aspect, the system comprises a means for activating a magnet that is disposed within or on the cartridge.

### Lateral Flow Devices

[1011] In one embodiment, the detection assay can be provided on a lateral flow device, see, e.g. International Publication WO 2019/071051, incorporated herein by reference for exemplary lateral flow devices. The lateral flow device can be adapted to detect one or more coronaviruses and/or other viruses in combination of the coronavirus. The lateral flow device may comprise a flexible substrate, such as a paper substrate or a flexible polymer-based substrate, which can include freeze-dried reagents for detection assays with a visual readout of the assay results. See, WO 2019/071051 at [0145]-[0151] and Example 2, specifically incorporated herein by reference. In an aspect, lyophilized reagents can include preferred excipients that aid in rate of reaction, specificity, or other variable, for example, trehalose, histidine, and/or glycine. In one embodiment, a coronavirus assay can be utilized with isothermal amplification reagents, allowing amplification without complex instrumentation that may be unavailable in the field. Accordingly, the assay can be adapted for field diagnostics, including use of visual readout on a lateral flow device, rapid, sensitive detection and can be deployed for early and direct detection. Colorimetric detection can be utilized and may be particularly suited for field deployable applications, as described in International Application PCT/US2019/015726, published as WO2019/148206. In particular, colorimetric detection can be as described in WO2019/148206 at FIGS. 102, 105, 107-111 and [00306]-[00324], incorporated herein by reference and may be utilized with the TnpB systems.

[1012] In one embodiment, the invention provides a lateral flow device comprising a substrate comprising a first end and a second end. The first end may comprise a sample loading portion, a first region comprising a detectable ligand, two or more TnpB systems, two or more detection constructs, and one or more first capture regions, each comprising a first binding agent. The substrate may also comprise two or more second capture regions between the first region of the first end and the second end, each second capture region comprising a different binding agent. Each of the two or more TnpB systems may comprise a TnpB protein and one or more nucleic acid component molecules, each nucleic acid component molecule sequence configured to bind one or more target molecules.

[1013] The device may comprise a lateral flow substrate for detecting a reaction between a TnpB polypeptide and a target molecule triggering collateral, non-specific cleavage of detection construct. Substrates suitable for use in lateral flow assays are known in the art. These may include, but are not necessarily limited to membranes or pads made of cellulose and/or glass fiber, polyesters, nitrocellulose, or absorbent pads (J Saudi Chem Soc 19(6):689-705; 2015), and other embodiments further described herein. The detection system, i.e. one or more TnpB systems and corresponding reporter constructs are added to the lateral flow substrate at a defined reagent portion of the lateral flow substrate, typically on one end of the lateral flow substrate. Reporting constructs used within the context of the present invention can comprise a first molecule and a second molecule linked by an RNA or DNA linker. The lateral flow substrate further comprises a sample portion. The sample portion may be equivalent to, continuous with, or adjacent to the reagent portion. In an aspect, the lateral flow substrate can be contained within a further device. In an aspect, the lateral flow substrate can be utilized for visual readout of a detectable signal in one-pot reactions, e.g. wherein steps of extracting, amplifying and detecting are performed in an individual discrete volume.

### Lateral Flow Substrate

[1014] In certain example embodiments, a lateral flow device comprises a lateral flow substrate on which detection can be performed. Substrates suitable for use in lateral flow assays are known in the art. These may include, but are not necessarily limited to, membranes or pads made of cellulose and/or glass fiber, polyesters, nitrocellulose, or absorbent pads (J Saudi Chem Soc 19(6):689-705; 2015).

[1015] Lateral support substrates comprise a first and second end, and one or more capture regions that each comprise binding agents. The first end may comprise a sample loading portion, a first region comprising a detectable ligand, two or more TnpB systems, two or more detection constructs, and one or more first capture regions, each comprising a first binding agent. The substrate may also comprise two or more second capture regions between the first region of the first end and the second end, each second capture region comprising a different binding agent. Each of the two or more TnpB systems may comprise a TnpB protein and one or more nucleic acid component molecules, each nucleic acid component configured to bind one or more target molecules. The lateral flow substrates may be configured to detect a reaction wherein collateral, non-specific cleavage is triggered upon binding and cleavage of a target molecule in the reaction by the TnpB protein.

[1016] Lateral support substrates may be located within a housing (see for example, “Rapid Lateral Flow Test Strips” Merck Millipore 2013). The housing may comprise at least one opening for loading samples and a second single opening or separate openings that allow for reading of detectable signal generated at the first and second capture regions.

[1017] The embodiments disclosed herein can be prepared in freeze-dried format for convenient distribution and point-of-care (POC) applications. Such embodiments are useful in multiple scenarios in human health including, for example, viral detection, bacterial strain typing, sensitive genotyping, and detection of disease-associated cell free DNA. Accordingly, the lateral substrate comprising one or more of the elements of the system, including detectable ligands, TnpB systems, detection constructs and binding agents may be freeze-dried to the lateral flow substrate and packaged as a ready to use device. Alternatively, all or a portion of the elements of the system may be added to the reagent portion of the lateral flow substrate at the time of using the device.

### First End and Second End of the Substrate

[1018] The substrate of the lateral flow device comprises a first and second end. The TnpB system, i.e. one or more TnpB systems and corresponding reporter constructs are added to the lateral flow substrate at a defined reagent portion of the lateral flow substrate, typically on a first end of the lateral flow substrate. Reporting constructs used within the context of the present invention comprise a first molecule and a second molecule linked by an RNA or DNA linker. The lateral flow substrate further comprises a sample portion. The sample portion may be equivalent to, continuous with, or adjacent to the reagent portion.

[1019] In certain example embodiments, the first end comprises a first region. The first region comprises a detectable ligand, two or more TnpB systems, two or more detection constructs, and one or more first capture regions, each comprising a first binding agent.

### Capture Regions

[1020] The lateral flow substrate can comprise one or more capture regions. In embodiments the first end of the lateral flow substrate comprises one or more first capture regions, with two or more second capture regions between the first region of the first end of the substrate and the second end of the substrate. The capture regions may be provided as a capture line, typically a horizontal line running across the device, but other configurations are possible. The first capture region is proximate to and on the same end of the lateral flow substrate as the sample loading portion.

### Binding Agents

[1021] Specific binding-integrating molecules comprise any members of binding pairs that can be used in the present invention. Such binding pairs are known to those skilled in the art and include, but are not limited to, antibody-antigen pairs, enzyme-substrate pairs, receptor-ligand pairs, and streptavidin-biotin. In addition to such known binding pairs, novel binding pairs may be specifically designed. A characteristic of binding pairs is the binding between the two members of the binding pair.

[1022] A first binding agent that specifically binds the first molecule of the reporter construct is fixed or otherwise immobilized to the first capture region. The second capture region is located towards the opposite end of the lateral flow substrate from the first capture region. A second binding agent is fixed or otherwise immobilized at the second capture region. The second binding agent specifically binds the second molecule of the reporter construct, or the second binding agent may bind a detectable ligand. For example, the detectable ligand may be a particle, such as a colloidal particle, that when it aggregates can be detected visually, and generates a detectable positive signal. The particle may be modified with an antibody that specifically binds the second molecule on the reporter construct. If the reporter construct is not cleaved it will facilitate accumulation of the detectable ligand at the first binding region. If the reporter construct is cleaved the detectable ligand is released to flow to the second binding region. In such an embodiment, the second binding region comprises a second binding agent capable of specifically or non-specifically binding the detectable ligand on the antibody of the detectable ligand. Binding agents can be, for example, antibodies, that recognize a particular affinity tag. Such binding agents can further contain, for example, detectable labels, such as isotope labels and/or nucleic acid barcodes. A barcode is a short sequence of nucleotides (for example, DNA, RNA, or combinations thereof) that is used as an identifier. A nucleic acid barcode may have a length of 4-100 nucleotides and be either single or double-stranded. Methods for identifying cells with barcodes are known in the art. Accordingly, nucleic acid component molecules of the TnpB systems described herein may be used to detect the barcode.

### Detectable Ligands

[1023] The first region is loaded with a detectable ligand, such as those disclosed herein, for example a gold nanoparticle. The detectable ligand may be a particle, such as a colloidal particle, that when it aggregates can be detected visually. The particle may be modified with an antibody that specifically binds the second molecule on the reporter construct. If the reporter construct is not cleaved it will facilitate accumulation of the detectable ligand at the first binding region. If the reporter construct is cleaved the detectable ligand is released to flow to the second binding region. In such an embodiment, the second binding agent is an agent capable of specifically or non-specifically binding the detectable ligand on the antibody on the detectable ligand. Examples of suitable binding agents for such an embodiment include, but are not limited to, protein A and protein G. In some examples, the detectable ligand is a gold nanoparticle, which may be modified with a first antibody, such as an anti-FITC antibody.

### Lateral Flow Detection Constructs

[1024] The first region also comprises a detection construct. In one example embodiment, a RNA detection construct and a TnpB system (a TnpB protein and one or more nucleic acid component molecules configured to bind to one or more target sequences) as disclosed herein. In one example embodiment, and for purposes of further illustration, the RNA construct may comprise a FAM molecule on a first end of the detection construction and a biotin on a second end of the detection construct. Upstream of the flow of solution from the first end of the lateral flow substrate is a first test band. The test band may comprise a biotin ligand. Accordingly, when the RNA detection construct is present it its initial state, i.e. in the absence of target, the FAM molecule on the first end will bind the anti-FITC antibody on the gold nanoparticle, and the biotin on the second end of the RNA construct will bind the biotin ligand allowing for the detectable ligand to accumulate at the first test, generating a detectable signal. Generation of a detectable signal at the first band indicates the absence of the target ligand. In the presence of target, the TnpB complex forms and the TnpB protein is activated resulting in cleavage of the detection construct. In the absence of intact RNA detection construct the colloidal gold will flow past the second strip. The lateral flow device may comprise a second band, upstream of the first band. The second band may comprise a molecule capable of binding the antibody-labeled colloidal gold molecule, for example an anti-rabbit antibody capable of binding a rabbit anti-FITC antibody on the colloidal gold. Therefore, in the presence of one or more targets, the detectable ligand will accumulate at the second band, indicating the presence of the one or more targets in the sample.

[1025] In one embodiment, the first end of the lateral flow device comprises two detection constructs and each of the two detection constructs comprises an RNA or DNA oligonucleotide, comprising a first molecule on a first end and a second molecule on a second end. The first molecule and the second molecule may be linked by an RNA or DNA linker.

[1026] In one embodiment, the first molecule on the first end of the first detection construct may be FAM and the second molecule on the second end of the first detection construct may be biotin, or vice versa. In one embodiment, the first molecule on the first end of the second detection construct may be FAM and the second molecule on the second end of the second detection construct may be Digoxigenin (DIG), or vice versa.

[1027] In one embodiment, the first end may comprise three detection constructs, wherein each of the three detection constructs comprises an RNA or DNA oligonucleotide, comprising a first molecule on a first end and a second molecule on a second end. In specific embodiments, the first and second molecules on the detection constructs comprise Tye 665 and Alexa 488; Tye 665 and FAM, and Tye 665 and Digoxigenin (DIG), respectively.

[1028] In one embodiment, the first end of the lateral flow device comprises two or more TnpB systems, also referred to as a TnpB system. In one embodiment, such a TnpB system may include a TnpB protein and one or more nucleic acid component molecules configured to bind to one or more target sequences.

### Samples

[1029] When utilizing the detection systems with a lateral flow substrate, samples to be screened are loaded at the sample loading portion of the lateral flow substrate. The samples must be liquid samples or samples dissolved in an appropriate solvent, usually aqueous. The liquid sample reconstitutes the detection reagents such that a detection reaction can occur. The liquid sample begins to flow from the sample portion of the substrate towards the first and second capture regions.

[1030] A sample for use with the invention may be a biological or environmental sample, such as a surface sample, a fluid sample, or a food sample (fresh fruits or vegetables, meats). Food samples may include a beverage sample, a paper surface, a fabric surface, a metal surface, a wood surface, a plastic surface, a soil sample, a freshwater sample, a wastewater sample, a saline water sample, exposure to atmospheric air or other gas sample, or a combination thereof. For example, household/commercial/industrial surfaces made of any materials including, but not limited to, metal, wood, plastic, rubber, or the like, may be swabbed and tested for contaminants. Soil samples may be tested for the presence of pathogenic bacteria or parasites, or other microbes, both for environmental purposes and/or for human, animal, or plant disease testing. Water samples such as freshwater samples, wastewater samples, or saline water samples can be evaluated for cleanliness and safety, and/or potability, to detect the presence of, for example, Cryptosporidium parvum, Giardia lamblia, or other microbial contamination. In further embodiments, a biological sample may be obtained from a source including, but not limited to, a tissue sample, saliva, blood, plasma, sera, stool, urine, sputum, mucous, lymph, synovial fluid, spinal fluid, cerebrospinal fluid, ascites, pleural effusion, seroma, pus, bile, aqueous or vitreous humor, transudate, exudate, or swab of skin or a mucosal membrane surface. In some particular embodiments, an environmental sample or biological samples may be crude samples and/or the one or more target molecules may not be purified or amplified from the sample prior to application of the method. Identification of microbes may be useful and/or needed for any number of applications, and thus any type of sample from any source deemed appropriate by one of skill in the art may be used in accordance with the invention.

[1031] In particular embodiments, the methods and systems can be utilized for direct detection from patient samples. In an aspect, the methods and systems can further allow for direct detection from patient samples with a visual readout to further facilitate field-deployability. In an aspect, a field depoloyable version can include, for example the lateral flow devices and systems as described herein, and/or colorimetric detection. The methods and systems can be utilized to distinguish multiple viral species and strains and identify clinically relevant mutations, important with viral outbreaks such as the coronavirus outbreak in Wuhan (2019-nCoV). In an aspect, the sample is from a nasophyringeal swab or a saliva sample. See., e.g. Wyllie et al., “Saliva is more sensitive for SARS-CoV-2 detection in COVID-19 patients than nasopharyngeal swabs,” DOI: 10.1101/2020.04.16.20067835.

Methods for Detecting and/or Quantifying Target Nucleic Acids

[1032] In one embodiment, the invention provides methods for detecting target nucleic acids in a sample. Such methods may comprise contacting a sample with the first end of a lateral flow device as described herein. The first end of the lateral flow device may comprise a sample loading portion, wherein the sample flows from the sample loading portion of the substrate towards the first and second capture regions and generates a detectable signal.

[1033] A positive detectable signal may be any signal that can be detected using optical, fluorescent, chemiluminescent, electrochemical or other detection methods known in the art, as described elsewhere herein.

[1034] In one embodiment, the lateral flow device may be capable of detecting two different target nucleic acid sequences. In one embodiment, this detection of two different target nucleic acid sequences may occur simultaneously.

[1035] In one embodiment, the absence of target nucleic acid sequences in a sample elicits a detectable fluorescent signal at each capture region. In such instances, the absence of any target nucleic acid sequences in a sample may cause a detectable signal to appear at the first and second capture regions.

[1036] In one embodiment, the lateral flow device as described herein is capable of detecting three different target nucleic acid sequences. In specific embodiments, when the target nucleic acid sequences are absent from the sample, a fluorescent signal may be generated at each of the three capture regions. In such exemplary embodiments, a fluorescent signal may be absent at the capture region for the corresponding target nucleic acid sequence when the sample contains one or more target nucleic acid sequences.

[1037] Samples to be screened are loaded at the sample loading portion of the lateral flow substrate. The samples must be liquid samples or samples dissolved in an appropriate solvent, usually aqueous. The liquid sample reconstitutes the system reagents such that a detection reaction can occur. Intact reporter construct is bound at the first capture region by binding between the first binding agent and the first molecule. Likewise, the detection agent will begin to collect at the first binding region by binding to the second molecule on the intact reporter construct. If target molecule(s) are present in the sample, the TnpB protein collateral effect is activated. As activated TnpB protein comes into contact with the bound reporter construct, the reporter constructs are cleaved, releasing the second molecule to flow further down the lateral flow substrate towards the second binding region. The released second molecule is then captured at the second capture region by binding to the second binding agent, where additional detection agent may also accumulate by binding to the second molecule. Accordingly, if the target molecule(s) is not present in the sample, a detectable signal will appear at the first capture region, and if the target molecule(s) is present in the sample, a detectable signal will appear at the location of the second capture region.

[1038] In one embodiment, the invention provides a method for quantifying target nucleic acids in samples comprising distributing a sample or set of samples into one or more individual discrete volumes comprising two or more TnpB systems as described herein. The method may comprise using HDA to amplify one or more target molecules in the sample or set of samples, as described herein. The method may further comprise incubating the sample or set of samples under conditions sufficient to allow binding of the nucleic acid component molecules to one or more target molecules. The method may further comprise activating the TnpB protein via binding of the nucleic acid component molecules to the one or more target molecules. Activating the TnpB protein may result in modification of the detection construct such that a detectable positive signal is generated. The method may further comprise detecting the one or more detectable positive signals, wherein detection indicates the presence of one or more target molecules in the sample. The method may further comprise comparing the intensity of the one or more signals to a control to quantify the nucleic acid in the sample. The steps of amplifying, incubating, activating, and detecting may all be performed in the same individual discrete volume.

[1039] An “individual discrete volume” is a discrete volume or discrete space, such as a container, receptacle, or other defined volume or space that can be defined by properties that prevent and/or inhibit migration of nucleic acids and reagents necessary to carry out the methods disclosed herein, for example a volume or space defined by physical properties such as walls, for example the walls of a well, tube, or a surface of a droplet, which may be impermeable or semipermeable, or as defined by other means such as chemical, diffusion rate limited, electro-magnetic, or light illumination, or any combination thereof. By “diffusion rate limited” (for example diffusion defined volumes) is meant spaces that are only accessible to certain molecules or reactions because diffusion constraints effectively defining a space or volume as would be the case for two parallel laminar streams where diffusion will limit the migration of a target molecule from one stream to the other. By “chemical” defined volume or space is meant spaces where only certain target molecules can exist because of their chemical or molecular properties, such as size, where for example gel beads may exclude certain species from entering the beads but not others, such as by surface charge, matrix size or other physical property of the bead that can allow selection of species that may enter the interior of the bead. By “electro-magnetically” defined volume or space is meant spaces where the electro-magnetic properties of the target molecules or their supports such as charge or magnetic properties can be used to define certain regions in a space such as capturing magnetic particles within a magnetic field or directly on magnets. By “optically” defined volume is meant any region of space that may be defined by illuminating it with visible, ultraviolet, infrared, or other wavelengths of light such that only target molecules within the defined space or volume may be labeled. One advantage to the used of non-walled, or semipermeable is that some reagents, such as buffers, chemical activators, or other agents maybe passed in Applicants' through the discrete volume, while other material, such as target molecules, maybe maintained in the discrete volume or space. Typically, a discrete volume will include a fluid medium, (for example, an aqueous solution, an oil, a buffer, and/or a media capable of supporting cell growth) suitable for labeling of the target molecule with the indexable nucleic acid identifier under conditions that permit labeling. Exemplary discrete volumes or spaces useful in the disclosed methods include droplets (for example, microfluidic droplets and/or emulsion droplets), hydrogel beads or other polymer structures (for example poly-ethylene glycol di-acrylate beads or agarose beads), tissue slides (for example, fixed formalin paraffin embedded tissue slides with particular regions, volumes, or spaces defined by chemical, optical, or physical means), microscope slides with regions defined by depositing reagents in ordered arrays or random patterns, tubes (such as, centrifuge tubes, microcentrifuge tubes, test tubes, cuvettes, conical tubes, and the like), bottles (such as glass bottles, plastic bottles, ceramic bottles, Erlenmeyer flasks, scintillation vials and the like), wells (such as wells in a plate), plates, pipettes, or pipette tips among others. In certain example embodiments, the individual discrete volumes are the wells of a microplate. In certain example embodiments, the microplate is a 96 well, a 384 well, or a 1536 well microplate.

[1040] Incubating the sample at either the amplification step or the extraction steps as described herein can be performed using heat sources known in the art. Advantageously, the heat source can be readily commercially available heating sources that do not require complicated instrumentation. Exemplary heating systems can include heating blocks, incubators, and/or water baths with temperatures maintained by commercially available sous-vide cookers. In this way, sample diagnostics can be performed without the requirement of expensive and proprietary equipment found primarily in diagnostic laboratory and hospital settings.

[1041] In certain example embodiments, paper-based microfluidics may be used for transfer of samples or reagents. For example, paper strips having wax barrier printed at a defined distance from the end of a paper dipstick may be used to define a volume of reagent or sample to be transferred. For example, a wax barrier may be printed across a paper dipstick to define a microliter volume such that when the dipstick is transferred into a volume of a reagent or sample only a microliter of said reagent or sample is absorbed onto the dipstick. The dipstick may be place in a second reagent mix, where the reagent or sample will diffuse into the reaction mixture. Such components allow for preparation and use of the assay without specialized equipment such as pipettors.

[1042] Optical means may be used to assess the presence and level of a given target molecule. In one embodiment, an optical sensor detects unmasking of a fluorescent masking agent. In one embodiment, the device of the present invention may include handheld portable devices for diagnostic reading of an assay (see e.g., Vashist et al., Commercial Smartphone-Based Devices and Smart Applications for Personalized Healthcare Monitoring and Management, Diagnostics 2014, 4(3), 104-128; mReader from Mobile Assay; and Holomic Rapid Diagnostic Test Reader).

[1043] As noted herein, certain embodiments allow detection via colorimetric change which has certain attendant benefits when embodiments are utilized in POC situations and or in resource poor environments where access to more complex detection equipment to readout the signal may be limited. However, portable embodiments disclosed herein may also be coupled with hand-held spectrophotometers that enable detection of signals outside the visible range. An example of a hand-held spectrophotometer device that may be used in combination with the present invention is described in Das et al. “Ultra-portable, wireless smartphone spectrophotometer for rapid, non-destructive testing of fruit ripeness.” Nature Scientific Reports. 2016, 6:32504, DOI: 10.1038/srep32504. Finally, In one embodiment utilizing quantum dot-based masking constructs, use of a hand-held UV light, or other suitable device, may be successfully used to detect a signal owing to the near complete quantum yield provided by quantum dots.

### Amplifying Target Molecules

[1044] The step of amplifying one or more target molecules can comprise amplification systems known in the art. In one embodiment, amplification is isothermal. In certain example embodiments, target RNAs and/or DNAs may be amplified prior to activating the TnpB protein. Any suitable RNA or DNA amplification technique may be used. In certain embodiments, the amplifying step may take less than about 1 hour, 50 minutes, 40 minutes, 30 minutes, 25 minutes, 20 minutes or 15 minutes, which may depend on the sample, starting concentrations and nature of amplification used.

[1045] In one embodiment, the amplifying of the target molecules and the detection of the target molecules can be performed in a single reaction, for example, a ‘one-pot’ method. General guidance for use of a single-pot approach can be as described in Gootenberg, et al., Science 2018 Apr. 27: 360(6387) 439-444 (using Cas13, Cas12a and Csm6 generally, detecting multiple targets in a single reaction, and specifically performing DNA extraction in a sample and using as input for direct detection at Figure S33); and Ding et al., “All-in-One Dual CRISPR-Cas12a (AIOD-CRISPR) Assay: A Case for Rapid, Ultrasensitive and Visual Detection of Novel Coronavirus SARS-CoV-2 and HIV Virus,” doi:10.1101/2020.03.19.998724, biorxiv preprint (utilizing a pair of crRNAs with dual CRISPR-Cas12a detection for a one-pot approach to target-specific nucleic acid detection).

[1046] In certain example embodiments, the RNA or DNA amplification is an isothermal amplification. In certain example embodiments, the isothermal amplification may be nucleic-acid sequenced-based amplification (NASBA), recombinase polymerase amplification (RPA), loop-mediated isothermal amplification (LAMP), strand displacement amplification (SDA), helicase-dependent amplification (HDA), or nicking enzyme amplification reaction (NEAR). In certain example embodiments, non-isothermal amplification methods may be used which include, but are not limited to, PCR, multiple displacement amplification (MDA), rolling circle amplification (RCA), ligase chain reaction (LCR), or ramification amplification method (RAM).

[1047] The amplifying of target molecules can be optimized by methods as detailed herein. In an aspect, the design optimizes the primers used in the amplification, In particular aspects, the isothermal amplification is used with TnpB systems. In either approach, design considerations can follow a rational design for optimization of the reactions. Optimization of the methods as disclosed herein can include first screening primers to identify one or more sets of primers that work well for a particular target, TnpB protein and/or reaction. Once the primers have been screened, titration of magnesium concentration can be performed to identify an optimal magnesium concentration for higher signal to noise readout. In an example, varying additives with specific primers, target, TnpB protein, temperature, and other additive concentrations within the reaction can be identified. Optimization can be made with the goal of reducing the number of steps and buffer exchanges that have to occur in the reaction, simplifying the reaction and reducing the risks of contamination at transfer steps. Similarly, optimizing the salt levels as well as the type of salt utilized can further facilitate and optimize the one-pot detections disclosed herein.

### Loop-Mediated Isothermal Amplification

[1048] In certain example embodiments, a loop-mediated isothermal amplification (LAMP) reaction may be used to target nucleic acids, which encompasses both LAMP and RT-LAMP reactions. LAMP can be performed with a four-primer system for isothermal nucleic acid amplification in conjunction with a polymerase. Notomi et al., Nucleic Acids Res. 2000, 28, 12, Nagamine et al., Molecular and Cellular Probes (2002) 16, 223-229, doi: 10.1006/mcpr.2002.0415. When performing LAMP with a 4-primer system, two loop-forming inner primers, denoted as FIP and BIP, are provided with two outer primers, F3 and B3. The inner primers each contain two distinct sequences, one for priming in the first stage of the amplification and the other sequence for self-priming in subsequent amplification states. The two outer primers initiate strand displacement of nucleic acid strands initiated from the FIP and BIP primers, thereby generating formation of loops and strand displacement nucleic acid synthesis utilizing the provided polymerase. LAMP can be conducted with two to six primers, ranging from only the two loop-forming primers, up to at least the addition of 2 additional primers, LF and LB along with the two outer primers and two inner primers. LAMP technologies advantageously have high specificity and can work at a variety of pH and temperature. In a preferred aspect, the LAMP is an isothermal reaction at between about 45° C. to 750 C, 55 to 70° C. or 60° C. to 65° C. Colorimetric LAMP (Y. Zhang et al., doi:10.1101/2020.92.26.20028373), RT-LAMP (Lamb et al., doi: 10.1101/2020.02.19.20025155; and Yang et al., doi:10.1101/2020.03.02.20030130) have been developed for detection of COVID-19, and are incorporated herein by reference in their entirety.

[1049] In one embodiment, the LAMP reagents may include Bst 2.0+RTx or Bst 3.0 from New England Biolabs. In one embodiment, the LAMP reagents may comprise colorimetric or fluorescent detection. Detection of LAMP products can be accomplished using colorimetric tools, such as hydroxy napthol blue (see, e.g. Goto, M., et al., Colorimetric detection of loop-mediated isothermal amplification reaction by using hydroxy naphthol blue. Biotechniques, 2009. 46(3): p. 167-72.) leuco triphenylmethane dyes (see, e.g. Miyamoto, S., et al., Method for colorimetric detection of double-stranded nucleic acid using leuco triphenylmethane dyes. Anal Biochem, 2015. 473: p. 28-33) and pH-sensitive dyes (see, e.g. Tanner, N. A., Y. Zhang, and T. C. Evans, Jr., Visual detection of isothermal nucleic acid amplification using pH-sensitive dyes. Biotechniques, 2015. 58(2): p. 59-68); as well as fluorescent detection (see, e.g. Yu et al., Clinical Chemistry, hvaa102, doi:10.1093/clinchem/hvaa102 12 May 2020), including use of quenching probes (see, e.g. Shirato et al., J Virol Methods. 2018 August; 258:41-48. doi: 10.1016/j.jviromet.2018.05.006).

[1050] In an aspect, the primer sets for LAMP are designed to amplify one or more target sequences, generating amplicons that comprise the one or more target sequences. Optionally, the primers can comprise barcodes that can be designed as described elsewhere herein. Incubating to a temperature sufficient for LAMP amplification, e.g. 50° C.-72° C., more preferably 55° C. to 65° C., using a polymerase and, optionally a reverse transcriptase (in the event RT-LAMP is utilized). Preferably the enzymes utilized in the LAMP reaction are heat-stabilized. LAMP primer sites have been designed, see, e.g. Park et al., “Development of Reverse Transcription Loop-Mediated Isothermal Amplification Assays Targeting SARS-CoV-2” J. of Mol. Diag. (2020). Optionally, a control template is further provided with the sample, which may differ from the target sequence but share primer binding sites. In an exemplary embodiment, visual read out of the detection results can be accomplished using commercially-available lateral flow substrate, e.g. a commercially available paper substrate.

### NASBA

[1051] In certain example embodiments, the RNA or DNA amplification is NASBA, which is initiated with reverse transcription of target RNA by a sequence-specific reverse primer to create a RNA/DNA duplex. RNase H is then used to degrade the RNA template, allowing a forward primer containing a promoter, such as the T7 promoter, to bind and initiate elongation of the complementary strand, generating a double-stranded DNA product. The RNA polymerase promoter-mediated transcription of the DNA template then creates copies of the target RNA sequence. Importantly, each of the new target RNAs can be detected by the nucleic acid component molecules thus further enhancing the sensitivity of the assay. Binding of the target RNAs by the nucleic acid component molecules then leads to activation of the TnpB protein and the methods proceed as outlined above. The NASBA reaction has the additional advantage of being able to proceed under moderate isothermal conditions, for example at approximately 41° C., making it suitable for systems and devices deployed for early and direct detection in the field and far from clinical laboratories.

[1052] RPA

[1053] In certain other example embodiments, a recombinase polymerase amplification (RPA) reaction may be used to amplify the target nucleic acids. RPA reactions employ recombinases which are capable of pairing sequence-specific primers with homologous sequence in duplex DNA. If target DNA is present, DNA amplification is initiated and no other sample manipulation such as thermal cycling or chemical melting is required. The entire RPA amplification system is stable as a dried formulation and can be transported safely without refrigeration. RPA reactions may also be carried out at isothermal temperatures with an optimum reaction temperature of 37-42° C. The sequence specific primers are designed to amplify a sequence comprising the target nucleic acid sequence to be detected. In certain example embodiments, a RNA polymerase promoter, such as a T7 promoter, is added to one of the primers. This results in an amplified double-stranded DNA product comprising the target sequence and a RNA polymerase promoter. After, or during, the RPA reaction, a RNA polymerase is added that will produce RNA from the double-stranded DNA templates. The amplified target RNA can then in turn be detected by the TnpB system. In this way target DNA can be detected using the embodiments disclosed herein. RPA reactions can also be used to amplify target RNA. The target RNA is first converted to cDNA using a reverse transcriptase, followed by second strand DNA synthesis, at which point the RPA reaction proceeds as outlined above.

### Transposase Based Amplification

[1054] Embodiments disclosed herein provide systems and methods for isothermal amplification of target nucleic acid sequences by contacting oligonucleotides containing the target nucleic acid sequence with a transposon complex. The oligonucleotides may be single stranded or double stranded RNA, DNA, or RNA/DNA hybrid oligonucleotides. The transposon complex comprises a transposase and a transposon sequence comprising one or more RNA polymerase promoters. The transposase facilitates insertion of the one or more RNA polymerase promoters into the oligonucleotide. A RNA polymerase promoter can then transcribe the target nucleic acid sequence from the inserted one or more RNA polymerase promoters. One advantage of this system is that there is no need to heat or melt double-stranded DNA templates, since RNA polymerase polymerases require a double-stranded template. Such isothermal amplification is fast and simple, obviating the need for complicated and expensive instrumentation for denaturation and cooling. In certain example embodiment the RNA polymerase promoter is a native of modified T7 RNA promoter.

[1055] The term “transposon”, as used herein, refers to a nucleic acid segment, which is recognized by a transposase or an integrase enzyme and which is an essential component of a functional nucleic acid-protein complex (i.e. a transposome) capable of transposition. The term “transposase” as used herein refers to an enzyme, which is a component of a functional nucleic acid-protein complex capable of transposition and which is mediating transposition. The term “transposase” also refers to integrases from retrotransposons or of retroviral origin. Transposon complexes form between a transposase enzyme and a fragment of double stranded DNA that contains a specific binding sequence for the enzyme, termed “transposon end”. The sequence of the transposon binding site can be modified with other bases, at certain positions, without affecting the ability for transposon complex to form a stable structure that can efficiently transpose into target DNA.

[1056] In embodiments provided herein, the transposon complex may comprise a transposase and a transposon sequence comprising one or more RNA polymerase promoters. The term “promoter” refers to a region of DNA involved in binding the RNA polymerase to initiate transcription. In specific embodiments, the RNA polymerase promoter may be a T7 RNA polymerase promoter. The T7 RNA promoter may be inserted into the double-stranded polynucleotide using the transposase. In one embodiment, insertion of the T7 RNA polymerase promoter into the oligonucleotide may be random.

[1057] The frequency of transposition is very low for most transposons, which use complex mechanisms to limit activity. Tn5 transposase, for example, utilizes a DNA binding sequence that is suboptimal and the C-terminus of the transposase interferes with DNA binding. Mechanisms involved in Tn5 transposition have been carefully characterized by Reznikoff and colleagues. Tn5 transposes by a cut-and-paste mechanism. The transposon has two pairs of 19 bp elements that are utilized by the transposase: outside elements (OE) and inside elements (IE). One transposase monomer binds to each of the two elements that are utilized. After a monomer is bound to each end of the transposon, the two monomers dimerize, forming a synapse. Vectors with donor backbones of at least 200 bp, but less than 1000 bp, are most functional for transposition in bacteria. Transposon cleavage occurs by trans catalysis and only when monomers bound to each DNA end are in a synaptic complex. Tn5 transposes with a relaxed target site selection and can therefore insert into target DNA with little to no target sequence specificity.

[1058] The natural downregulation of Tn5 transposition can be overcome by selection of a hyperactive transposase and by optimizing the transposase-binding elements [York et al. 1998]. A mosaic element (ME), made by modification of three bases of the wild type OE, led to a 50-fold increase in transposition events in bacteria as well as cell-free systems. The combined effect of the optimized ME and hyperactive mutant transposase is estimated to result in a 100-fold increase in transposition activity. Goryshin et al showed that preformed Tn5 transposition complexes could be functionally introduced into bacterial or yeast by electroporation [Goryshin et al. 2000]. Linearization of the DNA, to have inverted repeats precisely positioned at both ends of the transposon, allowed Goryshin and coworkers to bypass the cutting step of transposition thus enhancing transposition efficiency.

[1059] In one embodiment, the transposase may be used to tagment the oligonucleotide sequence comprising the target sequence. The term “tagmentation” refers to a step in the Assay for Transposase Accessible Chromatin using sequencing (ATAC-seq) as described. (See, Buenrostro, J. D., Giresi, P. G., Zaba, L. C., Chang, H. Y., Greenleaf, W. J., Transposition of native chromatin for fast and sensitive epigenomic profiling of open chromatin, DNA-binding proteins and nucleosome position. Nature methods 2013; 10 (12): 1213-1218). Specifically, a hyperactive Tn5 transposase loaded in vitro with adapters for high-throughput DNA sequencing, can simultaneously fragment and tag a genome with sequencing adapters. In one embodiment the adapters are compatible with the methods described herein.

[1060] In one embodiment, the transposase may be a Tn5 transposase. In one embodiment, the transposase may be a variant of a Tn5 transposase, or an engineered transposase. Transposases may be engineered using any method known in the art. The engineered transposase may be optimized to function at a temperature ranging from 30° C. to 45° C., 35° C. to 40° C. or any temperature in between. The engineered transposase may be optimized to release from the oligonucleotide at a faster rate compared to a wild type transposase.

[1061] In one embodiment, the transposase may be a Tn5 transposase, a Mu transposase, or a Tn7 transposase. Transposition efficiency in vitro may vary depending on the transposon system used. Generally, Tn5 and Mu transposases effect higher levels of transposition efficiency. In one embodiment, insertion may be random. In one embodiment, insertion may occur in GC rich regions of the target sequence.

[1062] In one embodiment, the transposon sequence may comprise two 19 base pair Mosaic End (ME) Tn5 transposase recognition sequences. Tn5 transposases will generally transpose any DNA sequence contained between such short 19 base pair ME Tn5 transposase recognition sequences.

[1063] In one embodiment, use of a transposase allows for separation of a double-stranded polynucleotide in the absence of heat or melting. Approaches can be adapted from those described in PCT/US2019/039195, incorporated herein by reference.

### Nickase Dependent Amplification

[1064] In an embodiment of the invention may comprise nickase-based amplification. The nicking enzyme may be a TnpB protein. Accordingly, the introduction of nicks into dsDNA can be programmable and sequence-specific. In an embodiment of the invention, two guides can be designed to target opposite strands of a dsDNA target. According to the invention, the nickase can be TnpB, or one may use any CRISPR protein such as Cpf1, C2c1, Cas9, or any ortholog or CRISPR protein that cleaves or is engineered to cleave a single strand of a DNA duplex. In a particular embodiment, the TnpB is utilized in the nickase dependent amplification. The nicked strands may then be extended by a polymerase. In an embodiment, the locations of the nicks are selected such that extension of the strands by a polymerase is towards the central portion of the target duplex DNA between the nick sites. In one embodiment, primers are included in the reaction capable of hybridizing to the extended strands followed by further polymerase extension of the primers to regenerate two dsDNA pieces: a first dsDNA that includes the first strand TnpB guide site or both the first and second strand TnpB guide sites, and a second dsDNA that includes the second strand TnpB guide site or both the first and second strand TnpB guide sites. These pieces continue to be nicked and extended in a cyclic reaction that exponentially amplifies the region of the target between nicking sites. Alternatively, a CRISPR-Cas protein instead of TnpB can be used for nickase-based amplification, and such methods are known in the art.

[1065] The amplification can be isothermal and selected for temperature. In one embodiment, the amplification proceeds rapidly at 37 degrees. In other embodiments, the temperature of the isothermal amplification may be chosen by selecting a polymerase (e.g. Bsu, Bst, Phi29, klenow fragment etc.). operable at a different temperature.

[1066] Thus, whereas nicking isothermal amplification techniques use nicking enzymes with fixed sequence preference (e.g. in nicking enzyme amplification reaction or NEAR), which requires denaturing of the original dsDNA target to allow annealing and extension of primers that add the nicking substrate to the ends of the target, use of a reprogrammable nickase wherein the nicking sites can be programed via RNA molecules means that no denaturing step is necessary, enabling the entire reaction to be truly isothermal. This also simplifies the reaction because these primers that add the nicking substrate are different than the primers that are used later in the reaction, meaning that NEAR requires two primer sets (i.e. 4 primers) while Cpf1 nicking amplification only requires one primer set (i.e. two primers). This makes nicking Cpf1 amplification much simpler and easier to operate without complicated instrumentation to perform the denaturation and then cooling to the isothermal temperature.

[1067] In an aspect, the isothermal amplification reagents may be utilized with a thermostable TnpB protein. The combination of thermostable protein and isothermal amplification reagents may be utilized to further improve reaction times for detection and diagnostics.

[1068] Accordingly, in certain example embodiments the systems disclosed herein may include amplification reagents. Different components or reagents useful for amplification of nucleic acids are described herein. For example, an amplification reagent as described herein may include a buffer, such as a Tris buffer. A Tris buffer may be used at any concentration appropriate for the desired application or use, for example including, but not limited to, a concentration of 1 mM, 2 mM, 3 mM, 4 mM, 5 mM, 6 mM, 7 mM, 8 mM, 9 mM, 10 mM, 11 mM, 12 mM, 13 mM, 14 mM, 15 mM, 25 mM, 50 mM, 75 mM, 1 M, or the like. One of skill in the art will be able to determine an appropriate concentration of a buffer such as Tris for use with the present invention.

[1069] A salt, such as magnesium chloride (MgCl2), potassium chloride (KCl), or sodium chloride (NaCl), may be included in an amplification reaction, such as PCR, in order to improve the amplification of nucleic acid fragments. Although the salt concentration will depend on the particular reaction and application, in one embodiment, nucleic acid fragments of a particular size may produce optimum results at particular salt concentrations. Larger products may require altered salt concentrations, typically lower salt, in order to produce desired results, while amplification of smaller products may produce better results at higher salt concentrations. One of skill in the art will understand that the presence and/or concentration of a salt, along with alteration of salt concentrations, may alter the stringency of a biological or chemical reaction, and therefore any salt may be used that provides the appropriate conditions for a reaction of the present invention and as described herein. In certain preferred embodiments, when polynucleotide extraction beads such as magnetic beads are utilized, a Plant QuickExtract solution can be used in combination with a KCl buffer in optimized detection methods according to the present disclosure.

[1070] Other components of a biological or chemical reaction may include a cell lysis component in order to break open or lyse a cell for analysis of the materials therein. A cell lysis component may include, but is not limited to, a detergent, a salt as described above, such as NaCl, KCl, ammonium sulfate [(NH4)2SO4], or others. Detergents that may be appropriate for the invention may include Triton X-100, sodium dodecyl sulfate (SDS), CHAPS (3-[(3-cholamidopropyl)dimethylammonio]-1-propanesulfonate), ethyl trimethyl ammonium bromide, nonyl phenoxypolyethoxylethanol (NP-40). Concentrations of detergents may depend on the particular application, and may be specific to the reaction in some cases. Amplification reactions may include dNTPs and nucleic acid primers used at any concentration appropriate for the invention, such as including, but not limited to, a concentration of 100 nM, 150 nM, 200 nM, 250 nM, 300 nM, 350 nM, 400 nM, 450 nM, 500 nM, 550 nM, 600 nM, 650 nM, 700 nM, 750 nM, 800 nM, 850 nM, 900 nM, 950 nM, 1 mM, 2 mM, 3 mM, 4 mM, 5 mM, 6 mM, 7 mM, 8 mM, 9 mM, 10 mM, 20 mM, 30 mM, 40 mM, 50 mM, 60 mM, 70 mM, 80 mM, 90 mM, 100 mM, 150 mM, 200 mM, 250 mM, 300 mM, 350 mM, 400 mM, 450 mM, 500 mM, or the like. Likewise, a polymerase useful in accordance with the invention may be any specific or general polymerase known in the art and useful or the invention, including Taq polymerase, Q5 polymerase, or the like.

[1071] In one embodiment, amplification reagents as described herein may be appropriate for use in hot-start amplification. Hot start amplification may be beneficial In one embodiment to reduce or eliminate dimerization of adaptor molecules or oligos, or to otherwise prevent unwanted amplification products or artifacts and obtain optimum amplification of the desired product. Many components described herein for use in amplification may also be used in hot-start amplification. In one embodiment, reagents or components appropriate for use with hot-start amplification may be used in place of one or more of the composition components as appropriate. For example, a polymerase or other reagent may be used that exhibits a desired activity at a particular temperature or other reaction condition. In one embodiment, reagents may be used that are designed or optimized for use in hot-start amplification, for example, a polymerase may be activated after transposition or after reaching a particular temperature. Such polymerases may be antibody-based or aptamer-based. Polymerases as described herein are known in the art. Examples of such reagents may include, but are not limited to, hot-start polymerases, hot-start dNTPs, and photo-caged dNTPs. Such reagents are known and available in the art. One of skill in the art will be able to determine the optimum temperatures as appropriate for individual reagents.

[1072] Amplification of nucleic acids may be performed using specific thermal cycle machinery or equipment, and may be performed in single reactions or in bulk, such that any desired number of reactions may be performed simultaneously. In one embodiment, amplification may be performed using microfluidic or robotic devices, or may be performed using manual alteration in temperatures to achieve the desired amplification. In one embodiment, optimization may be performed to obtain the optimum reactions conditions for the particular application or materials. One of skill in the art will understand and be able to optimize reaction conditions to obtain sufficient amplification.

[1073] In one embodiment, detection of DNA with the methods or systems of the invention requires transcription of the (amplified) DNA into RNA prior to detection.

[1074] It will be evident that detection methods of the invention can involve nucleic acid amplification and detection procedures in various combinations. The nucleic acid to be detected can be any naturally occurring or synthetic nucleic acid, including but not limited to DNA and RNA, which may be amplified by any suitable method to provide an intermediate product that can be detected. Detection of the intermediate product can be by any suitable method including but not limited to binding and activation of a TnpB protein which produces a detectable signal moiety by direct or collateral activity.

### Helicase-Dependent Amplification

[1075] In helicase-dependent amplification, a helicase enzyme is used to unwind a double stranded nucleic acid to generate templates for primer hybridization and subsequent primer-extension. This process utilizes two oligonucleotide primers, each hybridizing to the 3′-end of either the sense strand containing the target sequence or the anti-sense strand containing the reverse-complementary target sequence. The HDA reaction is a general method for helicase-dependent nucleic acid amplification.

[1076] In combining this method with a TnpB detection system, the target nucleic acid may be amplified by opening R-loops of the target nucleic acid using first and second TnpB complexes. The first and second strand of the target nucleic acid may thus be unwound using a helicase, allowing primers and polymerase to bind and extend the DNA under isothermal conditions.

[1077] The term “helicase” refers here to any enzyme capable of unwinding a double stranded nucleic acid enzymatically. For example, helicases are enzymes that are found in all organisms and in all processes that involve nucleic acid such as replication, recombination, repair, transcription, translation and RNA splicing. (Kornberg and Baker, DNA Replication, W. H. Freeman and Company (2^{nd} ed. (1992)), especially chapter 11). Any helicase that translocates along DNA or RNA in a 5′ to 3′ direction or in the opposite 3′ to 5′ direction may be used in present embodiments of the invention. This includes helicases obtained from prokaryotes, viruses, archaea, and eukaryotes or recombinant forms of naturally occurring enzymes as well as analogues or derivatives having the specified activity. Examples of naturally occurring DNA helicases, described by Kornberg and Baker in chapter 11 of their book, DNA Replication, W. H. Freeman and Company (2^{nd} ed. (1992)), include E. coli helicase I, II, III, & IV, Rep, DnaB, PriA, PcrA, T4 Gp41helicase, T4 Dda helicase, T7 Gp4 helicases, SV40 Large T antigen, yeast RAD. Additional helicases that may be useful in HDA include RecQ helicase (Harmon and Kowalczykowski, J. Biol. Chem. 276:232-243 (2001)), thermostable UvrD helicases from T. tengcongensis (disclosed in this invention, Example XII) and T. thermophilus (Collins and McCarthy, Extremophiles. 7:35-41. (2003)), thermostable DnaB helicase from T. aquaticus (Kaplan and Steitz, J. Biol. Chem. 274:6889-6897 (1999)), and MCM helicase from archaeal and eukaryotic organisms ((Grainge et al., Nucleic Acids Res. 31:4888-4898 (2003)).

[1078] A traditional definition of a helicase is an enzyme that catalyzes the reaction of separating/unzipping/unwinding the helical structure of nucleic acid duplexes (DNA, RNA or hybrids) into single-stranded components, using nucleoside triphosphate (NTP) hydrolysis as the energy source (such as ATP). However, it should be noted that not all helicases fit this definition anymore. A more general definition is that they are motor proteins that move along the single-stranded or double stranded nucleic acids (usually in a certain direction, 3′ to 5′ or 5 to 3, or both), i.e. translocases, that can or cannot unwind the duplexed nucleic acid encountered. In addition, some helicases simply bind and “melt” the duplexed nucleic acid structure without an apparent translocase activity.

[1079] Helicases exist in all living organisms and function in all aspects of nucleic acid metabolism. Helicases are classified based on the amino acid sequences, directionality, oligomerization state and nucleic-acid type and structure preferences. The most common classification method was developed based on the presence of certain amino acid sequences, called motifs. According to this classification helicases are divided into 6 super families: SF1, SF2, SF3, SF4, SF5 and SF6. SF1 and SF2 helicases do not form a ring structure around the nucleic acid, whereas SF3 to SF6 do. Superfamily classification is not dependent on the classical taxonomy.

[1080] DNA helicases are responsible for catalyzing the unwinding of double-stranded DNA (dsDNA) molecules to their respective single-stranded nucleic acid (ssDNA) forms. Although structural and biochemical studies have shown how various helicases can translocate on ssDNA directionally, consuming one ATP per nucleotide, the mechanism of nucleic acid unwinding and how the unwinding activity is regulated remains unclear and controversial (T. M. Lohman, E. J. Tomko, C. G. Wu, “Non-hexameric DNA helicases and translocases: mechanisms and regulation,” Nat Rev Mol Cell Biol 9:391-401 (2008)). Since helicases can potentially unwind all nucleic acids encountered, understanding how their unwinding activities are regulated can lead to harnessing helicase functions for biotechnology applications.

[1081] The term “HDA” refers to Helicase Dependent Amplification, which is an in vitro method for amplifying nucleic acids by using a helicase preparation for unwinding a double stranded nucleic acid to generate templates for primer hybridization and subsequent primer-extension. This process utilizes two oligonucleotide primers, each hybridizing to the 3′-end of either the sense strand containing the target sequence or the anti-sense strand containing the reverse-complementary target sequence. The HDA reaction is a general method for helicase-dependent nucleic acid amplification.

[1082] The invention comprises use of any suitable helicase known in the art. These include, but are not necessarily limited to, UvrD helicase, CRISPR-Cas3 helicase, E. coli helicase I, E. coli helicase II, E. coli helicase III, E. coli helicase IV, Rep helicase, DnaB helicase, PriA helicase, PcrA helicase, T4 Gp41 helicase, T4 Dda helicase, SV40 Large T antigen, yeast RAD helicase, RecD helicase, RecQ helicase, thermostable T. tengcongensis UvrD helicase, thermostable T. thermophilus UvrD helicase, thermostable T. aquaticus DnaB helicase, Dda helicase, papilloma virus E1 helicase, archaeal MCM helicase, eukaryotic MCM helicase, and T7 Gp4 helicase.

[1083] In particularly preferred embodiments, the helicase comprises a super mutation. In particular embodiments, although the E. coli mutation has been described, the mutations were generated by sequence alignment (e.g. D409A/D410A for TteUvrd) and result in thermophilic enzymes working at lower temperatures like 37° C., which is advantageous for amplification methods and systems described herein. In one embodiment, the super mutations is an aspartate to alanine mutation, with position based on sequence alignment. In one embodiment, the super mutant helicase is selected from WP_003870487.1 Thermoanaerobacter ethanolicus 403/404, WP_049660019.1 Bacillus sp. FJAT-27231 407/408, WP_034654680.1 Bacillus megaterium 415/416, WP_095390358.1 Bacillus simplex 407/408, and WP_055343022.1 Paeniclostridium sordellii 402/403.

### Incubating

[1084] Methods of detection and/or extraction using the systems disclosed herein can comprise incubating the sample or set of samples under conditions sufficient to allow binding of the nucleic acid component molecules to one or more target molecules. Extraction can comprise incubating the sample under conditions sufficient to allow release of viral RNA present in the sample, which may comprise incubating at 22° C. to 60° C. for 30 to 70 minutes or at 90° C.-100° C. for about 10 minutes.

[1085] In certain example embodiments, the incubation time of the amplifying and detecting in the present invention may be shortened. The assay may be performed in a period of time required for an enzymatic reaction to occur. One skilled in the art can perform biochemical reactions in 5 minutes (e.g., 5 minute ligation). Incubating may occur at one or more temperatures over timeframes between about 10 minutes and 90 minutes, preferably less than 90 minutes, 75 minutes, 60 minutes, 45 minutes, 30 minutes, 25 minutes, 20 minutes, 15 minutes, or 10 minutes depending on sample, reagents and components of the system. In one embodiment, incubating for the amplification is performed at one or more temperatures between about 20° C. and 80° C., In one embodiment, about 37° C. In one embodiment, incubating for the amplification is performed at one or more temperatures between about 55° C. and 65° C., between about 59° C. and 61° C., In one embodiment, about 60° C.

### Activating

[1086] In certain example embodiment, activating of the TnpB protein occurs via binding of the TnpB complex via the nucleic acid component molecule to the one or more target molecules, wherein activating the TnpB protein results in modification of the detection construct such that a detectable signal is generated.

### Detecting a Signal

[1087] Detecting may comprise visual observance of a positive signal relative to a control. Detecting may comprise a loss of signal or presence of signal at one or more capture regions, for example colorimetric detection, or fluorescent detection. In certain example embodiments, further modifications may be introduced that further amplify the detectable positive signal. For example, activated TnpB protein collateral activation may be used to generate a secondary target or additional nucleic acid component molecule sequence, or both. In one example embodiment, the reaction solution would contain a secondary target that is spiked in at high concentration. The secondary target may be distinct from the primary target (i.e. the target for which the assay is designed to detect) and in certain instances may be common across all reaction volumes. A secondary nucleic acid component molecule sequence for the secondary target may be protected, e.g. by a secondary structural feature such as a hairpin with an RNA loop, and unable to bind the second target or the TnpB protein. Cleavage of the protecting group by an activated TnpB r protein (i.e. after activation by formation of complex with the primary target(s) in solution) and formation of a complex with free TnpB protein in solution and activation from the spiked in secondary target. In certain other example embodiments, a similar concept is used with free nucleic acid component molecule sequence to a secondary target and protected secondary target. Cleavage of a protecting group off the secondary target would allow additional TnpB protein, nucleic acid component sequence, secondary target sequence to form. In yet another example embodiment, activation of TnpB protein by the primary target(s) may be used to cleave a protected or circularized primer, which would then be released to perform an isothermal amplification reaction, such as those disclosed herein, on a template for either secondary nucleic acid component sequence, secondary target, or both. Subsequent transcription of this amplified template would produce more secondary nucleic acid component molecule sequence and/or secondary target sequence, followed by additional TnpB protein collateral activation.

### Quantifying

[1088] In particular methods, comparing the intensity of the one or more signals to a control is performed to quantify the nucleic acid in the sample. The term “control” refers to any reference standard suitable to provide a comparison to the expression products in the test sample. In one embodiment, the control comprises obtaining a “control sample” from which expression product levels are detected and compared to the expression product levels from the test sample. Such a control sample may comprise any suitable sample, including but not limited to a sample from a control patient (can be stored sample or previous sample measurement) with a known outcome; normal tissue, fluid, or cells isolated from a subject, such as a normal patient or the patient having a condition of interest.

[1089] The intensity of a signal is “significantly” higher or lower than the normal intensity if the signal is greater or less, respectively, than the normal or control level by an amount greater than the standard error of the assay employed to assess amount, and preferably at least 20%, 30%, 40%, 50%, 60%, 70%, 80%, 90%, 100%, 150%, 200%, 300%, 350%, 400%, 500%, 600%, 700%, 800%, 900%, 1000% or than that amount. Alternatively, the signal can be considered “significantly” higher or lower than the normal and/or control signal if the amount is at least about two, and preferably at least about 5%, 10%, 15%, 20%, 25%, 30%, 35%, 40%, 45%, 50%, 55%, 60%, 65%, 70%, 75%, 80%, 85%, 90%, 95%, 100%, 105%, 110%, 115%, 120%, 125%, 130%, 135%, 140%, 145%, 150%, 155%, 160%, 165%, 170%, 175%, 180%, 185%, 190%, 195%, two times, three times, four times, five times, or more, or any range in between, such as 5%-100%, higher or lower, respectively, than the normal and/or control signal. Such significant modulation values can be applied to any metric described herein, such as altered level of expression, altered activity, changes in biomarker inhibition, changes in test agent binding, and the like.

[1090] In one embodiment, the detectable positive signal may be a loss of fluorescent signal or colorimetric relative to a control, as described herein. In one embodiment, the detectable positive signal may be detected on a lateral flow device, as described herein.

### Applications of Detection Methods

[1091] Systems and methods can be designed for the detection and diagnosis of microbes, including bacterial, fungi and viral microbes. In an aspect, the systems may comprise multiplex detection of multiple variants of viral infections, including coronavirus, different viruses which may be related coronaviruses or respiratory viruses, or a combination thereof. In embodiments, assays can be performed for a variety of viruses and viral infections, including acute respiratory infections using the disclosure detailed herein. The systems can comprise two or more TnpB systems to multiplex, as described elsewhere herein, to detect a plurality of respiratory infections or viral infections, including coronavirus. The coronavirus is a positive-sense single stranded RNA family of viruses, infecting a variety of animals and humans. SARS-CoV is one type of coronavirus infection, as well as MERS-CoV Detection of one or more coronaviruses are envisioned, including the 2019-nCoV detected in Wuhan City. Sequences of the 2019-nCoV are available at GISAID accession no. EPI_ISL_402124 and EPI_ISL_402127-402130, and described in DOI: 10.1101/2020.01.22.914952. Further deposits of the SARS-CoV-2 deposited in the GISAID platform include EP_ISL_402119-402121 and EP_ISL 402123-402124; see also GenBank Accession No. MN908947.3.

[1092] Target molecule detection can comprise two or more detection systems utilizing TnpB proteins. The TnpB protein may preferably be thermostable, with multiplexing designed such that different TnpB proteins with different sequence specificities, operable temperatures, or cutting preferences can be used.

[1093] A multiplex embodiment can be designed to track one or more variants of coronavirus or one or more variants of coronavirus, including SARS-CoV-2, in combination with other viruses, for example, Human respiratory syncytial virus, Middle East respiratory syndrome (MERS) coronavirus, Severe acute respiratory syndrome-related (SARS) coronavirus, and influenza. In embodiments, assays can be done in multiplex to detect multiple variants of coronavirus, different viruses which may be related coronaviruses or respiratory viruses, or a combination thereof. In an aspect, each assay can take place in an individual discrete volume. An “individual discrete volume” is a discrete volume or discrete space, such as a container, receptacle, or other defined volume or space that can be defined by properties that prevent and/or inhibit migration of nucleic acids and reagents necessary to carry out the methods disclosed herein, for example a volume or space defined by physical properties such as walls, for example the walls of a well, tube, or a surface of a droplet, which may be impermeable or semipermeable, or as defined by other means such as chemical, diffusion rate limited, electro-magnetic, or light illumination, or any combination thereof. By “diffusion rate limited” (for example diffusion defined volumes) is meant spaces that are only accessible to certain molecules or reactions because diffusion constraints effectively defining a space or volume as would be the case for two parallel laminar streams where diffusion will limit the migration of a target molecule from one stream to the other. By “chemical” defined volume or space is meant spaces where only certain target molecules can exist because of their chemical or molecular properties, such as size, where for example gel beads may exclude certain species from entering the beads but not others, such as by surface charge, matrix size or other physical property of the bead that can allow selection of species that may enter the interior of the bead. By “electro-magnetically” defined volume or space is meant spaces where the electro-magnetic properties of the target molecules or their supports such as charge or magnetic properties can be used to define certain regions in a space such as capturing magnetic particles within a magnetic field or directly on magnets. By “optically” defined volume is meant any region of space that may be defined by illuminating it with visible, ultraviolet, infrared, or other wavelengths of light such that only target molecules within the defined space or volume may be labeled. One advantage to the used of non-walled, or semipermeable is that some reagents, such as buffers, chemical activators, or other agents maybe passed in Applicants' through the discrete volume, while other material, such as target molecules, maybe maintained in the discrete volume or space. Typically, a discrete volume will include a fluid medium, (for example, an aqueous solution, an oil, a buffer, and/or a media capable of supporting cell growth) suitable for labeling of the target molecule with the indexable nucleic acid identifier under conditions that permit labeling. Exemplary discrete volumes or spaces useful in the disclosed methods include droplets (for example, microfluidic droplets and/or emulsion droplets), hydrogel beads or other polymer structures (for example poly-ethylene glycol di-acrylate beads or agarose beads), tissue slides (for example, fixed formalin paraffin embedded tissue slides with particular regions, volumes, or spaces defined by chemical, optical, or physical means), microscope slides with regions defined by depositing reagents in ordered arrays or random patterns, tubes (such as, centrifuge tubes, microcentrifuge tubes, test tubes, cuvettes, conical tubes, and the like), bottles (such as glass bottles, plastic bottles, ceramic bottles, Erlenmeyer flasks, scintillation vials and the like), wells (such as wells in a plate), plates, pipettes, or pipette tips among others. In certain example embodiments, the individual discrete volumes are the wells of a microplate. In certain example embodiments, the microplate is a 96 well, a 384 well, or a 1536 well microplate.

[1094] In certain example embodiments, the systems, devices, and methods, disclosed herein are directed to detecting the presence of one or more microbial agents in a sample, such as a biological sample obtained from a subject. In certain example embodiments, the microbe may be a bacterium, a fungus, a yeast, a protozoan, a parasite, or a virus. Accordingly, the methods disclosed herein can be adapted for use in other methods (or in combination) with other methods that require quick identification of microbe species, monitoring the presence of microbial proteins (antigens), antibodies, antibody genes, detection of certain phenotypes (e.g. bacterial resistance), monitoring of disease progression and/or outbreak, and antibiotic screening. Because of the rapid and sensitive diagnostic capabilities of the embodiments disclosed here, detection of microbe species type, down to a single nucleotide difference, and the ability to be deployed as a POC device, the embodiments disclosed herein may be used as guide therapeutic regimens, such as a selection of the appropriate antibiotic or antiviral. The embodiments disclosed herein may also be used to screen environmental samples (air, water, surfaces, food etc.) for the presence of microbial contamination.

[1095] Disclosed is a method to identify microbial species, such as bacterial, viral, fungal, yeast, or parasitic species, or the like. Particular embodiments disclosed herein describe methods and systems that will identify and distinguish microbial species within a single sample, or across multiple samples, allowing for recognition of many different microbes. The present methods allow the detection of pathogens and distinguishing between two or more species of one or more organisms, e.g., bacteria, viruses, yeast, protozoa, and fungi or a combination thereof, in a biological or environmental sample, by detecting the presence of a target nucleic acid sequence in the sample. A positive signal obtained from the sample indicates the presence of the microbe. Multiple microbes can be identified simultaneously using the methods and systems of the invention, by employing the use of more than one effector protein, wherein each effector protein targets a specific microbial target sequence. In this way, a multi-level analysis can be performed for a particular subject in which any number of microbes can be detected at once, for example, a subject with unknown respiratory infection, having symptoms of coronavirus, or an individual at risk or having been exposed to coronavirus. In one embodiment, simultaneous detection of multiple microbes may be performed using a set of probes that can identify one or more microbial species.

### Microbe Detection

[1096] In one embodiment, a method for detecting microbes in samples is provided comprising distributing a sample or set of samples into one or more individual discrete volumes, the individual discrete volumes comprising a TNPB system as described herein; incubating the sample or set of samples under conditions sufficient to allow binding of the one or more nucleic acid component molecules to one or more microbe-specific targets; activating the TnpB protein via binding of the one or more nucleic acid component molecules to the one or more target molecules, wherein activating the TnpB protein results in modification of the RNA-based masking construct such that a detectable positive signal is generated; and detecting the detectable positive signal, wherein detection of the detectable positive signal indicates a presence of one or more target molecules in the sample. The one or more target molecules may be mRNA, gDNA (coding or non-coding), trRNA, or rRNA comprising a target nucleotide tide sequence that may be used to distinguish two or more microbial species/strains from one another. The nucleic acid component molecules may be designed to detect target sequences. The embodiments disclosed herein may also utilize certain steps to improve hybridization between nucleic acid component molecule and target RNA sequences. Methods for enhancing ribonucleic acid hybridization are disclosed in WO 2015/085194, entitled “Enhanced Methods of Ribonucleic Acid Hybridization” which is incorporated herein by reference. The microbe-specific target may be RNA or DNA or a protein. If DNA method may further comprise the use of DNA primers that introduce a RNA polymerase promoter as described herein. If the target is a protein than the method will utilize aptamers and steps specific to protein detection described herein.

### Detection of Single Nucleotide Variants

[1097] In one embodiment, one or more identified target sequences may be detected using nucleic acid component molecules that are specific for and bind to the target sequence as described herein. The systems and methods of the present invention can distinguish even between single nucleotide polymorphisms present among different microbial species and therefore, use of multiple nucleic acid component molecules in accordance with the invention may further expand on or improve the number of target sequences that may be used to distinguish between species. For example, In one embodiment, the one or more nucleic acid component molecules may distinguish between microbes at the species, genus, family, order, class, phylum, kingdom, or phenotype, or a combination thereof.

Detection Based on rRNA Sequences

[1098] In certain example embodiments, the devices, systems, and methods disclosed herein may be used to distinguish multiple microbial species in a sample. In certain example embodiments, identification may be based on ribosomal RNA sequences, including the 16S, 23S, and 5S subunits. Methods for identifying relevant rRNA sequences are disclosed in U.S. Patent Application Publication No. 2017/0029872. In certain example embodiments, a set of nucleic acid component molecule may be designed to distinguish each species by a variable region that is unique to each species or strain. nucleic acid component molecules may also be designed to target RNA genes that distinguish microbes at the genus, family, order, class, phylum, kingdom levels, or a combination thereof. In certain example embodiments where amplification is used, a set of amplification primers may be designed to flanking constant regions of the ribosomal RNA sequence and a nucleic acid component molecule designed to distinguish each species by a variable internal region. In certain example embodiments, the primers and nucleic acid component molecules may be designed to conserved and variable regions in the 16S subunit respectfully. Other genes or genomic regions that uniquely variable across species or a subset of species such as the RecA gene family, RNA polymerase R subunit, may be used as well. Other suitable phylogenetic markers, and methods for identifying the same, are discussed for example in Wu et al. arXiv:1307.8690 [q-bio.GN].

[1099] In certain example embodiments, a method or diagnostic is designed to screen microbes across multiple phylogenetic and/or phenotypic levels at the same time. For example, the method or diagnostic may comprise the use of multiple TnpB systems with different nucleic acid component molecules. A first set of nucleic acid component molecules may distinguish, for example, between mycobacteria, gram positive, and gram negative bacteria. These general classes can be even further subdivided. For example, nucleic acid components could be designed and used in the method or diagnostic that distinguish enteric and non-enteric within gram negative bacteria. A second set of nucleic acid component molecules can be designed to distinguish microbes at the genus or species level. Thus a matrix may be produced identifying all mycobacteria, gram positive, gram negative (further divided into enteric and non-enteric) with each genus of species of bacteria identified in a given sample that fall within one of those classes. The foregoing is for example purposes only. Other means for classifying other microbe types are also contemplated and would follow the general structure described above.

### Screening for Drug Resistance

[1100] In certain example embodiments, the devices, systems and methods disclosed herein may be used to screen for microbial genes of interest, for example antibiotic and/or antiviral resistance genes. nucleic acid component molecules may be designed to distinguish between known genes of interest. Samples, including clinical samples, may then be screened using the embodiments disclosed herein for detection of such genes. The ability to screen for drug resistance at POC would have tremendous benefit in selecting an appropriate treatment regime. In certain example embodiments, the antibiotic resistance genes are carbapenemases including KPC, NDM1, CTX-M15, OXA-48. Other antibiotic resistance genes are known and may be found for example in the Comprehensive Antibiotic Resistance Database (Jia et al. “CARD 2017: expansion and model-centric curation of the Comprehensive Antibiotic Resistance Database.” Nucleic Acids Research, 45, D566-573).

[1101] Ribavirin is an effective antiviral that hits a number of RNA viruses. Several clinically important viruses have evolved ribavirin resistance including Foot and Mouth Disease Virus doi:10.1128/JVI.03594-13; polio virus (Pfeifer and Kirkegaard. PNAS, 100(12):7289-7294, 2003); and hepatitis C virus (Pfeiffer and Kirkegaard, J. Virol. 79(4):2346-2355, 2005). A number of other persistent RNA viruses, such as hepatitis and HIV, have evolved resistance to existing antiviral drugs: hepatitis B virus (lamivudine, tenofovir, entecavir) doi:10/1002/hep22900; hepatitis C virus (telaprevir, BILN2061, ITMN-191, SCh6, boceprevir, AG-021541, ACH-806) doi:10.1002/hep.22549; and HIV (many drug resistance mutations) hivb.standford.edu. The embodiments disclosed herein may be used to detect such variants among others.

[1102] Aside from drug resistance, there are a number of clinically relevant mutations that could be detected with the embodiments disclosed herein, such as persistent versus acute infection in LCMV (doi:10.1073/pnas.1019304108), and increased infectivity of Ebola (Diehl et al. Cell. 2016, 167(4):1088-1098.

[1103] As described herein elsewhere, closely related microbial species (e.g. having only a single nucleotide difference in a given target sequence) may be distinguished by introduction of a synthetic mismatch in the nucleic acid component molecule.

### Monitoring Microbe Outbreaks

[1104] In one embodiment, a TnpB system or methods of use thereof as described herein may be used to determine the evolution of a pathogen outbreak. The method may comprise detecting one or more target sequences from a plurality of samples from one or more subjects, wherein the target sequence is a sequence from a microbe causing the outbreaks. Such a method may further comprise determining a pattern of pathogen transmission, or a mechanism involved in a disease outbreak caused by a pathogen.

[1105] The pattern of pathogen transmission may comprise continued new transmissions from the natural reservoir of the pathogen or subject-to-subject transmissions (e.g. human-to-human transmission) following a single transmission from the natural reservoir or a mixture of both. In one embodiment, the pathogen transmission may be bacterial or viral transmission, in such case, the target sequence is preferably a microbial genome or fragments thereof. In one embodiment, the pattern of the pathogen transmission is the early pattern of the pathogen transmission, i.e. at the beginning of the pathogen outbreak. Determining the pattern of the pathogen transmission at the beginning of the outbreak increases likelihood of stopping the outbreak at the earliest possible time thereby reducing the possibility of local and international dissemination.

[1106] Determining the pattern of the pathogen transmission may comprise detecting a pathogen sequence according to the methods described herein. Determining the pattern of the pathogen transmission may further comprise detecting shared intra-host variations of the pathogen sequence between the subjects and determining whether the shared intra-host variations show temporal patterns. Patterns in observed intrahost and interhost variation provide important insight about transmission and epidemiology (Gire, et al., 2014).

[1107] Detection of shared intra-host variations between the subjects that show temporal patterns is an indication of transmission links between subject (in particular between humans) because it can be explained by subject infection from multiple sources (superinfection), sample contamination recurring mutations (with or without balancing selection to reinforce mutations), or co-transmission of slightly divergent viruses that arose by mutation earlier in the transmission chain (Park, et al., Cell 161(7):1516-1526, 2015). Detection of shared intra-host variations between subjects may comprise detection of intra-host variants located at common single nucleotide polymorphism (SNP) positions. Positive detection of intra-host variants located at common (SNP) positions is indicative of superinfection and contamination as primary explanations for the intra-host variants. Superinfection and contamination can be parted on the basis of SNP frequency appearing as inter-host variants (Park, et al., 2015). Otherwise superinfection and contamination can be ruled out. In this latter case, detection of shared intra-host variations between subjects may further comprise assessing the frequencies of synonymous and nonsynonymous variants and comparing the frequency of synonymous and nonsynonymous variants to one another. A nonsynonymous mutation is a mutation that alters the amino acid of the protein, likely resulting in a biological change in the microbe that is subject to natural selection. Synonymous substitution does not alter an amino acid sequence. Equal frequency of synonymous and nonsynonymous variants is indicative of the intra-host variants evolving neutrally. If frequencies of synonymous and nonsynonymous variants are divergent, the intra-host variants are likely to be maintained by balancing selection. If frequencies of synonymous and nonsynonymous variants are low, this is indicative of recurrent mutation. If frequencies of synonymous and nonsynonymous variants are high, this is indicative of co-transmission (Park, et al., 2015).

[1108] Like Ebola virus, Lassa virus (LASV) can cause hemorrhagic fever with high case fatality rates. Andersen et al. generated a genomic catalog of almost 200 LASV sequences from clinical and rodent reservoir samples (Andersen, et al., Cell Volume 162, Issue 4, p 738-750, 13 Aug. 2015). Andersen et al. show that whereas the 2013-2015 EVD epidemic is fueled by human-to-human transmissions, LASV infections mainly result from reservoir-to-human infections. Andersen et al. elucidated the spread of LASV across West Africa and show that this migration was accompanied by changes in LASV genome abundance, fatality rates, codon adaptation, and translational efficiency. The method may further comprise phylogenetically comparing a first pathogen sequence to a second pathogen sequence, and determining whether there is a phylogenetic link between the first and second pathogen sequences. The second pathogen sequence may be an earlier reference sequence. If there is a phylogenetic link, the method may further comprise rooting the phylogeny of the first pathogen sequence to the second pathogen sequence. Thus, it is possible to construct the lineage of the first pathogen sequence. (Park, et al., 2015).

[1109] The method may further comprise determining whether the mutations are deleterious or adaptive. Deleterious mutations are indicative of transmission-impaired viruses and dead-end infections, thus normally only present in an individual subject. Mutations unique to one individual subject are those that occur on the external branches of the phylogenetic tree, whereas internal branch mutations are those present in multiple samples (i.e. in multiple subjects). Higher rate of nonsynonymous substitution is a characteristic of external branches of the phylogenetic tree (Park, et al., 2015).

[1110] In internal branches of the phylogenetic tree, selection has had more opportunity to filter out deleterious mutants. Internal branches, by definition, have produced multiple descendent lineages and are thus less likely to include mutations with fitness costs. Thus, lower rate of nonsynonymous substitution is indicative of internal branches (Park, et al., 2015).

[1111] Synonymous mutations, which likely have less impact on fitness, occurred at more comparable frequencies on internal and external branches (Park, et al., 2015).

[1112] By analyzing the sequenced target sequence, such as viral genomes, it is possible to discover the mechanisms responsible for the severity of the epidemic episode such as during the 2014 Ebola outbreak. For example, Gire et al. made a phylogenetic comparison of the genomes of the 2014 outbreak to all 20 genomes from earlier outbreaks suggests that the 2014 West African virus likely spread from central Africa within the past decade. Rooting the phylogeny using divergence from other ebolavirus genomes was problematic (6, 13). However, rooting the tree on the oldest outbreak revealed a strong correlation between sample date and root-to-tip distance, with a substitution rate of 8×10-4 per site per year (13). This suggests that the lineages of the three most recent outbreaks all diverged from a common ancestor at roughly the same time, around 2004, which supports the hypothesis that each outbreak represents an independent zoonotic event from the same genetically diverse viral population in its natural reservoir. They also found out that the 2014 EBOV outbreak might be caused by a single transmission from the natural reservoir, followed by human-to-human transmission during the outbreak. Their results also suggested that the epidemic episode in Sierra Leon might stem from the introduction of two genetically distinct viruses from Guinea around the same time (Gire, et al., 2014).

[1113] It has been also possible to determine how the Lassa virus spread out from its origin point, in particular thanks to human-to-human transmission and even retrace the history of this spread 400 years back (Andersen, et al., Cell 162(4):738-50, 2015).

[1114] In relation to the work needed during the 2013-2015 EBOV outbreak and the difficulties encountered by the medical staff at the site of the outbreak, and more generally, the method of the invention makes it possible to carry out sequencing using fewer selected probes such that sequencing can be accelerated, thus shortening the time needed from sample taking to results procurement. Further, kits and systems can be designed to be usable on the field so that diagnostics of a patient can be readily performed without need to send or ship samples to another part of the country or the world.

[1115] In any method described above, sequencing the target sequence or fragment thereof may be used any of the sequencing processes described above. Further, sequencing the target sequence or fragment thereof may be a near-real-time sequencing. Sequencing the target sequence or fragment thereof may be carried out according to previously described methods (Experimental Procedures: Matranga et al., 2014; and Gire, et al., 2014). Sequencing the target sequence or fragment thereof may comprise parallel sequencing of a plurality of target sequences. Sequencing the target sequence or fragment thereof may comprise Illumina sequencing.

[1116] Analyzing the target sequence or fragment thereof that hybridizes to one or more of the selected probes may be an identifying analysis, wherein hybridization of a selected probe to the target sequence or a fragment thereof indicates the presence of the target sequence within the sample.

[1117] Currently, primary diagnostics are based on the symptoms a patient has. However, various diseases may share identical symptoms so that diagnostics rely much on statistics. For example, malaria triggers flu-like symptoms: headache, fever, shivering, joint pain, vomiting, hemolytic anemia, jaundice, hemoglobin in the urine, retinal damage, and convulsions. These symptoms are also common for septicemia, gastroenteritis, and viral diseases. Amongst the latter, Ebola hemorrhagic fever has the following symptoms fever, sore throat, muscular pain, headaches, vomiting, diarrhea, rash, decreased function of the liver and kidneys, internal and external hemorrhage.

[1118] When a patient is presented to a medical unit, for example in tropical Africa, basic diagnostics will conclude to malaria because statistically, malaria is the most probable disease within that region of Africa. The patient is consequently treated for malaria although the patient might not actually have contracted the disease and the patient ends up not being correctly treated. This lack of correct treatment can be life-threatening especially when the disease the patient contracted presents a rapid evolution. It might be too late before the medical staff realizes that the treatment given to the patient is ineffective and comes to the correct diagnostics and administers the adequate treatment to the patient.

[1119] The method of the invention provides a solution to this situation. Indeed, because the number of nucleic acid component molecules can be dramatically reduced, this makes it possible to provide on a single chip selected probes divided into groups, each group being specific to one disease, such that a plurality of diseases, e.g. viral infection, can be diagnosed at the same time. Thanks to the invention, more than 3 diseases can be diagnosed on a single chip, preferably more than 4, 5, 6, 7, 8, 9, 10, 11, 12, 13, 14, 15, 16, 17, 18, 19, 20 diseases at the same time, preferably the diseases that most commonly occur within the population of a given geographical area. Since each group of selected probes is specific to one of the diagnosed diseases, a more accurate diagnosis can be performed, thus diminishing the risk of administering the wrong treatment to the patient.

[1120] In other cases, a disease such as a viral infection may occur without any symptoms, or had caused symptoms but dissipated before the patient is presented to the medical staff. In such cases, either the patient does not seek any medical assistance or the diagnostics is complicated due to the absence of symptoms on the day of the presentation.

[1121] The present invention may also be used in concert with other methods of diagnosing disease, identifying pathogens and optimizing treatment based upon detection of nucleic acids, such as mRNA in crude, non-purified samples.

[1122] The method of the invention also provides a powerful tool to address this situation. Indeed, since a plurality of groups of selected nucleic acid component molecules, each group being specific to one of the most common diseases that occur within the population of the given area, are comprised within a single diagnostic, the medical staff only need to contact a biological sample taken from the patient with the chip. Reading the chip reveals the diseases the patient has contracted.

[1123] In some cases, the patient is presented to the medical staff for diagnostics of particular symptoms. The method of the invention makes it possible not only to identify which disease causes these symptoms but at the same time determine whether the patient suffers from another disease he was not aware of.

[1124] This information might be of utmost importance when searching for the mechanisms of an outbreak. Indeed, groups of patients with identical viruses also show temporal patterns suggesting a subject-to-subject transmission links.

### Example Microbes

[1125] The embodiment disclosed herein may be used to detect a number of different microbes. The term microbe as used herein includes bacteria, fungus, protozoa, parasites and viruses.

### Bacteria

[1126] The following provides an example list of the types of microbes that might be detected using the embodiments disclosed herein. In certain example embodiments, the microbe is a bacterium. Examples of bacteria that can be detected in accordance with the disclosed methods include without limitation any one or more of (or any combination of) Acinetobacter baumanii, Actinobacillus sp., Actinomycetes, Actinomyces sp. (such as Actinomyces israelii and Actinomyces naeslundii), Aeromonas sp. (such as Aeromonas hydrophila, Aeromonas veronii biovar sobria (Aeromonas sobria), and Aeromonas caviae), Anaplasma phagocytophilum, Anaplasma marginale Alcaligenes xylosoxidans, Acinetobacter baumanii, Actinobacillus actinomycetemcomitans, Bacillus sp. (such as Bacillus anthracis, Bacillus cereus, Bacillus subtilis, Bacillus thuringiensis, and Bacillus stearothermophilus), Bacteroides sp. (such as Bacteroides fragilis), Bartonella sp. (such as Bartonella bacilliformis and Bartonella henselae, Bifidobacterium sp., Bordetella sp. (such as Bordetella pertussis, Bordetella parapertussis, and Bordetella bronchiseptica), Borrelia sp. (such as Borrelia recurrentis, and Borrelia burgdorferi), Brucella sp. (such as Brucella abortus, Brucella canis, Brucella melintensis and Brucella suis), Burkholderia sp. (such as Burkholderia pseudomallei and Burkholderia cepacia), Campylobacter sp. (such as Campylobacter jejuni, Campylobacter coli, Campylobacter lari and Campylobacter fetus), Capnocytophaga sp., Cardiobacterium hominis, Chlamydia trachomatis, Chlamydophila pneumoniae, Chlamydophila psittaci, Citrobacter sp. Coxiella burnetii, Corynebacterium sp. (such as, Corynebacterium diphtheriae, Corynebacterium jeikeum and Corynebacterium), Clostridium sp. (such as Clostridium perfringens, Clostridium difficile, Clostridium botulinum and Clostridium tetani), Eikenella corrodens, Enterobacter sp. (such as Enterobacter aerogenes, Enterobacter agglomerans, Enterobacter cloacae and Escherichia coli, including opportunistic Escherichia coli, such as enterotoxigenic E. coli, enteroinvasive E. coli, enteropathogenic E. coli, enterohemorrhagic E. coli, enteroaggregative E. coli and uropathogenic E. coli) Enterococcus sp. (such as Enterococcus faecalis and Enterococcus faecium) Ehrlichia sp. (such as Ehrlichia chafeensia and Ehrlichia canis), Epidermophyton floccosum, Erysipelothrix rhusiopathiae, Eubacterium sp., Francisella tularensis, Fusobacterium nucleatum, Gardnerella vaginalis, Gemella morbillorum, Haemophilus sp. (such as Haemophilus influenzae, Haemophilus ducreyi, Haemophilus aegyptius, Haemophilus parainfluenzae, Haemophilus haemolyticus and Haemophilus parahaemolyticus, Helicobacter sp. (such as Helicobacter pylori, Helicobacter cinaedi and Helicobacter fennelliae), Kingella kingii, Klebsiella sp. (such as Klebsiella pneumoniae, Klebsiella granulomatis and Klebsiella oxytoca), Lactobacillus sp., Listeria monocytogenes, Leptospira interrogans, Legionella pneumophila, Leptospira interrogans, Peptostreptococcus sp., Mannheimia hemolytica, Microsporum canis, Moraxella catarrhalis, Morganella sp., Mobiluncus sp., Micrococcus sp., Mycobacterium sp. (such as Mycobacterium leprae, Mycobacterium tuberculosis, Mycobacterium paratuberculosis, Mycobacterium intracellulare, Mycobacterium avium, Mycobacterium bovis, and Mycobacterium marinum), Mycoplasm sp. (such as Mycoplasma pneumoniae, Mycoplasma hominis, and Mycoplasma genitalium), Nocardia sp. (such as Nocardia asteroides, Nocardia cyriacigeorgica and Nocardia brasiliensis), Neisseria sp. (such as Neisseria gonorrhoeae and Neisseria meningitidis), Pasteurella multocida, Pityrosporum orbiculare (Malassezia furfur), Plesiomonas shigelloides. Prevotella sp., Porphyromonas sp., Prevotella melaninogenica, Proteus sp. (such as Proteus vulgaris and Proteus mirabilis), Providencia sp. (such as Providencia alcalfaciens, Providencia rettgeri and Providencia stuartii), Pseudomonas aeruginosa, Propionibacterium acnes, Rhodococcus equi, Rickettsia sp. (such as Rickettsia rickettsii, Rickettsia akari and Rickettsia prowazekii, Orientia tsutsugamushi (formerly: Rickettsia tsutsugamushi) and Rickettsia typhi), Rhodococcus sp., Serratia marcescens, Stenotrophomonas maltophilia, Salmonella sp. (such as Salmonella enterica, Salmonella typhi, Salmonella paratyphi, Salmonella enteritidis, Salmonella cholerasuis and Salmonella typhimurium), Serratia sp. (such as Serratia marcesans and Serratia liquifaciens), Shigella sp. (such as Shigella dysenteriae, Shigella flexneri, Shigella boydii and Shigella sonnei), Staphylococcus sp. (such as Staphylococcus aureus, Staphylococcus epidermidis, Staphylococcus hemolyticus, Staphylococcus saprophyticus), Streptococcus sp. (such as Streptococcus pneumoniae (for example chloramphenicol-resistant serotype 4 Streptococcus pneumoniae, spectinomycin-resistant serotype 6B Streptococcus pneumoniae, streptomycin-resistant serotype 9V Streptococcus pneumoniae, erythromycin-resistant serotype 14 Streptococcus pneumoniae, optochin-resistant serotype 14 Streptococcus pneumoniae, rifampicin-resistant serotype 18C Streptococcus pneumoniae, tetracycline-resistant serotype 19F Streptococcus pneumoniae, penicillin-resistant serotype 19F Streptococcus pneumoniae, and trimethoprim-resistant serotype 23F Streptococcus pneumoniae, chloramphenicol-resistant serotype 4 Streptococcus pneumoniae, spectinomycin-resistant serotype 6B Streptococcus pneumoniae, streptomycin-resistant serotype 9V Streptococcus pneumoniae, optochin-resistant serotype 14 Streptococcus pneumoniae, rifampicin-resistant serotype 18C Streptococcus pneumoniae, penicillin-resistant serotype 19F Streptococcus pneumoniae, or trimethoprim-resistant serotype 23F Streptococcus pneumoniae), Streptococcus agalactiae, Streptococcus mutans, Streptococcus pyogenes, Group A streptococci, Streptococcus pyogenes, Group B streptococci, Streptococcus agalactiae, Group C streptococci, Streptococcus anginosus, Streptococcus equismilis, Group D streptococci, Streptococcus bovis, Group F streptococci, and Streptococcus anginosus Group G streptococci), Spirillum minus, Streptobacillus moniliformi, Treponema sp. (such as Treponema carateum, Treponema petenue, Treponema pallidum and Treponema endemicum, Trichophyton rubrum, T. mentagrophytes, Tropheryma whippelii, Ureaplasma urealyticum, Veillonella sp., Vibrio sp. (such as Vibrio cholerae, Vibrio parahemolyticus, Vibrio vulnificus, Vibrio parahaemolyticus, Vibrio vulnificus, Vibrio alginolyticus, Vibrio mimicus, Vibrio hollisae, Vibrio fluvialis, Vibrio metchnikovii, Vibrio damsela and Vibrio furnisii), Yersinia sp. (such as Yersinia enterocolitica, Yersinia pestis, and Yersinia pseudotuberculosis) and Xanthomonas maltophilia among others.

### Fungi

[1127] In certain example embodiments, the microbe is a fungus or a fungal species. Examples of fungi that can be detected in accordance with the disclosed methods include without limitation any one or more of (or any combination of), Aspergillus, Blastomyces, Candidiasis, Coccidiodomycosis, Cryptococcus neoformans, Cryptococcus gatti, sp. Histoplasma sp. (such as Histoplasma capsulatum), Pneumocystis sp. (such as Pneumocystis jirovecii), Stachybotrys (such as Stachybotrys chartarum), Mucroymcosis, Sporothrix, fungal eye infections ringworm, Exserohilum, Cladosporium.

[1128] In certain example embodiments, the fungus is a yeast. Examples of yeast that can be detected in accordance with disclosed methods include without limitation one or more of (or any combination of), Aspergillus species (such as Aspergillus fumigatus, Aspergillus flavus and Aspergillus clavatus), Cryptococcus sp. (such as Cryptococcus neoformans, Cryptococcus gattii, Cryptococcus laurentii and Cryptococcus albidus), a Geotrichum species, a Saccharomyces species, a Hansenula species, a Candida species (such as Candida albicans), a Kluyveromyces species, a Debaryomyces species, a Pichia species, or combination thereof. In certain example embodiments, the fungi is a mold. Example molds include, but are not limited to, a Penicillium species, a Cladosporium species, a Byssochlamys species, or a combination thereof.

### Protozoa

[1129] In certain example embodiments, the microbe is a protozoa. Examples of protozoa that can be detected in accordance with the disclosed methods and devices include without limitation any one or more of (or any combination of), Euglenozoa, Heterolobosea, Diplomonadida, Amoebozoa, Blastocystic, and Apicomplexa. Example Euglenoza include, but are not limited to, Trypanosoma cruzi (Chagas disease), T. brucei gambiense, T. brucei rhodesiense, Leishmania braziliensis, L. infantum, L. mexicana, L. major, L. tropica, and L. donovani. Example Heterolobosea include, but are not limited to, Naegleria fowleri. Example Diplomonadids include, but are not limited to, Giardia intestinalis (G. lamblia, G. duodenalis). Example Amoebozoa include, but are not limited to, Acanthamoeba castellanii, Balamuthia madrillaris, Entamoeba histolytica. Example Blastocysts include, but are not limited to, Blastocystic hominis. Example Apicomplexa include, but are not limited to, Babesia microti, Cryptosporidium parvum, Cyclospora cayetanensis, Plasmodium falciparum, P. vivax, P. ovale, P. malariae, and Toxoplasma gondii.

### Parasites

[1130] In certain example embodiments, the microbe is a parasite. Examples of parasites that can be detected in accordance with disclosed methods include without limitation one or more of (or any combination of), an Onchocerca species and a Plasmodium species.

### Viruses

[1131] In certain example embodiments, the systems, devices, and methods, disclosed herein are directed to detecting viruses in a sample. The embodiments disclosed herein may be used to detect viral infection (e.g. of a subject or plant), or determination of a viral strain, including viral strains that differ by a single nucleotide polymorphism. The virus may be a DNA virus, a RNA virus, or a retrovirus. Non-limiting example of viruses useful with the present invention include, but are not limited to Ebola, measles, SARS, Chikungunya, hepatitis, Marburg, yellow fever, MERS, Dengue, Lassa, influenza, rhabdovirus or HIV. A hepatitis virus may include hepatitis A, hepatitis B, or hepatitis C. An influenza virus may include, for example, influenza A or influenza B. An HIV may include HIV 1 or HIV 2. In certain example embodiments, the viral sequence may be a human respiratory syncytial virus, Sudan ebola virus, Bundibugyo virus, Tai Forest ebola virus, Reston ebola virus, Achimota, Aedes flavivirus, Aguacate virus, Akabane virus, Alethinophid reptarenavirus, Allpahuayo mammarenavirus, Amapari mmarenavirus, Andes virus, Apoi virus, Aravan virus, Aroa virus, Arumwot virus, Atlantic salmon paramyxovirus, Australian bat lyssavirus, Avian bornavirus, Avian metapneumovirus, Avian paramyxoviruses, penguin or Falkland Islandsvirus, BK polyomavirus, Bagaza virus, Banna virus, Bat herpesvirus, Bat sapovirus, Bear Canon mammarenavirus, Beilong virus, Betacoronavirus, Betapapillomavirus 1-6, Bhanja virus, Bokeloh bat lyssavirus, Boma disease virus, Bourbon virus, Bovine hepacivirus, Bovine parainfluenza virus 3, Bovine respiratory syncytial virus, Brazoran virus, Bunyamwera virus, Caliciviridae virus. California encephalitis virus, Candiru virus, Canine distemper virus, Canine pneumovirus, Cedar virus, Cell fusing agent virus, Cetacean morbillivirus, Chandipura virus, Chaoyang virus, Chapare mammarenavirus, Chikungunya virus, Colobus monkey papillomavirus, Colorado tick fever virus, Cowpox virus, Crimean-Congo hemorrhagic fever virus, Culex flavivirus, Cupixi mammarenavirus, Dengue virus, Dobrava-Belgrade virus, Donggang virus, Dugbe virus, Duvenhage virus, Eastern equine encephalitis virus, Entebbe bat virus, Enterovirus A-D, European bat lyssavirus 1-2, Eyach virus, Feline morbillivirus, Fer-de-Lance paramyxovirus, Fitzroy River virus, Flaviviridae virus, Flexal mammarenavirus, GB virus C, Gairo virus, Gemycircularvirus, Goose paramyxovirus SF02, Great Island virus, Guanarito mammarenavirus, Hantaan virus, Hantavirus Z10, Heartland virus, Hendra virus, Hepatitis A/B/C/E, Hepatitis delta virus, Human bocavirus, Human coronavirus, Human endogenous retrovirus K, Human enteric coronavirus, Human genital-associated circular DNA virus-1, Human herpesvirus 1-8, Human immunodeficiency virus 1/2, Human mastadenovirus A-G, Human papillomavirus, Human parainfluenza virus 1-4, Human paraechovirus, Human picornavirus, Human smacovirus, Ikoma lyssavirus, Ilheus virus, Influenza A-C, Ippy mammarenavirus, Irkut virus, J-virus, JC polyomavirus, Japanese encephalitis virus, Junin mammarenavirus, KI polyomavirus, Kadipiro virus, Kamiti River virus, Kedougou virus, Khujand virus, Kokobera virus, Kyasanur forest disease virus, Lagos bat virus, Langat virus, Lassa mammarenavirus, Latino mammarenavirus, Leopards Hill virus, Liao ning virus, Ljungan virus, Lloviu virus, Louping ill virus, Lujo mammarenavirus, Luna mammarenavirus, Lunk virus, Lymphocytic choriomeningitis mammarenavirus, Lyssavirus Ozernoe, MSSI2\225 virus, Machupo mammarenavirus, Mamastrovirus 1, Manzanilla virus, Mapuera virus, Marburg virus, Mayaro virus, Measles virus, Menangle virus, Mercadeo virus, Merkel cell polyomavirus, Middle East respiratory syndrome coronavirus, Mobala mammarenavirus, Modoc virus, Moijang virus, Mokolo virus, Monkeypox virus, Montana myotis leukoenchalitis virus, Mopeia lassa virus reassortant 29, Mopeia mammarenavirus, Morogoro virus, Mossman virus, Mumps virus, Murine pneumonia virus, Murray Valley encephalitis virus, Nariva virus, Newcastle disease virus, Nipah virus, Norwalk virus, Norway rat hepacivirus, Ntaya virus, O'nyong-nyong virus, Oliveros mammarenavirus, Omsk hemorrhagic fever virus, Oropouche virus, Parainfluenza virus 5, Parana mammarenavirus, Parramatta River virus, Peste-des-petits-ruminants virus, Pichande mammarenavirus, Picornaviridae virus, Pirital mammarenavirus, Piscihepevirus A, Porcine parainfluenza virus 1, porcine rubulavirus, Powassan virus, Primate T-lymphotropic virus 1-2, Primate erythroparvovirus 1, Punta Toro virus, Puumala virus, Quang Binh virus, Rabies virus, Razdan virus, Reptile bornavirus 1, Rhinovirus A-B, Rift Valley fever virus, Rinderpest virus, Rio Bravo virus, Rodent Torque Teno virus, Rodent hepacivirus, Ross River virus, Rotavirus A-I, Royal Farm virus, Rubella virus, Sabia mammarenavirus, Salem virus, Sandfly fever Naples virus, Sandfly fever Sicilian virus, Sapporo virus, Sathuperi virus, Seal anellovirus, Semliki Forest virus, Sendai virus, Seoul virus, Sepik virus, Severe acute respiratory syndrome-related coronavirus, Severe fever with thrombocytopenia syndrome virus, Shamonda virus, Shimoni bat virus, Shuni virus, Simbu virus, Simian torque teno virus, Simian virus 40-41, Sin Nombre virus, Sindbis virus, Small anellovirus, Sosuga virus, Spanish goat encephalitis virus, Spondweni virus, St. Louis encephalitis virus, Sunshine virus, TTV-like mini virus, Tacaribe mammarenavirus, Taila virus, Tamana bat virus, Tamiami mammarenavirus, Tembusu virus, Thogoto virus, Thottapalayam virus, Tick-borne encephalitis virus, Tioman virus, Togaviridae virus, Torque teno canis virus, Torque teno douroucouli virus, Torque teno felis virus, Torque teno midi virus, Torque teno sus virus, Torque teno tamarin virus, Torque teno virus, Torque teno zalophus virus, Tuhoko virus, Tula virus, Tupaia paramyxovirus, Usutu virus, Uukuniemi virus, Vaccinia virus, Variola virus, Venezuelan equine encephalitis virus, Vesicular stomatitis Indiana virus, WU Polyomavirus, Wesselsbron virus, West Caucasian bat virus, West Nile virus, Western equine encephalitis virus, Whitewater Arroyo mammarenavirus, Yellow fever virus, Yokose virus, Yug Bogdanovac virus, Zaire ebolavirus, Zika virus, or Zygosaccharomyces bailii virus Z viral sequence. Examples of RNA viruses that may be detected include one or more of (or any combination of) Coronaviridae virus, a Picornaviridae virus, a Caliciviridae virus, a Flaviviridae virus, a Togaviridae virus, a Bornaviridae, a Filoviridae, a Paramyxoviridae, a Pneumoviridae, a Rhabdoviridae, an Arenaviridae, a Bunyaviridae, an Orthomyxoviridae, or a Deltavirus. In certain example embodiments, the virus is Coronavirus, SARS, Poliovirus, Rhinovirus, Hepatitis A, Norwalk virus, Yellow fever virus, West Nile virus, Hepatitis C virus, Dengue fever virus, Zika virus, Rubella virus, Ross River virus, Sindbis virus, Chikungunya virus, Borna disease virus, Ebola virus, Marburg virus, Measles virus, Mumps virus, Nipah virus, Hendra virus, Newcastle disease virus, Human respiratory syncytial virus, Rabies virus, Lassa virus, Hantavirus, Crimean-Congo hemorrhagic fever virus, Influenza, or Hepatitis D virus.

[1132] In certain example embodiments, the virus may be a plant virus selected from the group comprising Tobacco mosaic virus (TMV), Tomato spotted wilt virus (TSWV), Cucumber mosaic virus (CMV), Potato virus Y (PVY), the RT virus Cauliflower mosaic virus (CaMV), Plum pox virus (PPV), Brome mosaic virus (BMV), Potato virus X (PVX), Citrus tristeza virus (CTV), Barley yellow dwarf virus (BYDV), Potato leafroll virus (PLRV), Tomato bushy stunt virus (TBSV), rice tungro spherical virus (RTSV), rice yellow mottle virus (RYMV), rice hoja blanca virus (RHBV), maize rayado fino virus (MRFV), maize dwarf mosaic virus (MDMV), sugarcane mosaic virus (SCMV), Sweet potato feathery mottle virus (SPFMV), sweet potato sunken vein closterovirus (SPSVV), Grapevine fanleaf virus (GFLV), Grapevine virus A (GVA), Grapevine virus B (GVB), Grapevine fleck virus (GFkV), Grapevine leafroll-associated virus-1, -2, and -3, (GLRaV-1, -2, and -3), Arabis mosaic virus (ArMV), or Rupestris stem pitting-associated virus (RSPaV). In a preferred embodiment, the target RNA molecule is part of said pathogen or transcribed from a DNA molecule of said pathogen. For example, the target sequence may be comprised in the genome of an RNA virus. It is further preferred that TnpB protein hydrolyzes said target RNA molecule of said pathogen in said plant if said pathogen infects or has infected said plant. It is thus preferred that the TnpB system is capable of cleaving the target RNA molecule from the plant pathogen both when the TnpB system (or parts needed for its completion) is applied therapeutically, i.e. after infection has occurred or prophylactically, i.e. before infection has occurred.

[1133] In certain example embodiments, the virus may be a retrovirus. Example retroviruses that may be detected using the embodiments disclosed herein include one or more of or any combination of viruses of the Genus Alpharetrovirus, Betaretrovirus, Gammaretrovirus, Deltaretrovirus, Epsilonretrovirus, Lentivirus, Spumavirus, or the Family Metaviridae, Pseudoviridae, and Retroviridae (including HIV), Hepadnaviridae (including Hepatitis B virus), and Caulimoviridae (including Cauliflower mosaic virus).

[1134] In certain example embodiments, the virus is a DNA virus. Example DNA viruses that may be detected using the embodiments disclosed herein include one or more of (or any combination of) viruses from the Family Myoviridae, Podoviridae, Siphoviridae, Alloherpesviridae, Herpesviridae (including human herpes virus, and Varicella Zozter virus), Malocoherpesviridae, Lipothrixviridae, Rudiviridae, Adenoviridae, Ampullaviridae, Ascoviridae, Asfarviridae (including African swine fever virus), Baculoviridae, Cicaudaviridae, Clavaviridae, Corticoviridae, Fuselloviridae, Globuloviridae, Guttaviridae, Hytrosaviridae, Iridoviridae, Maseilleviridae, Mimiviridae, Nudiviridae, Nimaviridae, Pandoraviridae, Papillomaviridae, Phycodnaviridae, Plasmaviridae, Polydnaviruses, Polyomaviridae (including Simian virus 40, JC virus, BK virus), Poxviridae (including Cowpox and smallpox), Sphaerolipoviridae, Tectiviridae, Turriviridae, Dinodnavirus, Salterprovirus, Rhizidovirus, among others. In one embodiment, a method of diagnosing a species-specific bacterial infection in a subject suspected of having a bacterial infection is described as obtaining a sample comprising bacterial ribosomal ribonucleic acid from the subject; contacting the sample with one or more of the probes described, and detecting hybridization between the bacterial ribosomal ribonucleic acid sequence present in the sample and the probe, wherein the detection of hybridization indicates that the subject is infected with Escherichia coli, Klebsiella pneumoniae, Pseudomonas aeruginosa, Staphylococcus aureus, Acinetobacter baumannii, Candida albicans, Enterobacter cloacae, Enterococcus faecalis, Enterococcus faecium, Proteus mirabilis, Staphylococcus agalactiae, or Staphylococcus maltophilia or a combination thereof.

### Coronavirus

[1135] Systems and methods of the presently disclosed invention are designed to detect coronavirus, in an aspect, the target sequence is the 2019-nCoV, also referred to herein as SARS-CoV-2, which causes COVID-19. The coronavirus is a positive-sense single stranded RNA family of viruses, infecting a variety of animals and humans. SARS-CoV is one type of coronavirus infection, as well as MERS-CoV. Detection of one or more coronaviruses are envisioned, including the SARS-CoV-2 detected in Wuhan City. Sequences of the sARS-CoV-2 are available at GISAID accession no. EPI_ISL_402124 and EPI_ISL_402127-402130, and described in DOI: 10.1101/2020.01.22.914952. Further deposits of the SARS-CoV2 are deposited in the GISAID platform include EP_ISL_402119-402121 and EP_ISL 402123-402124; see also GenBank Accession No. MN908947.3. In an aspect, one may use known SARS and SARS-related coronaviruses or other viruses from one or more hosts to generate a non-redundant alignment. Related viruses can be found, for example in bats.

[1136] In one embodiment, the systems are designed to comprise at least one highly active nucleic acid component polynucleotide which is designed according to the methods disclosed herein. In a preferred embodiment, the nucleic acid component polynucleotide binds to at least one target sequence that is a unique coronavirus genomic sequence, thereby identifying the presence of coronavirus to the exclusion of other viruses. The systems and methods can be designed to detect a plurality of respiratory infections or viral infections, including coronavirus.

[1137] In an aspect the at least one nucleic acid component polynucleotide binds to a coronavirus sequence encoding a polypeptide that is immunostimulatory to a host immune system. Immunostiumulatory polypeptides have the ability to enhance, stimulate, or increase response of the immune system, typically by inducing the activation or activity of a components of the immune system (e.g. an immune cell). In embodiments, the immunostimulatory polypeptide contributes to immune-mediated disease in the host. In an aspect, the host is a mammal, for example, a human, a bat, or a pangolin, that may be infected by a coronavirus. Cyranoski, D. Did pangolins spread the China coronavirus to people? Nature, 7 Feb. 2020. In one embodiment, the nucleic acid component polynucleotide can be designed to detect SARS-CoV-2 or a variant thereof in meat, live animals and humans so that testing can be performed, for example at markets and other public places where sources of contamination can arise.

[1138] Gene targets may comprise ORF1ab, N protein, RNA-dependent RNA polymerase (RdRP), E protein, ORF1b-nsp14, Spike glycoprotein (S), or pancorona targets. Molecular assays have been under development and can be used as a starting point to develop nucleic acid component molecules for the methods and systems described herein. See, “Diagnostic detection of 2019-nCoV by real-time RT-PCR” Charité, Berlin Germany (17 Jan. 2020)’ Detection of 2019 novel coronavirus (2019-nCoV) in suspected human cases by RT-PCR—Hong Kong University (23 Jan. 2020); PCR and sequencing protocol for 2019-nCoV—Department of Medical Sciences, Ministry of Public Health, Thailand (updated 28 Jan. 2020); PCR and sequencing protocols for 2019-nCoV—National Institute of Infectious Diseases Japan (24 Jan. 2020); US CDC panel primer and probes—U.S. CDC, USAV—U.S. CDC, USA (28 Jan. 2020); China CDC Primers and probes for detection 2019-nCoV (24 Jan. 2020), incorporated in their entirety by reference. Further, the nucleic acid component molecule design may exploit differences or similarities with SARS-CoV. Researchers have recently identified similarities and differences between 2019-nCoV and SARS-CoV. “Coronavirus Genome Annotation Reveals Amino Acid Differences with Other SARS Viruses,” genomeweb, Feb. 10, 2020. For example, nucleic acid component molecules based on the 8a protein, which was present in SARS-CoV but absent in SARS-CoV-2, can be utilized to differentiate between the viruses. Similarly, the 8b and 3b proteins have different lengths in SARS-CoV and sARS-CoV-2 and can be utilized to design nucleic acid component molecules to detect non-overlapping proteins of nucleotides encoding in the two viruses. Wu et al., Genome Composition and Divergence of the Novel Coronavirus (2019-nCoV) Originating in China, Cell Host & Microbe (2020), DOI: 10.1016/j.chom.2020.02.001, incorporated herein by reference, including all supplemental information, in particular Table S1. Mutations may also be detected, with nucleic acid component and/or primers designed specifically to detect, for example, changes in the SARS-CoV-2 virus. In an embodiment, the nucleic acid component or primer can be designed to detect the D614G mutation in the SARS-CoV-2 spike protein. See, Korber et al., Cell 182, 812-827 (2020); doi: 10.1016/j.cell.2020.06.043. Other mutations in the spike protein can be designed utilizing the COVID-19 viral genome analysis pipeline available at cov.lanl.gov. Further resources to design primers and nucleic acid components to detect coronavirus or coronavirus mutations can be found at Starr, et al., “Deep Mutational Scanning of SARS-CoV-2 Receptor Binding Domain Reveals Constraints in Folding and ACE2 Binding,” Cell, 182, 1-16 (2020); doi: 10.1016/j.cell.2020.08.012.

[1139] The systems and methods of detection can be used to identify single nucleotide variants, detection based on rRNA sequences, screening for drug resistance, monitoring microbe outbreaks, genetic perturbations, and screening of environmental samples, as described in PCT/US2018/054472 filed Oct. 22, 2018 at [0183]-[0327], incorporated herein by reference.

[1140] In certain example embodiments, the systems, devices, and methods disclosed herein may be used for biomarker detection. For example, the systems, devices and method disclosed herein may be used for SNP detection and/or genotyping. The systems, devices and methods disclosed herein may be also used for the detection of any disease state or disorder characterized by aberrant gene expression. Aberrant gene expression includes aberration in the gene expressed, location of expression and level of expression. Multiple transcripts or protein markers related to cardiovascular, immune disorders, and cancer among other diseases may be detected. In certain example embodiments, the embodiments disclosed herein may be used for cell free DNA detection of diseases that involve lysis. In certain example embodiments, the embodiments could be utilized for faster and more portable detection for pre-natal testing of cell-free DNA. The embodiments disclosed herein may be used for screening panels of different SNPs associated with, among others, different coronaviruses, evolving SARS-CoV2, and other related respiratory viral infections. As described herein elsewhere, closely related genotypes/alleles or biomarkers (e.g. having only a single nucleotide difference in a given target sequence) may be distinguished by introduction of a synthetic mismatch in the nucleic acid component molecule.

[1141] In an aspect, the invention relates to a method for detecting target nucleic acids in samples, comprising: distributing a sample or set of samples into one or more individual discrete volumes, the individual discrete volumes comprising a TnpB system according to the invention as described herein; incubating the sample or set of samples under conditions sufficient to allow binding of the one or more nucleic acid component molecules to one or more target molecules; activating the TnpB protein via binding of the one or more nucleic acid component molecules to the one or more target molecules, wherein activating the TnpB protein results in modification of the RNA-based masking construct such that a detectable positive signal is generated; and detecting the detectable positive signal, wherein detection of the detectable positive signal indicates a presence of one or more target molecules in the sample.

[1142] The sensitivity of the assays described herein are well suited for detection of target nucleic acids in a wide variety of biological sample types, including sample types in which the target nucleic acid is dilute or for which sample material is limited. Methods for field deployable and rapid diagnostic assays can be optimized for the type of sample material utilized and can be adapted from approaches used for other assays known in the art. See, e.g. Myhrvold et al., 2018. Biomarker screening may be carried out on a number of sample types including, but not limited to, saliva, urine, blood, feces, sputum, and cerebrospinal fluid. The embodiments disclosed herein may also be used to detect up- and/or down-regulation of genes. For example, a sample may be serially diluted such that only over-expressed genes remain above the detection limit threshold of the assay.

[1143] In one embodiment, the present invention provides steps of obtaining a sample of biological fluid (e.g., urine, blood plasma or serum, sputum, cerebral spinal fluid), and extracting the DNA or RNA. The mutant nucleotide sequence to be detected, may be a fraction of a larger molecule or can be present initially as a discrete molecule.

[1144] In embodiments, DNA is isolated from plasma/serum of a cancer patient. For comparison, DNA samples isolated from neoplastic tissue and a second sample may be isolated from non-neoplastic tissue from the same patient (control), for example, lymphocytes. The non-neoplastic tissue can be of the same type as the neoplastic tissue or from a different organ source. In one embodiment, blood samples are collected and plasma immediately separated from the blood cells by centrifugation. Serum may be filtered and stored frozen until DNA/RNA extraction.

[1145] In an aspect, sample preparation can comprise methods as disclosed herein to circumvent other RNA extraction methods and can be used with standard amplification techniques such as RT-PCR as well as the TnpB detection methods disclosed herein. In an aspect, the method may comprise a one-step extraction-free RNA preparation method that can be used with samples tested for coronavirus, which may be, in an aspect, a RT-qPCR testing method, a lateral flow detection method or other TnpB detection method disclosed herein. Advantageously, the RNA extraction method can be utilized directly with other testing protocols. In an aspect, the method comprises use of a nasopharyngeal swab, nasal saline lavage, or other nasal sample (e.g., anterior nasal swab) with Quick Extract™ DNA Extraction Solution (QE09050), Lucigen, or QuickExtract Plant DNA Extraction Solution, Lucigen. In an aspect, the sample is diluted 2:1, 1:1 or 1:2 sample:DNA extraction solution. The sample:extraction mix is incubated at about 90° C. to about 98° C., preferably about 95° C. In another aspect, incubation is performed at between about 20° C. to about 90° C., about 22, 23, 24, 25, 26, 27, 28, 29, 30, 31, 32, 33, 34, 35, 36, 37, 38, 39, 40, 41, 42, 43, 44, 45, 46, 47, 48, 49, 50, 51, 52, 53, 54, 55, 56, 57, 58, 59, 60, 61, 62, 63, 64, 65, 66, 67, 68, 69, 70, 71, 72, 73, 74, 75, 76, 77, 78, 79, 80, 81, 82, 83, 84, 85, 86, 87, 88, 89 or 90° C. The incubation period can be about 2, 3, 4, 5, 6, 7, 8, 9, 10, 11, 12, 13, 14, 15, 16, 17, 18, 19, 20, 21, 22, 23, 24, 25, 26, 27, 28, 29, or 30 minutes, preferably about 4 to 6 minutes, or about 5 minutes. Incubation time and temperature may vary depending on sample size and quality, and incubation time may increase if using lower temperature. Current CDC Real-Time RT-PCR Diagnostic Panel are as described at fda.gov/media/134922/download, “CDC 2019-Novel Coronavirus (2019-nCoV) Real-Time RT-PCR Diagnostic Panel.” In one embodiment, the DNA extraction solution can remain with the sample subsequent to incubation and be utilized in the next steps fo detection methods. In an aspect, the detection method is an RT-qPCR reaction and the extraction solution is kept at a concentration of less than 10%, 9%, 8%, 7%, 6%, 5%, 4%, 3% of the reaction mixture, where the reaction mixture comprises the detection reaction reagents, sample and extraction solution.

[1146] In one embodiment, a bead is utilized with particular embodiments of the invention and may be included with the extraction solution. The bead may be used to capture, concentrate or otherwise enrich for particular material. The bead may be magnetic, and may be provided to capture nucleic acid material. In another aspect, the bead is a silica bead. Beads may be utilized in an extraction step of the methods disclosed herein. Beads can be optionally used with the methods described herein, including with the one-pot methods that allow for concentration of viral nucleic acids from large volume samples, such as saliva or swab samples to allow for a single one-pot reaction method. Concentration of desired target molecules can be increased by about 10-fold, 50-fold, 100-fold, 200-fold, 500-fold, 800-fold, 1000-fold, 1500-fold, 2000-fold, 2500-fold, 3000-fold, or more.

[1147] Magnetic beads in a PEG and salt solution are preferred in an aspect, and in embodiments bind to viral RNA and/or DNA which allows for concentration and lysis concurrently. Silica beads can be used in another aspect. Capture moieties such as oligonucleotide functionalized beads are envisioned for use. The beads may be using with the extraction reagents, allowed to incubate with a sample and the lysis/extraction buffer, thereby concentrating target molecules on the beads. Extraction can be performed as described elsewhere herein, at 22° C.-60° C., with subsequent isothermal amplification and/or TnpB detection performed under conditions as described elsewhere herein. When used with a cartridge device detailed elsewhere herein, a magnet can be activated and the beads collected, with optional flushing of the extraction buffer and one or more washes performed. Advantageously, the beads can be used in the one-pot methods and systems without additional washings of the beads, allowing for a more efficient process without increased risks of contamination in multi-step processes. Beads can be utilized with the isothermal amplifications detailed herein, and the beads can flow into an amplification chamber of the cartridge or be maintained in the pot for the amplification step. Upon heating, nucleic acid can be released off the beads.

[1148] In certain example embodiments, target nucleic acids are detected directly from a crude or unprocessed sample, such as blood, serum, saliva, cebrospinal fluid, sputum, or urine. In certain example embodiments, the target nucleic acid is cell free DNA.

### Kits

[1149] In one aspect, the invention provides kits containing any one or more of the elements disclosed in the above methods and compositions. In one aspect, the invention provides a kit comprising one or more of the components described herein. In one embodiment, the kit comprises the compositions herein and instructions for using the kit. In one embodiment, the kit comprises a vector system and instructions for using the kit. In one embodiment, the kit comprises a delivery system and instructions for using the kit. In one embodiment, the kit comprises a vector system and instructions for using the kit. Elements may be provided individually or in combinations, and may be provided in any suitable container, such as a vial, a bottle, or a tube. The kits may include the nucleic acid component and optionally an unbound protector strand as described herein. The kits may include the nucleic acid component with a protector strand bound to at least partially to a reprogrammable spacer portion of the nucleic acid component sequence (i.e. pnucleic acid component). Thus the kits may include the pnucleic acid component in the form of a partially double stranded nucleotide sequence as described here. In one embodiment, the kit includes instructions in one or more languages, for example in more than one language. The instructions may be specific to the applications and methods described herein.

[1150] In one embodiment, a kit comprises one or more reagents for use in a process utilizing one or more of the elements described herein. Reagents may be provided in any suitable container. For example, a kit may provide one or more reaction or storage buffers. Reagents may be provided in a form that is usable in a particular assay, or in a form that requires addition of one or more other components before use (e.g., in concentrate or lyophilized form). A buffer can be any buffer, including but not limited to a sodium carbonate buffer, a sodium bicarbonate buffer, a borate buffer, a Tris buffer, a MOPS buffer, a HEPES buffer, and combinations thereof. In one embodiment, the buffer is alkaline. In one embodiment, the buffer has a pH from about 7 to about 10. In one embodiment, the kit comprises one or more oligonucleotides corresponding to a nucleic acid component scaffold, reprogrammable sequence for insertion into a vector so as to operably link the nucleic acid component sequence and a regulatory element. In one embodiment, the kit comprises a homologous recombination template polynucleotide. In one embodiment, the kit comprises one or more of the vectors and/or one or more of the polynucleotides described herein. The kit may advantageously allow to provide all elements of the systems of the invention.

### EXAMPLES

### Example 1

[1151] Applicants reviewed TnpBs that shared inverted terminal repeat (ITR) sequences with IscB ITRs to infer the true RNA of the TnpB. Specifically, the TnpB in Ktedonobacter racemifer shares ITRS with the Ktedonobacter racemifer IscB. FIG. 2 provides an alignment of exemplary TnpBs that include similarity to the TnpB in K. racemifer. Importantly, there is a region of high conservation that exists beyond what one would view as the typical end of the protein (FIG. 2). This conserved region marks the likely presence of an ITR and also the expressed RNA. Supporting that this region marks the RNA is that the 3′ end of the TnpB loci has much weaker conservation (FIG. 3), suggested the 3′ end is not expressed as RNA. The similarly of the ITRs between TnpB and IscB may include a 5′ ITR of the TnpB (FIG. 4) that is homologous to the 5′ ITR of IscB (FIG. 5).

[1152] The 5′ ITRs of TnpB and IscB are similar at the sequence level, and based on the similarity with the IscB loci, the TnpB guide orientation relative to the locus would be consistent. In IscB, the guide is 5′ of the locus, creating a guide+(hRNA conserved region) expressed RNA. This suggests that the region directly upstream from the 5′ ITR of TnpB also serves as the guide. Based on the positioning of the end of the coding sequence being immediately 3′ of the conserved RNA region, it would suggest that the conserved RNA region could be expressed as runoff transcription from the CDS, which could easily flow past the ITR and include part of the surrounding regions not part of the locus (guide region). This would suggest the RNA species for these systems is (TnpB RNA conserved region)+Guide, which is akin to the DR+spacer configuration that many Type V CRISPRs take.

[1153] Using existing RNA seq data from K. racemifer, the proposed RNA is indeed expressed with evidence of a 15 bp guide with 50-60 bp reserved for the remainder of the RNA (FIG. 6). This suggest the expression is 3′->5′, meaning the RNA mirrors the bottom strand. While IscB is an RNA-guided endonuclease that similarly has a guide in the same location relative to the inverted terminal repeats (immediately upstream from the 5′ ITR), the orientation of the effector protein relative to the DNA transposon in TnpB based transposons is opposite that of IscB. The orientation of IscB locus is 5′ ITR/hRNA(overlapping), IscB (5′ strand), and lastly 3′ ITR. For TnpB sharing ITRs with IscB, it is 5′ITR/RNA (with RNA on the 3′ strand), TnpB (3′ strand), and lastly 3′ ITR. This work, along with the RuvC domain of TnpB support that the TnpB systems acts as RNA guided DNA endonucleases, with the guide being the RNA expressed immediately upstream from the 5′ end. An annotated sequence of exemplary TnpB loci from K. racemifer, including 5′ ITR and 3′ITR (FIG. 7).

TABLE 5
Ktedonobacter racemifer DSM 44963 TnpB

| 3′ ITR | 5′ ITR | TnpB | Expressed | Hairpin 2 | Hairpin 1 | Extension |
|---|---|---|---|---|---|---|
| Ggggtc | Gtcaga | ctaagccgaagcgtgagacgagaggacg | Aagagagg | Tgtcccta | Accccatg | gtcag |
| cacgca | tacccc | tctgacagcgacccactcaggacaggtc | tagcaatgtc | agccgaag | gcgaaagc | at |
| tggcgc | atggcg | taccaccctgagcaagacaaaatttgtc | agatacccc | cgtgagac | caggggc | |
| ggttctt | aaagcc | tcggatgttgtatgcagcattgaggtct | atggcgaaa | gagaggac | (SEQ ID | |
| atgatgg | aggggc | gcatgaagttgatacccgcaggagcgac | gccaggggc | gtctgacag | NO: | |
| (SEQ ID | (SEQ ID | agtgaaagaccgattgagaacgccgatt | ttgtccctaa | cgacccac | 64,317) | |
| NO: | NO: | gttgcgtgcttgatgcccacaacgagaa | gccgaagcg | tcaggaca | | |
| 64,312) | 64,313) | caggtctgcgaggtatgacgcggatcaa | tgagacgag | (SEQ ID | | |
| | | tgcgttcaaccaccattccctgttcttg | agg (SEQ | NO: | | |
| | | ccctttgtagacaatgaagccgtacaac | ID NO: | 64,316) | | |
| | | tgcgcaaaggaccaggaatgcaacttac | 64,315) | | | |
| | | gttgtccttcacctttgcgatgtcggac | | | | |
| | | tccttctcgaatattggtcaagttctca | | | | |
| | | agcacaattgttgctccaggggttacgc | | | | |
| | | tttgcacgatgcgtttggagagcacatg | | | | |
| | | gtcacagtcccggtggaaaagcatctgc | | | | |
| | | ttacgcgacagctttttgagatgccgtt | | | | |
| | | tggcagacgtggttcctttggactgaag | | | | |
| | | tttgcgacggagacggaacgtacggcgg | | | | |
| | | tcaacctctttccagtggcgagagccaa | | | | |
| | | ggaagtgacggttggaagtcacagcagg | | | | |
| | | acgattcaagcccaagtccacaccaaca | | | | |
| | | accgtgtcattggcttgaacaacaggtt | | | | |
| | | cgggaacattgaccacgacatgcagcca | | | | |
| | | ccatttccctttgcggtggatcaggtca | | | | |
| | | gcagtagcaatgttacacccacgatatc | | | | |
| | | gctcactgaaatgaggaacggtaaaggg | | | | |
| | | aagagtcattttgccttgcgtggtcgaa | | | | |
| | | acgcgaatcgtttgtgtttcccaattga | | | | |
| | | gggagtaggtgtgaacattgtaacgaac | | | | |
| | | cgcacactgctcagaggaagggcaacga | | | | |
| | | acaggcttgaagagaggagcgggtttcc | | | | |
| | | cctgtttctgtgcgttagcaaccttttt | | | | |
| | | cggataggacgcttccttcttggctttc | | | | |
| | | caggtgaaagcactgcgaagcgtttcgg | | | | |
| | | tggctttgacccgagcctgaatgagcaa | | | | |
| | | gtcactcaccagaccaggacacaaggat | | | | |
| | | ttcgtctcgtagtaggtggcatgatgaa | | | | |
| | | gcctgacaccgttcttctcgcaatgctg | | | | |
| | | ccaaccatagacacacacatgattgtag | | | | |
| | | gcaacggtaaactgcaccaacgtttcct | | | | |
| | | gcaagacgtgggactgttctgtattcgg | | | | |
| | | ttgaagttgaatccgcaccgttctatcc | | | | |
| | | at (SEQ ID NO: 64,314) | | | | |

[1154] Applicants identified two functional TnpB orthologs, Actinoplanes lobatus strain DSM 43150 and Epsilonproteobacteria bacterium isolate B11. The Applicants investigated the TAM requirements for these functional TnpB orthologs using the experimental approach in FIG. 8. Based on the experiment, the TAM for Actinoplanes lobatus strain DSM 43150 and Epsilonproteobacteria bacterium isolate B11 are identified in FIG. 9, with TCAG identified as the TAM for Actinoplanes lobatus strain DSM 43150, and TCAT identified for Epsilonproteobacteria bacterium isolate B11.

### Example 2—Plasmid Cleavage Assay

[1155] TnpB protein and ωRNA are mixed in an in vitro transcription/translation reaction with two plasmids, one which contains a correct cognate target and TAM sequence (example TCAT in FIG. 10) and one that has either an incorrect TAM or does not contain a target at all. If cleavage occurs, an adapter can be ligated, which can then be used for amplification and next-generation sequencing. If the plasmid is not cleaved, then the adapter will not be ligated and that product will not be amplified. The identification of sequences indicates that cleavage has occurred. It has been observed by Applicants (unpublished results) that adapter ligation only seems to occur with +TAM/+target plasmids in any appreciable amount, and thus it is concluded that cleavage is occurring only of those substrates.

### Example 3—TnpB Rd1 Summary of Ortholog 5

[1156] RNA sequencing (RNA-Seq) was performed on a selection of 10 orthologs of TnpB-Rd1 that appeared to be associated with a non-coding RNA (ncRNA) with sequence similarity to IscB ncRNA. The results of the RNA-seq validated that TnpB is associated with a ncRNA. It was observed that a 173 nucleotide (nt) scaffold can be truncated to 102 nt and maintain TnpB activity (FIG. 11A). An analysis was performed with orthologs TnpBRd1_5_Fn30_TAM using enrichment to all captured TAMs with a 30 bp guide to the Fn spacer region (FIG. 11B), with a 15% depletion of TAMs using the same 30 bp guide to the Fn (FIG. 11C) and enrichment of TAMs using a 30 bp guide to the 644PSP1 spacer (against the top 10% of captured TAMs; FIG. 11D). The results showed that the TnpB activity is reprogrammable and guide specific, that is, no TAM enrichment observed with non-targeting guides, that the TnpB activity is not consistent with nicking because NEB nickases do not lead to nicking site enrichment and that guide lengths of 15-30 nt are tolerated.

### Example 4—TnpB Rd1 Validation of Orthologs 1 and 4

[1157] Validation of the Rd1 orthologs 1 and 4 using a TXTL cleavage assay was performed using plasmid substrates of TAM-specific cleavage of adaptor-ligated reads in A. lobatus TnpB-1 and A. cellulosilytica TnpB (FIG. 12A). For each condition, two separate plasmids at the same concentration were used for direct comparison of different substrates (FIG. 12A). The site of adaptor ligation was determined using next generation sequencing in the amplification products and was shown to be consistent between TAM screens and validation (results based on ortholog 4). The location of adaptor ligation using the 8N TAM library plasmid (FIG. 12B, upper bar graphs) of the non-target (NT) and target (T) strands show that the site of adaptor ligation is slightly different with respect to each strand. When a single TAM plasmid is used (FIG. 12B, bottom bar graph) with the non-target (NT) strand, the site of adaptor ligation is similar to the non-target (NT) strand when the TAM library is used.

### Example 5—Identification of TnpB Orthologs Having 5′ TAMs

[1158] Orthologs were selected based on experimental characterization of ten Tnp orthologs from various bacteria which contained a non-coding RNA (ncRNA) bearing sequence similarity to IscB ncRNA. The orthologs were derived from Actinomadura celluolosilytica strain DSM 45823, Actinomadura namibiensis strain DSM 44197, two TnpB from Actinomadura cellulosilytica strain DSM 45823, Actinomadura namibiensis strain DSM 44197, Actinoplanus lobatus strain DSM 43150, Alicyclobacillus macrosporagiidus strain DSM 17980, Lipingzhangella halophila strain DSM 102030, Haloactinospora alba Strain DSM 45015, Epsilonbacteria bacterium, Ktedonobacter racemifer, Meiothermus silvana strain DSM 9946 and QNF01000004_Extraction_(reversed).

[1159] To determine the TAMs in the orthologs, two methods were used (FIG. 13A-13B). The first consisted of expressing TnpB from an operably-linked T7 promoter in conjunction with a reprogrammable pTarget (e.g., Fn) and a T7 expressing an ωRNA scaffold and guide for retargeting. The intact pTargets were sequenced to determine which TAMs permitted cleavage (FIG. 13A). The second method involved in vitro transcription and translation, TAM-specific pTarget cleavage followed by adaptor ligation, cleavage specific amplification and finally sequencing of enriched TAMs. Identification of 5′ TAMs were permitted only in those sequences that were cleaved (FIG. 13A). The identified TAMs of seven of the ten orthologs are shown and each has the sequence TTCAN (FIG. 13B).

### Example 6—Validation of TAMs for Two TnpB Orthologs

[1160] Validation of two TnpB orthologs from Actinoplanes lobatus strain DSM 43150 (TnpB-2) and Actinomadura celluolosilytica strain DSM 45823 was performed using adapter-ligated reads in the presence (+protein) or absence (−protein) of TnpB protein (FIG. 14). The results showed that cleavage of target plasmids in both orthologs is TnpB-protein dependent and requires the presence of both the target and the TAM (FIG. 14).

### Example 7—TnpB-2 DNA Cleavage

[1161] Applicants determined the A. lobatus TnpB-2 cleavage site on both the target and non-target strands (FIG. 15A). It was observed that similar to some Cas12 proteins, TnpB cleaves at multiple positions within and beyond the guide annealing site (FIG. 15B).

### Example 8—Characterization of ncRNA Associated with A. lobatus TnpB

[1162] The A. lobatus TnpB-2 ORF was expressed in E. coli including the downstream region of approximately 200 bp. The downstream region was shown to contain a 173 nt scaffold (reRNA) and an RNA guide sequence (FIG. 16A). Engineered scaffold sequences resulting in a series of truncations from 201 nt down to 102 nt maintained TAM-specific enrichment in the presence of a guide and dsDNA (FIG. 16B).

### Example 9—Characterization of ncRNA Associated with K. Racemifer TnpB

[1163] The region located immediately downstream of K. racemifer TnpB appears to encode a ncRNA and guide sequences (FIG. 17).

### Example 10—IS200/IS605 Elements Encode Diverse RNA-Guided Nucleases

[1164] Applicants sought to determine if IS200/605 transposons, in general, harbor RNA-guided effectors. IS200/IS605 transposons more commonly encode TnpB, a protein of a distinct family that, like IsrB, contains a RuvC domain as the only endonuclease domain and is thought to be the ancestor of Cas12s, the type V CRISPR effectors (FIG. 18A). The TnpB family is an order of magnitude more diverse than the IscB family; a HM ER search identified over 1 million tnpB loci in publicly available prokaryotic genomes. A sequence conservation analysis revealed conserved non-coding regions immediately downstream of the CDS of many TnpBs, suggesting the presence of an associated ncRNA that may serve as an RNA guide (FIG. 20). Previous work also identified ncRNAs overlapping with the 3′-end of tnpB genes in archaea and bacteria, but the function of these ncRNAs has not been characterized. Small RNA-seq of K. racemifer demonstrated native expression of a ncRNA overlapping with the 3′ end of the associated tnpB ORF (FIG. 18B), which was classified as a distinct class of ωRNAs. The reverse complement of the K. racemifer TnpB ωRNA 3′ end is nearly identical to the 5′ of the ωRNA in some K. racemifer IscBs, a region that corresponds to the predicted transposon end in each locus (FIG. 18C). Analysis of non-redundant loci containing tnpB genes that clustered with K. racemifer TnpB showed an abrupt drop in conservation at the 3′ end of the loci (FIG. 20), corresponding to an IS200/605 transposon end. Comparison to the small RNA-seq trace revealed expression beyond the conservation drop, indicating the possible presence of a guide sequence in the transcript (FIG. 18D). To investigate this possibility, Applicants recombinantly expressed and purified one of these TnpBs (from Actinoplanes lobatus) in the presence of the predicted ωRNA overlapping the ORF. Small RNA-seq of the co-purified RNA showed that the predicted ωRNA containing the putative guide region in A. lobatus interacts with the TnpB protein (FIG. 21A). An in vitro plasmid cleavage assay of multiple TnpB proteins from this cluster using a reprogrammed guide demonstrated RNA-guided cleavage with a 5′ TAM (FIG. 18E). Cleavage-specific adapter ligation and sequencing of TAM-containing targeted plasmids further confirmed the reprogrammable RNA-guided dsDNA endonuclease activity of TnpB (FIG. 18F). TAM screens of additional TnpB loci including A. lobatus TnpB-2, A. macrosporangiidus TnpB and Epsilonbacteria bacterium isolate B11_G4 TnpB TAM were performed (FIG. 21B). Plasmid competition assay positive control with SpCas9. SpCas9 cleaves only TAM and target-containing plasmids as indicated by the presence of cleavage-specific adapter ligation products. Statistical significance was assessed by comparing the number of adapter-ligated reads of the first plasmid listed in each condition normalized to the average of adapter-ligated reads of the second plasmid listed in the + protein versus − protein conditions using a two-tailed T-test (FIG. 21C).

[1165] Examples of RNA-guided systems including specific guide loading systems such as Ω (OMEGA) and CRISPR systems and non-specific guide loading systems such as Argonaute/RNAi systems are shown in FIG. 19.

### Materials and Methods

### Profile Curation

[1166] Initial profiles for IscB were curated using NCBI's PSI-BLAST on the NR database with 8 iterations from a starting seed sequence up to a maximum of 20000 target sequences. Strong filtering parameters (expect threshold of 1e-5 and PSI-BLAST threshold of 1e-6) were selected to reduce the accumulation of unrelated proteins also containing HNH domains, such as restriction enzymes or homing endonucleases. All proteins smaller than 260 aa were discarded. The remaining proteins were then aligned using MAFFT FFT-NS-1 and partial proteins as well as proteins with poor alignment coverage to the HNH domain were discarded. The filtered set was then clustered using MMSeqs2 at 70% sequence identity with a minimum coverage of 70%. The MMSeqs2 representatives for each cluster were then aligned using MAFFT-einsi. The resulting alignment was further split into multiple domains (NTD, RuvC-I, RuvC-II, HNH, and RuvC-III) in order to create distinct HHAlign profiles for the respective regions. For HMMER profiles, the RuvC-I, BH, and RuvC-II were combined into a single profile to reduce false positives.

[1167] Due to the extensive diversity in TnpA, a PSI-BLAST search resulted in more than 20000 homologous sequences. Because TnpA consists of a single contiguous catalytic domain, HHblits was instead used to identify more non-redundant homologs using an E-value cutoff of 1e-3, minimum hit probability of 80% and 8 iterations on the UniRef30_2020_06 database. The resulting proteins were aligned using MAFFT-einsi, and partial proteins were removed.

### Identification of IscB, IsrB, and IshA

[1168] All prokaryotic genomes were downloaded from NCBI, and NCBI WGS, as well as JGI projects for which express permission was given. ORFs on all contigs were predicted with a minimum size of 80 aa, and allowing for alternative start codons GTG and TTG. ORFs sharing the same stop location and strand (+/−) as an existing protein annotation were discarded in favor of the existing annotation. All ORFs were then searched using HMMER and the 6 IscB profiles with a minimum bitscore of 18. Any ORF/protein with a hit to any of the 6 domains was considered a protein of interest (POI) and retained for further analysis. For redundancy reduction, all proteins were then clustered using MMSeqs2 at 90% sequence identity with 85% coverage. Proteins with start or end sites within 200 bp of contig edges were considered partial. Within each 90% cluster, proteins smaller than the 80th percentile in length were discarded. Of the remaining proteins, proteins containing X (ambiguous) amino acids were discarded unless their removal would result in an empty set of sequences. Of the remaining proteins, the representative sequence was selected to be the sequence with the maximum of the minimum distance from the protein's start or end site to either IscB-IsrB-Cas9 RuvC/BH and RuvC/BH/HNH domain based phylogenetic analysis

[1169] Cas9s identified from the IscB domain-based search exhibited monophyletic branching from a RuvC based tree, however not all Cas9s were identified from this search. To expand the space of Cas9s included in the analysis, Cas9 profiles from the Koonin lab, TIGRFAM, and profiles made from MAFFT alignments of Cas9 proteins from CRISPRDisco were used to identify additional Cas9 proteins not found in the initial IscB domain-based search using HMMER with a minimum bitscore of 25 and protein length of 500 aa. Cas9 proteins from the IscB domain search were combined with the Cas9 proteins from the Cas9 search and deduplicated. The Cas9 ORF start sites were then refined using GLIMMER(8). The superset of Cas9 proteins were then clustered 90% sequence identity with 85% coverage and redundancy reduced in the same manner as for the IscB search. The superset of non-redundant Cas9 proteins were then reclustered at 50% sequence identity and 60% coverage. The choice of 50% sequence identity reflects the difference in the size of conserved regions between IscBs and Cas9s with approximately 100 aa more slowly evolving in the key regions (RuvC, BH, and HNH). The clustering criteria of 65% minimum sequence identity for 400 aa proteins is functionally similar to 65%-100/400+100/1000=50% sequence identity for larger 1000 aa Cas9s with the same conserved domains spanning approximately 100 aa. The Cas9 clusters were then pooled with the IscB clusters for phylogenetic analysis.

[1170] IscB, IsrB and Cas9 obtained from the above filtering criteria were aligned using MAFFT-x2 (two iterations) and BLOSUM62 scoring (default if not mentioned). The RuvC-I and BH regions of Cas9 did not align with the RuvC-I and BH regions of IscB and IsrB due to the different domain architectures and sizes of these divergent protein families. RuvC-I and BH were manually grouped and realigned using MAFFT-x2. Sequences with poor coverage at the RuvC-I domain region of the alignment were removed if their HHAlign score to either the IscB-RuvC-I or Cas9-RuvC-I profiles were less than 21. Small proteins with both Cas9-like and IscB-like sequences containing HHAlign hits to RuvC-I and BH typically did not have correct alignments with RuvC-I and BH relative to all other proteins due to their hybrid nature. For such proteins, all amino acids between the N terminus and RuvC-II were grouped together as RuvC-I and BH for alignment. RuvC-I and BH regions were then realigned using MAFFT-linsi. IsrB aligned columns from the HNH domain were moved to the RuvC-II column group. RuvC-II, RuvC-III, HNH, and NTD domains were then sequentially aligned using MAFFT-linsi. Excess regions between the BH domain and RuvC-II were then aligned using MAFFT-einsi and BLOSUM30 for identification of REC-like insertions. Sequences with no or poor alignment to any of the RuvC or BH domains were removed. The resulting alignment was then used for phylogenetic analysis.

[1171] All domains not common to all 3 types of proteins, namely NTD, REC1, REC2, PI domains, and IscB/IsrB C terminal domains were removed from the alignment, leaving a trimmed alignment containing only the highly conserved portions of the RuvC-I, BH, RuvC-II, and RuvC-III domains, creating a RuvC/BH alignment containing IscB, IsrB, and Cas9. Another alignment was created containing only RuvC-I, BH, RuvC-II, HNH, and RuvC-III domains for only IscB and Cas9, termed the RuvC/BH/HNH alignment. For both of these alignments, clusters with dead representative sequences (sequences with key catalytic sites mutated) were removed. Specifically, the positions filtered are the RuvC-I conserved D RuvC-II conserved E, HNH Conserved H (when applicable), and RuvC-III coserved D and H. Symmetry tests implemented in IQ Tree 2 were used to identify potential phylogenetic violations for the alignments (FIG. S#74fu2). The RuvC/BH/HNH alignment displayed significant violation to the stationarity assumption of the three main assumptions used in typical phylogenetic analysis (reversibility, stationarity, homogeneity). As the alignment contained too many taxa for the use of heterotachy models in IQ Tree 2, we use a subtractive approach to identify the source of the stationarity violation. Preliminary analyses revealed the major monophyletic clade of II-B Cas9s consistently split from the rest of Cas9s with a branch length of ≥1, suggesting its accurate placement along the tree might be difficult. We removed the major monophyletic clade of II-B Cas9s from the RuvC/BH/HNH alignment, which substantially reduced the stationarity violation as determined by marginal symmetry test p-value (FIG. S#74fu2). We also created another alignment only consisting of IscB and Cas9s from the early stages of Cas9 evolution, which completely eliminated any stationarity violation. For each alignment, substitution model selection was performed using the model finder tool implemented in IQ Tree 2. Optimal models were selected using the Akaike Information Criterion corrected for small sample sizes (AICc). In most cases, the AICc best model differed from the Bayesian Information Criterion (BIC) or AIC (standard Akaike Information Criterion), and some analyses were run for both sets of models; however, AICc was generally preferred due the small sample size correction. Then, for each alignment, phylogenetic trees were built using multiple methods for cross comparison (IQ Tree 2, RAxML, MrBayes). While FastTree2 was used for quick visualizations of phylogenetic information, the likelihood scores obtained using this method were substantially worse than for IQ Tree 2, RAxML, or MrBayes. As a result, FastTree2 was not used for comprehensive cross comparisons.

[1172] For the main text phylogenetic figure, a hybrid tree approach was used in order to condense the information pertinent to Cas9 while maintaining phylogenetic accuracy. For this approach, a subsample of Cas9 clusters were selected from the alignment, in addition to the complete set of IscB and IsrBs. The resulting sub alignment was then used for phylogenetic inference using IQ Tree 2 with identical parameters. Due to the potentially skewed Cas9 related information present in the sub alignment, placement of the Cas9 lineage was inferred from the tree inferred from the original alignment. This was done by detaching the Cas9 branch from the sub alignment tree and replacing the original Cas9 branch on the original tree with the smaller detached branch. The branch selected for grafting was the branching between Cas9_849 and all other Cas9s, as this region shared the same topology between both trees. The ordering of Cas9 subtype evolution was checked for consistency between each tree to ensure compatibility after having substantially downsampled Cas9 proteins.

### IscB/IsrB ωRNA Discovery, Curation, and Analysis

[1173] Using results from just the IscB domain search, all representatives from clusters with at least 3 proteins and at least 2 HHAlign hits to any of RuvC-I, RuvC-II, or RuvC-III with at least 17 bitscore were collected. All regions upstream (−300 bp to +200 bp of the start codon), and downstream (−200 bp to +300 bp of the stop codon) for all IscB and IsrB proteins were aligned separately using MAFFT-einsi. The upstream alignment demonstrated large conserved regions outside of the typical CDS boundaries of the IscB/IsrB. The downstream alignment did not contain any large conserved region and was discarded for further analysis. Individual sequences in the conserved upstream region were folded using ViennaRNA RNAFold (9). Sequences in the alignment were split into separate groups on the basis of conservation to key distinct regions in the alignment. The main group was labeled G1a and spanned a large number of IscB ωRNAs. R-scape was used to infer covariance-folded RNA structures that correct for phylogenetic correlations. The R-scape parameters used for all profiles was an E-value threshold of 1e-2 and a gap threshold of 0.75. CMbuild from infernal was used to optimize the RNA alignments and build covariance models (CMs). R2R was used to visualize the resulting RNA structures. Additional alignment groups for IscB/IsrB ωRNAs (G1b, G1c, . . . ) were iteratively created based on conserved upstream regions (relative to the ORF) from clades of IscB/IsrB in the RuvC tree that were not strongly associated with existing ωRNA groups. Models for these groups were built in the same manner, except the consensus secondary structure identified using ViennaRNA was used in place of the R-scape structure when the sample size was too small to permit an accurate covariance-folded structure. Pseudoknots were not explicitly encoded in the covariance models for Infernal. The structure for the hybrid CRISPR/oRNA associated with CRISPR-associated IscBs was inferred in the same way, using the consensus secondary structure in lieu of the covariance-folded structure due to small sample size.

### Cluster Annotation

[1174] All 10 kb genomic frames (10 kb region around a protein of interest (POI)) were collected. CRISPR sequences were identified using CRT. TnpA was predicted for all ORFs within 10 kb of a POI using HMMER. All ωRNA profiles were predicted on genomic DNA using Infernal-1.1's covariance based nucleic acid hmm search, cmsearch. RNA profile hits with score below 35 were discarded. For each genomic frame, all RNA profile hits were grouped into overlapping sets, with each ωRNA hit in the set overlapping genomically with at least one other oRNA hit in the set. Each overlapping group was then assigned to the ωRNA hit with the highest bitscore in the group. GraphLAN was used to visualize the resulting information on different phylogenetic trees.

### Identification of Guide Encoding Mechanisms for IscB/IsrB ωRNA

[1175] Upon complete classification and curation of all major ωRNA types according to IscB and IsrB, the genome of K. racemifer was searched for all instances of IscB and IsrB using HMMER with the previously described profiles. The genome was also searched for all instances of IscB/IsrB ωRNAs using CMsearch with the G1a-G1i RNA covariance models. Occurrences of multiple nearly identical IscBs associated with nearly identical ωRNAs were identified with BLASTn, and was classified as transposon expansion. Occurrences of ωRNAs without detectable IscBs or IsrBs within 500 bp on the same strand were classified as standalone trans-acting ωRNAs. In some instances, ωRNAs and corresponding IscB/IsrBs were separated by the insertion of unrelated transposons between them. In such cases, the ωRNA was not considered a trans-acting oRNA.

[1176] All covariance models were searched against our prokaryotic genome database. Examples with multiple ωRNAs on the same strand within 300 bp were retained for further analysis and categorized as ωRNA arrays.

### Identification of Eukaryotic IscB Orthologs

[1177] All eukaryotic genomes were downloaded from NCBI. In order to capture all possible IscBs, existing gene models were discarded for this analysis. All DNA sequences were translated into 6 frame amino acids translations and split into ORFs by splitting across stop codons (*). Each ORF was then searched for IscB domains using the HMMER profiles generated by the IscB profile curation step. ORFs with hits to both IscB HNH and RuvC domains were retained for further analysis. The regions around the ORFs were then searched for IscB-linked ωRNAs using CMsearch and the IscB-linked ωRNA covariance models created in this study.

### Discovery of IshB

[1178] The powerset of all possible domain combinations of the PLMP, RuvC-I, BH, RuvC-II, HNH, and RuvC-III domains was generated. For each domain combination, the number of clusters from the IscB domain search with a hit to every domain in the combination with a minimum bitscore of 21 was computed. Domain combinations that exhibited high levels of protein homology within the combination were retained for further analysis. Domain combinations that were N-terminal or C-terminal truncations of IscB, Cas9, or IsrB were discarded. From the remaining combinations, PLMP+HNH displayed high cluster counts relative to the other domain combinations, such as RuvC-II+PLMP only, suggesting that the combination corresponded to a real protein family. These proteins were subsequently named IshB due to the presence of an HNH domain, while also containing the PLMP domain present in IscB and IsrB.

### TnpB Curation and Analysis of ωRNA

[1179] Examples of IscB-linked ωRNA from K. racemifer were searched in the K. racemifer genome using BLASTn. Hits in the vicinity of IscB or IsrB were discarded. Multiple partial hits were found in the vicinity of TnpB, with the hit being always downstream of the TnpB gene. Exploration of these hits revealed multiple TnpBs shared transposon ends with IscB. An upstream and downstream locus conservation analysis was performed for related TnpB loci as done for IscB. As TnpB is highly diverse, only TnpBs that were identifiable via high similarity in an mmseqs2 search were included.

### Small RNA Sequencing

[1180] Heterologous Expression in E. coli

[1181] Stbl3 chemically competent E. coli were transformed with plasmids containing the locus of interest. A single colony was used to seed a 5 mL overnight culture. Following overnight growth, cultures were spun down and resuspended in 750 uL TRI reagent (Zymo) and incubated for 5 min at room temperature. 0.5 mm zirconia/silica beads (BioSpec Products) were added and the culture was vortexed for approximately 1 minute to mechanically lyse cells. 200 uL chloroform (Sigma Aldrich) was then added, culture was inverted gently to mix and incubated at room temperature for 3 min, followed by spinning at 12000×g at 4 C for 15 min. The aqueous phase was used as input for RNA extraction using a Direct-zol RNA miniprep plus kit (Zymo). Extracted RNA was treated with 10 units of DNase I (NEB) for 30 min at 37 C to remove residual DNA and purified again with an RNA Clean & Concentrator-25 kit (Zymo). Ribosomal RNA was removed using a RiboMinus Transcriptome Isolation Kit for bacteria (Thermo Fisher Scientific) as per the manufacturer's protocol using half-volume reactions. The purified sample was then treated with 20 units of T4 polynucleotide kinase (NEB) for 6 h at 37 C and purified again with an RNA Clean & Concentrator-25 (Zymo) kit. The purified RNA was treated with 20 units of 5′ RNA polyphosphatase (Lucigen) for 30 min at 37 C and purified again using an RNA Clean & Concentrator-5 kit (Zymo). Purified RNA was used as input to an NEBNext Small RNA Library Prep for Illumina (NEB) as per the manufacturer's protocol with an extension time of 60 s and 16 cycles in the final PCR. Amplified libraries were gel extracted, quantified by qPCR using a KAPA Library Quantification Kit for Illumina (Roche) on a StepOne Plus machine (Applied Biosystems/Thermo Fisher Scientific) and sequenced on an Illumina NextSeq with Read 1 42 cycles, Read 2 46 cycles and Index 1 6 cycles. Adapters were trimmed using CutAdapt and mapped to loci of interest using Bowtie2 (http://bowtie-bio.sourceforge.net/bowtie2/index.shtml). Filled reads were obtained and filled reads longer than 200 bp were visualized using a custom Python script.

### Ribonucleoprotein

[1182] RNPs were purified as described. 100 uL concentrated RNP was used as input. The above protocol was followed with the following modifications: 300 uL TRI reagent (Zymo) and 60 uL chloroform (Sigma Aldrich) were used for RNA extraction.

K. racemifer

[1183] Freeze-dried K. racemifer SOSP1-21 DSM 44963 was obtained from DSMZ (dsmz.de/collection/catalogue/details/culture/DSM-44963), resuspended in GYM Streptomyces media (4 g glucose, 10 g malt extract, 4 g yeast extract in 1 L water) and grown in a shaking incubator at 28 C. After 76 days, the culture was spun down, and the above protocol was followed with the following modifications: mechanical lysis using zirconia beads was performed with approximately 30 min of vortexing. Ribosomal RNA was removed using a NEBNext rRNA Depletion Kit (Bacteria) (NEB) as per the manufacturer's protocol and the rRNA-depleted sample was purified using Agencourt RNAClean XP beads (Beckman Coulter) prior to T4 PNK treatment. T4 PNK treatment was performed for 1.5 h and purified with an RNA Clean & Concentrator-5 kit (Zymo). Final PCR in the small RNA library prep contained 15 cycles.

### Cloning TAM Libraries

[1184] Target sequences with 8N degenerate flanking sequences were synthesized by IDT and amplified by PCR with NEBNext High Fidelity 2× Master Mix (NEB). Backbone plasmid was digested with restriction enzymes (pACYC: EcoRV; pUC19: Eco88I and HindIII, Thermo Fisher Scientific) and treated with FastAP alkaline phosphatase (Thermo Fisher Scientific). The amplified library fragment was inserted into the backbone plasmid by Gibson assembly at 50 C for 1 hour using 2× Gibson Assembly Master Mix (NEB) with an 8:1 molar ratio of insert:vector. The Gibson assembly reaction was then isopropanol precipitated by addition of an equal volume of isopropanol (Sigma Aldrich), final concentration of 50 mM NaCl, and 1 uL of GlycoBlue nucleic acid co-precipitant (Thermo Fisher Scientific). After a 15 min incubation at room temperature, the solution was spun down at max speed at 4 C for 15 min, then the supernatant was pipetted off and the pelleted DNA was resuspended in 12 uL TE and incubated at 50 C for 10 minutes to dissolve. 2 uL were then transformed by electroporation into Endura Electrocompetent E. coli (Lucigen) as per the manufacturer's instructions, recovered by shaking at 37 C for 1 h, then plated across 5 22.7 cm×22.7 cm BioAssay plates with the appropriate antibiotic resistance. After 12-16 hours of growth at 37 C, cells were scraped from the plates and midi- or maxi-prepped using a NucleoBond Midi- or Maxi-prep kit (Machery Nagel).

E. coli TAMscreen

[1185] 100 ng each of a plasmid containing a locus of interest and a target 8N degenerate flanking library plasmid were transformed by electroporation into 30 uL Endura Electrocompetent E. coli (Lucigen) as per the manufacturer's protocol, with 3 replicates per locus of interest as well as 3 replicates of an empty control. After recovery by shaking at 37 C for 1 hour, cells were plated across 1 22.7 cm×22.7 cm BioAssay plate with the appropriate antibiotic resistance and grown for 12-16 h at 37 C. Cells were scraped from the plate and mixed well, and 2 mL of the scraped cells were used as input to minipreps (Qiagen). 100 ng miniprepped plasmids were input to PCR to amplify the TAM-containing region (Supplementary Table XXX) with a 12-cycle PCR using NEBNext High Fidelity 2×PCR Master Mix (NEB) with an annealing temperature of 63 C, followed by a second 18-cycle round of PCR to further add Illumina adaptors and barcodes. Amplified libraries were gel extracted, quantified by a Qubit dsDNA HS assay (Thermo Fisher Scientific) and subject to single-end sequencing on an Illumina NextSeq with Read 1 75 cycles, Index 1 8 cycles and Index 2 8 cycles. TAMs were extracted and weblogos depicting depleted TAMs were visualized using a custom Python script.

### In Vitro Cleavage Assays

[1186] Double-stranded DNA (dsDNA) substrates were produced by PCR amplification of pUC19 plasmids containing the target sites and the TAM sequences. Cy3 and Cy5-conjugated DNA oligonucleotides (IDT) were used as primers to generate the labeled dsDNA substrates. Single-stranded DNA (ssDNA) substrates were ordered as Cy5.5-conjugated oligonucleotides (IDT). All ωRNA used in the biochemical assays was in vitro transcribed using the HiScribe T7 Quick High Yield RNA Synthesis kit (New England Biolabs) from the DNA templates purchased from Twist Biosciences. Target cleavage assays performed with AwaIscB contained 10 nM of DNA substrate, 1 μM of protein, and 4 μM of ωRNA in a final 1× reaction buffer of 20 mM HEPES pH 7.5, 50 mM NaCl, and 5 mM MgCl₂. Assays were allowed to proceed at 37° C. for 1 hour, then briefly shifted to 50° C. for 5 min, and immediately placed on ice to help relax the RNA structure prior to RNA digestion. Reactions were then treated with RNase A (Qiagen), and Proteinase K (New England Biolabs), and purified using a PCR cleanup kit (Qiagen). DNA was resolved by gel electrophoresis on Novex 10% TBE (dsDNA substrates), 6% TBE-Urea (dsDNA substrates), and 15% TBE-Urea (ssDNA substrates) polyacrylamide gels (Thermo Fisher Scientific). Target cleavage assays performed with CRISPR-associated IscB RNPs were performed similarly, except that 450 nM RNP replaced the protein and the ωRNA, and the reactions were incubated for 1.5 hours at 37° C. Cleaned reactions were then run on a 4% agarose E-gel (Thermo Fisher Scientific).

[1187] For kinetic analysis of AwaIscB activity, cleavage reactions were quenched with 11 mM of EDTA at each time point prior to cleanup. For screening metals, MgCl₂ was eliminated from the reaction buffer, while 2 mM of EDTA, and 7 mM of the indicated metal were added. Collateral cleavage assays were performed using 10 nM of unlabeled ds/ssDNA substrate along with 10 nM of Cy5.5-labeled collateral ssDNA substrate, and the reactions were allowed to proceed for 3 hours at 37° C. Cleavage of the labeled nontargeted ssDNA was then assessed on a 15% TBE-Urea polyacrylamide gel.

[1188] Single-stranded RNA (ssRNA) substrates were in vitro transcribed, and labeled with pCp-Cy5 (Jena Bioscience) on their 3′ end. For the 3′ end labeling, 50 pmol of ssRNA was incubated with 100 pmol of pCp-Cy5 and 50 U of T4 RNA ligase 1 (New England Biolabs) in 50 mM Tris pH 7.8, 10 mM MgCl₂, 10 mM DTT, 2 mM ATP, and 10% DMSO at 4° C. for 40 hours. Labeling reactions were quenched with 20 mM EDTA, and purified using an RNA Clean and Concentrator kit (Zymo). ssRNA cleavage assays were performed similarly to the DNA cleavage assays, quenched with 19 mM EDTA at the end of the reactions, treated with Proteinase K, and visualized on a 6% TBE-Urea polyacrylamide gel.

### Cell-Free Transcription/Translation TAM Screen

[1189] IscB protein sequences were human codon optimized using the GenScript codon optimization tool, and IscB genes, TnpB genes with endogenous codon optimization, and ωRNA scaffolds were synthesized by Twist Biosciences. Transcription/translation templates were generated by PCR from custom synthesis products. Cell-free transcription/translation reactions were carried out using a PURExpress In Vitro Protein Synthesis Kit (NEB) as per the manufacturer's protocol with half-volume reactions, using 75 ng of template for the protein of interest, 125 ng of template for the corresponding ωRNA with a guide targeting the TAM library and 25 ng of TAM library plasmid. Reactions were incubated at 37 C for 4 hours, then quenched by placing at 4 C or on ice and adding 10 ug RNase A (Qiagen) and 8 units Proteinase K (NEB) each followed by a 5 min incubation at 37 C. DNA was extracted by PCR purification and adaptors were ligated using an NEBNext Ultra II DNA Library Prep Kit for Illumina (NEB) using the NEBNext Adaptor for Illumina (NEB) as per the manufacturer's protocol. Following adaptor ligation, cleaved products were amplified specifically using one primer specific to the TAM library backbone and one primer specific to the NEBNext adaptor with a 12-cycle PCR using NEBNext High Fidelity 2×PCR Master Mix (NEB) with an annealing temperature of 63° C., followed by a second 18-cycle round of PCR to further add the Illumina i5 adaptor. Amplified libraries were gel extracted, quantified by qPCR using a KAPA Library Quantification Kit for Illumina (Roche) on a StepOne Plus machine (Applied Biosystems/Thermo Fisher Scientific) and subject to single-end sequencing on an Illumina MiSeq with Read 1 80 cycles, Index 1 8 cycles and Index 2 8 cycles. TAMs were extracted and enrichment score for each TAM was calculated by filtering for all TAMs present more than once and normalizing to the TAM frequency in the input library subject to the same in vitro transcription/translation and quenching reactions. A position weight matrix based on the enrichment score was generated and weblogos were visualized based on this position weight matrix using a custom Python script.

### Expression and Purification of KraIscB-1 RNP Complex

[1190] Purification of the KraIscB-1 in complex with the ncRNA of its native locus was performed similarly to the CRISPR-associated IscB-ncRNA RNP complex with the following modifications: (1) the KraIscB-1 CDS was not changed and human codon optimized; (2) co-expression with the ncRNA was performed in BL21(DE3) cells (New England Biolabs) in the presence of 100 μg/ml ampicillin, and 25 μg/ml kanamycin; (3) bdSENP1 protease was not used since KraIscB-1 protein was not attached to an N-terminal tag, but was only twin-strep tagged on its C-terminus. Once the boundaries of the co-purified RNA were defined by small RNA sequencing, the predicted ωRNA sequence was cloned downstream of a T7 promoter in a pCOLADuet-1 vector for inducible expression, and the KraIscB-1-oRNA complexes were then prepared following the same procedure

### Cell-Free Transcription/Translation Cleavage Assays

[1191] ωRNA templates were amplified from custom synthesis products as described and in vitro transcribed using a HiScribe T7 Quick High Yield RNA Synthesis Kit (NEB) with 150 ng DNA template in 2 uL with 2 uL T7 RNA Polymerase Mix (NEB) and 6.67 mM final concentration each NTP in 30 uL reactions and purified with a RNA Clean & Concentrator-25 kit (Zymo). Protein sequences were amplified from custom synthesis products or locus plasmid templates. To generate targets, short oligos containing target and TAMsequences with appropriate overhangs were synthesized by Genewiz and cloned into corresponding backbone plasmids by Golden Gate or restriction-ligation cloning. Labeled primers for generating labeled linear targets were synthesized by IDT and linear targets were amplified from target plasmids by PCR using Q5 Hot Start High Fidelity 2× Master Mix (NEB) as per the manufacturer's protocol.

[1192] Cell-free transcription/translation reactions were carried out using a PURExpress In Vitro Protein Synthesis Kit (NEB) as per the manufacturer's protocol with half-volume reactions using 75 ng of template for the protein of interest and a final concentration of 1 μM in vitro-transcribed ωRNA. Reactions were incubated at 37 C for 4 hours, then placed on ice to quench in vitro transcription/translation. 50-100 ng of target substrate was then added and the reactions were incubated at the specified temperature for 1 additional hour. Reactions were then quenched by adding 10 ug RNase A (Qiagen) and 8 units Proteinase K (NEB) each followed by a 5 min incubation at 37 C. DNA was extracted by PCR purification and run on either 10% or 6% Novex TBE-Urea gels, or 10% Novex TBE gels (Thermo Fisher Scientific) as per the manufacturer's protocols, as specified. Gels were stained with 1×SYBR Gold (Thermo Fisher Scientific) where specified for 10-15 min and imaged on a ChemiDoc imager (BioRad) with optimal exposure settings.

### Mammalian Cell Culture and Transfection

[1193] Mammalian cell culture experiments were performed in the HEK293FT line (American Type Culture Collection (ATCC)) grown in Dulbecco's Modified Eagle Medium with high glucose, sodium pyruvate, and GlutaMAX (Thermo Fisher), additionally supplemented with 1× penicillin-streptomycin (Thermo Fisher), 10 mM HEPES (Thermo Fisher), and 10% fetal bovine serum (VWR Seradigm). All cells were maintained at confluency below 80%.

[1194] All transfections were performed with Lipofectamine 2000 (Thermo Fisher). Cells were plated 16-20 hours prior to transfection to ensure 90% confluency at the time of transfection. For 96-well plates, cells were plated at 20,000 cells/well, and for 24-well plates, cells were plated at 100,000 cells/well. For each well on the plate, transfection plasmids were combined with OptiMEM I Reduced Serum Medium (Thermo Fisher) to a total of 25 μL. Separately, 23 μL of OptiMEM was combined with 2 μL of Lipofectamine 2000. Plasmid and Lipofectamine solutions were then combined and pipetted onto cells.

### Mammalian Lysate Cleavage Assays

[1195] Human codon-optimized IscB genes were cloned into a CMV expression backbone by Gibson assembly using 2× Gibson Assembly Master Mix (NEB) to generate pCMV-SV40 NLS-IscB protein-nucleoplasmin NLS-3xHA constructs. 500 ng each protein expression plasmid was transfected in a separate well of a 24-well plate as described. After approximately 48 hours, cells were washed with 500 μL of Dulbecco's phosphate buffered saline (Sigma Aldrich). 50 μL ice-cold lysis buffer (20 mM HEPES 7.5, 100 mM KCl, 5 mM MgCl2, 0.1% Triton-X 100, 5% glycerol, 1 mM DTT, 1× cOmplete Protease Inhibitor Cocktail) was added, then cells were scraped from the plate, transferred to clean tubes and incubated on ice for 15 min. Cells were then sonicated in a cold water bath with amplitude 30 for 4 cycles of 10 s each. Lysate was then cleared by centrifugation at max speed for 20 min and supernatant was collected and either used fresh in assays or snap frozen in liquid nitrogen for later use. Labeled targets and in vitro-transcribed RNA was generated as described in “Cell-free transcription/translation cleavage assays” above.

[1196] ωRNA templates were amplified from custom synthesis products as described and in vitro transcribed using a HiScribe T7 Quick High Yield RNA Synthesis Kit (NEB) with 150 ng DNA template in 2 uL with 2 uL T7 RNA Polymerase Mix (NEB) and 6.67 mM final concentration each NTP in 30 uL reactions and purified with a RNA Clean & Concentrator-25 kit (Zymo). To perform cleavage assays, 10 μL cell lysate was incubated with 1 μg in vitro-transcribed ωRNA or sgRNA, or no RNA for negative controls, and 100 ng target substrate in 1×NEBuffer 3.1 (NEB). Reactions were incubated at 37 C for 1 hour, then quenched by adding 10 ug RNase A (Qiagen) and 8 units Proteinase K (NEB) each followed by a 5 min incubation at 37 C. DNA was extracted by PCR purification and run on a 4% Agarose E-gel EX (Thermo Fisher Scientific) as per the manufacturer's instructions and visualized on a ChemiDoc imager (BioRad).

### Sequencing of Cleavage Products

[1197] In vitro cleavage assays were performed as described. Purified reactions were subjected to a GLOE-seq library preparation protocol (15) as described using 2.5 uM adapter as input to the proximal adapter annealing step. The final amplification to add Illumina adapters and barcodes was performed with NEBNext High Fidelity 2×PCR Master Mix (NEB) with an annealing temperature of 63 C for 15 s and 12 cycles. Libraries were subjected to paired-end sequencing using an Illumina MiSeq with Read 1 150 cycles, Read 2 150 cycles, Index 1 8 cycles and Index 2 8 cycles. Paired-end reads were mapped to the target substrate using BWA and 3′ ends were extracted and plotted using a custom Python script.

### Enzymatic Footprinting Assay

[1198] dsDNA substrate (191 bp) was produced by PCR amplification from a plasmid containing the target site and the TAM sequence. 10 pmol of dAwaIscB and 40 pmol of ωRNA were incubated in reaction buffer (20 mM HEPES pH 7.5, 50 mM NaCl, 10 mM MgCl2, and 5% glycerol) at 37° C. for 30 min. Then, 0.1 pmol of DNA substrate was added and the reaction was allowed to proceed for another 30 min at 37° C. Next, 500 U of Exonuclease III (New England Biolabs) was added, the assay was incubated for an additional 10 min at 37° C., and quenched with 20 mM EDTA. As negative control, another reaction was run in parallel, in which ωRNA was excluded and the volume was replaced with water. After quenching, both reactions were briefly shifted to 50° C. for 5 min, then immediately placed on ice, treated with RNase A (Qiagen), and Proteinase K (New England Biolabs), and purified using a PCR cleanup kit (Qiagen). Purified reactions were subjected to a GLOE-seq library preparation protocol using 2.5 uM adapter as input to both the proximal and distal adapter annealing steps. Libraries were amplified as described in “Sequencing of cleavage products” in “Materials and Methods” section and subjected to paired-end sequencing using an Illumina MiSeq with Read 1 100 cycles, Read 2 100 cycles, Index 1 8 cycles and Index 2 8 cycles. Paired-end reads were mapped to the target substrate using BWA and 3′ ends were extracted and plotted using a custom Python script.

### Mammalian Genome Editing

[1199] ωRNA scaffold backbones were cloned into a pUC19-based human U6 expression backbone by Gibson Assembly. For pooled 12-guide libraries, primers to add each of the 12 guides in in a given pool were mixed at equimolar ratios and ωRNA scaffold backbones were subject to whole plasmid amplification with guide primers annealing to the U6 promoter and a second primer annealing to the start of the ωRNA scaffold using Phusion Flash High-Fidelity 2× Master Mix (Thermo Fisher Scientific). PCR products were gel extracted and eluted in 30 uL, then blunt-end ligated to circularize by addition of 5 units T4 PNK (NEB), 200 units T4 DNA Ligase (NEB) and final 1×T4 DNA Ligase Buffer (NEB) and incubation for 1.5 h at room temperature prior to transformation in Stbl3 chemically competent E. coli (NEB). For individual guide constructs, oligos with appropriate overhangs were synthesized by Genewiz, annealed and phosphorylated using T4 PNK (NEB) and cloned into ωRNA backbones by restriction-ligation cloning. Protein expression constructs were cloned as described in “Mammalian lysate cleavage assays” above.

[1200] For individual guide sequences, 250 ng guide/oRNA expression plasmid and 125 ng protein expression plasmid was transfected in each of 4 wells in a 96-well plate for each guide condition as described. After 60-72 hours, genomic DNA was harvested by washing the cells once in 1×DPBS (Sigma Aldrich) and adding 50 uL QuickExtract DNA Extraction Solution (Lucigen). Cells were scraped from the plates to suspend in QuickExtract and cycled at 65 C for 15 min, 68 C for 15 min then 95 C for 10 min to lyse cells. 2.5 uL of lysed cells were used as input into each PCR reaction.

[1201] For library amplification, target genomic regions were amplified and with a 12-cycle PCR using NEBNext High Fidelity 2×PCR Master Mix (NEB) with an annealing temperature of 63 C for 15 s, followed by a second 18-cycle round of PCR to add Illumina adapters and barcodes. The libraries were gel extracted and subject to single-end sequencing on an Illumina MiSeq with Read 1 300 cycles, Index 1 8 cycles, Index 2 8 cycles. Insertion/deletion (indel) frequency was analyzed using CRISPResso2. Given the low frequency of indel events with IscBs, to eliminate noise from PCR and sequencing error only indels with at least 2 reads or more than 1 base inserted or deleted were counted towards reported indel frequencies. For individual guide/oRNA experiments, to assess statistical significance, 2-tailed T-tests were performed using non-targeting guide/oRNA conditions as a negative control (see Supplementary Table ukreP).

### Expression and Purification of TnpB RNP Complex

[1202] To purify the TnpB protein in complex with the putative ωRNA of its native locus, an N-terminally His14-MBP tagged TnpB CDS and the corresponding downstream locus up to 80 bp beyond the end of predicted guide adaptor were cloned as a single piece downstream of a T7 promoter in a pET45b(+) vector. The TnpB RNP was expressed and purified similarly to the CRISPR-associated IscB RNPs with the following modifications: (1) the lysis buffer, and the buffers A and B were supplemented with 40 mM imidazole, and 5 mM β-mercaptoethanol, while MgCl₂ and DTT in all of the buffers were eliminated; (2) the RNP was purified on Ni-Sepharose 6 Fast Flow beads (GE Healthcare) instead of the Strep-Tactin resin; (3) the elution buffer was supplemented with 300 mM imidazole and 5 mM β-mercaptoethanol, while MgCl₂, DTT and desthiobiotin were eliminated; (4) the His14-MBP solubility tag was kept attached to the RNP to provide stability.

### In Vitro Transcription/Translation Plasmid Competition Assays

[1203] As described in “Cell-free transcription/translation cleavage assays,” in vitro assays to verify TAM-specific TnpB activity were set up with 62.5 ng protein template and ωRNA to a final concentration of 7 uM in 5 uL. SpCas9 was also assayed as a positive control (FIG. S#KnIchC). Reactions were incubated at 37 C for 3 hours prior to addition of target plasmid substrates. Each reaction received 15 ng each of 2 plasmids, containing either a TAM sequence flanking the cognate target, cognate target only, or no target. Reactions were incubated for 1 additional hour at 37 C, then quenched and subjected to adaptor ligation and sequencing as described in “Cell-free transcription/translation TAM screen”. A custom python script was used to quantify cleaved products corresponding to each plasmid substrate.

[1204] Various modifications and variations of the described methods, pharmaceutical compositions, and kits of the invention will be apparent to those skilled in the art without departing from the scope and spirit of the invention. Although the invention has been described in connection with specific embodiments, it will be understood that it is capable of further modifications and that the invention as claimed should not be unduly limited to such specific embodiments. Indeed, various modifications of the described modes for carrying out the invention that are obvious to those skilled in the art are intended to be within the scope of the invention. This application is intended to cover any variations, uses, or adaptations of the invention following, in general, the principles of the invention and including such departures from the present disclosure come within known customary practice within the art to which the invention pertains and may be applied to the essential features herein before set forth.

LENGTHY TABLES
The patent application contains a lengthy table section. A copy of the table is available in electronic form from the USPTO web site (https://seqdata.uspto.gov/?pageRequest=docDetail&DocID=US20240084332A1). An electronic copy of the table will also be available from the USPTO upon request and payment of the fee set forth in 37 CFR 1.19(b)(3).

What is claimed is:

1. A non-naturally occurring, engineered composition comprising a) a TnpB polypeptide comprising a Ruv-C nuclease domain, the Ruv-C nuclease domain optionally comprising Ruv-CI, Ruv-CII, and Ruv-CIII subdomains, and b) an ωRNA molecule comprising a scaffold and a reprogrammable spacer sequence, the nucleic acid component molecule capable of forming a complex with the TnpB polypeptide and directing the TnpB polypeptide to a target polynucleotide.

2. The composition of claim 1, wherein the TnpB polypeptide comprises about 200 to about 500 amino acids.

3. The composition of claim 1, wherein the reprogrammable spacer sequence comprises a spacer of 10 nucleotides to 30 nucleotides in length.

4. The composition of claim 1, wherein the ωRNA component molecule comprises a scaffold of about 80 to 200 nucleotides in length.

5. The composition of any of the previous claims, wherein the TnpB complex binds a target adjacent motif (TAM) sequence 5′ of the target polynucleotide.

6. The composition of claim 5, wherein the TAM sequence comprises TCA.

7. The composition of claim 5, wherein the TAM sequence comprises TTCAN.

8. The composition of any of the previous claims, wherein the target polynucleotide is DNA.

9. The composition of any one of the preceding claims, further comprising a homologous recombination donor template comprising a donor sequence for insertion into a target polynucleotide.

10. The composition of any of the previous claims, further comprising a functional domain associated with the TnpB protein.

11. The composition of claim 10, wherein the functional domain is a transposase, an integrase, a nucleobase deaminase, a reverse transcriptase, a recombinase, an integrase, a topoisomerase, a retrotransposon, phosphatase, polymerase, ligase, helitron, a helicase, a methylase, a demethylase, a translation activater, a translation repressor, a transcription activator, a transcription repressor, a transcription release factor, a chromatin modifier, a histone modifier, a nuclease.

12. A vector system comprising one or more vectors encoding the TnpB polypeptide and the oRNA component of any of the preceding claims

13. An engineered cell comprising the composition of any of claims 1 to 12.

14. A method of modifying a target polynucleotide sequence in a cell, comprising introducing into the cell the composition of any of claims 1 to 12.

15. The method of claim 14, wherein the modifying comprises cleaving a DNA polynucleotide.

16. The method of claim 15, wherein the cleaving results in a 5′ overhang.

17. The method of claim 16, wherein the cleavage occurs distal to a target-adjacent motif.

18. The method of claim 17, wherein the cleavage occurs at the site of the spacer annealing site or 3′ of the target sequence.

19. The method of claim 14, wherein the polypeptide and/or ωRNA components are provided via one or more polynucleotides encoding the polypeptides and/or ωRNA component(s), and wherein the one or more polynucleotides are operably configured to express the TnpB polypeptide and/or the ωRNA component molecule.

20. The method of any one of the preceding claims, wherein the one or more mutations include substitutions, deletions, and insertions.

21. An engineered, non-naturally occurring composition comprising:
a. a TnpB polypeptide, wherein the TnpB polypeptide is catalytically inactive,
b. a nucleotide deaminase associated with or otherwise capable of forming a complex with the TnpB protein, and
c. an ωRNA component molecule capable of forming a complex with the TnpB protein and directing site-specific binding at a target sequence.

22. The composition of claim 21, wherein the TnpB is selected from Table 1A, 1B, 1C, or FIG. 1.

23. The composition of claim 21, wherein the nucleotide deaminase is an adenosine deaminase or a cytidine deaminase.

24. One or more polynucleotides encoding one or more components of the composition of any one of claim 21 or 22.

25. One or more vectors encoding the one or more polynucleotides of claim 24.

26. A cell or progeny thereof genetically engineered to express one or more components of the composition of any one of claim 24 or 26.

27. A method of editing nucleic acids in target polynucleotides comprising delivering the composition of claim 21 or 22, the one or more polynucleotides of claim 24, or one or more vectors of claim 25 to a cell or population of cells comprising the target polynucleotides.

28. The method of claim 27, wherein the target polynucleotides are target sequences within genomic DNA.

29. The method of claim 27 or 28, wherein the target polynucleotide is edited at one or more bases to introduce a G→A or C→T mutation.

30. An isolated cell or progeny thereof comprising one or more base edits made using the method of any one of claims 28 to 29.

31. An engineered, non-naturally occurring composition comprising:
a. a catalytically dead TnpB polypeptide,
b. a reverse transcriptase associated with or otherwise capable of forming a complex with the TnpB polypeptide, and
c. an ωRNA component molecule capable of forming a complex with the TnpB protein and directing site-specific binding of the complex to a target sequence of a target polynucleotide, the guide molecule further comprising a donor template encoding a donor sequence for insertion into the target polynucleotide.

32. One or more polynucleotides encoding one or more components of the composition of claim 31.

33. One or more vectors encoding the one or more polynucleotides of claim 32.

34. A method of modifying target polynucleotides comprising;
delivering the composition of claim 31, the one or more polynucleotides of claim 32, or the one or more vectors of claim 33 to a cell, or population of cells, comprising the target polynucleotides, wherein the complex directs the reverse transcriptase to the target sequence and the reverse transcriptase facilitates insertion of a donor sequence encoded by the donor template from the oRNA component molecule into the target polynucleotide.

35. The method of claim 34, wherein insertion of the donor sequence:
a. introduces one or more base edits;
b. corrects or introduces a premature stop codon;
c. disrupts a splice site;
d. inserts or restores a splice site;
e. inserts a gene or gene fragment at one or both alleles of the target polynucleotide; or;
f. a combination thereof.

36. An isolated cell or progeny thereof comprising the modifications made using the method of claim 34 or 35.

37. An engineered, non-naturally occurring composition comprising:
a. a TnpB polypeptide,
b. a non-LTR retrotransposon protein associated with or otherwise capable of forming a complex with the TnpB polypeptide, and
c. an ωRNA component molecule capable of forming a complex with the TnpB protein and directing site-specific binding of the complex to a target sequence of a target polynucleotide, the oRNA molecule further comprising a donor template encoding a donor sequence for insertion into the target polynucleotide and located between two binding elements capable of forming a complex with the non-LTR retrotransposon protein.

38. The composition of claim 37 wherein the TnpB protein is fused to the N-terminus of the non-LTR retrotransposon protein.

39. The composition of claim 37 or 38, wherein the TnpB protein is engineered to have nickase activity.

40. The composition of claim 39, wherein the ωRNA component molecule directs the fusion protein to a target sequence 5′ of the targeted insertion site, and wherein the TnpB protein generates a strand break at the targeted insertion site.

41. The composition of claim 39, wherein the ωRNA component molecule directs the fusion protein to a target sequence 3′ of the targeted insertion site, and wherein the TnpB protein generates a strand break at the targeted insertion site.

42. The composition of claim 39, wherein the donor polynucleotide further comprises a polymerase processing element to facilitate 3′ end processing of the donor polynucleotide sequence.

43. The composition of claim 39, wherein the donor polynucleotide further comprises a homology region to the target sequence on the 5′ end of the donor construct, the 3′ end of the donor construct, or both.

44. The composition of claim 43, wherein the homology region is from 8 to 25 base pairs.

45. One or more polynucleotides encoding one or more components of the composition of any one of claims 39 to 44.

46. One or more vectors comprising the one or more polynucleotides of claim 45.

47. A method of modifying target polynucleotides comprising;
delivering the composition of any one of claims 39 to 44, the one or more polynucleotides of claim 45, or one or more vectors of claim 46 to a cell or population of cells comprising the target polynucleotides, wherein the complex directs the non-LTR retrotransposon protein to the target sequence and the non-LTR retrotransposon protein facilitates insertion of the donor polynucleotide sequence from the donor construct into the target polynucleotide.

48. The method of claim 47, wherein insertion of the donor sequence:
a. introduces one or more base edits;
b. corrects or introduces a premature stop codon;
c. disrupts a splice site;
d. inserts or restores a splice site;
e. inserts a gene or gene fragment at one or both alleles of the target polynucleotide; or;
f. a combination thereof.

49. An isolated cell or progeny thereof comprising the modifications made using the method of claim 47 or 48.

50. An engineered, non-naturally occurring composition comprising:
a. A TnpB polypeptide,
b. an integrase protein associated with or otherwise capable of forming a complex with the TnpB polypeptide, and optionally a reverse transcriptase, and
c. an ωRNA component molecule capable of forming a complex with the TnpB protein and directing site-specific binding of the complex to a target sequence of a target polynucleotide, the guide molecule further comprising a donor template encoding a donor sequence for insertion into the target polynucleotide and located between two binding elements capable of forming a complex with the integrase protein.

51. The composition of claim 50 wherein the TnpB protein is fused to the integrase protein and optionally the reverse transcriptase.

52. The composition of claim 50 or 51, wherein the TnpB protein is engineered to have nickase activity.

53. The composition of claim 52, wherein the ωRNA component molecule directs the fusion protein to a target sequence, and wherein the TnpB protein generates a nick at the targeted insertion site.

54. The composition of claim 52, wherein the donor polynucleotide further comprises a homology region to the target sequence on the 5′ end of the donor construct, the 3′ end of the donor construct, or both.

55. One or more polynucleotides encoding one or more components of the composition of any one of claims 52 to 54.

56. One or more vectors comprising the one or more polynucleotides of claim 55.

57. A method of modifying target polynucleotides comprising;
delivering the composition of any one of claims 50 to 54, the one or more polynucleotides of claim 55, or one or more vectors of claim 56 to a cell or population of cells comprising the target polynucleotides, wherein the complex directs the integrase protein to the target sequence and the integrase protein facilitates insertion of the donor polynucleotide sequence from the donor construct into the target polynucleotide.

58. The method of claim 57 wherein insertion of the donor sequence:
a. introduces one or more base edits;
b. corrects or introduces a premature stop codon;
c. disrupts a splice site;
d. inserts or restores a splice site;
e. inserts a gene or gene fragment at one or both alleles of the target polynucleotide; or;
f. a combination thereof.

59. An isolated cell or progeny thereof comprising the modifications made using the method of claim 57 or 58.

60. A composition for detecting the presence of a target polynucleotide in a sample, comprising:
one or more TnpB proteins possessing collateral activity;
at least one ωRNA component comprising a sequence capable of binding a target polynucleotide and designed to form a complex with the one or more TnpB proteins;
a detection construct comprising a polynucleotide component, wherein the TnpB protein exhibits collateral nuclease activity and cleaves the polynucleotide component of the detection construct once activated by the target sequence; and
optionally, isothermal amplification reagents.

61. The composition of claim 60, wherein the TnpB is selected from Table 1A, Table 1B, Table 1C, or FIG. 1, or comprises one or more catalytic residues corresponding to 195D, 277E, or 361D of the sequence alignment in FIG. 1.

62. The composition of claim 60, wherein the one or more TnpB proteins are selected from Table 1A, Table 1B, Table 1C, or FIG. 1 and is active, i.e., possess nuclease activity, in the temperature range of 45° C. to 60° C.

63. The composition of claim 60, wherein the isothermal amplification reagents are loop-mediated isothermal amplification (LAMP) reagents.

64. The composition of claim 63, wherein the LAMP reagents comprise LAMP primers.

65. The composition of any one of the claims 60 to 64, further comprising one or more additives to increase reaction specificity or kinetics.

66. The composition of any one of claims 60 to 65, further comprising polynucleotide binding beads.

67. A method for detecting polynucleotides in a sample, the method comprising;
contacting one or more target sequences with a TnpB, at least one ωRNA component capable of forming a complex with the TnpB and direct sequence-specific binding to one or more target polynucleotides and a detection construct, wherein the TnpB exhibits collateral nuclease activity and cleaves the detection construction once activated by the one or more target sequences; and
detecting a signal from cleavage of the detection construction thereby detecting the one or more target polynucleotides.

68. The method of claim 67, further comprising amplifying the target polynucleotides using isothermal amplification prior to the contacting step

69. The method of claim 68, wherein detection of amplified target polynucleotides by binding of the target polynucleotides to the TnpB complex occurs in the temperature range of 45° C. to 60° C.

70. The method of claim 67, wherein the target polynucleotide is detected in one hour or less.

The application's sequence listing, which the Patent Office published only in electronic form, follows.

SEQUENCE LISTING (68545 sequences)

SEQ ID NO: 1 - protein, 405 aa, Artificial Sequence
  TnpB Polypeptide
MLISYRFRIYPSKTVQAKLNEQLELCRWLYNRLLSEVNKARKEGRRIRREDTQSLIVRIKREEKPELSKVYSKVLQMVNYQLRSNISSLNELRKKGVKVGWLRYKTSPNSFKTLNFNQSGFKIDFDRKKLSLSKVGDIPIRLHRSIGGKIKGVIIKRTKSGKWYAIVQAEVDKQPLPPTGRAIGIDVGITHFCVDSDGNYFEHPKYLDRTLEKIKKVQKQLSRKQKGSKNREKVRIGLAKLYEKLENQRNDFLHKLSRYYVNNYDIMVVEDLNVKEMAENGSSTTLNRHITDSAWSKFVRLLCEKAERAARTVVKVNPKNTSKRCAMCGYIVNNLKLHDRTFTCPICGWEADRDYNASLNILDVGMGRSRTPVEGEPLPCVISYREVIAGQVLSMKQEVPSVRAE

SEQ ID NO: 2 - protein, 375 aa, Artificial Sequence
  Synthetic
MSLLSVKCKLIPDASTAEKLSRTVNQFANACNYALQVARRDNIWNKFALQRAVYADLRAEYGLSANLAIRAIARVGKRKGHKAGGFKATSVDYDQRILSVNVDTETVSLSTVDGRVKVPMRIAGYQRHLLRTAKSIQGGQLVRGRDSSWYIHLWCEYDDPPVLDPQGMLGVDLGIVNIATDSDGETYSGKHLNSVRHRHRRLRKKLQKKGTKGAKRRLKKLSGKETRFSNHVNHTLSKRIVAKAQRTERALALEDLQGIRERVRLRRPQRATLHSWAFFDLGQKLRYKAERAGVPLVFVDPRNTSRQCPACGHAERANRPTQALFRCVACGYSGAADYVAAVNIAVRGWAAVNRPYLGEASRVSLHGSVPGSPRL

SEQ ID NO: 3 - protein, 401 aa, Artificial Sequence
  Synthetic
MLESQPITVACKLQVANTLAKEIDETMMVFACACDWVNQNTPEKMTNKTAMQSLVYQDVRVNFGLSSNLAIQAIRRVCANRKTAKQKGKKVKEFKPTSISYDARIFSFRESDWTVSVKLLNSRQRIKLLIGNYQIGLLKSKNPTSATLVKRKSGNYYIHITLDEPTQPEAKTDKVLGVDLGRTDIATTSEGESWSGKQITAKRNHYAKLRTTIQKKASKGTRSSRRRCRQLLARLSGKERRFQKHINHEISRQLVNNAVTNKQAIAIEDLTGIRERTNRKPRSKKDKRLGNNWAFYQLRQFLTYKCILAGVKLILVNPAYTSLSCHKCLVIGDRKGKGFSCNNCGNKCDADYNGAQNIKALGAIINRPGGSGLSCKLKTNVQYIQLSLFEGLGLLKTSTSA

SEQ ID NO: 4 - protein, 383 aa, Artificial Sequence
  Synthetic
VKLVVRVKLLPDAVMDAALRETLKLCNRAADHASRRAFATRITGRTALQRLVYGELKAMGLSAQPAIHVARKVAGAYATLKANLKAGNYGPEGSKRRARVESRPIRFRRDAAQPFDDRCLSWQLDQRTVSIWTVRGRAGGIPFVCSAEQLKMLAAHRRGESDLVYRGGQWYLYATCEVPEPDAYEPDGFLGVDLGIANIATTSDGTVHSGKHINQIRHRNRRLRRKLQRKGTKSARRLLRKLSGREARFAADVNHRIAKRIVTEAQRTCRGIALEDLGGIRERVRLRRPRRVTLHSWAFAQLGAFIAYKARRAGVPVVHVDPRHTSQGCSACGHISRKNRPDQTTFCCTSCGFAEHADVNAARNIAQRGATGRAVSHAADDVA

SEQ ID NO: 5 - protein, 383 aa, Artificial Sequence
  Synthetic
VYVVVRVKLEPSAEDAAALGATLHAVNKAANEVSRTAFAHGVKREYALRKLTYAGLKERGLGAQAAQHVIKKVCGAYAVLAGQIRSGFLRGERRRRAESKPIAFRPDAAHPFDDRCLSWQLHAWTVSIWTVHGRKRGIRFSCSGGDLEMLFAHRKGETDLVFRDGMWFLMATCEVPAPPVAEPNGFIGVDLGIANIATTSDGARHVGRGLNRHRRRQAALRAKLQAKRTRSARRLLRKRRRREARHARNINHRISKQVVAEAERTGRGIALEDLSGIRDRERSHRSQRAILHSWSFHQLAEFLEYKARRAGVALVRVNPAYTSRTCADCGHRERTNRVSQARFVCRSCGVVAHADLNASRNIARLGEAAWNAGRESRVPAASP

SEQ ID NO: 6 - protein, 379 aa, Artificial Sequence
  Synthetic
VKLMVQVRLLPTSEQASALRSTLHVCNVQANEVSRTAFERGVFRNHDLRKLTYRSVRDAGLGSQAAQHVIKKVADAYGTLRAGIRAGNFGRPGSRRRIKAESKPITFRPDAAQPFDRRNMSLALDAGTLSLWTLNGRLKGVPFACSTSARRTLAECRHGESDLLCRDGKWLLLVTVEVAEQPLNEEPDGFIGVDLGIANIATTSTGYRAAGRESSRHRARQARLRRRLQAKGTKSAKRVLKRQRRREQRRARDVNHCVSKRIVAEAERTGRGIALEDLTGIRDRVRHRRPQRAAFHSWAFHQLGNFITYKARRAGVPVVFVDPAHTSRTCADCGHRERADRVDQALFICRGCGVVAHADRNASRNIARKGEVAWDAGRR

SEQ ID NO: 7 - protein, 383 aa, Artificial Sequence
  Synthetic
VKLVVQVKLLPTPVQTSALEATLRACNTAASQVAATARTVDCYRNYDLRKHSYQAIKADCGLGAQAAQHVIKKVCDAYTTLQANLTAGRYGKPGSRRRRRVEAGPVVFRWDAAQPYDARMLSWQHDARTVSIWTVGGRLRDVAFTGSADQLTAVATLPVGECDLLHRDGMWFLYASVEVPEPQLIEPAGFLGVDMGIVNIAYDSDGTRHAGAELNGYRRRQARLRQRLQAKNSQSAKRLLHRRRRKEARHAADINHVIAKTIVTEAARTGRGIAVEQLTGIRDRVRLRKPQRVTLSSWSFGQLGAFLAYKACRAGVPLVQVDPRYTSQTCHRCGHRDKRNRPNQETFTCRSCGVVAHADHNAALNIAHRGVEGWGAVSRPHVA

SEQ ID NO: 8 - protein, 383 aa, Artificial Sequence
  Synthetic
MKLVVQVKLQPTAEQASMLEATLRACNTAANEVAQVARRARVYRNYDLRKHVYAGIKADHRLGSQAAQHVIKKVCDAYKTLTSNLRAGNYGPPDAKRYRRVSTEPVRFRWQAAQPYDARMLSWQHDARTVSIWTVAGRMKNIAYTGSPDQLKAVAELPVGECDLVHRDGMWLLYATVEIAEATPVEPAGFLGVDLGIVQIATDSDGTVYAGEQLNRYRRRQIRLRAKLQAKKTESARRLLVKRARRESRHATNVNHVISKSIVAEAERTSRGIAVEDLTGIRARVRLRKPQRAALHSWSFAQLGGFLTYKARRAGIPLVQVDPRYTSQTCSACGHRDKRNRPDQATFICRSCGVVAHADVNAAVNIAARGVDVWGAVSRPYVA

SEQ ID NO: 9 - protein, 373 aa, Artificial Sequence
  Synthetic
MGRKRALIVLNDLCYNNGMNLTLMVKLLPTTEQHQALLETMERFNAACNAIAEVAFEHRTANKIRLQKLVYDSIRKEFGLSAQMTVRAIAKACEAYKRDKSIKPTFKPHGAIVYDQRLLSWKGLDRVSILTLGGRILVPILFGEYQAARLQRIRGQADLIYRDGTFYLAVVVDVPDPPQGAPNGFLGVDLGIKNIATDSDGEVFSGGHVNGLRHRHARLRQRLQSKGTKSAKRLLKKRRRKEARFATNVNHRIAKVLVAKAKDTGRGIALEDLKGIRDRITVRKAQRRTQHSWAFHQLRFFIEYKARLAGVPVVFVDPRNTSRTCPSCGHADKRNRPTRDNFECVECGFAGPADTIAAVNIRRRAEVMQPYAV

SEQ ID NO: 10 - protein, 353 aa, Artificial Sequence
  Synthetic
VSEVAFERGVPREYELRKHTYAELKARGLGAQAAQHVIKKVRDADTTLTANIRAGNLGAPGSKRRRRAESTPIAFRPEAAQPYDDRCLSWQYDRRTVSLWTTAGRIKNVRFACSAEALTRLQQHRQGESDLIERDGVFYLIATCEVPEGEQYEPDGFIGVDLGIANIATTSTGYQAAGRGLNRHRKRQLVLRAKLQKKRTKSAKRRLKARARREARHAANQNHIISKTIVTEAERTSSGLSLEELTGIRQRVRLSKPQRVALHSWAFAQLAGFIVYKAKGAGVPLVVVDPAYTSQMCAQCQHIDQRNRVDQGLFICRGCGVVAHADRNASHNIAHRGESVWNAGRESRVPATP

SEQ ID NO: 11 - protein, 391 aa, Artificial Sequence
  Synthetic
MLISLLVKIVVQVKLVPDAVQASALESTLRTVNEAANWVSGVAFEQGVPREYALRRHTYAELKSRGLGAQAAQHVIKRVRDAYTTLRANLRAGNLGRPGSARRRKAESRPIAFRVDAAQPYDDRCLSWQYDAQTVSIWTTAGRVKGVRFACSADALKMLQQYRKGESDLIERDGVFYLSATCEVPEATEYEPEGFIGVDLGIANVATTSTGYRAAGRGLNRHRRRQRALRRKLQAKATKSAKRRLKNRRRKEARHAANVNHIIAKRIVTEAQRTSSGIALEDLKGIRQRARLRRPQRVTLHTWAFAQLGQFLAYKARRAGVPLVFVDPAYSSQECAQCHHIAKNNRLNQARFVCRSCGVVAHADRNASRTIAHRGEAAWIAGRESRVPATP

SEQ ID NO: 12 - protein, 374 aa, Artificial Sequence
  Synthetic
MSLLSVRCKLIPDASTAEKLTRTVNQFANACNYTLQVARRDNLWNKFALQRAVYRELRERFGLSANLAVRAIARVGKRKGHKVGGFKATSVDYDQRILSVNLDTEVVSLSTVDGRVKVPMQIAGYQRHLLRTAKSIQGGQLVRGRDSWYVHLWCEYDDPPAMTPNGFLGVDLGIVNIATDSDGETYSGSHLNSVRHRHRRLRRKLQKKGTKGAKRRLKKLSGKEARFSNHTNHALSKRIVAKAQRTGRGIAIEDLGGIRDRVRLRRPQRAALHSWAFFDLGQKLRYKAERAGVVLVQVDPRNTSRTCPACGHCEKLNRVSQAQFVCRSCGLVGHADHFAAVNIAVRGWAAVNRPYLGEAESAIRHNPVPGSPRL

SEQ ID NO: 13 - protein, 370 aa, Artificial Sequence
  Synthetic
VKLTTQVKLIISREDKQSLLETMEQFNEVCNGISKSAFEYKVFRQYDIHQMLYHPIRDCFDLSAQLVVRAISKVADSYKLDIKKIRKFREHGAITYDSRILTWKDEEVSIWAIGGRKKFSYLCGERQKEQLKFQKGESDLIYKNGDFFLYTTCEVPEKEPVPVEQYLGVDLGITNIATDSLEKIYSGSHISSVRIRNLKLRAKLQSKGTKSAKNLLKKRSKKERRFAKDINHQISKKIVETAQRHSVGIALENLKGIRSRVTVRKGLRYQLHSWAFNDLAGKIWYKARKEGIEVILVDPRYTSQECSSCGHTKKSNRKSQSLFSCQSCGYTVHADINAACVISSRAAVNRPNVVGEQSPNYKPLPLGRGG

SEQ ID NO: 14 - DNA, 1158 bp, Artificial Sequence
  Synthetic
ttggtcttgttctatacttcgattacgcgactgaccgtcacagtcaagctctcgcctgccgacccggacggattgcgccgtaccctgcagacggccaatggggcctgcgattggattagcgagcaggcgtggcaccaccagaccttccggcatttggcgctccataagctggtctactaccaagtccgccagcgctttggtttgtccgctcagatggcggtgcgggggatcgccaaggtggtggatgcctacgcgctcgataagcgcaccaagcggaagttccgaaccgatggggcttttccgtacgatgcgcgcatcctgagttgggatctggaatccgagaccgtctcgatctggactgtggcgggccggcgccggatgccatttgaatgcggggagcggcagcgtaacctgttggagcggcaacagggtgaaagcgacctgatctaccgccgccaggctttctatttggcaaccacctcgaacgtggatgtgcctgaaccacaagctgtggatgactttctgggagtggatttgggggtagcgaacgttgcgagcgattcggatggacggcgctactccggctctgaggtgaagaatgtgcgctggcggaaccggaagttgcgggctagattgcaggccaagcaaacgcgatccgccaaacgcaggtttaagaagttggcggggggagaatcgcgtttcgcccgccatgtgaaccactgtattagcaagcagatcgttcgcacggctaaaggcaccgggcgcggaatccgtatggaggagctgaatggaatccgcacacgggtaaaagttaggcacggcgagcgaggggttctgcactcttgggggttctggcagttgcgccagatgatcgtttataaggcggcactggcaggagtcctggtggagtttgtcgatccgcgcaacaccagccggacgtgctccgagtgtggccactgtgagaagggcaaccgccgtaatcaatctgagtttcggtgtcgctcgtgcggaagggaagcgcatgccgatatcaacgctgccgagaatatccggcagggccgcagtaaaccggccgaacgtgacgtggtcgagaatcgtctgtcgcattcgtttcgcttcaggcggctttcagccgcagtcacaagccctcgcctttag

SEQ ID NO: 15 - DNA, 1077 bp, Artificial Sequence
  Synthetic
atgaaactgattgcccaaataaaacttctgtgcagcgaagtcgagaaacaggccctgatggacaccatgcggctaatgaactcgacctgcgaccagatcagcaaggccgcgtggtcggcgcggaagtttggacgatcatctttacagaaactctgctatctggatgccaagtgcaacggccttactgctcagatggctatccacgccactcggaaggtggccgacgcatacaagaaggacaagaaaactctgcgccaattccgtcccaccggggccataacttttgacgatcgggtattgagctggaaacctgcccagcagactgtctctatctggacggttgcaggcagacaaacgatctcatacgtctgtggcgaccggcagggtgcgctgctctccacccgccacggtgaatccgacttggtgtaccgtggaggcgagttttacctgttggccacctgtgacatcgaggatgttcctttggcggataccgaaagatttcttggggtggatcttggtgttgtgaacattgctgtagacagcgaagggacaatccataggggtaacgccgtaaacaacgtccggtatcgtcatagggcgctacgaggaaagctccagagaaaaggcactagatcagcaaagcggaaactgaaacaactctcaggcaaggaatccaggtttgcccgagatgtaaaccactgcatcagcaaaagcattgtggccaaggcgcaagacaccggcaaggggatagcgttggaagacctgacgcacatccgtagtcggataacggctagacgctcccagcgggccaccctgcatagttggtcgtttgggcaactaagggcatttatctcctataaggctgaggtgctaggactaccagtcgccctggtggaccctcgcaacaccagcagggaatgtcccgagtgtggccatacgtacaaagataaccggaagacgcaatcgaagtttctctgcacgtcatgcggtttcgctggaatcgccgacgtgatcgcggcaggcaacattgcccgccgggccgaagtcagccggccaaacgtagcggaggcagcataa

SEQ ID NO: 16 - DNA, 1173 bp, Artificial Sequence
  Synthetic
gtggtagcagtagcatatgagcatgcagcggacgattcgggtcgggctgaaaccgaccctcgagcaggcggacgcgctccgggaaaccctccgccagcacaccgaatgcttcaacgccgtgtgcgcgtatggttggcagcaccaggagaggaacggcgtccggctccaccatgccacctatcgcgccttgcgcgagcgattcccagcgctcccgtcccagcttgtggtcgccgccagggaacgcgcccgcgaggcgctgaggagtgcgcttggccgcgcaaggcgcggcaagaaggcatcccagccgagaagccgtctgtgcccattcggtacgacgcacgcacctacgcgcttcgcgccgccaagggctatgtgagcctcgcgtccgtggcggggcggctcaaagtgccgttcgccctcgatccacacacccagggcattctgggtcaggccgtcggcttcgacagcgccgacatgatccatcgcaaaggccggttctggctgcatatcgtcgtcaccatccccgacgtggagttccagccgtctggagatgtcgtcggggtggacatgggcctttcgcgccctgccgtctgctcccacaatcgcttctttgggaaacgccgctggaaggagatcgagcgccggtacttccggctccgtcgcagtctccagcgcaaaggcacccgctcggccaagaggcacctgcgcaagctggccgggaaggtcaaccgctttcggcgcgactgcgaccatgtgctcagtcggcgtatcgtcgattccgtccagcccggcaccgtgatcgtcgtggagaacttggtggacatccgcacccgcactaagcagcgcggcagggaatcgcgccgtcgcctgcactcctggagcttcgcgcgactcagaagcttcctggcatacaaggcagcagctaaggggtgcaaggttgtgggtgtcgatccccgtcacacgtcgcagatgtgctcccgttgcggacatgtccatcgtcgaaatcgacgctcccagtcgcggttcctatgccgggcttgcgggttcgagctaaacgccgatctcaacgctgcccgcaatatagcccggaagtaccttgccagcggtggcatgcctgccgctggcgggccgttgtcaaccggcctcgcgtgccagcccgcgcaagcgggctag

SEQ ID NO: 17 - DNA, 1113 bp, Artificial Sequence
  Synthetic
atggtaaagcttctgccggataagcaacagcaggaggcactcattgacaccttcgtgaaattcaatgaagcctgcaactttgtatccaggcttgcattcgagagaaagctgtacaacaaggtactcctccagaagcttgtctacagggacataagggagaacttcgggctcgcagcccagcttgccataagggtaatagcaaaggtcgttgaaacctacaagaacgacaaaactgttatgcacgagttccgggaattcggaagcatcgtgtatgaccagagggtgatgagtttcaagggcctcgacacagtgagcctcaacactgtcaggggaagggtgaggatacccatgacaatagggaaatacagagaacttcctcttgacaggatcagagggcagtgtgatctcgtaagaaggaacaggatattctacctcatggttgtggtggaggttccagaagaggaagcaattagcgcgtcagatgttatcggtgtcgatctcggcatcgagaacatagctgttgactcgtcaggacattactactcaggagacaggattgcagaggcaggaacgaaacattccagtctgcgatcaaggttgcaggcttgtggcaccaggtctgcaaagagacatctcaagaaactttccgggaaggagagacgttttgcaagagatgtcaaccatgtcatttccggggagatcgcggaaagagcaaaaggcacctcttccgcaatagcccttgaagaactcaagggcataaggaagaggacaaccgttgggaagaacaggaggtacaggcacaatagctggtctttctgccagcttcgtaccttcattgaatacaaggctcttgaatccggcgtcccagtcataggtgtgaatgcgaaaaacacaagcagggagtgtcctgattgccacaccgttgataaaaggaacaggccggagcgttccatattcaaatgtatttcttgtggttttgagggtgaggctgatttcgtcgcatccctcaacatcaggaacagggctgccgccagccagcctattgtagcgggtgctattttcgatcagccgttgatcccccagctgcaagccccatccgtcagggtggggtag

SEQ ID NO: 18 - DNA, 1152 bp, Artificial Sequence
  Synthetic
gtgaagcttgtggtgcgggtgaagctgctccccgacgccgtcatggacgcggcgttgcgggagacgctgaagctgtgcaaccgggccgccgaccacgcctcccggcgggcgttcgccacccggatcacgggcaggaccgcactccagcggctggtgtacggcgagctgaaggccatgggcctgtcggcccagcccgcgattcatgtggcccggaaggtcgccggggcgtacgccaccctgaaggccaacctgaaggccgggaactacggccccgaagggtcgaagcgccgcgccagggtcgagagcaggccgatccggttccgcagggacgccgcccagccgttcgacgaccggtgcctgtcctggcaactcgaccagcggaccgtgtcgatctggacggtgcgcggccgggcgggcggtattccgttcgtgtgctcggcggagcagttgaagatgctcgccgcccaccggcggggcgagtccgacctggtgtaccggggtgggcagtggtacctgtacgccacctgcgaggttcccgaacccgacgcctatgagccggacgggttcctcggcgtggacctgggcatcgccaacatcgccaccaccagcgacggcaccgttcattccggcaagcacatcaaccagatccggcaccgcaaccgccgcctgcgccgcaagctgcagaggaaaggcaccaagtccgcccggcgcctgctgcgcaagctgtccggccgcgaagcgcgcttcgcggccgacgtcaaccaccgcatcgccaaacgcatcgtgaccgaggctcaacgcacctgtcgtgggatcgccctggaggacctgggtgggatccgcgagagggtacggctccgcaggccccggcgggtcacgctgcactcgtgggcgttcgcccagctcggcgcgttcatcgcctacaaggcccggcgcgccggggtaccggtggtgcacgtggacccgcgccacacctcccaagggtgctcggcgtgcggccacatctcccgcaaaaaccggcccgaccagaccacgttctgctgcacgtcgtgcggcttcgctgagcacgccgacgtgaacgcggcccgcaacatcgcccaacgcggtgcgacgggccgggcagtgagtcacgctgccgacgacgtggcctga

SEQ ID NO: 19 - DNA, 1152 bp, Artificial Sequence
  Synthetic
gtgtacgtcgtggtgcgggtgaagctcgagccctcggccgaggacgcggccgctctcggcgcgaccttgcacgctgttaacaaggcggcgaacgaggtttctcgaacggcgttcgcgcacggcgtcaagcgcgagtacgcactgcggaaactgacctacgcgggtctgaaggagcgtgggctcggcgcacaggcggcgcaacacgtcatcaagaaggtctgcggcgcctatgccgttctggcgggccagatacgatccggtttcctgcgcggcgaacggcgtcgcagggccgagtccaagccgatcgcctttcgccccgacgcggcgcatccgttcgacgaccgttgcctgtcctggcagctccacgcctggacggtgtcgatctggacggtacatggccggaagaggggaatccgcttctcctgctccggcggtgatcttgagatgctcttcgcccaccgcaagggcgagacggatctggtcttccgggacgggatgtggttcctcatggccacctgcgaggttcccgccccgccggtggccgagccgaacgggttcatcggcgtggacctcggcatcgcgaacatcgccaccacgagcgacggcgcacgacatgtcgggcgcggactgaaccggcaccgcagacgccaggccgcgttgcgagccaagctgcaggccaagcgaaccaggtccgccaggcggctgctgaggaaacgccgccgcagggaagcacggcacgcacggaacatcaatcaccgcatctctaagcaggtcgtggccgaggccgaacgcaccggacgcggaatcgccctggaagatctttcgggcatccgcgaccgggaacggtcgcaccggtcccaacgggccatcctgcactcctggagttttcaccagctcgcggagttcctggagtacaaggcccgccgtgcgggtgtcgcgctggtcagggtgaaccccgcctacaccagccggacctgcgctgattgcgggcaccgtgagaggaccaaccgggtgagccaggcccggttcgtatgtcggagctgcggcgtcgttgcgcacgcggacctgaacgcttcccgcaacatcgcccggctgggcgaggccgcgtggaacgcggggcgtgagtcacgcgtcccagccgcctcaccgtag

SEQ ID NO: 20 - DNA, 1139 bp, Artificial Sequence
  Synthetic
gtgaagctgatggtgcaggtgaggttgttgccgacgtccgagcaggcgtcggcgctgcgatcgaccctgcacgtctgcaacgtgcaggcgaacgaggtttcgcggaccgcgttcgagcgcggcgtgttccgaaaccatgacctgcgcaagctcacctaccggtcggtgcgggacgcggggctcgggtcgcaggccgcccagcatgtgatcaagaaggtcgccgacgcctacggcacgctgcgagccggcatccgggcggggaacttcggcaggcccggctcccggcgccggatcaaggccgagagcaagccgatcacgttccgccctgacgccgcacagccgttcgaccgacgcaacatgtcgttggccctggatgcggggaccctctcgctctggactctcaacggccggttgaagggcgtaccgttcgcctgctccacctcggcgcgaaggaccctggccgagtgtcgccacggtgagtccgatctgctgtgccgggacggaaaatggctcttgctggtcacggtcgaggtggccgagcagccgttgaacgaggaacccgacgggttcatcggggtggacctcggcatcgccaacattgcgaccacctccaccggatatcgcgcggccggccgtgagtcgagtcggcaccgcgcccgccaagcccgactccgccgcaggctccaggccaagggcaccaagtccgccaagcgggtgttgaagcggcagcgtcgcagggagcagcggcgtgccagggatgtcaaccactgtgtttcgaaacggatcgtggccgaggccgaacgcaccggacgcggcattgccctggaagacctcacgggcatccgcgaccgggtacggcaccgccggccccaacgggccgcgttccactcgtgggcgttccaccaactcgggaacttcatcacctacaaggcccgccgggccggggtgccggtggtgttcgtggacccggcccacacctcccgaacctgcgcggactgcggccatcgcgaacgggccgaccgcgtcgatcaagccctgttcatctgccgaggctgcggcgtcgttgcgcacgcggaccggaacgcctcccgcaacatcgcccgcaagggcgaggttgcgtgggatgcggggcggcggtc

SEQ ID NO: 21 - DNA, 1152 bp, Artificial Sequence
  Synthetic
gtgaagctggtggtgcaggtgaagctcctgccgacgcccgtgcagacgtcggcgttggaggccaccctgcgggcctgcaacaccgccgcctcccaggttgccgccaccgcacgcaccgtcgactgttaccgcaactacgacctacggaaacactcctaccaggcgatcaaagcggattgcgggttgggtgcgcaggccgcgcaacatgtgatcaagaaggtctgcgacgcgtacacgacgttgcaggccaacctcacagccggccgctacggcaagcccggcagcaggcgccgccgcagagtcgaggccggcccggtcgtgttccgctgggatgcggcgcagccgtatgacgcgcggatgctgtcctggcagcacgacgcccggaccgtgtcgatctggacggtcggcgggcggcttagggatgtcgcgttcaccggctcggcggatcagctcacagcggtcgcgaccctaccggtcggtgaatgcgatctgctgcaccgcgacggcatgtggttcctgtacgccagcgtggaggtgcccgagccgcagctgatcgagccggccgggttcctcggtgttgatatgggcatcgtcaacatcgcctacgactccgacggcacccggcacgccggggccgaactcaacggctatcgccgccggcaggcccggctgcgtcagcggttgcaggccaagaacagccagtccgcgaaacggctgctgcaccgccgccgtcgtaaggaggcgcggcacgccgcggacatcaaccatgtgatcgccaagaccatcgtgaccgaggctgcacgcaccggccgcggtatcgccgtcgaacagttgacggggatccgtgaccgggtccggctgagaaagccccaacgggtcacgctctcctcatggtcattcggtcagctcggcgcgtttctggcgtacaaggcctgccgggccggtgtaccgctggtccaagtggacccccgctacacctcgcaaacctgtcatcggtgcgggcaccgcgacaaacggaaccggccgaaccaggaaaccttcacctgtcggtcgtgcggggtcgttgcccacgccgaccacaacgcggccctcaacatcgcccaccgcggtgtcgagggctggggcgcagtcagccgcccacacgtggcctga

SEQ ID NO: 22 - DNA, 1152 bp, Artificial Sequence
  Synthetic
gtgaagctggtggtgcaggtgaagcttcagccgacggccgaacaggcgtcgatgttggaggcgaccctgcgtgcttgcaacacggccgcgaacgaggttgctcaggtggcccgccgggcgcgggtctaccgcaactacgacctgcgcaagcatgtgtacgcgggcatcaaagccgatcatcggctcgggtcccaggccgcccagcatgtgatcaagaaggtttgtgacgcgtacaagaccctcacgtcgaatctgcgggccggcaactacggcccgccggatgcgaagcggtaccggcgggtgtccaccgagccggtccggttccggtggcaggccgcccagccgtacgacgcgcggatgctgtcgtggcagcacgacgcccgtacggtgtcgatctggaccgtggccggccggatgaagaacatcgcctacaccggctctcccgaccagctcaaagccgtcgccgagttgccggtcggtgaatgcgatctggtgcaccgcgacggcatgtggttgctctacgcgaccgtcgagatcgccgaggccaccccggtcgaaccggctggtttcctcggtgtggatttgggcatcgtgcagatcgccaccgactccgacggcaccgtctacgcgggcgaacagctgaaccggtaccggcgccgccagatccggttgcgcgccaagttgcaggccaagaagaccgaatccgcccgccggctgctggtcaaacgcgcccgccgggagtcacggcacgctacgaacgtcaaccatgtgatctcgaaaagcattgtggccgaggctgaacgcacctcgcgtggtatcgccgtcgaagacctgacggggatccgcgccagggtccggctccgcaagccccaacgggccgcactgcattcttggagcttcgcccaactcggcggcttcttgacctacaaggcccgccgggccggtatccctctggtccaggtcgatccccggtacacgtcgcagacgtgctcggcatgcggtcaccgggacaagaggaaccggcccgaccaggccacgttcatctgccggtcgtgtggagtcgttgcccacgcggacgtcaatgctgccgtcaacatcgccgcgcgtggtgtcgacgtctggggcgcagtcagccgcccgtacgtggcctga

SEQ ID NO: 23 - DNA, 1122 bp, Artificial Sequence
  Synthetic
atggggaggaaacgcgctcttattgtattgaacgatttgtgctataataacggcatgaacctgacgttgatggtcaagctgctacccacaactgaacagcaccaagcgttgcttgagacgatggaacggttcaatgcggcttgcaatgcgattgcggaagtggctttcgaacatcgcactgcaaacaagatccggttgcaaaagctcgtgtacgacagtatccgcaaggaatttgggctttcagcccaaatgaccgtccgtgctatcgctaaggcgtgcgaagcgtacaagcgagacaagtcgataaagccgacattcaagccgcatggcgccatcgtatatgaccaacgcctcctttcttggaaaggtcttgatcgcgtgtccatcctaacgcttggcggccgcatcttggtccccattttgtttggcgagtaccaggctgcacgcctccagcggattcgtggacaagccgacctgatttaccgcgatggcaccttctacctcgctgtcgttgtggatgtcccagatccaccacaaggtgctccaaatggatttcttggcgtggacttgggcattaagaacatcgcgacagacagcgacggcgaggtgttttctggagggcacgtgaacggactgcgccatcgccacgcacgccttcgccaacgcctgcaatcgaaaggcacaaagtctgccaagcgtctgctgaagaagcgtcgccgcaaggaagcccgtttcgccaccaacgtaaaccatcgcattgcgaaagtgctggttgcgaaagccaaagacaccgggcgcgggattgcacttgaagatctcaagggcattcgtgaccggataacggttcgcaaggctcagcgtcgcacccagcattcctgggcattccatcagcttcgcttcttcatcgagtacaaggcacgtttggcgggtgtgcccgtggtgttcgtcgatccgcgcaatacatctcgaacatgtccaagctgcggtcatgcggacaaacgcaatcgccccacaagggataattttgagtgtgtcgaatgtgggttcgctggcccagccgacaccatcgctgcggtgaacattcgccgtagggctgaagtcatgcagccgtacgcggtatag

SEQ ID NO: 24 - DNA, 1062 bp, Artificial Sequence
  Synthetic
gtgtcggaggtggcgtttgagcgtggcgtgccgcgtgaatatgagctgcgcaagcacacctacgccgagctgaaggcccgtgggctgggagcgcaggccgcccagcacgtcatcaagaaggtgcgcgacgccgacaccacgctcacggccaacattcgtgccgggaacctcggcgcgccaggatcgaaacgccgccgcagggccgagtcgacaccgatcgccttccgacctgaggccgcccagccctacgacgatcgatgcttgtcctggcagtacgaccgccgaaccgtgtcgctctggaccacggcgggccgtatcaagaacgtccgcttcgcctgctcggcggaggcgctcacgaggctccagcagcatcggcagggcgagtccgacctgatcgagcgtgacggcgtcttctacctcattgccacgtgcgaggtgcccgagggcgagcagtatgagccggacggcttcatcggtgtggacctcggtatcgccaacatcgccaccacctcgaccggctaccaggctgccgggcgcggcctgaaccgccaccgcaagcgacagctcgtcctgcgagccaagctccagaagaagcgcacgaagtccgccaagcggcggctcaaggcccgcgcccgccgcgaggcgcggcacgccgcgaaccagaaccacattatctctaagacgatcgtgaccgaggctgaacgcacctcgtccggactgtcactcgaagagttgacgggtatccggcagagggtacggctatccaagccccaacgggtcgcgctgcactcctgggccttcgcccagctcgcaggattcatcgtctacaaggccaagggggcgggtgtgcccctggtcgtcgttgaccctgcctacacgtcgcagatgtgcgcacagtgccagcacatcgaccagcgcaaccgtgtcgaccaggggcttttcatctgccgggggtgtggggtcgttgcccacgccgaccggaatgcttcccacaacatcgcccaccgtggcgagagcgtgtggaatgcggggcgtgagtcacgcgtccctgccaccccataa

SEQ ID NO: 25 - DNA, 1176 bp, Artificial Sequence
  Synthetic
atgttaatatcactcctcgtgaagatcgtcgtgcaggtcaaacttgttccggatgccgtgcaggcatccgcgcttgagtccaccctgcgcacggtcaacgaggccgcgaactgggtctccggggtggccttcgagcagggtgtgccgcgtgagtacgcgttgcgcaggcacacctacgccgagctgaagtctcgtgggttgggggcgcaggcggcccagcatgtgatcaagagggttcgtgatgcctacaccacgctgcgggcgaacctgcgggcgggcaacctcggtaggccggggtcggcgcggcgtcgcaaggcggagtccaggccgatcgcctttcgggtcgatgcggcccagccctatgacgatcggtgtctgagctggcagtacgacgcgcagaccgtgtcgatctggaccaccgcaggtcgggtgaagggcgtgcggttcgcatgctcggcggacgcgctcaagatgctgcagcagtaccgtaagggcgagtccgacctgatcgaacgcgatggtgtgttctacctgagcgccacctgcgaggtccccgaagccactgagtacgagcccgaggggttcatcggcgtggatctgggcatcgccaacgtcgctaccacgtccaccggctaccgggccgccgggcggggcctgaatcggcaccgtaggcgccaacgcgctctgcgccgtaagctccaggccaaggccaccaagtccgccaagcggcggctgaagaataggcggcgtaaggaagcgcgccacgccgccaacgtcaaccacatcatcgccaaacgcatcgtgaccgaggcgcaacgcacctcgtccggcatcgccctggaagacctgaagggcatccggcagagggcacggctccgcaggccccaacgggtcacactgcacacctgggccttcgcccagcttggccagttcctggcctacaaggcacgccgggcgggcgtcccgctggtgttcgtcgatccggcctattccagccaggaatgcgcccagtgccatcacatcgcgaagaacaaccgcctcaaccaggcccgctttgtctgccggtcatgcggggtcgttgcccacgccgaccgcaacgcgtcccgcaccatcgcccaccgcggcgaggctgcgtggatcgcggggcgtgagtcacgcgtccctgccaccccataa

SEQ ID NO: 26 - DNA, 1125 bp, Artificial Sequence
  Synthetic
atgtccctcctgtccgtgcgttgcaaactgatacccgacgcgagtacggccgagaagctgacccgcacggtgaaccagttcgcgaatgcctgtaactacaccctccaagtcgcaaggcgggacaacctgtggaacaagttcgccctgcaacgtgcggtctaccgggagcttcgggagcggttcggcctcagcgccaacctcgcggtgcgggccatcgctcgggtgggcaagcgcaaaggccacaaagtgggcggcttcaaggctaccagcgtggactacgaccagcgcatcctctcggtcaacctggacaccgaagtggtcagcctctccaccgtggacgggcgggtgaaagtccccatgcagattgcggggtatcagcgccaccttttgcgaaccgccaaaagcatccagggcggtcaactggtcagggggcgggactcctggtacgtccacctgtggtgcgagtacgacgacccgcccgccatgaccccaaacggctttctcggggttgacctcggcatcgtgaacatcgccaccgattcggacggagagacctactccggctcccacctcaactcggttcgccaccgccaccggaggctcaggaggaagttgcagaagaaaggcaccaagggggccaagcgccgcctgaagaagctctcgggcaaggaggcccgcttttccaaccatacaaaccacgcgctcagcaagcgcattgtcgccaaggcccaacgcaccgggaggggtatcgccatcgaggatttgggtggcatccgcgaccgggtacggctcagacggcctcaacgggcggccttgcatagctgggcgttcttcgacctgggccagaagcttcggtacaaggctgaacgggcgggagtcgttctggtccaggttgacccccgcaacacttcccgcacctgcccggcctgcgggcactgcgagaagctcaaccgcgtttcgcaggcacagttcgtctgtcggtcgtgcggcctcgttgggcacgcagaccacttcgcagccgtgaacattgccgttcgcggctgggccgctgtaaaccggccatacctgggggaagcggagagtgctatccggcataatcctgtccctggaagcccccggctttag

SEQ ID NO: 27 - DNA, 1113 bp, Artificial Sequence
  Synthetic
gtgaaactgactacgcaagttaaacttataatttctagggaagacaaacaatctttgcttgaaactatggagcagtttaacgaagtttgcaatggtattagtaaatctgcttttgaatacaaggtttttcgccaatacgatatccaccaaatgctctaccaccctattcgagattgctttgatctctccgctcaactcgttgtaagagcgatatccaaggtcgctgacagctacaaacttgatattaaaaaaatcagaaaatttagagaacatggtgccatcacctacgactctagaattttgacttggaaagatgaagaggtctctatctgggcgattggtggtcgtaaaaagttttcttatctttgtggagaaagacaaaaagaacaactcaaatttcaaaaaggtgaatctgatctgatctataaaaatggagattttttcctctacaccacttgtgaggttccggaaaaggaacctgttcctgttgagcaatatcttggggtagatcttggcatcaccaacatcgccactgacagcttggaaaaaatttacagtggttctcacatcagctctgttaggattagaaatcttaaacttagagcaaagcttcaatccaagggaaccaagtctgccaaaaaccttttgaaaaaaagaagcaaaaaagaaagaagatttgccaaagatatcaaccatcaaatatccaaaaaaattgttgaaacggcccaaaggcactctgtgggaattgcccttgaaaacctcaagggaataagatctagagtaacggttaggaagggcctgcggtatcaactccattcttgggcatttaacgatcttgccgggaagatctggtataaagcgagaaaagagggaattgaagtgattttggtcgacccaagatacacttcccaggaatgttctagttgcggacatactaaaaaatccaatcgaaaatcccaatctcttttctcctgtcagtcgtgtggttataccgtccacgccgacatcaacgctgcttgtgtaatctcaagtagggccgcagtcaatcggccgaacgtagtgggggagcaatctcctaattacaagccccttcctttagggaggggtggttga

SEQ ID NO: 28 - DNA, 179 bp, Artificial Sequence
  Synthetic
tctgctgcacgtcgtgcggcttcgctgagcacgccgacgtgaacgcggcccgcaacatcgcccaacgcggtgcgacgggccgggcagtgagtcacgctgccgacgacgtggcctgacacgcatcccccagatgcgggtcagagctgcaagctcggaccattcagggccgagaagctgac

SEQ ID NO: 29 - DNA, 208 bp, Artificial Sequence
  Synthetic
tcgtatgtcggagctgcggcgtcgttgcgcacgcggacctgaacgcttcccgcaacatcgcccggctgggcgaggccgcgtggaacgcggggcgtgagtcacgcgtcccagccgcctcaccgtaggcggccaggacgcggcggagcgcatcgcggccagcgacgcgctccagccgcggatcccccgtgaggagggggaccaagctgac

SEQ ID NO: 30 - DNA, 173 bp, Artificial Sequence
  Synthetic
tcacctgtcggtcgtgcggggtcgttgcccacgccgaccacaacgcggccctcaacatcgcccaccgcggtgtcgagggctggggcgcagtcagccgcccacacgtggcctgacctcgcagccagcgggggaagagatccacaaacccacccattcatgggcaggtagttgac

SEQ ID NO: 31 - DNA, 173 bp, Artificial Sequence; identical to SEQ ID NO: 30
  Synthetic

SEQ ID NO: 32 - DNA, 173 bp, Artificial Sequence
  Synthetic
tcatctgccggtcgtgtggagtcgttgcccacgcggacgtcaatgctgccgtcaacatcgccgcgcgtggtgtcgacgtctggggcgcagtcagccgcccgtacgtggcctgacctcgcagccagcgggagcagagatccacaagctcgcccattcatgggcgggtagttgac

SEQ ID NO: 33 - DNA, 146 bp, Artificial Sequence
  Synthetic
ttgagtgtgtcgaatgtgggttcgctggcccagccgacaccatcgctgcggtgaacattcgccgtagggctgaagtcatgcagccgtacgcggtatagcgcaggctacaactgcaagccccgccctttagggctggggttcatgac

SEQ ID NO: 34 - DNA, 207 bp, Artificial Sequence
  Synthetic
tcatctgccgggggtgtggggtcgttgcccacgccgaccggaatgcttcccacaacatcgcccaccgtggcgagagcgtgtggaatgcggggcgtgagtcacgcgtccctgccaccccataacggggtgtctggacggaggagcccacccagcagccagttgggcgctacctccgagcccggtcgttcacggccgggtcaagttgac

SEQ ID NO: 35 - DNA, 207 bp, Artificial Sequence
  Synthetic
ttgtctgccggtcatgcggggtcgttgcccacgccgaccgcaacgcgtcccgcaccatcgcccaccgcggcgaggctgcgtggatcgcggggcgtgagtcacgcgtccctgccaccccataacggggtgtctggacggaggagtccacccagcacccagttgggcgctacctccaagcccggtcgtttacggccgggtcaagttgac

SEQ ID NO: 36 - DNA, 171 bp, Artificial Sequence
  Synthetic
tcgtctgtcggtcgtgcggcctcgttgggcacgcagaccacttcgcagccgtgaacattgccgttcgcggctgggccgctgtaaaccggccatacctgggggaagcggagagtgctatccggcataatcctgtccctggaagcccccggctttagccgtggggtggtttac

SEQ ID NO: 37 - DNA, 147 bp, Artificial Sequence
  Synthetic
tctcctgtcagtcgtgtggttataccgtccacgccgacatcaacgctgcttgtgtaatctcaagtagggccgcagtcaatcggccgaacgtagtgggggagcaatctcctaattacaagccccttcctttagggaggggtggttgac

SEQ ID NO: 38 - protein, 422 aa, unknown
  TnpB Polypeptide
MMLKKMSEYKYHSGIRLRIYPSHQQKRIIKKNAETARFIYNEMIACSKEIAAFGKLSIYIQGITERIQVLRERIKSVTSLKAHFLWMDDVDLDANMIANAKKNYAHAWKCYRCSETKNPPAFHRRTYALSYQTNPHYNRQRVSEATLTNGSAGFRDTSHVYVPKLGRIRCKGSRKILVHIFSMHSVRIGTMTVSRDACGGYFLSMQLASDEPFVTSLPKTGSAIGIDLNLKNFYMDSNGRCVNHPVYIQRTKRRVTRAQRILSRKARGCRRQHIPLRRSVRYQAQRRLVARLKQKIKRQRQDFLHVQAMDLIKNHETIVAEQLDISRLIQLRRCTKAIYEAGWRTFLDFLEYKAKRYRRIFVKVNPAYTTQRCSACGYILPTGQRLQLSDRQWQCPSCHVIHDRDRNAACNILQRGLATLSK

SEQ ID NO: 39 - protein, 424 aa, unknown
  TnpB Polypeptide
MQLTEQHVIKRGDPRFAAIDAASFASKNLYNAALYELRQAFFRDGTWLRYAEMDKRMQSHEAYKALPAKVSQQVLKQLDDAWTSFFEACKAYKQDPSKFTGRPRLPKYKHKTEGRNLLVYTVQAVSRRRLKRSIINPSMLAIEVQTKHKQVDQVRIVPRKGFYVVEAVYEQEEKQAAVNSAYYAGIDIGMNNLVALTSNKPGFRSVLVNGRPVKSINQFYNKRKAELQSELRRKGTTKRMERMTNKRNRRIDHYMHTVSHRMIDLLVKEGIGTLVIGKNDGWKQEVNLGKRTNQNFCSIPHARFVAMLTYKAELVGITVKLTEESYTSKASLLDLDPLPVRDPNTGNEQHRFSGKRIKRGLYRASDGREINADINGAGNVVRKVAPDAFSEVEGVEDGKGMLASLVVHPVRFVVAPSRTQKGKS

SEQ ID NO: 40 - protein, 453 aa, Oscillatoria sp.
MLINSNISYKNMAKARSKTPKKPKVPLGVQQNLISPSQQLKAVLEFICSESNKLHNCATYYARQIWFKSHKYVTSFDLVKNLTKNAHFSALPSDAATQTCLSVGESISAFAKLRELWRNGELENKPKPPNYRKPGYQLVAYPKRALKLIDGQIRFPLGLRVNAWFGLKEFFLPMPSNLDFENLREVRILPRNGCFYAEFVYPVVVKKPILDPAKCLGLDHGLNNWLTGVSNVGTSFIVDGKHLKSINQWYNKQVAKQMTDKPNGFWSKRLAAMTEKRNRQMRDAVNKAARIVIQHCLDNSIGTLVFGWNKGQKSGIDLGNKTNQNFVQIPTARLKARIEQLCKLYGIRFEETEESYTSKASFLDADALPNFGEKPVGEATLKELGWKASGKRVKRGLYRTSEGVEINADCNGAANILRKVAVKLGLDLSGISRGGLCSPLKSRFWTIQESQRL

SEQ ID NO: 41 - protein, 394 aa, Oscillatoria sp.
MLVLEAKLKGKNWQYKLLEEAIRTANFVRNKALLYWMDNRGVSKNDLQKLCATLAKEYDWAGKLNSQVRQSSADRAWNGISRFYKNCKEGKPGKKGYPKFKKRGHSVEYKQTGWRLAEDRKRIAFTDGFKAGTFKLIGTRDLSFYQPEQIKRVRVVKRADGFYCQFLIDVERSEPQSPTGKAVGIDLGLEFFYTDSEGNQIENPRFLRKSEKSLKRLQRRVSKRKKGSKNRRKAINKMARKHLKVSRQRREFAVRTARALTVSSDAIAYEDLKVSNMVKNHKLAKSISDAAWSMFTNWVDYFAKIRGVHVVEVAPHFTSQDCSRCGTRVKKSLSTRTHKCPSCGLIEHRDLNAAKNILAKGLGINTVGHTGISKLEEIGSLACSEQSEWVKSGH

SEQ ID NO: 42 - protein, 331 aa, Oscillatoria sp.
MYAVQKDIWHLTGRDKSIVEQVLRWSNNLFNVGTYESRQRYFRDRSAVKYPELYKITKANENYGLLHSQVAQQSLKSVAESFSSFRGLERLAKKGKLNQKPRLPKYRTKGGMYQVSYPGQALKIVGNRVRLPLGTKGKEHFGADALWVPLPERIKGCPLKELRLIPRNGEVWIEYVHESLTEQAPSCSLEVTGILGIDHGINNWLTCVSSNGNPFIVDGHKLKSWNQWFNKQKARVQSEHAKRKLPKDRDCLPVKVGEKPDNWQPSGKRIKRGLYRSAQKLILNADVNGAANIIRKSKVATDSIIERVGSGLLTNPLRIKLWRDSSPSFCP

SEQ ID NO: 43 - protein, 396 aa, Limnothrix sp.
MLILEFKVYGKPAQFSAIDEALRTAKFIQNKCLRYWMDNKGLSKYDLNKYCAVLAKEFPFANELNSMARQASAERTWSAISRFYENCKKQIPGKKGFPQFKKDVRSVEYKTTGWKLAEDRKSITFTDGKQIGRLKLKGTRDLHFYQPNQIKRVRLVKRADGYYVQFAVSVERFEVVQPSGKAVGLDVGLNDFYVTQDGDRAENPRFLRRGEQRIKQAQRRVSRKVKGSSNRRKARVILGKRHLKISRQRKDHAVKLARCVVQSNDLIVYEDLRIKNMVQNHCLAKSINDASWYQFRVWLEYFGKVFGKITVAVPPHYTSQECSSCGAIVKKGLSTRTHICRCGAVLNRDHNAARNILSRGLATVGHTGSYGLEPCNAWGEDASTLVGETLSRQATS

SEQ ID NO: 44 - protein, 533 aa, unknown
  TnpB Polypeptide
VHKFEARPGCVLQAYRYALDPTPAQARALASHAGASRYAYNWAVSRIRATWNQRSAEESYGIPEDDRTPWRNWSLPSLRKDWNQAKDTVAPWWADNSKEAYSSGLAAAARAFDNYTASKNGKRKGPKMGRPRRKSKHSAVKSCRFTTGIIRAEADRHHVTLPRLGAIRTHESTRKLARRLETGRARILSAAIRLESDGRWFVSLQTETERKPGTPARPGVAAGVDLGVKHLAVVADSLGEIRFIPNPRHLSSSLGGLRRAGRRQSRRNGPTVYDPATGKKTRQNPSAGWEQAVAATGRAHARVRHLRADGLAKLTTSLAAEYGTVVVEDLNVAGMVRNKRLARHIADAGFGEIRRQLTYKTQWNGGQLVLAGRWFPSSKTCSGCGAVKAKLPLHARVYACDVCGLVRDRDENAAVNLAALATSGSTGPGVAGDPGAEALKIRGADRKTCRYDPGSGPGRRAGGVETGTRHGSGTDHGKTGTASPQGLAARRTSCPTGGPPRAHGQDVRCGRAVQDALFDLDEFCAPAELANAR

SEQ ID NO: 45 - protein, 449 aa, Haloterrigena sp.
MKRTNTFAVRPLTDDDEQVLRGLLDASAALWNEINFQRLMRYNDEDGFEGDVWDANTGILEGKYKAVLGASTAQTVRRANTEAWRSFFGSKKAYHDESNTSVAEHPEPPGFRGNKDDGRLLKGVVRKDAYTVEWGDRSRLEMVVGEQLRDRHNSPKSRLRLEIVGEPSWPDYEDQGRLELWYDETDSTFRASQPVTVSSGSRDTPLADEKAALDIGANNLVACTTTTGEQFLYEGRKLFDRFRETTREIARLQAKLEDGRYSSKRIRRLYRNRTRRRDHAQEALCRDLLERLYDEGVDTVYIGGLTDILETHWSVETNAKTHNFWAFKQFTERLTCTAEEYGISVEVRSEAWTSQECPQCSSTDRTTRHQDTLTCPCGFEGHADLTASETFLRRHAEQAQAVRPMARPMRFKWDDHTWSGIPHPHERPNEQRTDPSTVYGDGNVASGES

SEQ ID NO: 46 - protein, 412 aa, Pyrodictium sp.
MRGKTTYTWVVPRGEYMLTLKARGELVDGSLNELREELYITRKAIQHIIDCLWELDKLPTLNQLHQMFYKVLRNQGFRAHQCKQIYKHALSMVKSAKRNGGKKPVLRKLSVRLDKYDAKIDLENQVVIVKLRSRIFKIKLLHSREYIRKFIGRKWYEVIISIDKQGRIWISTPFKWIHKPYKPRRLLSLDVNLKKIVVYNGRSVRRIDTRFMEALYLKHLAEDIQKRHRYAWRRNRKWLDIIRALHRRSRNIVVDWCRKFAKHIVLKAKRMRSAIVLEDLEKLWFNASKKSSSLADKLSRFAYRKLQLAIVTKAIEYNVPVVFTDPRNTSSACPRCGAKLNYNHRLATCPRCGFMSDRDIVGAMNIYLRAIKHLAPRLGSWGTRPMTNEARAKGGSPRDEPMTIHIKSYTNI

SEQ ID NO: 47 - protein, 379 aa, unknown
  TnpB Polypeptide
MLRAIKIRLYPNKTQEQEFNKTLGCYRFVYNHMLARKQEAYKADKTNLALTELSKYFHHELLKDEQYGWLKDQNSKVMNQAIRQMLTAYDKFFKEHKGFPKFKSKRDKQSALFPKLAISKKNTFDKRKITLTKKLKDIKFCCSDLYHKRLQKYKDNIRSATLSKTKSGCYTLSILIDIPQNEFVKFNKTSRDVGIDLGVKDFVITSNGEVFENKRFYKKDEKKLAKLQRQLSKKRKGSSNFHKQCKRITMVFETITNKKENYIHSVVNELLSQYDTIYMEDLNTSGLLKNHRLAKTIQEVGFYKFKTVLSTKALQNNKKVVLIGRYYPSSKTCSTCGYINKDLKLQDRHWQCPICGSYHDRDLNAALNILYEGRRISAA

SEQ ID NO: 48 - protein, 382 aa, Lactobacillus sp.
LKTFKLRIYPNATQRQQIERNFGMCRFVWNELLNMQIQRHNNGGKYLNEFQMNYLIKPLKQQYPWLKEADATSLIAVSHNLHLAFQNLFKKRAGYPKFKARRFAKPTYRANAVNGNIVLTDATHLRMPKLGPILFRTGQRPVGEIKTATVVRDRVGDYYVLVVAEVELELWPKSEAAVGLDMGIADLVITSDGMKYPTKRFDKANAKKKHYWEKRLARRRAQAEKEIAWDRHLKLEAPRQLSDFKNYLKAKRMVAKYSAKEANQRRDYLQKLSTGLIRQYDLIKLEDLKTKGLLHNHKLARAIVNQAWRELRLMLEYKAAWYGKQVVVVSPYKTSQRCSNCGYDDGKHELDVREWICPQCGTRHDRDINAAKNILAAEQQTV

SEQ ID NO: 49 - protein, 155 aa, unknown
  TnpB Polypeptide
MTRKAKKGSKRKAQKTGLNRNMLDVGIGMLKSAIEYKVTESGGQYIEIPTQKVKPSQTCPNCGHQQKKELSERVHTCLSCGYTADRDVAAAQVMLNWVLYDSTVFGTSIVKRGEPSSTPSSTHCGGMAQLGSKKRKKHSLLDGNLETPSSRSRVG

SEQ ID NO: 50 - protein, 446 aa, unknown
  TnpB Polypeptide
LCERLEVKCETGTNKKVELLEEFERYFEFERTDNRHIKINKIYKYPLPGFENGYFYKTMIIPVKCSSKDYQYLMQCSRWAGDCWNAIVDADKEFHNQNGRYMKKGELQSFVKNKTPLHAVGNQGVFIKYYTARDAMYKSMTSDHTNSKKVELPYKKKKYFVVCWNVFSFVVDYKNKILKLAKKVDENGRPQKQVRCWFKTMPKHIVEIELIYRNGLCFAVKYKEPKANTDIKEENVAAIDFGEIHSISSIDNNGDAVIITGRKIRSIKRLQNKEQAKLRSKRDKLTKGSRQYKKYSRAIYKLKLKTDRQILDCVHKISKLYLDYCIENNISKVYYGDLDSCTRGHHGKFNGYTNQKLRDWCYGLLTLQLENKLSRYGIELVKVSEAFSSQTCPHCGERHKPSGRNYICQCGYEQHRDLVGAMNILNFNGKDIHIERYKNLKYLRIA

SEQ ID NO: 51 - protein, 372 aa, unknown
  TnpB Polypeptide
MISKTFKYRLYPTKAQRTTLSRWIDLCRWVYNKTLEARKVSWEKEEKSLRLFDTNKLLTKWKKEIPVFKEVHSQVLQNVQYRVDKAYQNFFRRVKQGDKKAGYPRFRGKFRYDSLCFPQYPGGAVLESSVLKIRKIGDIRLNLHRQVKGRIKTTTIKRTSTDKWFVSFSVEIDKPKRLKKTKRVIGIDVGLESFLTTNTGEKVRNRRFFRTDEKALASVQRRFSKEKKGTPERRFRKKAVARIHERIRNRRSNFAHKISKRIVSHYGTIVFEDLSISKMVKNRCLSKSISDVAWSQLVQYTIYKAEEAGRIVVLVNPAYTSQNCSRCGHRERKKLSQRVHDCSVCGLVLDRDHNAALNILRLGLQSLGSSNP

SEQ ID NO: 52 - protein, 535 aa, unknown
  TnpB Polypeptide
VITVTTKIMDDSLSPYLEKRSILHQKVLRRLFVAIYIKGEAPNDAYNRLAKQYGIFAAEINSIRKETEAIYQSWKELLATRISDQQGKINKLEAKLKRPKIEPSKAHQWRRKLHRYRCKLLVLKSEQASGTPKICFGSKELFYRQFRLEENGYKTHTQWLQDWRTARGDSFYLAGRASEKSGNNACILEVLESDNDSVTGVLSLRKKNDEIKGPKAKAGDFIPILVRFTHNSKYILQALAEKRPITYRFAQVKNWKVHVMVDLPTVPIITDVRNGSIGTDQNPFCIVWSVIKPDGNCSDTYSAKLTQGHRTAKQAEHELSNIVCDLVDTAVLTKRPIIIEKLDFAQIQRELRSRGLNRQLSRFKHSLFVKLLRGRAAKLGVEVIEVNPAFSSIIGWLKFGYGYGFNRHQAASIAIGRRVLRPNGKSFSERLRVRETPGHPAASKLSRNTSAKPVRKRSEHAWTGWRRLGKQLAREPSRPKSAGTRKPPAVSCHETGRQGSNPYPLGQSTPKATDAFQNGSTDPLANRRGTVYAPA

SEQ ID NO: 53 - protein, 535 aa, unknown; identical to SEQ ID NO: 52
  TnpB Polypeptide

SEQ ID NO: 54 - protein, 510 aa, unknown
  TnpB Polypeptide
MGIRAVLIDVGGTLWPDGWPAQPGDADRRRERLRAAFPGLGPERAAACVAELDEAAGQLPGTLTQDAGTYVTPALRHYGLAGGRAGRVRGYASAAERHAKTVRLQVLQARLAVVDRRLAAGRVSVVRGGRRLLGRRGNLADAGLTEGQWRREWEAARLFLTADGEKNKAFGNETIRWDPGEGWLEIRLPGPLAELANWPHGRYRLSCPVGFSYRDGEVAAQAATGAVRYDISWDPVRDRWYLDASWRTSPGPAPALEDLRRTPVLAVDLNHGHLAAWVVTPDGNPAGPPVTIPVVLAGLPASQRDGRLRAAISAVIGLARQRGCRAIVIEDLDFAEAREQGRERHGSRPSHGGRGRRFRALVAGLPTGRFRDRLVQMAANAGLAVIAADPAYTSRWGAEHWLGPLRERVSPVPATGHHAAAVVIGRRALGHRARRRAGVTGGGQRTGRRRAAPRAPAATRTSRNGRPRQARRQPPRWRKTAMATRTRPPDQAAQDRSGPPASQDHVLLVQ

SEQ ID NO: 55 - protein, 370 aa, unknown
  TnpB Polypeptide
MEYSYKFRIYPNAAQENLIQRTFGCSRFVFNHFLAERMEQYEKTGKVPTRFQQDKELTALKKELLWLKEVDATALQASLQMLDTAYQNFFRRVKQGEKPGYPRFKSKHNHRRSYKSKCVGTNIKVLEKAVQLPKLGLVKCRISREVKGRILSATVSQAPSGRYFVAICCTDVEINPWPAAGTVVGLDMGLKSFAIASDGKKYPNHRCLFKGQKKLARLQRQLSRKTKGSNRREKARIKVARLHEQIANQRLDMLHQLSADIVRNYDRIAIEDLAPANMKKNRKLARSISDASWSEFRRQLKYKAAWYGKQVVIIDRFFPSSQICSSCGVQWPGTKDLSIRTWICPACGTVHDRDINAAKNILKEGLRILA

SEQ ID NO: 56 - protein, 371 aa, unknown
  TnpB Polypeptide
MMYNSLLEHSLSERRAGRGTPTHKALAYLIPAMKARTPELNAVFSQVLQNVAKRVRSGFEGYWNRRRAGLRAHLPRFRGEDRYDSLTYPQFGFRVKDRCLRLSKIGDVRIIPHRPIEGKVKTLTVTRSRTGKWFAVFSCEVEAKPIRKRLPAVGVDFGLNSLVALSDGTLIEAPRSYRNAESRLRRVQRSLSQKRRGSRNREKARLRVASVCEKVANQRRDFAYKTARMIVDRYERIYVEDLKVQGMMRNRRLSKSLGDAGWGMLRNALTYMAKMSEGVIAFVSPLGTSQTCSGCGAYVGKDLSVRTHRCPECGLTIDRDVNAAENILKRGLEIGLERAEYTPEGEETTTHLSADVQAASVSQEASLFRGG

SEQ ID NO: 57 - protein, 420 aa, unknown
  TnpB Polypeptide
MEMLLSHKTSIKISQEYSNIIGHMCYAASKLWNICNYERHHYKELGLEKYPDWYYQKKAHKGNLWYKQLPSQTAQETCKQLDKAWKSFYVLKKTGGIKDPNPPRFKQDNIPVTYMQMGIRHEKGSDQLRLSLSKALKSYMEETYGIHEKFLYLENKIFRNMDHIKQLRIYPPENGKYDLIVIYEIEEPEQLSQNGHYLSIDLGLHNLMTCYDSGNGRTFILGRKYLSLERYFHKEIARVQSVWYAQQSERGIKYPKSSKHIQRLYRKKQNAVKDYLHKVTRWIAEYCRKEDIRCVVVGDIRNIRKEKDMGHKTNQKFHGLPYNKLYIMLEYKLKLYGIQLIKQEESYTSQCSPLSPEVSKRYAEASNRKERGMYITDGVRYNADAVGAFNILRKYLSVSGKQKELSVTGLKNPEIIKVAA

SEQ ID NO: 58 - protein, 421 aa, Brasilonema sp.
MKVFNLTYEFKLKPTQQQVALFEEWLETHRRVYNHALAERKDWYKSRSCQINACSLRSCYIIRADAPRPTFASQCKSLTAARNATCFMPGNPSTAVAQESEYLKRVNAQSLQQTLRRLEKAFVSMWEQNHGFPRFKKAGRMRSFSFPQLGQNPLSNRYIKLPVIGAVKIRQSRSIPEGGVIKQARVVKRASGWYVMLTVQWDVNPPQRLPHGEAVGIDVGLTSFVATSNGLLVKRPRFFVDAERKLKLLQQRVSRKRIGSNNWKKAQKKVASLHEYVANCRKDWHRKLSHQICNDAGMVFVEDLNLIGLSRGMLGKHCLDAGFGQFFNILEQTCFKRDVYFQKVDSRKTSQICPNCGTETGKKELSERTHACSNCGYTTDRDVAAAQVVAIRGLAAVGHTVKMLAEGKFIGIPVKQESSYQ

SEQ ID NO: 59 - protein, 433 aa, unknown
  TnpB Polypeptide
MFEAVKVALDPTPSQERRLLSHAGAARFAYNAGLARVKAALDAGEVLDWSFFALVNWWNSCKDELTVGGDGEPWWQENSKEAYSRALESLAKALSNWSKSRRGDRKGRKVGFPKFKAKGRATPKFTYGTGCFGLVKGDPKALKLPRIGRVHCMENVAERVGDAKVKRMTISQRAGRWYASLTVEREDKPVKRAPKGGAVGVDLGVKTLATLSDGTVIENPRYLRKSERKLKRAQQALSRKIKGSNRRAKAVAKVARIHAHVANQRLDGLHKFTTWLTSGYSDISIEDLHVAGMVKNHHLAKAVSDAAFGEFRRQLEYKTAMTGARLHVVDRWFASSKTCSGCGRVKAKLSLSERTYRCDGCGLVLDRDLNAAINIHVAGSAPETLKAHGGTVKRGNRSGCATLVSVKCEPSVGANRVSLGADSRKSVLHTAVR

SEQ ID NO: 60 - protein, 506 aa, unknown
  TnpB Polypeptide
LAELASEIRDVSGYATYVARNDVELGGELARVTAITPSEAGRQAGITMPDFLVSGKSGRSRKEKLLQHNVVTSYRSYQERVKAANGESPKYVSQGWKRTVDASAPSYGEDYVNLGAVDRAYAVIENNPFTDGEIVLRMVIQGAWYRLIFDFDNKRFIEGKVALPVIKVQGDQPVFIFTVVTDNPVVQFSGDYVIGVDVGINNYATVVVRSSSTGQIVHASTLSQRVHSLWNSVRASERQVRQLRKKATHLLGDRQAHMAALDEARLHREAASRKKRELAILAAQEIADLSHLWGNAVVAVEDLSWIRNTMQNGRWNRGTLVQWLTHYVSQNGGWVVAVSPAHTSQLCYKCGSKVAHPTHEVSVCATHGVMDRDMNAAVNIAARAVPKVEKARRTRAKNRKIRTQQPLRTPPARTSLRYPGRDRTKDKTTPKRKNHRISREVILPSCPARAQAQRLEATVLADQGACDTLGTVQAALKRGNVAYKCRLCSLICYRVARVSPSELAST

SEQ ID NO: 61 - protein, 498 aa, unknown
  TnpB Polypeptide
MKNKEEKIIGTYFYPHFANKGKVAQVIRTLIEYRKVAQKIAHIQWKYFFINRECKFNKYLSVKEINSDLSERYKQTCLWQVCSTLKSYIGNLQNQFVNIIFYSNLPEKDKHILLALNSKNAWLKYDNSEIIYYKDKTKIVYPVTEFHKNLAKKIFKHLIKKNRKPSFKRISMHLDEKVAVLIEKIPNKAKEFDYWLRLSTVNKGNPIYIPLKKNPHAEFIDGEFMKFVQIIYQNDNLIIKRVKSLNAKQYIPQIQEISIDLGLNPLFATNKGDLFGRNFLKSLTEFDRKIQNRAKYLQSKGIKRLKTDKKYSELTNHLREFLKNEVNRILNRIIKIYKPAKLIIEKLNFRSPELSKRMNRLIQNFGKRYIKEKLNRFKEIFGIEVIEVNPAYTSQECSCCGYVDKNNRKNTYYFECKSCGKKLNAQVNGSRNISKRSSLVDVKLYTPKKQVLKVLVKHYLERLNGCNSAPVKLLSENPYFKDSLGNFKPLECGENKCL

SEQ ID NO: 62 - protein, 268 aa, unknown
  TnpB Polypeptide
MLLSIKTKLKLSKTQEIIMCKHAGIARFTYNWGLATWQELYKDGLKPNKYILKKFFNNHVKPEFAWIKETGICQKITQYAFDNLGDSFSRLFSGKGGYPNLKKKGDRDYFTDAGGKPIPVGGKSIKLPTIGWVKTYEGFPHVTCKSITISRTAESWFIAFAYEQEHEPTIKQQEIVGVDLGVKELATLSTGVVFPNPKHYKTNLEKLRRLSRKLARKVKGSNNRNKAKIQLAKHHAMVANLRKDTLHPITTFLCKNHAKIVVEDLNEV

SEQ ID NO: 63 - protein, 407 aa, Nostoc sp.
MRLVERHIIKINHRFYKEIDDLAWRSKNLYNYANYLVRQSFIKDSAYLNNVAVFHLVKKHESYTALPAKVSNQVLMALHRNWKSFFEAQKAYNQNPSKFNGRPKLPKYKDKLKGRNIVIYELGAISKKTLKEGIIKLSKTAIELKTFVNNVKEVRLIPKCGQYVIEVVYELEVVPQQLNPDWVAGIDIGLDNLAALTSNKLGFKPVLVNGRPLKSINQQYNKVKAKLQSYLKGNAKTSIRINALTCKRNNQIDNYLHNASRWIINHLVDEKIGTLVIGKNDQWKQKINLGTKTNQNFVGIPHSRFIEQLQYKSELVGITVLINEESYTSASSFLDLDPIPVYKKGEKHTFSGKRIKRAWYRSSDGRLIHADINASLNIIRKVFPATLSSGIEDIAVYPFRVTPGKVA

SEQ ID NO: 64 - protein, 360 aa, unknown
  TnpB Polypeptide
MQKGLKIRLYPDNKQINILNIIFGHTRFVYNYFLNYSKENKDYKYTNWSRLLTELKNSEETNFLKDADKFALQNSLKNLSVAYSNFFSKRAKEPVFKKKHNLQSYRTNYTNKNIELYDKGIKLPKLGIVKCKYNKNIKNHKIVNVTVKLLKSGIYEASIIYEAETEMLLKTGNSVGIDLGVRKLITTSDNNKYISELDIDRINNKIKKEQKKLSRCKLHSSNWNKQRKKLAKIYQYKGNYMLDNIHKATKAIVTKYDIIYMEDLDIKDLLSKQKLKKHKRKMLTSSLGKITTILEYKCKHYGKELKKIDRYYASSQTCSVCGKTYKVLASEIYKCPHCKLIIDRDYNAAINILNYGIAHN

SEQ ID NO: 65 - protein, 565 aa, unknown
  TnpB Polypeptide
MNNFKELTSIGEILQEYSLKDLEDCNIQPLDLIFEYSYKGPGENESIPLTKEEEDHHKVLIKQKIARREANKTTRRLSESSWSSLIKQKAKNNKKIPNSLNVQENKEMVSKVFNISSITKESNSSLHYNLQASSSTLSKFLLKKDSEKKKKKKTKSKKNPELEEKMRAIKVRIYPSKEKKETYKKLFGYQRKLYNSCLEYIKNNNGLYKLQDLRENFVKASGDFVKQNKQEYPDVPNEFRDNIVLDLIKNIVSNEKKTSKTGKSFTIKRKTKKLGKVNSESFGIQGRTWNKAKTVNSWWFKTFKHELKFKDKTSKFPKINHDIRFLRTSSNKYYICIPISYTEDDLLDNQDSIVTCDPGERVFLTARNTRTNSIDEIGTNIREKIEKLLRPIDFIKEELNKKKDTGKFFHDRKKRYKLQKVKLRRLEKIQNVVSDFHKVIAKNFCENNSLILIPKLNFHFLRNLNKRSKRVLQTISHCKLVDRLKTKSQQYKNCNVQVVREDYTSKTCSNCGNINYDLGSSKYYVCSKIACGFEEDRDHNATNNILYKFLNEKIPITKLAELVCA

SEQ ID NO: 66 - protein, 391 aa, unknown
  TnpB Polypeptide
MYLTERHIIKNNKELDMICFKSKNLYNRALYLVRQHYFETKGYLNYYDVNKILVDSKDTDYYSLPTRISNQVLMLLDKNFKSFFALIKKKKNNKFDKPIRIPKYLDKQGRNIAIFTKSAISKAYLRKGLIKLSSLNILIPTKITDSNIVEVRILPRNNHHVVEVVYKVEEKEHKPNNGRYVSIDLGLNNLATVSSNAIKPFIINGRPLKSINQYYNKEKAKLQSLLKGNKRTSKRINNITLKRNNKIKDYLHKSSRLLVNFLVSNNISTLVIGYNEEWKQNINIGRRNNQSFVNIPFYTFIKQLEYKCKLEGINMIFIEESYTSKCSFLDSEPLRKHSNYKGKRIKRGLFKSAKGKLINADLNGSLNILRKVVGEFQYPIEVCGTPLKVTI

SEQ ID NO: 67 - protein, 439 aa, Geitlerinema sp.
MLTMNYRYRIYPDAVQQTELLEWLETCRGVYNYALRELKDWVASRKCLVDRCSLEKEYIIPANEPFPSYHRQQNNLPKAKKQFPHLGKVHSQVLQTTIRRLHDTWEAFQKRGHGFPRFKRFGQFKSFVFPQFKVNPINGNAIKLPKIGEVSINLHRPIPEGFKVKQVRVLSKVRGTQWYVVVTIESSVLVPDAPVHGRAIGIDLGLERFLTASDGSFQERPKFFKSMQRKLKLLQRRAVRKQKGSKNWEKAQIEVSRLHHRIANRRQDFHLKTAHKLCDQAQTIFAEDLNVKGLTRGMLRKDCVDAAFGQFLYLTEWVCWKRGVYFAKVNPNGTSQTCPNCLATVTKGLEVREHHCPECGYRTHRDHAAAEMVLHRGLENAVAQGLWGTETACQVERADAEPSSASFESSVGLSGVYGLDKWRGAGISNREVGKPALYP

SEQ ID NO: 68 - protein, 200 aa, Clostridioides sp.
  misc_feature (5)..(5): Xaa can be any naturally occurring amino acid
LIYIXTNNQIGLDLGIKEFCISSCGEFIENPKYLKKSLNKLAKLQRELSRKTIGSLNRNKARLKVARLQEHIANQRNDFLQKLSTKLIKENDIICIEDLQVKNMIRNRKLSRLISDVSWSEFVRQLEYKANWHGRQIVKVGKFFASSQICNKCGYKNEEVKNLNIREWICPSCNETHDRDINASINILKEGLRLITIQNK

SEQ ID NO: 69 - protein, 373 aa, unknown
  TnpB Polypeptide
  misc_feature (364)..(370): Xaa can be any naturally occurring amino acid
MRRYRDALNFSIRVIIANRALSLSRAHRLLYKELRERYGLSARAALDCYREAIAIAKSWLRNPRRGGMPIVKGLSMWLTHGLGYRVKGDHVELAGGYRLRVIGWDRRYDSLPSREARLVFRDGEFTLYVFKRAPRPAKYAPKGVLAVDVNERQIVVGNSRVEQRVETPVERALRYRRLAERLQEKYSSSRYNAWLRRSGIRRRVRHFHRKARNIIEDWARRTAHIIVSLAKQGQLAVAREDLTGLVESLRRLPKGHRTALVMLGYRRLGYWIDWQAEKNGVPILVVEPAGTSSTCPRCGSELVEVGHRMLRCPRCGLEADRDTIAILNIERRTLSKMGGSLATPTAPQMTDVNPNRWGEPPHLXXXXXXXYLP

SEQ ID NO: 70 - protein, 389 aa, Nocardia sp.
VQASGLARAAGCARFAWNWGLAWWQSEYERYKAGEREKPPNQLEVRRVLNSLKREQFPWMLESTKCAPQEALINLGRAFDNFCSCRAKYPKFKKKGFKDSFKLSSGNFAVSGNRLRIPNVGWIMMSELPRFDGAIQTVTVSRRAGEWFAALTIDTTEPPKLPATGRTVGVDVGVREFVTQDGDLLQTPRALRKAERKLKRAQQALSRKQSGSANRAKARRRLANLHAKIADTRSDWIHKLTSKLVETYDSIAIENLNVRGMARNRHLAKSVLEAGFYEFRRQLEYKTALAGRTLVVAERWFASSKMCSACGAKTKQRMTLDVREWACKSCGTRHHRDVNAATNLDHLNTPGVPRCQPVESSPPLPTNGTVDGQAASVKQEPDSALNEVA

SEQ ID NO: 71 - protein, 419 aa, unknown
  TnpB Polypeptide
MILTSKHSFKDSNFDKQKYLSIFIDEYRRVSEVILNSIWDEGYKGFNISLNELEFPKYPDYRDFEVETFLTARALSSLVNQLSGIIRAAVEKQRKRIFVFNKKKENEIAKNEMKHLILKLKQNIPRKPNIKNINPELSSKCMEFIRVEGHFNGFIKLQSIIKSKKPIYLPIKFHKHSLNLQSKGYMLGGFGLTKCNVSIRWNIKEPILKPEGIIVGADQGLKTVLTLSDKQTTQETDLHGHSLNSIITKMTKTKKGSIRFKRLQDQRTNFINWSINRLDFSGIKQINLERIWNIGYKNGVSRKLSHWTNTVIRDKVEKRCSLAGVQFTEQDSTYRSQRCHCCGMVRKANRKGKTYSCNSCGFIGDADLNAAMNHEISIPEIPYTLRIAKYNRAGFYWTKDGFYDLAGTSLESVPPVEDV

SEQ ID NO: 72 - protein, 374 aa, unknown
  TnpB Polypeptide
MITYSFKLYCAKRNKKLHNSINLSGHIYNHLIALHKRYYRLYGKHLHIYKIQKHITTLKRTKRYSYWNELGSQAIQDIAERIDRAYKLFYRNLKHGIKSAPPSFKKIKKYKSFTLKQAGYKLHDDNKIIIMGQEYKFHKSRNIEGKVKTLTVKRDALGDIYIYFVCETEKTNIEPRTGKGVGFDFGLKKFLTASNGQDIESPLFFKQNNAKLQKLNRKLSKKQRGSNNRRRAKANLARLHKKVASQRKDYHFKLAKQLSEEYALICIEDLNIKAMQRLWGKKISDLGHSQFVNTLKYQCTKTGTIVVGIPRFYPSSKTCSICGYMHQGLILSERTWICPDCKTCHDRDKNAAMNIYRVGASTLEVETVRPAKTG

SEQ ID NO: 73 - protein, 398 aa, unknown
  TnpB Polypeptide
VSRCRTFRYLLQPTGRQRAALEGLLGVQCELYNAALEERRGAWTWDRRSVSYFDQTRTLTELRALRPEVLACGVVVCRGTLKRLGRAFGAFSRRCRAGDKAGFPRFKSRRRFDSVQWEDTSGWRLIPEQGRLHLLGIGQVKVRFHRPLRGTPKAITVRREGRRYWVSVRCVDVPATLLPTTGRAVGIDLGVRFEVATSDGQLIGAGRPLRRSAERLAVAQRELATKQRGSGHRAKAAERVGALHRRVANQRRDFAHQLSRSLVNHYDLIVHEDLKITNLLRRPRPRKDEDGTGMYRANGARAKAGRNRSIHDAGWGQLLSFTVYKAEEAGRQVIAVDPRYTSQRCSSCGHVEAANRCTQAAFRCLACGHQAQADVNAALNILRAGRARRGLVPVEARK

SEQ ID NO: 74 - protein, 310 aa, Bacillus sp.
  misc_feature (149)..(182): Xaa can be any naturally occurring amino acid
  misc_feature (261)..(294): Xaa can be any naturally occurring amino acid
MKKEFVWLKEVDSIAIQSSVRNLADAYTRFFKKQNSAPRFKSKKNNVQSYTTKQTNENIAVLGNKIKLPKLGLVRFAKSREVKGRIVNATVRRNPSGKYFVSLLVETEVQELPKTNSYIGMDVGLKDFAILSDGTIYKNPKFFRSLEEXXXXXXXXXXXXXXXXXXXXXXXXXXXXXXXXXXAVVGNKIKLPKLGLVRFAKSREVKGRILNATVRRNLSGRYFVSLLGEIEVQELPKTQSSIGMDVGLKDFAILSDGTIYXXXXXXXXXXXXXXXXXXXXXXXXXXXXXXXXXXNGAHGTCVFVSFRLLL

SEQ ID NO: 75 - protein, 342 aa, Bacillus sp.
  misc_feature (31)..(64): Xaa can be any naturally occurring amino acid
  misc_feature (305)..(338): Xaa can be any naturally occurring amino acid
MLAVFQTCTSNLLPLLLPLYLLLYRFVKDPXXXXXXXXXXXXXXXXXXXXXXXXXXXXXXXXXXINKAYKFRIYPNKTQATLINKTIGCSRFVFNHFLSLWDNAYRETGKGLTYGTCSAKLPAMKKEFVWLKEVDSIAIQSSVRNLADAYTRFFKKQTSAPRFKSKKNNVQSYTTKQTNENIAIVGKKIKLPKLGLVRFAKSREIKGRIVNATVRRNPSGRYFVSLLVETEVQELPKTQSSIGMDVGLKDFAILSDGTIYKNPKFFRSLEENLAKAQRVLSRRMKGSSSWNKQRVKVARIHEYMXXXXXXXXXXXXXXXXXXXXXXXXXXXXXXXXXXNKND

SEQ ID NO: 76 - protein, 344 aa, unknown
  TnpB Polypeptide
MIVTVIKVIRSLTFSLRFANTVKKQKLDDLWLVYQRAVNYFILDDEISDEADYRDFDGPIGVRFKQAALRQTQAILRADKDYDRMPELTKPSMTLDQRFIRVEKANNSFDYWIRISTLDKGHPILVPVKSYDHANKYFRRWSLINGGRLLRNDSSEWFIQLVFQKAGRKRSVKKAKGFDVGYRKLLTDSNGKKYGTRIKKLTEKAARKQQGSKADKRVREEIKNYVGATVKEAVTGRFNIAVENLKNLKDNKKGKWNKAINRKFGYWYYSLTLKRMRDRAELFGVRYKTVNPQYTSQTCPKCGHIDKLNRHGERFKCLRCDYSGDADHVGALNILAGGFAQELP

SEQ ID NO: 77 - protein, 307 aa, Okeania sp.
MKSLSSRVYQYAFINLGEAFKRFFQGLGKYPRFKKKGRSDSFTIDNCGKPIELNGWCHKLPFIGWVKTYEPIEATTQKITISRQAGDWYLSLAFECTPTSTPKTTNVVGVDLGVKTLATLSDGKVFESVKSYRKFEAKLSRLQYLNRNKNIGSANWRAAQLKIARLLRRVANIRKDALHKLTTYLAKNHGSAVIEDLNVSGMLANHKLAKSIADQGFYEFRRQLEYKCQWYGCELVVVDRFFPSSKTCSSCGHVQDMPLNLRTFDCPDCGISIDRDLNASINLRNAVGLTVDACGRSAADSSGGSRK

SEQ ID NO: 78 - protein, 384 aa, unknown
  TnpB Polypeptide
MKRAISLKLLTNIGQSAALGALATEFSDACNAIVPAAQEHRCWNRVALHHLAYHRVRQQHPNLGSQMACQAIHRVADAYKTLKANKGIVKDSPVPAITFKPKSITFDGRTYSIAGNVLSLFTLDGRIKVAFVCGKHQQNLLEKGTPKEAKVLIRKGIWYFNLVIEIPDVAPVSGGAVIGIDVGENNLAASSTGKVWGGGQLRHNRDIHLAHRRRLQSNGSRAAKRKLKAISGREQRHVKHTNHEVSKAIVAEAVRVGAGEVRLEDLTNIRANIKTGKRVRARLHRWAFRQLQDFVSYKAQGAGLSVVFVDPAYTSKTCSVCGAIGKRVKHSFSCSCGTRRHSDVNAALNIAGFAKPIGLTRGGSVTRPKFAHRGLRVAVEIPVH

SEQ ID NO: 79 - protein, 209 aa, Salmonella sp.
VGNKFIPYTKIASWLIEWKSAPETAWLKESPSQPLQQSLKDMERGYKNFSQKRASFPRFKKHGQNDAFRYPQGVKLVQGNCCISLPKLGWIRYRNNREVIGEVKNVTISQSCGKWYVSIQTECEVADPVHHAEAEAMVGLDAGVTKPTTLSDGTVYQPVNSFKASQRKLAILQGQLSRKVKFSANWQKQKRKIQRLHSRTGNIRRDHLH

SEQ ID NO: 80 - protein, 487 aa, unknown
  TnpB Polypeptide
VELAHIRKEALALYNYTLKLNPSTEQQKELEKRFRMATDIYRKTLFEIFKRVRNLKKDPLYKKAYKLPKGKERNEILKTLDKKYEINSWHSFVTFANNYRNARQYDLHIPSICACKLGRRAYDTYAKVKFGDAKRVNVPKRIDSFEGGPGNGLRIRNGHLEFSKKTYRMHIPVQFRNSEYEAWVLQDNLKFVRLLRREENFRVQYYIQLVVDGTPPNTHYRSSATGAVGIDIGTSTVAIVSDTKATLQELAPTIDRQADELKRLQRKLDRQRRANNPNNYNADGTIKAGPKRWVESKRQRKTREMIANIQRKQAMTRKLSHNAQTNEVLQLGDTFVVEKMNFKGLQARAKETTVSETTGRFKRKKRFGKSIAHRAPASWVSTLAYKAAYAGKTFIEADTYALKASQYDHTTGEYTKHSLSTRVKQVGESTVQRDLYSAFLLSCVNDAGNEVVQDTATRKFPHFLKQQEDAMNQLTSILQSTGVKHWK

SEQ ID NO: 81 - protein, 387 aa, unknown
  TnpB Polypeptide
MKTTRTIACKLAPTPEQCAELDATLAAFADACNFIADVARREHTTNKVKVQHACYAEVRTQFGLSANLAIRAIARVCAALKVPAKAHSTFAPTSIDYDQRIFSFREWDWTFSLTLLHSRARLDTILGERQKSRLTGQTPTSAVLVKRQDGTFFLHVQITGTAPVPRETHDVLGVDLGRTDIAHTSDDHDWSGQELTAIRDRYSRLRASLQQKASKGTRSTRRRCRELLARLSGREHRFQKQTNHEISKAIVANAVETGRAIALEDLTGIRERTNQQPRTKTERRRSNSWAFYQLRGFIGYKADDAGAVVLRVPPAYTSQMCHCCLHIGERKGKRFVCINPLCGWRGDADLNGARNIRILGCFVAAARGPWLHCPLNVASGLLKATAL

SEQ ID NO: 82 - protein, 377 aa, Borrelia sp.
MSANKAYKYRIYPDANQKKYFSKVFGCVRFLYNKMLSDKKDYYEKNKQSLITYPSKYKEEFLFLKEVDSLALCNAQLDLNSAYSNFFREIKKGNRTQGFPKYKSKKNRQTFRTNNQKNSIRIENDYIKLPKIGFVKLALHRKIKSNELIKNVVVEKDTDDKYYISVAVECLDVKNNDKTKCNKKEIVGIDMSMRHFLVSSEDEKINYPKYLLKNERKLKKCQRKLSKKQKGSRNRAKSRLRVTKLHRKISNQRKDFLHKLSYYFVANYKNIAIENLSIKGMQKGMFGKSVNDLGWHEFVRQLSYKSEWSKSYLHKVDRYFPSSKLCNNCGIKNTTLKLSNTRWTCSGCNILHDRDINAALNLKAYYYKEIKTKAGTA

SEQ ID NO: 83 - protein, 309 aa, Borrelia sp.
LALCNAQLDLNSAYSNFFREIKKGNRTQGFPKYKSKKNRQTFRTNNQKNSIRIENDYIKLPKIGFVKLALHRKIKSNELIKNVVVEKDTDDKYYISVAVECLDVKNNDKTKCNKKEIVGIDMSMRHFLVSSGGEKINHSKCLLKNECKLKKCQRKLSKKQKGSRNRAKSRLRVAKLHRKISNQRKDFLHKLSYYFVVNYKNIVIESLSIKSMQKGMFGKSVNDLGWHKFVRQLSYKSEWCGAYLHKVDRYFPSSKLCNNYGIKNTTLIKLSDIRWSCRSCNTLQDRDINAALNLKAYYYKEIKTKAGTA

SEQ ID NO: 84 - protein, 559 aa, Hamadaea sp.
MVVGVAMVCQACGGPLTVDGQNRLVRDVARPFVVDGPSGVSIRDRLKGLSAEDEKVLRLVGAHLGSLASTDLARRCRDGLGHSNQAWAHRKRELTVVSSSRWAGSITANTHDQWGLSRRAQHDHLKSLEAGVAMIRHRLSLPIGHKGTKRAPGGYRSTHEWFVKSRRLAILQTRLARVRAEREAGRVSVVRGGRRLLHQRHNLAAAGKTEDRWRQQWQASRWFLSADGESGKRYGNETIRVTPDGQISIRLPAPLSGHANSPHGRYTLAARVAFPHRGEEWADRIQDNRAVAYRIHLNIDTGRWYVDASWQRKDLPTVPLESLRAGGVIGVDTNADHLAAWRLDPHGNPVGAPRRFDYDLTGTAEHRDAQLRHALTQLLHWAKRTGVQAIAVEDLDFTTATTREKHGRRKKFRQLISGIPTSKLRARLVAMCAELGIAVIAVDPAYTSRWGAQHWATPMTTPTRKTSRHEAASIAIGRRALGHPIRRRTPPPRQHQSDAGGHRSAQAGPGEQGREGNRPTRTGTRTRSAPPTRPRTRQPSPSNTVRDGRSDRTDHHDHS

SEQ ID NO: 85 - protein, 196 aa, Microcoleaceae sp.
  misc_feature (178)..(188): Xaa can be any naturally occurring amino acid
MITLEFKLKGKAQQYRMIDEMIRTAQFVRNKTLKHWIDNQGVKLVDLYKQCAIMAKEFEWAGKLNSMARQASSERAIFAILRFFSNCQAKKPGKKGCPQFKKHTRSVEYKTSGWKLSSDKRCLIFTDGFAAGTFRLLGSRDLHFYAPDEIKRVRVIRRADGYFAQFCINVERTEESIXXXXXXXXXXXGSKSSASS

SEQ ID NO: 86 - protein, 340 aa, unknown
  TnpB Polypeptide
LRTYIRKDQYTLRWGDRSTIEITVGSDLKDEYDMGSRERLTLEVQGKPNWSGDQGRLELYYDELSDQFRAIHPVTVDDSRQDSPLADETAALDIGANNIVACTTTTGQQYLYEGRDLFEQFRETTRRIAEQQSKVKREEGRYTSKRIRRLYRRRTRRRDHAMDALARDLFERLYEEGVSTVYVGDLTDVLETHWSVRANAKTHNFWAFRAFIDRLSYTAEEFGITVHLRSEAWTSQECPNCGSTEDTTRHQDTLTCSCGFEGHADLTASETFLRRHRKSEISDWQTRHGVSRRRNEADVPRPMARPVCLKWDDHRWSASPRARRPNEEHTHPQVTAGDSA

SEQ ID NO: 87 - protein, 735 aa, unknown
  TnpB Polypeptide
MISKVASISTEIITRIFDIESIENELELDTDVFDKHSSAVNLLIKEGINLSDLIFENESLVAVKQFYTRVTKQPKLKEALRQLKIRERLVRCAAQYAYFSIRNSKSTKCVYTLIAQTLSEKSTWLDLHFEHWKYCDFNKNTSLKYKILLPIEYMRQIREKIDSRKKVNWSSFVINNCFLHLKKHLLKELQQLFIEFSIQKEDIKQILVKQYSEVYKSTLLNKFSARASSMLTRRFKRIKKILVSKGNLSKINKQHLTKVVYQICKTKDLLSVETDEWLLKKELWMIGFKNKINNDMTKDKLLKEIENQLNKNRKIPSNIFLKHLIFPNKFNLRIYLSGDLKKDFISFYIRLINYHIIRLAINQLKHIYLPKVRIFLQKFIEKPMKYLKTPKFTKSSIPLGIDDGQIYKLIYNQNEVNISLSFYPNIRSEYKLVKPERFYELIKRGATPSRGVLMARGSKLKLAIPFLKRLPKLLKEKPLEEQKILNCDLGLKTFATLSITQGNIELQRKFLDQKEINGKKDRWFVNVNEKSPKEKELYFNYANLKSKLLNLQCKVYSIQARLTKLKNKNKLKRKKNKQYPKYNHTKEYWYLRREYKSCWLSIQNIHTEIIHQISTRIVEFAKYNNVDSIRFEDLRWAKHISKMKGGFFLSTWQVHWFFSQIIQFTSKLARREKIRIYLTNPFKSSKICSWCGEEGIRIGKLFQCRNNMCNLSLDSDLNAARNLGNISRNIIPLRL

SEQ ID NO: 88 - protein, 412 aa, unknown
  TnpB Polypeptide
MLTLEFKLKGKETQYRIVDEMIRTFQFVRNKCLRFWMDGQKVKLSEVNAEATKVRHNSEFPWAHLLESSSAQAASERAMSAIRRFYDNCKAGIPGKKGYPKFQKRNRSVEYKVAGWKLSVGRKRITFTDKFKAGTFKLVGSYDLNFYHLKAIKRVRIIRRADGYYCQFCVAVERNINLPPTGRAVGIDVGLAKFYTTSDGETVDNPKHLRKAEKALKRAQRRVAKKFVKPKKKGELVKQSNNYKKACQRLGRRHLTVQRRRRDFVVKTAKALLESSDFIAYEKLNVRNLVKNRKLSKSISDASWTQFLDWVERYGMLYKRPVVAVSPQYTSQDCSRCRTRVKKALSIRTHVCPKCYLMIDRDENAAINILIKGLNIAGIVLNSSTVGHTGINARGENNLCFGLETNSNKLTH

SEQ ID NO: 89 - protein, 405 aa, unknown
  TnpB Polypeptide
MLVFEAKLQGTDGQYRALDEALRTARFVRNSCLRYWMDNKGINKYDLNKYCAVLAREFEWADKLNSMARQASAERAWSGIARFFDNCKKQVSGKKGFPQFKKHQQNLSVEYKTSGWKLSDDRKDITFTDGFKAGTFKLWGTRDLHYYQVDQIKRVRVVRRADGYYTQFCIDQERIESHELTGKNVGIDVGLNHFLTDSAGQQIENPRFLRKDEKALKRFHQRVSRKKKGSANRAKARNRLGRKHLKISRRRKDFVVKTARALVQSNDLIALEDLKVRHMVRNHHLAKSISDAAWSQFREWLEYFGRVFGVPVIAVPPHYTSQDCSKCGVEVKKTLSTRTHSCSHCGHVQDRDWNAAINILKKALQYWAKNTVGHTGINASRENDLCAVEETQQGKPTRGKRKPKK

SEQ ID NO: 90 - protein, 405 aa, unknown
  TnpB Polypeptide
MLVRSMVFRFKNPLPNDAKFLMEDFRLAVNNAIRLGAHSDVTSRFALTNLAYKDFRGEHPGMYAKHLVSAFEVAGSILKNHRRRLRKGLPARVPFVRRLFMRAENQAYKLDRKNGIIDLPIRAGLHIQLELIVSDFHRRYLDDESLSLGSMTLLPDRVVVTIRKHAPKPYAPASVLSFDTNERSLDGVLAKDNRIATVVKVDFCEVSVMQSVHHERRRRLQKKKSYDRRTAKRLCVREGMRERHRIDYQMHEVANAVLSFAEEHRSMIVLEDLSGIRPRMGKCMNRRISIWPRRKLHQIIEYKAAWQGIPVMKVDPRYSSRKCPVCGRIQDSRKGTEFVCGCGWHIDRHINASINLLQTAASEKAAGGLRFDPGAFQHDVVMVLCGPGRTVRPEPNGTSGIRAVA

SEQ ID NO: 91 - protein, 399 aa, unknown
  TnpB Polypeptide
MMAVMRRAFKTRLNVNNKTGNMLARWCGISRLAYNICLMKWNMDYRDGVAKHNYYSIKKWFNSVKYERFPFIKECSKWVPEAAIKDLQNGFTNLFQHRGNHPKLHRKGHNDSFRIDGSVVKIDGRTVRLPKKLTIRMMERIPHERRITKINNITVSHKAGLWFISVNYETDMSVCENQATGVVGIDLGVKTLAVCSDGLTVKNPHVLRKRERRKKHLQRIVARRRKGSKNRRKAVARLARYEYHTACKRRDWLHKATRTIADENAVCFMEDLNVNGMLKNHRLAKSISDGSFNEFKRQLSYKTQVRNIDRWYPSSQICSRCGMRKPMPLPERTYECERCGLTLDRDLNAALNILQVGIANYPELMPVEGDNHLNAIGATDVATAPRETGIDHQKLHEQL

SEQ ID NO: 92 - protein, 804 aa, unknown
  TnpB Polypeptide
MIIKAVWLHNIRSYKDEIVVFPEEGITVIYGDVGSGKTSILSAIGFAIFGNVPGTPSDPLSRFANPTARDLLRKGESRGFIRLWLKSGERNIVVHREIVESGTTVSDRGGWVLIVEKNGKTKYKRLTATEMRNYILETLGIPEEKTRARSRVFASAIYVPQFGIHSILNVSDKERLEIVNRVLNLIKYSYARERIDYVKKVVRRRIRENLEKRESELRSKIAEEEQVREELRRTEEELKRLEEELKELRGKEEELKKVIEELEDKERRLREIAGKIGALKTQLEHLKQEKEREEVRLKGKTVGEIEKELKRKSDELEKFKLELEEVRKRKEEIEEERENVEKELERKIEETSTLTSKISAINGKVDELRKRLSEIEELERKGVCPVCLQPVTHAHAHELKSKIAAEIEELEAKKKQYMENLRRASIEVEKLKQRKEILSTEYSEIESRESKLNEKIKNLLETLSELKTLLEVAKKVSELEAKIENVKRELETVGKASKELDEVTKKLSFMRKEYDDVLRKKEELSTRKGVLQGKISNYESKLEEIEKLREELIAVRNEISKNKFYIEFLDKHVLAIIREVERYVKSKAYVAFKEEFLRIFKTLMMGYENIDVEITPDFKLQFKAKIDGTMVTIDTPSGGQLTSISLAYRLALNRVARAMIPQLREGILILDEPTYGFSPERVELLRKVLFSGEGPKQVIIVTHDRSFYDVSGEERLSIIRLELDPETTKTKIHYENIDPEYVEKVKNTFKAISKKIFSMSIEVTQPVKETFKPEVKVPLSEKVRKKTTSLLDFISQTGEKRDKH

SEQ ID NO: 93 - protein, 407 aa, unknown
  TnpB Polypeptide
VNKTYILPIKQQELAHRLSKLSGRIYSKTVSTIFKLKQSKDIWLNKNDMEKLIKLYASGFAMHSQSKQGAVQQYYTNLKSFFKSMDKTDNANPPYRTRKFNKVIYKKSAIKLKNGFLKLSNGRGTTPLEIKTKSLNQKPKYAEIIYHHKEQVYKLHIVVDIENKQINYDNDKVLAIDLGQIHPMVTFDGEQSFIYNGGKLNSFIRFRNKELSKLQNKMSKCQKYSNRWNKSNRGKKKLMLKSRNKINDVLQKYSSHLISYCIKNNVSTIVIGDIKGIRENISFGTKTNQKLHQWIYRQLTDMIEYKAQSVGIKVDYQEESYTSQTCPKCNKRHKPNNRNYICQCGFSYHRDSIAAINIYRKYTRRTLDKSSRLEGELTSPFGIRYNSNSISCSIEWNIRPFSRDIPA

SEQ ID NO: 94 - protein, 436 aa, Fischerella sp.
MFITVFHFKAVSGTISFMLLTYCYRIKPSVEQIVIMDSWLELLRRHWNDALGQRLDWLKRTRSPIDRYSIVSEPIGEIPERVDYYTQQAALKETKQLFPEYKNIWAESQQFNLQRLDKAWKRWQFPSHDAQRGGRPRFKKPGELRSFVFPRVNCPKAGAFVENGILKLSRIGAMPIRLHRPLPDGFTLKQATVVKKADGWYVCVSMQDESVPSPLPLDNIKTVVGIDVGLKEFLTTSSGETVPVVKPYRQVQNHLARQQRFLSRKQKGSNGYKKQQNKIARIHQRVGRIRENFHYNTAHNLVNRYDLIAVEDLNLRGLARTRLGKSILDVAWGSFISKLEAVAVKRGVHVVKVNPAGTTVECSSCGAKVPKTLSIRTHECTRCYAVIDRDENAARNILQRALNAVGLIVPAGGGLGDTQPVKPEAWGWNGVQLSLF

SEQ ID NO: 95 - protein, 335 aa, Fischerella sp.
LVRQSFIFEGKYLNNAAVFPKVKHHESYTALPRKVSNQVLMVLHRNWKSFFEAQKAYNQDPSKFKSRPKLPKYKDKEKGRNLVIYERGAISKTLLKKGVIKLSQTQIEFATKASNIKQVRLIPQCGQYVIELVYSQDAKPQQLNPDWVAGIDIGLDNLAGLTSNKPGLRAVLVNGRPLKSINQQYNKIKALLQSKLQGNAKTSRRILCITCKRNNRIDNYLHNASRWIINYLASQEIGTLVIGKNQQWKQQINLGKTTNQNFVSIPHARFIEQLKYKAELVGITVLINEESYPLLCRLQRLQHLYSKYFTLLTIYTTFQVDTGITSLKKVSTFHR

SEQ ID NO: 96 - protein, 400 aa, Microbispora sp.
MRTAYKVRVYPTDEQAAVLNRTFGCVRLVWNSVLAWRQARYHAEGVTTSYAQSDRYLTELKRDGGHDFLYEVSSVPLQQALRHQHTAFVNFFAGRAKYPRFKSRHGRQSATYTRSAFRWRDGRLWLAKMDGPIAFVWSWPELDPATLNPATVTISRDPDGRWYASITIETETEAEPLPATGGHAGVDLGVTDFAVLSTGEKIPNPRHLERKARNLARYQRRMARKQRGSNNRAKARAKVARAHTKVRDARADFLHRTSTRLVRDHDLIVIEDLNIKGMVRNRCLARAISDAGWGEFRRQLEYKAQRFGRHLVVIDRWFPSSKTCSACGHLLAELSLSTRHWTCPDCGARHDRDVNAAKNILAAGRAVPACGADVSHSGSSRVRSAAKQEARPVRAGVLRH

SEQ ID NO: 97 - protein, 461 aa, unknown
  TnpB Polypeptide
  misc_feature (52)..(59): Xaa can be any naturally occurring amino acid
MLKAYKYRIYPNEEQKTTFAKTFGCVRLVWNLMLNEKLTAYNIKKKYHSYTXXXXXXXXMLKAYKYRIYPNEEQKTTFAKTFGCVRLVWNLMLNEKHTAYYNKEKIPQVTPAKYKSEYPFLKEVDSLALANTQLNLEKAFKNYFKNPKHFRLPKFKKKKNKQAYTTNNVNNNIKIDFENGLLYLPKIKNGIKIKLHRKFEGKIKSVTIVKTTFGSYYASILVETENVKNKVKEPKNKTCGIDLGLKDFAIITNDTGIYKIEHPKYLRKAEKRLKRLQRALSRKQKGSKNFEKARKRLAIQYEYVSNARNDFLHKLSKAIIDDNQVIVVEDLNVAGMQKTDLAKPVSDSGFGTFVRYLEYKAYWYDRQLIKVDRFYPSSKLCNVCGYKHNELKLSDRYWQCPICGTYHDRDINASINLYKVGMERPDFKPVEHALVDDRIPSGIPKKPSCDEAGSHTFYKVR

SEQ ID NO: 98 - protein, 385 aa, unknown
  TnpB Polypeptide
MMAGMVGKLKKNKKGSDPMPAIPVPKRTITVELIPTKEQEELKDLGDLCSKLWNQVNYERKRQFFNGEHGVDIKGTYNKWYNEYKDMIGTITAQQVLNKNNEAWRSFFSLLRAKKKLLLPFTKKVNPPGYWKDRKERKLIIVLRKDQYKIDEEKQEIELRHLGKFKDLAIRYNGEIYYRGEHGRLEIIYNPVLHKWYAHITLKASEKLNRKTGKWIKVPLTPKGNLVGGIDIGINNLFAVYVSDGTQMLIKTRVLKSISYYFMKLISMKQKLKNVAEEYGITVEFVNESYTSTTCPIHGKGCGERVYRGLFKCTTSNKVYNADLVGAFNMSIIPSPNDGGVEGTTTRGIGISWGKTTPLVYMWTRGSGLVASYDSMRVKRMDQNL

SEQ ID NO: 99 - protein, 428 aa, unknown
  TnpB Polypeptide
VQSVSSARFVTPPLTQRKRDLLDELLDQFAASVNFCIQKCLEHNVTSRASLHHVAYEEWKSRFDLATHWFHSAGQVAIQTLHSWRKFCRQGQTDPKKPPIYEARTMRLELWADRNSTGICRFHGNSVQIRVRQGEYLWLPLVVTEHHELMYLSDWREGKLKTGEITISQFRDRANVFVPFKREVKPKLVEGVCGIDINERSVDLTILKPSERPKHITLDVSKFLAIRHASQLKRKSIQKKLDAPPQRPVQKRRLRAKYWRRERNRTNQILHAVSKQIAERECVAVAFEGIKNIRQSMRSKRKSKNGQALRRDMRRRLNQWPFRKFRSYADYKVARQGLPIVEVSNHHKSKDCPVCGRYNRPNGHAYRCKACGFKAGRHLVASWNIAKDGARHVPADCWQMQPTAEWLVAAEKPSVEPERIPLQFATGF

SEQ ID NO: 100 - protein, 419 aa, unknown
  TnpB Polypeptide
MNEQQRLEKNNRIKQKGKETRLRRLSQDCKVYELKLDKSHLSKAKQEFLHRLFLEAKWLYNYQLSNEIDVDYKLKEVDVLNKDKILEQRDLDTISAQIRQTLVNRTKQNIFSLSKSKKKGNKIGGLKFKSYVNCIPLSQFGITYRIENNNKYIHIQGFKKHFKILGLDQIPEDAEFANANLIRKLNDYYLKVTTFLPKQDKIQTGNYIGLDFGIKDNVVDSNRNKYNFSFPETRQLKKLSRKLNKCKRGSKNKAKLKFKLGLEYEKINNRKKDVKNKFVSKLINENDLIAIQDESIHQWKSSHFRGFGRKIHYSILGGITSSLKHKPETLIIPRTFPSTQLCPNCGSLNKHSLDERIYVCDCGYSEDRDIHSARNILNEGLRLISMEHRNPMLDESETSRFNVELNPSYNSLKQEAIVL

SEQ ID NO: 101 - protein, 360 aa, unknown
  TnpB Polypeptide
MKKAVPMILSEDNFKQIFAFAEQYSKLAKALYNAALFRIRQVFTGWDKGDNRTPLEQSVFDEIECAKEAYGKFSCRRVLSYPSLDKILRANRNPDFFAGLPMQTAQSIVRQAVTDFKAWLEALKAYKKDPSSFTGKPKMPGYCKADKKTFKVTNQDAALYPTKDGKGCLLKLPKMDHNKIPLSYLKDTSNLREIVFKPYYGKYIMTFIIEDMAPPFYPDLPNMAGMDLGTDNIAAIACTDGSSVVYKGGAILSANQFFAKQRASAVSTLTKGKKHRHASSAFLSNLSLKHDCFLKDQMHKLSTAIVRYCIAHRIGILVVGTNRLWKQHASMSKENNQKFVSIPHEKASLDDLLQSIGCRH

SEQ ID NO: 102 - protein, 417 aa, unknown
  TnpB Polypeptide
MKQVLTLVCKLQPTPEQVVKIEATLKAFADACNYANEQVKPQITSKTTIQNIVYEDLRSKFGLAANLAVRACARVGANRKTAKVKGKPIKSFRPTSADYDARIFSFWEEDWAVSLTTVDGRERIKLNAGNYQRGKLKGQKPTSAQLCKHRDHQYYIHIQIKDEAPTPIKSTRVATTEGTSATHSLNNVIGIDFGRTDIAVTSNGDKWDGKQLTKTRDRYARTRSSLQRSASTRTRATRRRARQILVRLSGRERRFQTWLNHNISKFIILSALTNNCLVAIEDLTGIRERTNTQPRTALERRRSNSWSFFQLRTFLEYKGLQFGVEVVAISPRYTSRTCHKCLHIHPDPDKSYRSGKRFKCGHCGWKGDADANGSQVIKLVGIVGAAHVNPLGGSILSCNLLDHIRATEKPPLYRECG

SEQ ID NO: 103 - protein, 437 aa, Moorea sp.
MEKSWFSATLFAAGFQNLQPLAFAQGRQSLKRDLWSIFSESFTSFLAESTGPENRVQKSKKIRIFLRADQRQIINQWLGVSRYVFNKTLEIIFDGEVKANWFAIKTDILNSLPEWCKAVPYQIKSIAIKDACPAIREAKKKYHLTGQINRVSFRSRKNPVQSCYIPKSAVLAQGIYPKKLGELTFAETLAENICDCRLTSTNGYYYLVVPHKTTRNKTENQGRVVALDPGVRTFLTFFSENSVGKIGEGDFSRIQRLCSHLDRLISKISFSKGKQKRRMRKAARRITLKIKNLINELHHKAARFLVDYFDVILLPTFETSQMSKRGSRKIRSKTVRNLLSFAHYRFKEFLKYKALLTGKLVVDVCEAYTSQTVSWTGERVLIGGSKIIKSKIDGQKMDRDINKWRSWNISAGFSRYTLGEKSSCIGGLICILVDIGS

SEQ ID NO: 104 - protein, 401 aa, Moorea sp.
MLVMEFKAVLTKPQELATTEAIRTARFVRNKVLRFWMDNRGIGKKELYRYNTQLRDEFEFVKHLNSQACQASVENVERAIKRFFDNCKKKVPGKKGYPKFKKHSRSVEYKQTGWKLLPDKKAIKFTDKKGIGQVKLKGTWDLWRFDQKLIKRVRIVQRADGYYVQFCVKVDNKSEPLQATGCNVGLDVGLKEFYTDSDGYSEPNPRFYRKGEKRLKFYQRRVSRKKKGSANRKKAINKLGRQHLKISRQREEHAKRLARCVIRSNDLIAYEDLRVKNLVKNHCLAKSINDAGWYQFRRWLEYFGEKFGRITVAVNPAYTSQTCSACGAIVKKSLSTRTHICECGCELDRDHNAARNILTRALSTVGHTGTFLNAWGDLSSTLPGSGLVGQDESVNQESPGL

SEQ ID NO: 105 - protein, 478 aa, Moorea sp.
MSLAVEAELFEMMQRLGVVRSESYNKLGSVNHWGIDWRKAYSFVRSFRTPESLGLPSKLMEWTVSDVAKAISAQQAACIEALGKILHKRFPGQENKKRRNECYKQLSSPSFVDNPFLHRIVRKQFQRGHSSTRNQIVYQQGGYSCKRISRHTYQLELAGLHRGKRNRILVRSNRKITGQIRVIYNLQLQRFEIHFLVNYGVVNVSSERRSLGVDKGYTEAFYDSDGRTHGRGLGKLASRKSVRVAWPFGHRIAKKNRNRGKLWALHRKLKKIDPAKSARILHNNLSRKTENRRYRKDQAGILAIIGTASKSLFKGESLKVFAEDLTQPMKSKRQSKAMSRKLNSWMKGAMRDSLQKWANWTGSVVSEIQPSYTSQIDSFSGTLLGVRKGDRFTRFNGVVLQADHNAARNILARGTDKDISRFMTRVEVQAILLRRTARFLKGMDLSLVDAVKLGWLDSKHSRNQAFKELLIGMSGTSR

SEQ ID NO: 106 - protein, 435 aa, Moorea sp.
MYGCQQHLITTNADNKAIIEFISSEANKLTNCGIYYCRQVLFKAGKYLTNADLDKIMKTNVHFKAMRSACAQQTLHGVIESFKSYKALSKLYKKGQLANKPRVPKYRKKGGMTVVSYPARWVKLIKGQLKFTLGKQIKAWFGIDHFFLPMPSNLDHKSIKEYRFVPRNGCFYLEFVYERPTPEAVKQTGNVLGIDPGLNNWLTCVANTGKSFIIDGRSIKSQNQWYNKQVAGIKKGKTQDYWDDNLAKLTEKRNRQMRDKVNKAARFVINWCLRNQVSTVVFGWNKRSKDSINIGKKNNQQFVQIPTAKLKKRIEQLCVEYGIKFIETEESYTSKASFLDRDFLPTLGEKPKGWKESGKRVRRGQYLSGKGELINADCNGACNILRKVETQLGKTLAEVCRAVLNLPQRYNLSSLSRSYREASLRVVLTREAISA

SEQ ID NO: 107 - protein, 489 aa, Moorea sp.
MPRKEGVTKRISTQVVPVAGMTKSVELELLQVMKKLGIVRAESYNKLGSINHWGLDWKKAYPEVRSFRTPESLGLPSKLMEWTVSDVAKAITAQQAACTEAVVKRIYKRFSGTYNQKRRKELCRQLKTLAFLENPLLHRFVRKEYQRGHSWVNNQIVYQQGGYTCKQLSRNTYQLELAGLRRGKRNKVIVRSNRKLKGQIRLIHNHVLPRFEIHFLVDHGTVEIPSELKSVGVDKGYTEAFYDSDGHAHGKGLGKKTTKKSDRICAKNRNRGKLWALHRKLEELNPSRSARILKNNLSRKTENKRYRQNQSELTAIIGAASKSLFNGESLKVFAEDLTQPIKNKRQSKAMSRKLNSWMKGQMRDSLQKWANWTGSVVTEVQPSYTSQIDSVTGTLLGKRSGDSFTRFNGVVLQADHNAAKNVLSRGTDQDITRYMTKTEVQAVLLRRTARFLEGMGLSLLDAIELGWLDCKHELCSGFQGTPGRDARNV

SEQ ID NO: 108 - protein, 484 aa, Moorea sp.
  misc_feature (404)..(437): Xaa can be any naturally occurring amino acid
MFVLEFKVNPKPTQISAIEEAIRTTQFVRNKALRYWMDHRGVGKKELFRYNTLLRKEFKFVEDLNSHACQVGIERVVRAINRFFENCKKSKPGKKGYPRFKKRSRSVEYKISGWKLSENRKHIEFTDKKRIGRLKLIGSRDLNYFQPEQIKRVRILRRADGYYVQFIIALDPRDIVPAIEPSQKALGLDLGIKYFLAQSNGQTEPNPQFYRKSERQLNRANRKKSKKFRKGKPQTQNYIKARQRYARKHLRVSRQREEFAKRVALRLIQSNDLVAYVRAACRRQDLNVKGLLKNRRLSKSISDAGWSTFRRWLEYFGYKYSKVTVAVPPHNTSQNCSNCGKKVQKSLSTRTHICPDCGLIEDRDVNAALNILQLGLSTVGHTGTYSAVRSNQELSETERVWVGXXXXXXXXXXXXXXXXXXXXXXXXXXXXXXXXXXVLGKMPVLGKMPVLGKMPVLGKMPVLGKMPVLGKMPVLGKMPVPQNF

SEQ ID NO: 109 - protein, 277 aa, Moorea sp.
SSIVRFYDNCQNKIPGKKGFPKFQKRARSVEYKKSGWKLYPEKKSITFTDNKGIGKLKLKGTWDLWRFDKKQINRVRIVKRADGYYVQFCVAVNAKEEVEQTGNMVGLDVGLKEFYTDSNGHSEPNPRFYRKGEKRLKFYQRRVSRKKKGSTNRNKAINRLGKHHLRISRQREEHAKRLARCVVKSSALIAYEELRVINLVKNHCLAKSINDAGWYQFRRWLEHFGTKFGRITVAVNPAYTSQNCSNCGEVVKKSLSTRTHVCKCGCELDRDHSAIR

SEQ ID NO: 110 - protein, 252 aa, Moorea sp.
  misc_feature (215)..(248): Xaa can be any naturally occurring amino acid
MEFKAVLKESQKVAINEAIRTARFVRNKVLRFWMDNRGIGKKELYRYNTQLRDEFEFVKHLNSHACQASVENVERAIKRFFDNCKKKVPGKKGYPKFKKHSRSVEYKQSGWKLSPDSKSIKFTDKKGIGQVKLKGTWDLWRFDPKLIKRVRIVQRADGYYIQFCVKVDTSEQLQATGCNVGLDVGLKEFYTDSDGYAEPNPRFYRKGEKRLKFYXXXXXXXXXXXXXXXXXXXXXXXXXXXXXXXXXXPSTN

SEQ ID NO: 111 - protein, 389 aa, Moorea sp.
MEYKAVVKKSQKVAIDEAIRTSRFVRNKVLRYWIDNKGVGKKELYRYNTQIRDEFKFVKDLNSHACQASVENVERAINRFYDNCQKGKPGKKGYPRFKKHSRSVEYKQSGWKLHPTKIRIKFTDNKGIGEVKLLGKWDIHTFDLKLIKRVRIVKRSDGYYVQFCVKVENSRPAPETNTEVGIDVGLEYFYSDSNGNHEENPKFLRKAEKDIKRSQGKIYKKKKGSSGRKKARGIYSRKHLRVTRQRNEHAKRLARNLCLANAKIVLEDLNISGLVRNHKLAKSISDASWYNFRQWLEHFGVKFGREIIAVPPHYTSQECSNCGVRVQKSLSTRTHSCPHCGYVEQRDVNAAKVILSRVSATGGRPESNASGDVSSTSVGRKTCRGKKRL

SEQ ID NO: 112 - protein, 411 aa, Moorea sp.
MIILEFKAYGKKKQYQSIDEAIRTVKFVRNSCLRLWMDNKGLNKYDLNKYCKTLAKNFSFANELNSTARQAAAERAWSSIARFFDNCKKKVPGKKGFPRFQKHCRSVEYKQSGWRLSPDNKSIVFTDKKGIGKLKLKGTWDLWRFDKKQIKRVRIVRRADGYYVQFCVSVKITEELEPTGTAIGLDVGLKDFYTDSTGQTQPNPRFYRTGEKRLKLYQRRVSRKKKGKAVGHASRTANRKKAINRLGRQHLKISRQREEHAKRLARCVIRSNDLVAYEDLRVKNLVKNHCLAKSINDAGWYQFRKWMEHFGTKFGKVTVAVNPAYTSQNCSECGEVVKKSLSTRTHVCQCGCHLDRDHNAANNILKRALGTVGHIGTLVLDQNALGELSSTLPDSGLVEQDGSVNKESPSL

SEQ ID NO: 113 - protein, 445 aa, Moorea sp.
MRSAYQYRLRPTKAQVKKIEKWLDMLRHQYNYLLADRFNWYEQNRCSINSCPLVCHLPNLRNNPDYFSQKRTLPQLKKNRPWYGELHAHVLQDCVKRVDLAFKGFLKGDSNEKKSGRPRFKGKNRYKSFTFPSLGKSPINGNTLTLPKFGKVKMIYHRPIPEDFKIKTATITRKADGYYVTLSIQDDSVPDVIPVDSASNPVGIDMGLKSFLVKSDGTEVPIPQYYRKAQKRLKKIQKAVSRSKKGSNNRKKVVSKLGKAHKKVADTRKDFHFKTAKKLLENHDLVAHEKLNIKGLAKTKMAKSVLDAGWGQFLSILSNKAVRVAWPTALNAGLVTVAVNPRNTSQNCSNCGKKVPKKLKDRIHSCPHCGYIADRDVNAAINILNLAVGHPVRSKACRATVRVASAKADRDTWCWQEARVVPLGQRREYVTKTLVLKEPRLIADS

SEQ ID NO: 114 - protein, 304 aa, Moorea sp.
MEFKAVLKDPQKTAIDEAIRTSRFVRNKVLRYWMDNRGIGKKELYRYNTQLRDEFKFVKDLNSHACQASVENVERAIKRFFDNCKNKAPGKKGYPRFKKHSRSVEYKQSGWKLSPNKKSIKFADKKGIGVVKLKGTWDLWRFDPKLIKRVRIVKKADGYYVQFCVKVDNNEQLEAAGLIIGLDVGLKEFYTDSDGYSEPNPRFYRKGEKRLKFYQRRVSRKKKGSTNRKKAINRLGRTHLKISRQRNEHAKRIARCVIRSNDLVAYEDLRIKNLVKNHCLAKSINDAGWYKFRGAIRWLETIPK

SEQ ID NO: 115 - protein, 414 aa, Moorea sp.
MRSAYQYRLRLTKSQVAKVEKWLDMLRHQYNYLLADRFNWYEQNRCSTISCPLVCHLPEPRNNPDYYSQKRTLPQLKKDRPWYQEIHAHVLQDCVKRVDLAFKRFLKGDCNGNRSGKPRFKSKNRYRSFTFPSLSKSPINGNLLTLPKFGQVKMIYHRPIPDGFKVKTATITRKADRYYVTLSIQDDTVPEIMPIDNVSNPIGIDMGLKSFLVKSDGTEVEIPQYYRKAQKRLKKIQKAVSRSKKGSNNRKKAVLKLGKAHKKVADTRKDFHFKTAKGLLDDHDLVAHEKLNIKGLAKTKMAKSVLDAGWGQFLSILSVKAVRVAWPTALNAGLVTKAVNPRNTSQNCSNCGKKVPKKLKDRVHSCPHCGYVADRDVNAAINILNLAVGRPVRSKAYRATEPVGGVGKKPALSR

SEQ ID NO: 116 - protein, 406 aa, Moorea sp.
MIIYEMKLEGTQSQYRSLDLAIRTGRFVRNSIIKAWMDGKIKSRNHAYSYCKVLSDNPQFPWAKKLNSMARQAHAERAWSAIERFYQHYKHKIPGKKGYPKFNKYQVRASVEYKTSGWKLSEDRRYLTFSDKFNAGTFKLWGSRNLHFYQLKQIKRVRVVRRHDGYYAQFLIDHQREQKKELTGQQIGLDLGLNHFYTDSSGEQIDNPRFLRQDERRIKKLQRRLSRTKKGSQNRKKARNRLGRMHLLVSRRRNDWVCKLAQHVIQSNDLVAIENLRIRNMVKNHKLAKSISDAAWYRFREWLEYFGKVYGVPVIAVEPAYTSQNCSNCGEKVVKTLSTRTHKCHHCGYVADRDENAAINILKSALKQLSNTVGQTEINASGEIDLCLNGETQASKSARRKRKVSQ

SEQ ID NO: 117 - protein, 460 aa, Moorea sp.
VYRTIPVRANFSEEERVFWEFQCKQANSLLNCAIYYAKQKHYQWLEQSEAFTTYWRGDELKAGWKTYKCKVGYSELCKELKENAHYKGMAAQSAQQTLKSVAESLASYNQLVCFYYKGEAVRPLFPRYRKKGGYAAVTFPRQALTYKQGVFYPSVSKESKPELLTLITLDPPDFIDPDWVKEVTVRPCYGQLWIDWVIDDGKEPVSVNSKLDYSQALGIDHGGDNWLTGVTTLGKSFIIDGKKLKSMNQGYSRLVAKYKMGKPEFYWDSNLDRIQLRRNNQMRDAINKAARFIVNRCLVDGIGNVVIGWNEGQKQRSNLGNKRNQRFVVIPTKRLINRLEQLCYEYGINLIITEESYTSKASFLDGDSLPKHGEKPAGWNPSGKRVRRGLYRTTSGKLINADANGAANILKKVTTQSFDMTKVAREALTLPHRYDLFNSMSKSYRYKSEEGRVYPPSSLL

SEQ ID NO: 118 - protein, 423 aa, Moorea sp.
MRTAYQYRLRLTKQQEADIERWLDMLRHQYNYLLADRFNWYEQNRCSINSCPLICHLPELRNNPDYFSQKRTLPQLKKDRHWYKEIHSNVLQDCVKRVDLAFKRYLKGDCNGKRSGKPRFKNKARYRSLTFSAFSKEPIKGNRLNLPKFGWVKMVYHRPIPDGFKIKTATLTSKADGYYVTLSLEDDTVPSVIPIEEVSNPVGIDMGLKSFLVKSDGSEVPIPQYYRKAQKRLKKIQKAVSRSKKGSNNRKKAVTKLGKAHKKVADTRKDFHFKTAKELLNSHDLVAHEKLNIKGLARTKLAKSVLDAGWGQFLSILSTKAENAGLISKAVNPRNTSQNCSNCGKKVPKELKDRVHSCPHCGYTADRDVNAAINILNLAVGHPASSKAYRVTVRAAEAKADTVGWCWEEAYTEPVKVSVGVCH

SEQ ID NO: 119 - protein, 174 aa, Moorea sp.
MTGEVLPLIGDIDSNIGSVKLKGTWDLWRFDQELIKRVRIVQRADGYYIQFCVKIDNSERLEATGFTVGLDVGLKEFYTDSDGQSEPNPRFYRKGEKRLKFYQRRVSRKKKGKAVGHASRTANRKKAINKLGRQHLKISRQREEHAKRLVRSYRKNKEAFMVSRLCIKGLNLCY

SEQ ID NO: 120 - protein, 404 aa, Moorea sp.
MNQRAYRYRFYPTTEQESLLRRTLGCTRLVYNMALAARTQAWYENQERVGYAQTSSMLTSWKKQEEFSFLNEVSCVPLQQGLRNLSAKPTLREQKAFTNFWAGLTKYPNFKKKHHGGSAEFTKSAFRWKNGEVFLAKCSQSLPIRWSRQIPANCTPSTITVNLDARGRWYVSLLVDDHTIKPFPEADTSIGLDLGITSLIATSNGDKIANPKHFKRLHKKLRRAQKALSRKQKGSNNRKKARLEVARVHGQITDTRKDFLHKLTTQLVRENQTIVVEDIAIKNMVKNHKLALAISDASWGELTRQLDYKCQWYGRKLIKIDRWFPSSKRCGNCGYIVDKMPLNIREWKCPKCGINHDRDVNASQNILAAGLAVSVCGANIRPDNHRVEGQLRKSRSGRKQKPKS

SEQ ID NO: 121 - protein, 408 aa, Moorea sp.
MFNVGLYNVRQYFFQERKHLRYESNYHHSKENENYKLLPTDIAQQTLKIVDRYFKSFFGLLKSKAKVGYKKKARLPGYLPKDGHFILVIPVRKRDWDKLPGKNWLFTVPMSRQLKKEYGVVQFTIPERLRSKTVKEIRILPKYKTRYFDVGYCYEDDSETEVEKTDEILGIDLGIDNFATCVSTTHKSFIIDGKKIKSDNQYYNKRNAKLQSIKDLQGIKALTNRQARLLIKRNHKIRDFTNKADGAYKVRTQVPHTAPSRYVVNWCREHKISKIVIGYNPDLKQRVNMGKRNNQKFTQIPIYTFKDKLESLCRRYGIEFAEQEESYTSKASSLDKDKLPVWNADNPKKYTFSGKRVKRGLYRTSEGWLINADCNGALNIIRKHTSKPDGFIGGFRGCLAQPLRVLCS

SEQ ID NO: 122 - protein, 401 aa, Moorea sp.
MRAAYQYRLRLTKSQTEKVEKWLDMLRHQYNYLLADRFSWYEHNRCSLNSCPLVCHLPEPRDNPDYLSQKRTLPQLKKNRPWYADIHAHVLQDCVKRVDLAFKRFLKGDHNGKKSGRPRFKSQSRYKSFTFPSLSKIPIDGNVLTLPKFGKVKMIYHRPIPEGFKVKTATITRKADGYYVTLSIQDDTVPEILPVESVTNPIGIDMGLKSFLVKSDGSEVPIPQYYRKAQKRLKKIQKAVSRSKKGSNNRKKAVSKLGKAHKKVADTRKDFHFKTAKVLLDRHDLVAHEKLNIKGLARTRLAKSVLDAGWGQFLSILSTKALNAGLIAKAVNPRNTSQNCSNCGQKVPKKLKDRVHSCPHCGYTADRDVNAAINVLKLAVGHPASSKAYRATVRAASGKAR

SEQ ID NO: 123 - protein, 394 aa, Moorea sp.
MTELLEVLTVNGKPFQRSLNMYKALKTKLKLNNHQKTLMAKHAGYSRWVYNWGLAIWIEAYKDGLTPSARKLRKLFTNHVLPQYPWMNQLSSKVYQYAFIDLGVAIARFFKGLGGYPRFKKKGKHDSFTIDNSGAPIKLSGLRRKLPKLGWVRTYEPLPDVITKKITISRQADGWYLSFHYDHESRPTPKPVDVVGVDLGVKELAVLSTGLVFSGSLPYRQAKKQLARCQRNLSRKVFGSNNWYKAVTRLARKHQRVANLRKDTLHKLTTYLAKNHGTIVIEDLNVSGMMANHKLASSIADQGFYEFKRQLEYKCEWYGSQLVIVDRFYPSSQLCSGCGHRQKMPLKIRTYNCCECGLILDRDLNAAINLKNAVGSTVSACGRSAADGSGRSRK

SEQ ID NO: 124 - protein, 295 aa, Moorea sp.
MFGIKRELKVNNSEANWLSQCAGFSRFVYNYGLGIMKSSWEFEDIRANDSKRLNTIKKVFTNVTKKNPDFAWCNKYPARIYQNAFRNLAKAFSWWRDPKIKAQMPTFKKKRHQCSFTVDDSNGKRLVKAGKTINIPTMGTFRLKEAIPYDCISQTFTISREADNWFVSFFVDACPMPGMKHTQQKVGIDLGVKCFATLSDRTKIEMPKSIKKAKIKQSLLQWRNRKKVLGNGQTKTQPSQNAQKYYQRLRKQHKHIGNIREDFLQKETTRLAQTYQEIKIEDLNLSGMLANHKER

SEQ ID NO: 125 - protein, 216 aa, Moorea sp.
LTFSEALPENRGDCRLTSNNGDYYLTVPHKTTHKKAENQGRVVAIDPGVRTFLTFFSENSIGKIGHGDFSGIQRLCTHLDNLLSKISKAKRNQKRRMRKAARRIVIRIKNLVNELHHKAARFLVDNFDVILLPTLETSEMSKKAKRKIRSKTVRNLLTFSHFRFKEFLKHKASETGKTVVDVCEAYTSLTVSWTGEMVNIGGSKTIKSKIDGRVMD

SEQ ID NO: 126 - protein, 250 aa, Moorea sp.
LWRFDKKQINRVRIVKRADGYYVQFCVAVNAKEEVEQTGNMVGLDVGLKEFYTDSNGHSEPNPRFYRKGEKRLKFYQRRVSRKKKGSSNRKKAVNRLGRQHLKISRQREEHAKRLARCVIRSRSVGFAESNDLVAYVRAACRRQDLRVKNLGKNHCLAKSINDAGWYQFRKWLEHFGTKFGRITVAVNPAYTSQNCSECGEVVKKSLSTRTHVCECGCELDRDHNAAINIRNRAISTTGHVGTWIINPFA

SEQ ID NO: 127 - protein, 457 aa, Moorea sp.
VYKTVPVRAVFSEEEIAFWVFQCEQANSLFNCAIYYAKQKHYEWLKEQEAYTTFWRGDELRCRWKTYKCSTKYPELDIALKMSPHYKGMAAQSAQQTLKTVGEAIASYNQLVGLYYKGNVDRPRFPRYRKKGGLAAVTFPRQALTYKEGLFYPSVSKESKSELLTKITLDPPDFIDPDWVKEVTIRPYYGQLWIDWVIDDGKEPVKENPNLDYSQALGIDHGGDNWLTCVSTLGKSFIIDGKKLKSMNQGYCRLVAKYKEGKHEFYWDAHLDRIQRKRNNQMRDAVNKAARFIINRCLVDGIGNLVIGWNEGQKCRSNMGKSGNQKFVAIPTKRLIERLKQLCSEYGIKLIITEESYTSKASFLDGDSLPKVGEKPEGWKPSGKRVRRGLYRTAKGKLINADCNGAANIIKKATTQLIDLAKVGRGSLTVPHRYDLFESLSKSYRKKSEVARVHPAT

SEQ ID NO: 128 - protein, 406 aa, Moorea sp.
LRAAYQYKLRLTRRQQIEIEKWLDLLRCQYNYLLADRFNWYEQNRCSINSCPLTCYLPELRDNPDYFSQKRTLPVLKKERPWYKVVQSQVLQDCVKRVDLAFKRFLKGDSNGKKSGRPRFKSQSRYKSFTFPSLSKNPIAANILTLPKFGKVKMVYHRPIPEGFKVKTATITRKADGYYVTLSIQDDTVPKVLPVDDVANPIGIDMGLKSFLVKSDGSEVPIPQYYRKAQKRLKKIQKKVSRKKKGSRNRKKAVARLGKAHKRVSDTRKDFHFKIAKEILDNHDLVAHEKLNIKGLARTRLAKSVLDAGWGQFLSILSTKAENAGLLVKAVNPRNTSQNCSNCGQKVPKRLKDRIHSCPHCGYTEDRDVNAAKNILKLAVGHPVSSKACRATEGIPGVGKKPALSR

SEQ ID NO: 129 - protein, 462 aa, Moorea sp.
MIIIEFKAYGNPHQYLAIDEAIRTVKFIRNSCIRLWIDNKGTGKYDLSKYSKVLAKEFSFANELNSTARQAAAERAWSSISRFFENCKKKVPGKKGFPKFQNHCRSVEYKQSGWKLSPDKKSITFSDKKGIGKLKLKGTWDLWRFDKNQIKRVRIVKRADGYYIQFCVSVDVKEQLEPADATLGLDVGLKELYTDSRGNTEPNPRFYRAGEKRLKFYQRRVYRKKKGSSNRKKAINKLARQHLKISRQREEHAKRLARCVIRSNDLVAYEDLRVKNLVKNHCLAKSINDAGWYQFRKWLEHFGQKFGRVTVAVNPAYTSQNCSECGEVVKKSLSTRTHVCECGCELDRDHNAAINILKRALGTVGHTGTWIIDPNASGDLTSTVLGSGQVQQVGSLSEESPGLMTGECQEILFHTDNCPTTSVGLPESILGTCIVYIFAGIIVVNQHHQSWTVLLVSVLKHF

SEQ ID NO: 130 - protein, 196 aa, Moorea sp.
RGWLAINRFYANCKSKKPGKKGYPRFQKDNRSVEYKTSGWKLHLAKRRVTFTDKKGIGTLKLLGKWDIHTYPVKSIKRVRLLRKADGYYCQFCIDVDCVDIQPKTGQEIGLDVGLESFYTDSNGYQEPNPRFLRKAQSDIKQAQRRIYKKKKGSTQRRKARARYSRKHLRVSEALTRTLRDWQRNEHAKRLGRVCK

SEQ ID NO: 131 - protein, 461 aa, Moorea sp.
VYKTIPVKANFSDEERVFWEFQCQQANSLFNCAIFYVKQKHYQWLEEQEAYSTYWRNDELRAGWKTYKCSTKYAELCRELKDNTHYKGMAAQSAQQTLKTIAESIASYNKLVGLYYQGKVDRPRFPRYRKSGGFAAVKFPRQALTYKEGLFYPSISKESKPELLTQIALIPPDFVDPDWVKEVAIRPCYGQLWIDWVIDDGRQPVTSNPSLDYSQAIGIDHGGDNWLTCVSTLGKSFIIDGKKLKAMNQGYCRLVAKYKTGKPEKYWDYHLDIVQLKRNNQMRDAVNKAARFIINRCLSDGIGNLVVGWNEGQKQRSNMGKRGNQSFVAIPTKRLIGRLKQLCCEYGINLIVTEESYTSIASFLDGDSLPNHGAKPVGWKPSGKRARRGLYRTASGKLINADANGAANILKKVTTQSFDLTKVARGALTLPHRYDLFNSLSRSYRHKGGAGRVNPSCVTSL

SEQ ID NO: 132 - protein, 329 aa, Moorea sp.
MSDVPEWVGKTPYSPRESAIFQAFEAHKAAKKVNGETKFRRFSDQVQSIRFNKVNFRKGTFYPKQTKGLAFSSSEFLPEKMSHDPILTVDKGRWFISFVIDEKPTYAIPPKRSIALDPGVRTFLTGFDGQKFIDLGAGDIGRIYRLCCHLDNLISKAALAKGSSNKRRRFKQRKAAQRVRIKIRNLIDEAHKKISCFLTSEYQVIYLPKFETSQMVNKLKRKIRSKTARGMMNWAHYRFKMTLKHQAIKRGCFVVDVTEEYTSKTCTRCGHVHNKLGGTKKFTCPKCGHTLDRDHNGAFGIYLKALRDTSSSIIDVLYTASGFCQELPG

SEQ ID NO: 133 - protein, 243 aa, Moorea sp.
MRLAYQYKIKPTKAQKAVIDNWLSMLCAQYNYLLADRFNWYEQNRCSVNACPLVCHLSELKENPDYYSQKKTLPNLKKTHPWYTQIHSQVLQDVVKRVKLAFDRFIKGDSNGRRSGRPRFKKRHRYRTFTYPQMKEGCLEGDLINLPKIGMVKVVLHRPIPAGFKIKTASITKKCDGYYLVLSLEDKTVPEVKPDINPDSMIGIDVGLKDFLTKDPEGASPWILSMGLARTGIYSLTARKFSS

SEQ ID NO: 134 - protein, 209 aa, Moorea sp.
MEFKAVLKEPQKLAINEAIRTARFVRNKVLRYWMDNRGTGKKELYRYNTQLRDEFKFVKDLNSHACQASVENVERAIKRFFDNCKKKVPGKKGYPRFKKHSRSVEYKQSGWKLSPDKKSIKFTDKKGIGKLKLKGTWDLWRFDSAKPTLREQKLIKRVRIVQKTDGYYVQFCVKVDDSEQLEATGFTVGLDVGLKDFYTDSDGYVRFVG

SEQ ID NO: 135 - protein, 531 aa, Moorea sp.
MQTMASSNANEPQAGTECSIQLVLPLWGNEKLPSQSQFVTAESVAASKKTISPGKSHTCIPCSQKRKSSRISVQDSTTKGKGLEPYWNDLCKDVSSLLLLPVETDSLDSGLNCLNTWQSSTVAKSWFSTSLKAVEDPNSQRIFSESFTSSLVGFTDSESTGQKSKKIRIFLNAEQRSIIRKWFGVSRYVFNKTVKILQNGEIKANWKAIKTGILNDLPEWCKAVPYQIKSIGIKDACTAVRESKKKYKKTGQINRVRFRSRKNPVQSCYIPKSAVSEKGVYHTKLGTLTFSESLPDHRGDCRLTSTNGDYYLTVPHQTTQTKADNQGRVVAIDPGVRTFLTFFSENSVGKIGHGDFSRIQRLCTHLDNLLSKISKASRNQKRRMRKAARRIIIRIQNLINELHHKAARFLVDHFDVILLPTFETSEMSKKGKRKIRSKTVRNLLTFSHFRFKEFLKHKASETGKIVVDVCEAYTSKTVSWTGEIVNIGGSKTIRSLIDGRVMDRDINGARGIFLRALVDTPWLSNQLALVS

SEQ ID NO: 136 - protein, 427 aa, Moorea sp.
MISAYQYRLRLTKSQEAEVERWLDLLRHQYNYLLADRFNWYEQNRCSINSCPLVCHLPDLRNNPDYFSQKKTLPQLKKDRPWYKVVQSQVLQDCVKRVDLTFKRFLKGDSNGKKSGRPRFKGKNRYKSFTFPSLSKNPINGNILTLPKFGKVKMIYHRPIPEGFKVKTATITRKADGYYVTLSVQDDTVPKIIPVDSVVNPVGIDMGLKSFLTKSDGTEVPIPQYYRKAQKRLKKIQKAVSRSKKGSNNRKKAVTKLGKAHKKVADTRKDFHFKTAKNLLDNHDLIAHEKLNIKGLAKTKMAKSILDAGWGQFLLILSNKAENAGLVTVAVNPHNTSQNCSNCGTKVPKKLKDRIHSCPHCGYTEDRDINAAINILKLAVGHPVRSKACRATVRVASAKADRDTWCWQEARVVPCLATSGVCHDVKT

SEQ ID NO: 137 - protein, 475 aa, Moorea sp.
MYKTIPVRATFLEEEKAFWLFQCEQANSLWNCAVYYSKQKHYSWLEQQPEAFTTYWRGDELRYGWKTYKCALKYPELCKELKSNPHYKAMAAQSAQQSLKTVAESIASYNQLVGLYYKGQVDKPKLLRYRKKGGLAPVTFPRQPLKYKNGLFYPPISKESKAELLTEIALEPPDFIDPDWVKEVTVRPYLGQLWIDWVIDDGKQPIEKNPNLDYSQAWSFDHGGDNWLTGVSTHGKSLIIDGRKLKSLNQGYARLVAKYKAGKPEFYWDANLDSPKATLRERVQRKRNNQIRDAINKAARFIVNRCLNDSAQPTLRERIGNLIIGWNEGQKNSLNMGKRGNQNFVVIPTKRLIERLKQLAFEYGIKLTITEEAYTSKASYLDDDSLPKHGEKPKGWTPSGKRVRRGLYKTSKGWLVNADCNGAANIARKVATQLGLNLAKVGREFLTVPHRYDIFKSLKKSYRKRSGEARFQPAL

SEQ ID NO: 138 - protein, 448 aa, Moorea sp.
MAKTKNKMGVQQILLHPDKETKAILTYLCEQSGKLYNMAVYFARQTFFKTGKILTGKFDLIYEESVGKTQIAKSLPSTPAQQTLLSVTEAFKSYKKLKESWFKGKLEDKPRPPKYLKGSKLFKVAYPNSGGQKPKRIKNQVHFSLGLTVRRWFGVKSFFLPFPSNLEGRKIKEWTILPKNGAFYLEVSYEIPAQEPLSSEENEALSIDLGTSDNLAACIDTLGNSFLIDSRAMKAFNQYWNKQVSTRKEGKPQKYWDSWLDRVTRQRNHRIRDGINKAAQIIIKHCLRNGIKTIVLGWNQGFKKNANMGRLNNQEFVQIPLGKLKDRLSQLCDLHNIRLEITEEAYTSKASFLDGDSLPKFGKKPDGWKASGKRLKRGLYRTGDRSLVNADLNGSANIMRKVARKLGINLGRLSRRHLTTVARVRLWQLPNSTLSAESPRLMTGECQG

SEQ ID NO: 139 - protein, 405 aa, Moorea sp.
MIIYEFKAYGKQPQYQAIDDAIRTSQFVRNKCLRLWMDNKGKKSITKYDLNKYCKILADEFPFANELNSTARQAAAERAWSGIARFFDNCKKRVKGKKGYPRFKKHSRSVEYKQSGWKLSHNRKVVTFTDNKGIGTLKLKGTYDLNYYDLKKIKRVRLIRRADGYYVQFAISVDVKIETESTHRAVGLDLGLKYFYADSLGTTELCPQFYRKSEKQLNRANRKKSKKYVRGAKLQSKNYHKARNRYARKHLKVSRQRVEYCKRLAYCVIQSNDLVAYEDLSVKNMVKNRHLAKSISDAGWSTFRHWLEYFGSKYGKATVAVPPHNTSQNCSNCGEKVKKSLSTRTHVCPYCGYVEDRDVNAAINILRKALSTVGHTGTYAWGELPSGLVGESLLGDGDSMESTAL

SEQ ID NO: 140 - protein, 436 aa, Moorea sp.
MLMMNYRYRIYPSASQQVQILEWLETCRGVYNYALRELKDWLASRKCDVDRCSLSKEYIIPADTPFPSYHLQQNSLPKAKKLNPKLKEVHSQVLQTTIRRLHDTWDNFRSRGFGFPRFKKFGQFKSFLYPQFKKNPIYNGTIALPKIGQVAINLHRPIPEVRPVANLIRQRKAHLNGFQVKQVRVLSRARSTQWYVVVTIAKDVEIPDNPSGGRAIGIDLGLEKFLTTSEGLTVERPKFFKDLKGKLKLLQRRAARKQKRSKNWEKAQVLVARLHHHIANTRKDFHLKTAHLLCDQAESIFAEDLNTVGLNRGMLRTECIDASFGQFLDLLKWVCWKRGGYFEKVNPKGTSQTCPECGATVKKSLKQREHICLECGYSTHRDHAAAMVIRLRGLESVPTDCGEWKPPAKSVLSGEHKRTDKCYAGMLNCEVKKPTP

SEQ ID NO: 141 - protein, 356 aa, Moorea sp.
LTIGYTSFYYSNRSKTGRQQTMIIAYQYRLKPTKEQKAQIDNWLSMLCAQYNYLLADRFRWYEQNRCSVNACPLVCNLPELRNNPNYYSQKKSLPNLKKTHPWYKYIHSQVLQDAVKRVKLAFDKFIKGDSKGKRSGRPRFKKTHRYRTFTYPQMKEGCLEENLITLPKIGKVKVVLHRPIPDGFKIKTATITRKCDKYYLVLSLEDKTVPEVKPDINPDSIIGIDVGLKEFLTTSEGETIQVPQYYRKAQKRLKVIQKRVSRRKKGGVNRLKAIKQFGRQHKKVADKRKDFHFKTANYLLSKYDVVAHEKLNVKGLAKSRLAKSVLDAGWSVRFVGYKPYSIRVWGISRLVRNEP

SEQ ID NO: 142 - protein, 494 aa, Moorea sp.
MYRTIPVKATFTDEENAFWVFQGEQANSLINCAIYYAKQKHYSWLREQPEGYTTYWRDDVLKFGWKTYRCAVKYPELDKALKMSPHYKAMAAQSAQQTLKSVGESMTSYNQLVRQYYKGEVDRPRLPRYRQKGGLAAVTFPKQALTYKKGLFYPSVSKESKPELLCEITLEPPEFIDPDWVKEVTIRPYLGQLWIDWVIDDGRQSYEHNPNLDYSQAWSFDHGGDNWLTGVSTQGKSLIIDGRKLKSMNQGYARLVAKYKTGKPEFFWDANLDSPKATLRERVQRKRNNQMRDAINKAARFIINRCLNDRVRNIIFGWNERQKDSINIGRRSNQIFVAIPTKRLIERLKQLCPEYGIKLTITEESYTSKASYLDEDPLPKHGEKPKGWKPSGKRVRRGLYETAKGYLINADTNGAANIARKVATQLGLDLAKVGSGSLTLPHRYVRVAWPTANLFNSLKKSYRTRSEAARVHPAASLLVESPVLQPGEMSTPIT

SEQ ID NO: 143 - protein, 302 aa, Moorea sp.
VIIIEFKAYGKDSQYAAIDEAIRTVKFIRNSCIRLWMDNKGTGKYDLSKYCKILAKQFPFANELNSTARQAASERAWSSIGRRPRYANVRFYDNCKKKVPGKKGFPRFQKYCRSVEYKQSGWKLSPDKKSITFRDKKGIGKLKLKGKWDLWRFDLKQIKRVRIVKRADGYYVQFCVAVDIKEDLAPSKRTIGLDVGLKEFYTDSDGNTELNPRFYRKSEKRAIFYQRRVSRKKKGKAVGHASRTANRNKAINRLGRHHLKISRQREEHAKRLVRSYRKKSAAFIVDRLCIKGDRFCCKAALF

SEQ ID NO: 144 - protein, 419 aa, Moorea sp.
MLTLNYCYRIYPDAVQEQILIEWMDICRSAYNYALREIKDWCNSKKCLIDRCAIDKEYIIPANTKFPSEVWQLNNLPKAKKEFPKLKKVPSQVLQQAIKQLHRGWQYFQSRGFGFPRFKKYGKFKSLLFPQFKNNPVRGYHIRLPKIGAIVINLHRPIPNGFVVKQVRVIRKADRWYVSINIQCDVKIPAPIPYGHPIGVDVGLEKFLATSEGVLVKQPLFLKSLQSQLKLLQRRLSRKQKRSNNYEKARIKVARIHHQIANTRKDFHFKQAHDLCDSADLVFMEDLDYGGLSRGFLGKHMLDAGFGQFRTIVKYVCWKRGKFFAEVDARGTSRECPECGGEVKKDLSVRVHDCLDCGYRTDRDVASAQIVRNRGIDLISTVGQTGMETACADVLPGAEVTRSRQVSKPRKGKTRKLKK

SEQ ID NO: 145 - protein, 310 aa, Moorea sp.
QYNYLLGERFSWFDQNRCAINACPLVCHISELKNRPDYFSQKKSLPTLKKDRPWYGDIHSQVLQDCVKRVDLAFKRFLKGDCNGKRSGRPRFKGKNRYKSFTFPSLNKDPINGNLLVLPKFGKVKMIYHRPIPDGFKVKTATITRKADGYYVTLSIQDDTVPDVISVDNITNPVGIDMGLKSFLVKSDGSEVPIPQYYRKAQKRLKKIQKSVSRSKKGSNNRKKAVSKLGKAHKKVADTRKDFHFKTANSLLDDHVRVASPSANLVAHEKLNIKGLAKTKMAKSVLDAGWGQFLSILSTKAERAPRGLRP

SEQ ID NO: 146 - protein, 405 aa, Moorea sp.
MEFKAVLKEPQKLAINEAIRTARFIRNKVLRYWMDNRGIGKKELYRYNTQLRNDFKFVKDLNSHACQASVENVERAIKRFFDNCKKKVPGNKGYPRFKKYSRSVEYKQSGWKLSPDKKSINFIDKKGIGLVKLKGTWDLWRLDSAKPTLREQKLIKRIRIVQRADGYYIQFCVKIDNSEPLETTRYALGLDVGLKEFYRDSDGYSEPNPRFYRKGEKRLKFYQRRVSRKKKGSANRKKAINRLGRHHLKISRQREEHAKRLARCVIQSNDLVAYEDLRVKNLVKNHCLAKSINDAGWYKFRGWLEYFGQKFGRITVAVNPAYTSQNCSRCGEAVKKSLSTRTHVCKCGCKLDRDHNAAINILSRALSTVGHTGTFINARGESTSTLLGSDLVEQVGSLNRESPGF

SEQ ID NO: 147 - protein, 220 aa, Moorea sp.
SSISRFFENCKKKVPGNIGFPRFQKHCRSVEYKQSGWKLFPDKKSFAQRRLCRITFSDKKGIGKLKLKGTWDLWRFDDKQIKRVRIVKRADGYYVQFCISADVNEQLEPADATVGLDVGLKEFYTDSRGDTEPNPRFYRTGEKRLKFYQRRVSRKKKGSCNRKKAVNRLGRQHLKISRQRVGEACAKRIEHAKRLVRSYRKNKEAFMVSRLCIKGLNLCY

SEQ ID NO: 148 - protein, 277 aa, Moorea sp.
MQIAFKTNLKLNNKQKTLMAQHAGYSRWVWNWALRMWNEAYKEGLKPSALLLKKFYANHFKPKYPWATNLSSRVSQFAFMYLGEGFKRFFKGTAQHPKFNKKGRNDSFTLDNCGRIMEFSGTRLKLPFIGWVSTYELLPEIQTKRVTITRVADSWYLSVAYEFEPEHTVKSREYLGVDVGVKVLATCSDGTVFENPRAYKKANKKLARIQRELSRIQIGYKNRYKTQLKLAKAHQRVANIRKDAIDKLTSWLGKNHAVIGERRFEGFRPVEKPQAGG

SEQ ID NO: 149 - protein, 609 aa, Moorea sp.
MNKLNMFLPESLLPGSGSVPGHLKGGLTKAKSKELKPLEDKEDTILTQLSLFQQKKQIETKEQQSYMQGFQAALKEMISINKYSFLSLVTQTQKSSETSAAVSTSKEKVFTPYWTEFSAALASILSLPTKIGSVALDSILSHGCALNSKLKYWFSTKRTSAQNKRWLKMFSQLSTSSVVGSTDSGSTSEKSLKTVSYRVYPSKELEKIWKKWVSAVRKVYNISIEQLNRNQGYTKVGKKGGKHGFRTWLKQSGLIPQWCRDLNVSKILDNASMEAYTAWKETAKQPKSVGKGKNLLPNPQAGLKIAKFRSVRDHHLTIQFDPTAYKAGRWMVSTTKHLPKPEFKGQDFCVLTDGSTELTYNKGRWFAHFPVEFDIEPTETKKVIALDPGVRTFMTGFDGTDFLEFANNDFQRIAKLCSHLDKLKSEHDKSKGRTHKRRRYKLRIAMERLRTKIRSLRTELHKQVASFLARNYDVIVLPTFETSQMVVKKKRKLKSKTARAMMTWAFYQFSQILEHLCNRYGSKLVRITEEYTSKTCTKCGHIHRKLGSSMNFQCPRCGYEIPRDFNGAVGIFLKAMWDTTFLEAVGDVVLSFSDSNDILDIQDVGICPG

SEQ ID NO: 150 - protein, 359 aa, Moorea sp.
SSIARFFDNCKKKVPGKKGFPRFQKHCRSVEYKQSGWKLSPDKKSITFRDNKGIDLRSRFAIGKLKLKGKWDLWRFDKKQIKRVRIVRRADGYYVQFCVQIDVSEELEPTGNTIGLDVGLKDFYTDSDGYAEPNPRFYRTGEKRLKFYQRRVSRKKKGKAVGHASRTANRKKAINKLGRTHLNISRQREEHAKRLARCVIRSRSVGFAESNDLVAYVRAACRRQDLRVKNLVKNHCRGLSINDAGWYQFRKWLEHFGEKFGRVTVAVNPAYTSQNCSECGEVLKKSLSTRTHVCKCGCQLDRDHNAAINILKRALSTVGHTGTWIDRRSRYANVDPNAYGEDTSTLPGSGLDEQATSLK

SEQ ID NO: 151 - protein, 456 aa, Moorea sp.
MANTNKKLGVQQILLHPDQETQAILTYLCEQSGKLYNMGVYFARQTFFKTGKILTGKFDLIYEESVGKTRIAKSLPSTPAQQTLLSVSEAFKSYKQLRGLWFKGKLESKPRPPKYLKGSKLFKVAYPNSGGQKPKIIDNQVQFYLGLAVRRWFGIKNFSLPFPSNLKGRKIKEWTILPKNGAFYLEVSYEMPDQEPSFSKGNEALSIDLGTSDNLAACVDTLGNSLLIDSRSMKAFNQYWNKQVSTRKEGKPQKYWDSWLDRVTRKRNHRIRDGINKAAQIIIKHCIKNGIKTIVLGWNDGFKKNANMGRLNNQEFVQIPLGKLKDRLSQLCDLHSIKLEITEEAYTSKASFLDGDSLPKFGEKPCGWKASGKRVRRGLYRTSNRSLVNADLNGSANIMRKVARKLGLNLDRLSRRCLTTVARVRLWQLPNSTLSAESPRLMTGECQPNPSTTGWK

SEQ ID NO: 152 - protein, 200 aa, Moorea sp.
MQYFYLPMPANLEFKEIRELRILPRNGCYYAEFVYNTEEIQADVDVDNCLGIDAGVDNWLTCVSNLGDSFIINGRKLKSQNRWYNKEVARLKTSQPQDFWSPRLAAITEKRNRQMRDSRNKTARLLLNYCLEHRIGRVVWGHNKQQKQECNIGDKNTQNFVEIPTARLKDRFQQLCEQHGIEFVETEESYTSKAIELSTG

SEQ ID NO: 153 - protein, 487 aa, Moorea sp.
MMPKKVGVTKKISTQVVPVVGMTKLVELELLSTMKKLGIVRSESYNKLGSISHWAIDWKKSYPEVRSFRTPESLGLPSKLMEWTVSDVAKAITAQQAACTDAVVKKIYKKFPGKDNQQNRKELCRQLKTLAFLENPLLHRLVRKEYKRGHYWVKNQIVYQQGGYKCKGISRNTYQLELAGLNRGKRNKILVRSNRKIEGQIRLIYNQSVQGFEIHILVNHGKVSIPYHRPPIGVDKGYTEAFFDSEGKVHGKGLGKLASEKSDRICTKNRNRGKLWAIHRKLEKIDPAKSTIILKNNLSRKTENRRYRRDQTEILSVIGQASKSLFGGKALKVFAVREAWPTALDLTQPIKNKRQSKAMSRKLNSWMKGKMRDSLQKWANWTGSVVTEVQPSYTSQIDSRNGTLLGKRTGDSFTGFDGVVLQADHNAAENILARGTDFEISRYSSRAEVQVVLLRRTARFLKGMGLSLADAVELGWLDCKHELCSGF

SEQ ID NO: 154 - protein, 456 aa, Moorea sp.
VKTPTKIIRTDKWRLNPTAEQRLLFRETVKVYRRACRYLVGIIYTHWGELGTLTADHLTPAVEKLMHQTAKRPSIKYPQFNQAFYKFPSYYRRSAIAFSAGQVSSFVTRYQEWQSGSRKRKDAKPPKLNADTGCYPSLYKGQCYKLHGFNQVEIKVFNGKNWIWTKVQITGLRERHACATNKMMSPALIFNDRYCHLSVPFNCKPEKRKPEANVTAVDLGINTTATIAVVTQTGTVIHREFIHPGRDIDRRDKRLKSVSVRASKTMGKGGKLHKAFCSKTYKKCQRINNQISHIVSKRIVEIAEKFNSEAIRQSRRFANVFENLKGWKPKGGRKRSNLRQRFHGWLKAKIRDFTEMKWTELGGKVVEVVAAYTSKLAYDGSGTVKRNSRNYALTTFPSGKRFNADLNGAYNIGARGVIKLTRRNDGEGRSSKRSGRPPRSWASLCELWVRDNSKLA

SEQ ID NO: 155 - protein, 286 aa, Moorea sp.
MPSNLDFMSVREFRFVPRNNCFYLEFVYKQPDVPTVPSTNKALGIDPGLNNWLTCVSTTGKSFIVDGKKVKSQNQWYNKKVENIKKGKSKDYWDEQLAFLTERRNRQMRDNINKAARFVVNWCLRNGVDTVVFGWNKGNKDGIQIGKKNNQEFVQTPTARLKGRIEQLCVQHGIKFVETEESYTSKASFLDNDFLPTFGEKPEWWKQSGKRVRRGLYRSANHEIVNADCNGAGNILRKVATQLGLSLAEVGRAALNLPPRYKLDSLSKSYREASLSAVLTREVTSA

SEQ ID NO: 156 - protein, 441 aa, Moorea sp.
MQLGYSYKLKPNQQQKVTMNKWLDMLRSAKPRQRRSQYNYLLRDRNDSYDQAKAPRLGNYCDLKSGGESCPLTCSVSKNHSVGYPWKSSKKNPRRSAYEAHSSSLPALKKQRPWYKEIHSTVLQQTLRQLDVAFSKFFKGETGYPKPKRRSRFRSFKYAPGQVKLDGSKIYFPGIGWMGFHNSRPIPEGFTLKSVTVRRKARGWFASLQIEDKSVPATPTKCKDEIDPLRVKGCDLGINKLVSISNGRIIANPAKQKSFRRRERRLKLRQKAASRKRKGSRNRGKSYARVASLHERITNKRSAYHWDAANQLANGTDALIFEDLNIKAMKSRCKPRPNKNGGYERNGQSAKRGLNRAISNAAWGELVKKIEVVAAKSGIPVVKINPKHTSQRCPKCHHTSKENRKKEKFVCTNCGHYDDADINGAVNIKLRGLKKLGIDRR

SEQ ID NO: 157 - protein, 528 aa, Moorea sp.
MELSNVSERQADIDCSIQLVLPLWENDKPLNQSQSVTAESVVANNLTTSPGKSRTCTRSSQRQKSSKTSAQDSTTKEKVLEPYWNDLCRDVSSRLLLPVETDLPDSVLNCLNTWQNSTVGESWFSTSLKAVFDPNSPQIFSESFTSSLVASTDSESTGQKSRKIRIFLSAEQRYLVRKWFGVSRYVFNKTVKILQDGEVKANWFAIKTGILNDLPEWCKEVPYQIKSIAIKDACTAVREAKKKYKKTGQINRVRFRSRKNPVQSCYIPKSAVSEKGIYHTKLGGLTFSEALPDNRGDCRLTSNNGDYHLTVPHQTTQKNAENQGRVVAIDPGVRTFLTFFSENSIGKIGHGDFSRIQRLCSHLDNLLSKISKTKRNQKRRMRKAARRIVIRIQNLVNELHHKAARFLVDSFDVILLPTFETSEMSKKGKRRIRSKTVRNLLTFSHFRFKEFLKHKASETGKTVVDVCEAYTSKTVSWTGEMVNIGGSKTIKSKIDGLIMDRDINGARGIFLRALVDTPWLREQLALVG

SEQ ID NO: 158 - protein, 528 aa, Moorea sp.
MARSNLKEPQADTGSLTQVVSNALGKAKEFNGLQSVTAESVVANNLTTLPDKLPTCTPSSRKQKSSRTSVQDLTTNALVLEPYWSDLCAVISSRLLLPVETDLPDLGLNSLSTWSVSTVEKSWFSTNLKVVQNPSLPQIFSESFTSSVALSTDSGSTGQKSKKIRIFLDAQQRATVRKWFGVSRYVFNKTVKILQNGEIKANWKALKTGILHGLPEWCGTVPYQIKSIAIKDACTAVREGKKKSKKTGQINRVRFRSRKNPVQSCYIPKSAVSDKGVYHTKLGRLTFAETVPDQIGDCRLTSTNGNYYLTVPHKTTQIKTENQGRVVALDPGVRTFLTFFSETSVGKIGNGDFSRVQRLCSHLDCLLSKISKAKGKQKYRMRKAARRIVIKIKNLINELHHKAARFLVDNFDVILLPTFETSEMSKKGNRKIRSKTVRNLLSFAHYRFKEFLKHKAQETGKFVVDVCEAYTSKTVSWTGELVNIGGNKTIKSRIDGQVMDRDINGARGIFLRALGDTPWLRNQLALAG

SEQ ID NO: 159 - protein, 333 aa, Moorea sp.
MLAMRVAYQYRLRLTKNQASEVERWLEMLRHQYNYLLADRFNWYEQNRCAINSCPLTCHLPGLRDNPDYFSQKRTLPKLKKDRPWYKAIQSQVLQDCVRRVDLAFKGFLKGDCNGKKSGRPRFKSQSRYKSFTFPSLSKSPVDGNVLTLPKLGKVKMVYHRPIPEGFKIKTATITRKADGYYVTLSIQDDTVPEILPIESVTNPMGIDMGLKSFLVKSDGSEVPIPQYYRKAQKRLKKIQKAVSRSKKGSNNRKKVVSKLGKAHKKVADTRKDFHFKTAKSLLTSHDLVAHEKLNIKGLARTKLAKSVLDAGWGQFLSILSTKAERAPRGLRP

SEQ ID NO: 160 - protein, 414 aa, Moorea sp.
MRAAYQYRLRLTKEQAQKVEKWLDMLRHQYNYLLADRFRWYEQSRCSINSCPLICHVPELRDNPDYFSQKRTLPQLKKDRPWYADIQSQVLQDCVKRVDLAFKRFLKGDCNGKKSGRPRFKGQNRYKSFTFPCLSKSPIDGNTLTLPKFGKVKMIYHRPIPEGFKVKTATITRKADGYYVTLSIQDDTVPEILPLENVANPIGIDMGLKSFLVKSDGSEVPIPQYYRKAQKRLKKIQKTVSRSKKGSNNRKKAVLKLGKAHKKVADTRKDFHFKTAKELLADHDLIAHEKLNIKGLARTKLAKSVLDAGWGQFLSILSNKAVRVAWPTALNAGLRTKAVNPRNTSQNCSNCGKKVPKELKDRIHSCPHCGYTEDRDVNAARNILNLAVGRPVRSKACRATEPLGGVGKKPTLNL

SEQ ID NO: 161 - protein, 192 aa, Moorea sp.
SSIARFFDNCTKKVPGKKGFPRFQKHCRSVEYKQSGWKLSPDQKSIVFSDKKGIGRLKLKGKWDLWRFDKKQIKRVRIVRRADGYYVQFCVQADNNETLDTTSKKIGLDIGLKDFYTDSDGNTEANPRFYRMGEKRAIFYQRRVSRKKKGSVNRRKAINKLGRTHLKISRQRVGEACAKRIEHAKRLGTKLP

SEQ ID NO: 162 - protein, 377 aa, Moorea sp.
MDNESTVQKSLKIRLFLKADQRQMVNYWFGVSRYVFNKTVEILKDGKVQANWKAIKSDLLNNLPEWCKAVPYQIKSIAIKDACTAIREAKKKSKKTGQVNRVRFRSRKNPVQSCYIPKSAVSAKGIYHTKLGELTFAETLPNNICDCRLTSTNGNYYLVIPHKATSKYTENQGRVVALDPGVRTFLAFFSEHSVGKMGNGDFSRIQRLCFFLDKLISKISKTKGKQKRRMRKAARRITIKIQNLIDELHHKTARFLVDNFDVILLPTFETSEMSKRGSRKIRSKTVRNMLSFAHYRFKQFLKHKAFETGKLVVDVCEAYTSKTVSWTGELVKIGGSKIIKSKIDGQVMDRDINGARGIFLRALVDTPWMKNHLALAG

SEQ ID NO: 163 - protein, 181 aa, Moorea sp.
VLVMEFKAVLKESQRVAINEAIRTARFVRNKVLRFWMDNRGIGKKELYRYNTQLRDEFEFVKHLNSHACQASVENVERAIKRFFDNCKKKVPGKKGYPKFKKYSRSVEYKQSGWKLSPDKKSIKFTDKKGIGQVKLKGTWDLWRFDQKLIKRVRIVQRADGYYIQFCVKVDTSEQLTCHWL

SEQ ID NO: 164 - protein, 395 aa, Moorea sp.
MLRRVVKVRLYPTTEQKKIIAQHFGCGRFVYNKGIDLNKKQYEETGNGFSKNGLVKLIPVLKKEFPWLKDCYSQVLQMSMRNLGDAFTDFFKGKAKYPRYKSKFKSKQSIQFPANVKLKGRDSIAFPGRIGVVKASIHRSLDGKIKTVSLSKTSSDKYYCSVLMDYEGKEPEKSSTGKIVGIDVGIKDLAISFDGIQTKKYENPQHLRKHQRRLAIEQRRLSKKKKGSSNRKKQIKKVARLHERVSNARQDHLHKVSRTIVNENQVVVVENLNVRGMVRNRKLAKSISDTALGMFVNFLYYKLERSGKVLVEIDRWFPSSKLCSNCGHKMDKMPLKVREWQCPKCGYNHDRDINAAKNIRAEGIRILNIADGTAVKACGADVRPQPTSVGAGRLR

SEQ ID NO: 165 - protein, 408 aa, Moorea sp.
IIIAYQYRLKPTKEQKAKIDHWLSMLCAQYNYLLADRFSWYEQNRCSINACPLVCHLPELRDNPDYYSQKKTLPNLKKTRPWYKEMHSQVLQDAVKRVKLAFDRFIKGDSNGKRSGKPRFKKQHRYRTFTYPQMKEGCLEGNLINLPKIGKIKIVLHRPLPDGFKVKTASITKKCDGYYLVLSLEDKTVPEIKPDINPDSIAGIDVGLKEFLTTSEGETIEIPQYYRKSQKRLRVIQKRVSRRKKGGKNRLKAVKQLGKQHKKVADKRKDFHFKTANYLLSKYDVIAHEKLNVKGLAKSRLAKSVLDAGWSSFLTILISKALNAGLLTVPVSPKNTSQNCSNCGKKVPKKLHVRWHDCPDCGCSLDRDHNAAINIRNRAEGQSVLKAQRLLSNSRIGWEAYTEPNGSV

SEQ ID NO: 166 - protein, 399 aa, Moorea sp.
MEFKAVLKKSQKVAINEALRTAKFVRNKVLRYWMDNRGVGKKELYRYNTQLRDEFNFVKELNSHACQASVENVERAIKRFYDNCQKKVPGKKGYPKFKKHCRSVEYKQSGWKFSPDKKSIIFSDKKGIGKVKLKGKWDLWQFEQKQIKRVRIVRRADGYYVQVCVKVDNHEELEPTGNTIGLDVGLKDFYTDSDGHAEPNPRFYRTGEKRLKFYQRRVSRKNKGSANRNKAINKLGRAHLRISRQREEHAKRLARCVIRSNDLVAYEDLRVKNLVKNHCLAKSINDAGWYKFREWLEYFGDKFGRITVAVNPAYTSQNCSNCGKVVKKSLSTRTHVCKCGCQLDRDHNAAIRRSRRYANNILKRALSTVGHTGTFLNAYGDLASTLLGSDLDEQVESVK

SEQ ID NO: 167 - protein, 405 aa, Moorea sp.
MIVLEFKVKGNKAQYAAIDDAIRTGQFVRNKCLRYWMDNKGVGQKDLYRHNTWLRAEFSFVKDLNSHACQASVERAYNSISRFYDNCKKKVPGKKGYPKFKKFSRSVEYKTSGWKLYPYTKSISFTDKKGIGKLKLKGTWDLWRYDQKLIKRVRLVKRADGYYVQFCVKVNIDEPLEPSHTNVGLDVGLKEFYTDSKGNTEPNPRFYRKGEKRLKFYQRRVSRKKKGSSNRKKAINKLGRQHLKISRQREEHAKRLARCVIHSNDVVAYEDLRIKNLVKNHCLAKSINDAGWYQFRKWLEYFGQKFGRQTVAVNPAYTSQNCSECGEVVKKSLSTRTHVCECGCELDSPKATLRERDHNAAINILKRALGTVGHTGTWIIDPNAYGESASTLPDSGLVEQVGSLK

SEQ ID NO: 168 - protein, 138 aa, Moorea sp.
LDNLISKISKAKGKQKRRRRKAARRMVIKIQNLVNELHHKAARFLVDHFDVILLPTFETSQMSRKPGRKIRSKTVRNMLTFAHYRFKEFLKHKAQETGKLVVDVCEAYTSQTVSWTGELVNIGGSKTIKSKIDGHVMD

SEQ ID NO: 169 - protein, 490 aa, Moorea sp.
MPKKVGATKKISTQVVPVVGMTGSVEIELLSTMKKLGVVRSESYNKLGSISYWGLDWKKAYPEVRSFRPPESLGLPSKLMEWTVSDVAKAITASQAACIEVVIKKVYRKFPGDKNKKTRKELCQQLKTLTFLESSLLHRLVRKEFQKGHSWVRNQIVYQQGGYSCQQLSRNTYQLELAGLRRGNRNRIVVRSNRKIKGQIRLIYNKLQQRFEIHFLVNHGTSEIPADRQSIGVDKGYTEAFYDSEGQGHGKGLGKVATRKSDRICKKNRNRGKLWAIHRKLEKIDSAKSARILRNNLSRKTENKRYRRNQSELKAIIGAASKSLFDEKSLKVFAEDLTQPFKNKRQSKAMSRKLNSWMIGVMRDSLHKWANWTGSVVTEVQPSYTSQVDSRNGTLLGKRTGDNFTGFDGVVLQADHNAAKNILARGADKEISRFSSRAEVQAVLLRRTARFLKGMGLSLLDAVELGWLDSKHSKTQAFKQLLTGMPGTSK

SEQ ID NO: 170 - protein, 268 aa, Moorea sp.
MIRGGEKMRHQAIKVRLYPSDEQKIRLAQHFGCARWWWNHALNYCIDTYKATGKGVKQSALNAMLPKLKKAEETEWLKDCYSQVFQATTLNLVTAYKNFFNGKARFPRFKSKRNKQSIQYPQNVKIVKGNLKFPGKVGIVDAKIHREIAGKIKTVTVSMTPSGKYFASILTELEGDNRTPNHDGKVAGVDLGIKDFAIVNDGQETSKFANPRHIRKHENNLARKQKKLSRKQKGSNSRKKARKLVARVHERIGNVRQDYLHKLPLKAC

SEQ ID NO: 171 - protein, 279 aa, Moorea sp.
MESMTYTYRIHPDIDQEAKMLDWLEQCRRVYNYALRQRKDWINSRKCRVDACSLRHEYIISVDEPYPDYYKQQNALTVAKKNIPEFKAVHSQVLQDALKRLDRAFKMRQQRQFGFPRFKKVGRYRSFVFPQFKSNPITGWQIKLPKIGKMPIVLHRAIPDGFVVKQVRVLFKASGWYAQRILQSDISIPEPMPHGEPLGIDWGISSFVATSQGELIDNPRFYIQSQSKLKWLQRRLSKKEEVSLIKHWLKRYLCCTKRLAISDKIFTTKSVIIFVVRQE

SEQ ID NO: 172 - protein, 403 aa, Moorea sp.
MITLEFKAKGKKRQYSAIDEAIRTVKFIRNSCIRYWMDNKGVNKFDLNKYSAVLAKKFPFAKALNSTARQSSAERAWSSIARFFEKCRKKVPGKKGFPRFQKHCRSVEYKQSGWKLSPDKKSITFTDKKGIGKLKLKGTWDLWRFDKKQIKRVRIVKKSDGYYVQLCVSADLKEELEPTGTAIGLDVGLKDFYTDSTGQAEPNPRFYRTGEKRLKFYQRRVSRKKKGSANRKKAVNRLGRQHLKISRQREEHAKRLARCVVRSNDLVAYEDLRVRNLVKNHCLAKSINDAGWYQFRKWMEHFGTKFGKMTIAVNPAYTSQDCSECGEEVKKSLSTRTHICKCGCQLDRDHNAAINILKRALGTTGHVETWILNPNASGDLTSTLLGSGLVKQVESLSEESPRL

SEQ ID NO: 173 - protein, 443 aa, Moorea sp.
MYGCQQHLIKTTIENQAIIEFICSEANKLTNCGIYYCRQILFKAGKYLNNAELDKIMKTNVHFKAMRSACAQQTLHGIIESFKSYKALSKLYKKGQLKHKPRIPTYRKKGGLAVVSYPARWVKLVKGQLKFTLGKQVKAWFGFDHFFLPMPSNIDHKSIKEYRFVPRNGCLYLEFVYERPAPEPVTKTDQVLGIDPGLNNWLTCVSNIGKSFIIDGRKVKSQNQWYNKRVAAIKKGKTQGYWDEDLALLTEKRNRQMRDNVNKVARFIVSWCLKNRVSTVVFGWNNRSKDSINIGKKNNQQFVQIPTAKLKSRIEQLCTEYGIKFVETEESYTSKASFLDRDFLPTLGEKPVREACPSGLGWKESGKRVKRGLYRSGSGDLINADCNGACNILRKVATQLGFSLAEVGRAALNLPQRYKLDSLSRSYRKALRSVVLTREVTSA

SEQ ID NO: 174 - protein, 209 aa, Moorea sp.
SSISRFFENCKKKVPGKKGFPSFQKHCRSVEYKQSGWKLSPDKKSITFSDKKGIGKLKLKGTWDLWRLDKKQIKRVRIVKRADGYYVQFCISAEINEQLDPVDATVGLDVGLKELYTDSRGNTEPNPRFYRTGEKRLKFYQRRVSRKKKGSSNRKKAVNRLGRQHLKISRQREEHAKRLVRSYRKKSAAFIVDRLCIKGGRFCCKAALF

SEQ ID NO: 175 - protein, 450 aa, Moorea sp.
MQLGYVYKLKPNRQQEATMKKWLDMLRSQYNYLLRDRNESYDQAKAPRLGNYCDLKSGGEACPLTCSVSKNYSVGYPWKNSQKNPRRSAYEAQSSSLPTLKKQRPWYKKINSTVLQQTLRQLDVAFSKFFKGETGYPRPKRRSRFRSFKYAPGQVKLNGDNIYLPGIGWMRFHNSRPIPDGFNIKSVTVRRKARGWFVSLQIEDKSIPTQSVKGKDEISPQKVKGCDLGINKLVSISSGKTIANPAKQKFFRRRERRLKLRHKAASRKKKGSKNRGKSYAEVASLHERITNKRTAYHWDVANQLVDGTDALVFEDLNIKAMKSRSLPKPNENGGYERNGQSAKRGLNHSISNAAWGELVKKIEVVAAKSGIPVIKINPKHTSQRCPKCHHISKENRKKEKFVCTNCGHYDDADVNGAVNIRLRGLKKLGIDPTQLPPVRGEVTPMEITVS

SEQ ID NO: 176 - protein, 289 aa, Moorea sp.
MRVLEFKVKGKKTQYTAIDEAIRTGQFVRNKCIRYWMDNRGVGQKELYRHNTWLRAEYPFVKDLNSHACQASVERAYSSIARFYDQCKKKVPGKKGYPKFKKFSRSVEYKTSGWKLSPDAKTIDFLDKKGIGRLKLKGTWELWRYDSAKPTLREQKLIKRVRLVRRADGYYVQFCLKVDERESLEPSHTNVGLDVGLKEFYTDSKGGVESNPRFYGKGEKRLKFYQRRVSRKKKGSSNRKKAINRLGRTHLKISRQREEHAKRLVRSYRKNKEAFMVSRLCIKGLNLCY

SEQ ID NO: 177 - protein, 330 aa, Moorea sp.
MRLAYQYRLRPTREQKVVIDNWLSMLCAQYNYLLADRFNWYEANLCPINACPLVCHLPKLRVNPDYYSQKKRLPGLKKTHPWYKQVHSQVLQDVVKRVKLAFDRFIKGDSNGRRSGRPRFKKPHRYRTFTYPQVKEGCLDGDLINLPKIGRVKVVLHRPIPSGFKIKTASITKKCDGYYLVLSLEDKTVPEVKPDINPDSIIGIDVGLKDFLTTSEGEAIEIPQYYRKAQKRLKVVQKRVSRRKKGGSNRLKAIKQLGKQHKKVADKRKDFHFKTANYLLSNYDVVAHEKLNVKGMAKSRLAKSVLDAGWSSFLTILTNKAERAPRGLRP

SEQ ID NO: 178 - protein, 231 aa, Moorea sp.
LLTEEWGLIARERSLSQILRKIRIMHSRRVRGWLAINRFYANCKSKKPGKKGYPRFQKDNRSVEYKTSGWKLHLAKRRVTFTDKKGIGTLKLLGKWDIHTYPVKSIKRVRLLRKADGYYCQFCIDVDCVDIQPKTGQEIGLDVGLESFYTDSNGYQEPNPRFLRKAQSDIKQAQRRIYKKKKGSTQRRKARARYSRKHLRVSEALTRTLRDWQRNEHAKRLGRVCKLLYPE

SEQ ID NO: 179 - protein, 375 aa, Moorea sp.
MYAIKRELKVNHKQANWLAQCAGFSRFVYNYGLGMMKASWEFDHVKASDSKRLNAIKKVFTNVTKKSTELAWCNKYPSRIYQNAFRNLAKALSRWRDPKLKAQMPKFKTKRHQCSFTVDDCNGKRLLFAGKQINIPTLGWFRLKEGIPYNCISQTFTISREAGKWFISFKIDACPVPAIKHTQQKVGIDLGVKCFATLSDRTQIETPESIKKAKIKLSKLQWRNRKKVLGNGQTKTKPSQNALTYYGRLRKQHKHLANIREDFLQKETTRLAQTYQEILIEDLNVLGMLANHKLAEAISLLGFYRFRELLTYKQEFHGFKLTLVDRWFPSSKTCHKCGHKQNMPLKERVYICGGCGNLEDRDLNAAINIERWEAR

SEQ ID NO: 180 - protein, 456 aa, Moorea sp.
VKTPTKVIRTDKWQLNVIPDQRILFGETIKVYRHACRYLVGIIYTHWSELGCLSAEQLTPAVERLMHQTAKRPDIKYPQFNKTFYKFPSYYRRAAIAFAAGQVSSYVTRYREWQSGVRKRRDTKPPKLNADTGCYPALYKGQCYKLQGFDKIEIKVFDGSDWVWTIVQITGLRERHQVASNKMMSPSLIFNERFCHLSVPFACKPEKRKPEANVTAVDLGINTTATIAVVTHSGTVIHREFIHPGRDIDRRDKRLKSVSVRASKTMGKGGKLHKGFCSLTYQKCQRINNQIGHIVSKRIVEVAEKFNSVRVAWPTALAIVFENLKRWKPKGGRKRSNLRQRFHGWLKAKIGYFTEMKWAELGGKVIEVAAAYTSKLAYDGSGTVRRDSKNYALATFSSGKQFNGDLNGAYNIGARGVLKLIRRNGNEGRSSKSSGRPPRSWACLCDLWARSSSRLA

SEQ ID NO: 181 - protein, 343 aa, Moorea sp.
LAAPSEHRRYEWKANKKSIGYFDQQNCLPDFKKCWPEYKELYSTSLQATLKRVYLAYNRFFQGLSGIPKYKPIRKYSGWTYPSKAGWKINTDGKNGTLTLNDLGITIKMRGQAKYWGTPTTLTIAYKPSVNAWYASITVKIESIETKYGAGSDLAYEKIVAYDLGTETAITAFNGSEFEEVANPRLAKVIEPKVKAAGKEKRRKQAPNRKKNILASKRWKKANKKESQLKRKVGLVRQDWQHVLMQSLMGETPKTALHRKVTSDLSSRYDIGVTEKLNTKGMTRKAKKGSKRKKQKAGLNKAILDVGFGTLNKMLTYKIELKGGIVLQLPTRQLNNFATHSPT

SEQ ID NO: 182 - protein, 411 aa, Moorea sp.
MIIIEFKAYGKQKQYLAIDEAIRTVKFIRNSCLRYWMDNKGVNKYDLSRYSKDLAKEFPFANELNSTARQASAERAWSSIARFFDNCKKKVPGKKGYPRFKKHSRSVEYKQCGWKLSPDKKSIIFTDKKGIGKLKLKGTWDLWRFDKKQIKRVRIVRRADGYYVQFCVQLNNNEELEKTGHTVGLDVGLKDFYTDSDGNVEPNPRFYRKGEKRIKFYQRRVSRKKKGSANRKKAINKLGKTHLKISRQREEHAKRLARCVVRSNDLVAYEDLRVKNLVKNHCLAKSINDAGWYQFRKWIEHFGTKFGKITVAVNPAYTSQNCSNCSEVVKKSLSTRTHICQCGCQLDRDHNAAINILNRALSTVGHTGTGIDRRSRYGNVDPNAWGEVASTLPGSGLVEQAASLNQESPRL

SEQ ID NO: 183 - protein, 464 aa, Moorea sp.
  misc_feature (375)..(408): Xaa can be any naturally occurring amino acid
MIVLEFKVKGNKTQYAAIDEAIRTGQFVRNKCIRYWMDNKGIGQKDLYRYNTWLRSEYPFVTDLNSHACQASVERAYSSISRFYDKCKKQVPGKKGYPKFKKFSRSVEYKTSGWKLSPDTKSLKFLDKKGIGLLLLKGTWELWRYDQNLIKRVRLVRRADGYYVQFCVKVEIKECLDPSHNNVGLDVGLKEFYTDSKGNTEPNPRFYRKGEKRLKFYQRRVSRKKKGSANRKKAIDRLGRQHLRISRQREEHAKRLARCVIRSNDLVAYEDIRVRNLVKNHCLAKSINDAGWYQFRKWLEHFGTKFGRITVAVNPALTSQNCSQCGEVVKKSLSTRTHTCKCGCQLDRDHNAAINILKRALSTVGHTGTRILDLXXXXXXXXXXXXXXXXXXXXXXXXXXXXXXXXXXTYGFEDESEEATPRLSLIPIWPHRGRRQPTRVTLATGRNQRGGRLPTLALMERRHG

SEQ ID NO: 184 - protein, 417 aa, Moorea sp.
MLLTYCYRINPSDEQITIMERWLELLRRHWNYALGQRLDWLNRTRSPIDRCSLVSEPIGEIPEAVNYYTQQSALKETKKLFTEYKLIYAETQQVNLQRLNQAWERWRKPDTTGKRGGRPRFKKPGQLRSFVFPRVNNSKAGAHLKDGMLKLSRIGEIPVVMHRPLPQGFTLKQCTIVKKADGWYACFSMQDDTVPELLPVDLVKSAVGIDVGLEKFLTTSDGDAIEIPQFYRKTQNKLALAQRVMSRRVKGSKNWEKAKQKVALLHLHLARCRKEFHYQVAHWLCSKYDLIGHEDLNIKGLARTKLAKSIHDAGWGSFLEVLQAVAVKRGLIVQKVNPRGTSIECFNCGSRVEKSLSERVHHCSSCGVKIDRDWNSGINILHRALMAVGLPLNGCGKSVMDIEEQQVSFVRSEKPTS

SEQ ID NO: 185 - protein, 435 aa, Moorea sp.
MLTQVNNLRLDRQQILALRQMCHLSKNMFNVGLYNVRQYFFQERKHLRYESNYYHSKENENYKLLPTDIAQQTLKITGRIKCSRRFRTQPLVDSSFKSFFGLLKLNKSGGYQEKIRLPNYLPKDGHFLLVIPVRKRDWEKLPGKNWLFTVPMSRQFKKEYGVVQFTVPERLRSKTVKEIRILPKYKARYFDVCYCYEDEPETKVEKTSEILGIDLGLDNFATCVSTTRKSFIIDGKKIKSDNQFYNKRNAKFQSIKDLQGINALTNRQARLLRKRNHKIRDFTNKAARYVVNWCRRNKISKIVIGYNPDLKQRVNMGKRNNQKFTQIPIYTFKDKLKSLCQRYGIELVEQEESYTSKASSLDKDELPVWNADNPKKYTFSGTRVKRGLYRTSKGWLINADCNGALNIIRKHTSKPDDSIGGFRGCLAQPLRVLCS

SEQ ID NO: 186 - protein, 420 aa, Moorea sp.
MYGCQQHIITTTAENKAVIELICSEANKLTNCGIYYCRQILFKAGKYLNNAELDKIMKTNVHFKAMRSACAQQTLHGVIESFKSYKALSNLYKKGQLTDKPRVPKYRKKGGMAVVSYPARWVKLIGGQLKFTLGKQIKTWFGIDHFLLPMPSNLDYKSIKEYRFVPRNGCFYLEFVYKQPDIEPVTPTPNVLGIDPGLNNWLTCVSNVGKSFIVDGRKVKSQNQWYNKQVAKIKKGKSQDYWDEQLASLTEKRNRQMRDNINKVARLVINWCLRHQISTIVFGWNQRNKDGINIGKKNNQQFVHIPTAKLKNRIEQLCIQHGIKFVETEESYTSKASFLDNDFLPVLGGKPEGWVASGKRVKRGLYKSGKVELINADCNGAGNILRKVVTQLGFPLAEVSRADLNLPQRYRLDSLSRSYR

SEQ ID NO: 187 - protein, 473 aa, Moorea sp.
LYRTIPVKSTFSEEERAFWVFQCEQANSLFNCAVYYAKQKHYQWLKDQEAYTTFWRGDEFRCGWKTYKCATKYPEMDKALKMSPHYKGMAAQSAQQTLKTVGEAISSYNQLVGLYYKGEVDRPRLPRYRKRGGLAAVTFPRQALTYKQGLFYPSVSKESKPELLTKIVLEPPEFIDPDWVREVTVRPCYGQLWIDWVIDDGKEPIIDNPELDYSQALGIDHGGDNWLTCVTTLGKSFIIDGKKLKSMNQGYSRLVAKHKAGKPEFYWDSHLDKIQLKRNNQMRDAINKAARFLVNRCLSDGIGNIVFGWNKGQKQRSNMGKKGNQKHVIIPTNRLIERLKQLCPEYGIKLIVTEESYTSKASFLDGDSLPNYGEKPTGWTPSGRRVRRGLYKTASGVLINADANGAANIIRKVTTQSFDLTKVARGCLTLPHRYDLFTSLSRSYRMSCVREASPLAVGHAARTAIAGRVYPPA

SEQ ID NO: 188 - protein, 524 aa, Moorea sp.
MIVREAKLLNGSKAQYQAIDSAIRTAQFIRNKAVRLWRDEPDVNKARLSELCKELARAYPFAKKLNSMARQASAQRAWNSISSFYRRCREGSKKKGYPQFKKHSRNGFADAARTVEYKTTGWKLSEDCLTINFTDGFQAGTFSLFCNHETREDLFRLKINRVRVVRRADGYYAQFCFDVNRKEAGNYTGNFVGIDLGLKYFYKDQNDNGAIYPKYLRRAQKRIKKLQRRLSRKDLLQKYFSNSVLDAIASGGNPQDRNGALTVVELNSPRVAPLHRFASILVHCSLFPVPCSRQLPRSLKFVKGKKPQSNNYHKARIRLGKAHLKVQRQRKDGVFAALGACIRENEDWAVKLARCVVHSNDVVVYVGASLPTLGGIDLKIQNMVKNHHLAQSISDASWYQFTQWLDYFGKVWDKTVIAVAPNYTSQDCSNCGHRVKKSLSTRTHQCPKCKTEICRDTNAALNILNKGMNILGVECNNNSTLGHRGSAGEPGTLEESSTAVDEEKSNSISCLDESRITVCENPAL

SEQ ID NO: 189 - protein, 363 aa, Moorea sp.
MIVTNNEFLSPQQEMLEDLMAIIHCFCCRLYGLRRYLQAIQEKINKNLDSPDDCAKVEMEVQVMVETPMFGIKRELKVNNSEANWLSQCAGFSRFVYNYGLGIMKSSWEFEDIRANDSKRLNTIKKVFTNVTKKNPDFAWCNKYPARIYQNAFRNLAKAFSWWRDPKIKAQMPTFKKKRHQCSFTVDDSNGKRLVKAGKTINIPTMGTFRLKEAIPYDCISQTFTISREADNWFVSFFVDACPMPGMKHTQQKVGIDLGVKCFATLSDRTKIEMPKSIKKAKIKQSLLQWRNRKKVLGNGQTKTQPSQNAQKYYQRLRKQHKHIGNIREDFLQKETTRLAQTYQEIKIEDLNLSGMLANHKER

SEQ ID NO: 190 - protein, 305 aa, Moorea sp.
IFSPSFTSSPVASTDSESTAQKSKKIRIFLDAEQRMILRKWFGVSRYVFNKTVKTLQNSEVKANWKAIKTDILHDLPEWSLTVPYQIKSIAIKDACTAVREAKKKYNKTGQINRVRFRSRKNPVQSCYIPKSAVSDKGIYHTKLGQLTFTETLPDNIGDCRLTSTNGNLYLTVPHKTTKLKAENQGRVVALDPGIRTFLTFFSENSVGKLGHEDFSRIQRLCAHLDNLYSKISKAKGKQKRRMIKASRRIIIKIQNLVNELHHKAARFLVDNFDVILIPTFETSEMSKKGNRKIRSKTVRNLLTF

SEQ ID NO: 191 - protein, 164 aa, Moorea sp.
LTFFSENYVGKIGQGDFSRIQRLCHHLDNLISRISKAKGKQKRRMRKAARSMVIKIQNLVNELHHKAARFLVDNFDVILLPTFETSQMSKKSNRKLRSKTVRNMLSFAHYRFKEFLKHKAIEYGKTVVDVCEAYTSKTVSWTGELVNIGGSKVIKSKIDGQTMD

SEQ ID NO: 192 - protein, 406 aa, Moorea sp.
MRAAYQYRLRLTKPQAAEIERWLEMLRHQYNYLLADRFSWYEQNRCSINACPLICHLRDLRDNPDYFSQKRTLPQLKQDRPWYSDIHAHVLQDCVKRVDLAFKRYLKGDSLGKKSGRPRFKGKGRYRSLTFPSLGKDPVKGNQLKLPKFGWVKMIYHRPIPEGFKIKTATITKKADGIYVTLSIQDDTVPEVIPIDRVSNPVGIDMGLKSFLIKSDGTDVEIPQYYRKAQKRLKKNQKAVSRSKKGSNNRKKAVVKLGKAHKKVADTRKDFHFKIAKDLLDNHDLVAHEKLNIKGLAKTRMAKSVLDAGWGQFLSILSVKAENAGLMTVAVNPSNTSQNCSNCGKKVPKKLKDRVHSCPHCKYTADRDVNAAKNILNLAVGRPVSSKACRATEPLGGVGKKPALSR

SEQ ID NO: 193 - protein, 403 aa, Moorea sp.
MATMRAAYQYRIRLTKSQEAEIERWLDMLRHQYNYLLADRFNWYEQNRCSINSCPLVCHLPDLRDNPDYFSQKRTLPQLKKERPWYKVIQSQVLQDCVKRVDLAFKRFLKGDSNGRKSGRPRFKSQGRYKSLTFPSLSKNPIKGNILTLPKFGKVKMVYHRPIPEGFKIKTATITRKADGYYVTLSIQDDTVPDVLPVEAVTNPIGIDMGLKSFLVKSDGSEVPIPQYYRKAQKRLRKIQKEVSRAKKGSNNRKKAVARLGKAHKQVAETRKDFHFKTAKVLLASHDLVAHEKLNIKGLARTRLAKSVLDAGWGQFLSILSTKAENAGLIVKAVNPRNTSQDCFSCGQKVPKKLKDRIHSCPHCGYTEDRDINAAKNILKLAVGHPVSSKACRATVRVASAWP

SEQ ID NO: 194 - protein, 432 aa, Moorea sp.
MPRKVGVAKRISTQIVPVLGITKSVEIELLFTMKKLGIVRSESYNKLGSISHWSLDWKKAIPEVKSFRTPDTLGLPAKLMDWTINDVAKAITASQAACTDAVIKKIYKRFPGKDNQKTRKELCQQLKTLAFLDNPLLHRLVRKEFQRGHSWVKNQIVYQQVGYNCKRLSRNTYQLELAGLQKRKRNKIIVRSNRNIKGQIRLIHNQILQRFEVHFLVDHGTVEVPGNRRSIGIDKGYTEAFYDSDGQAHGKGLGKATTKKSVRVAWPFGHRICHKNRQRGKLWALHKKLKKIDQAKSARILENNLTRKTENKRYRQDQSVLKAIIGAASKSLFNGESLKVFSEDLTRQFKNKHQSKAASRKLNSWMKGEMRDSIQKWADWTGSVVTEVQPSYTSQVDSRKRCSAVLGVSPMSDCIKTWNPSREKDWGQFYRI

SEQ ID NO: 195 - protein, 431 aa, Moorea sp.
VKHKAVKVRIYPTQEQVQILAQHFGCARWWWNYALNQCIETYKETGKGLKQSALNSMLPKLKKEKETEWLKDCYSQVLQSVSLNLSRAYQNFFEGRAKYPKFKSYYHRQSIQYPQKVKQVGDCLKFPGKLGLLKAVIHRALDGVIKTVTVSKDPSGKYYASVLMEYESGDIKPSKDGKVMVRKDPLKAIGIDLGIKDFAITYDGEKTSKFSNPNHLAKYEKKLAKKQRIAARKKKGSSGRKKARKIVAKVYERIGNVRQDYLHKLSRKIVDQNQVVVVENLKVRFPLANEIRHGSHLNVKGMVRNHKLAKAISDLGWGTFVNFLSYKCEKEGKILVEINRWFPSSKTCSNCHYQIKELPLDVRSWTCPSCGTHHDRDGNAANNIRAEGIRMLSSSGTGEVNASGEEVRPRRGRPSKLRHSSVKLEAPTSMK

SEQ ID NO: 196 - protein, 467 aa, Moorea sp.
MYKTIPVKANFTDEEQAFWVFQCQQANSLTNCAIYYSKQKHYAWLEQQEEAFTTYWREDVLKYGWKTYKCSIKYAELCKNLKNNPHYKAMAAQSAQQALKTVAESINSYNQLVGHYYSGEVDRPRLPRYRKKGGLAAVTFPRQALTYKQGLFWPSVSIESKPELLCDITLSPPDFIDPDWVKEVAIRPYLGQLWIDWVIDDGKQPIKHNPNLDYCQAWSFDHGGNNWFTGVSTQGKSLIIDGRKLKSMNQGYARLVAKYKAGQPELYWDANLDRVQRKRNNQMRDAVNKTARFIINRCLSDSAKPTLRERIGNIIIGWNERQKDSINIGKRGNQNFVVIPTKRLIERLKQLACEYGIKLTITEEAYTSKASFLDDDPLPRHGEKPSGWKPSGRRVRRGLYRSSKGHLVNADCNGAANIAKKVAAQLGIDLTKAGRGSMTVPHRYDLFRSISKSYRERSEVARVHPAT

SEQ ID NO: 197 - protein, 530 aa, Moorea sp.
VYRTVPVKANFSDEEKAFWIFQCENANSLWNCATYYSKQKHYSWLEQQPEAYTTYWKEDVLRYGWKTYKCNIKYAELCKELKNNPHYKAMAAQSAQQTLKSVAESITSYNQLVGLYYKGQVDRPKLLRYRKKGGLAAVTFPRQAITYKNGLFYPSISKESKPELLAEIVLGSPDFIDPDWVIEITICPDLGQLWIDWVIDDGKQPVEHNPNLDYSQAWSFDHGGYNWLTGVSTKGKSLIIDGRKIKSMNQGYARLIAKYKSGKPDFYWDSNLDSPKATLRERVQRKRNNQMRDAINKAARFIINRCLSDSALPTLRERIGNLVIGWNERQKDSINIGKRGNQNFVFIPTKRLINRLEQLCSEYGIKLTITEESYTSKASYLDDDSLPRHGEKPKGWKPSGKRVKRGLYRSSKGYLVNADCNGAANIARKVAAQLGLDLTKAGRGALTLPHRFDFFTSLSRSYRISCEAVRVHPTASQPYRIPRVSTGGDVNHLSLIGGSSKNATQATHDHDGLLSQKRGQVVYSTHSSSL

SEQ ID NO: 198 - protein, 173 aa, Moorea sp.
SSIEKFYDNCNKQVPGKKGFPKLQKKGRSVEYKQSGWKLSPDKKSITFTDKKGIGKLKLKGTWDLWRFDKKQIKRVRIVRRADGYYVQFCVSVDINEELESSGKTIGLDVGLKEFYTDSDGNTEPNPRFYRTGEKRAIFYQRRVSRKKKGSSNRKKAVNKLGRQHLRISRQRE

SEQ ID NO: 199 - protein, 359 aa, Moorea sp.
MRRAYQTRLKLNNRQKTLMARHAGYYRWVWNWALNMWNEAYKAELKPSANKLKKFYTHHVKPQYPWQSTLSSRVYQFAFRHLSEAFKRFFKGVAKHPKFKKKGRNDSFTLDNCGKVMEFSGTRLKLPFIGWVSTYEPLPEIQTKRVTISRVADSWYISVSYEFEPEATVKSREHLGVDVGVKVLATCSDGTVFANPRAYKQAQKKLARLQRELSRRKLGSANRNKTKLKLALAHQSIVNIRKDTIHKLTSWLCKNHAVIGLEDLNVSGLLKNHKLAGAIADSAFYEIRRQLEYKSEWYGCQLVFADRFYPSTKTCSSCGHIQEMPLKERVFNCEACGYTADRDLNASRNLERYAGGYLV

SEQ ID NO: 200 - protein, 277 aa, Moorea sp.
LRYEKIVAYDLGTETAITAFNGSEFEEVANQRFTKTLEPKVIAAGKEKRRKQAPNFKKGIKASNRWKKANKKESQLKRKAGNARKDWQHVLMQSLMGETPKTALHRKVTSDLSSRYDIGVTEKLNTKGMTGKAKKGSKRKKQKAGLNKAILDVGFGTLNKMLTYKIELKGGIVLQLPTRQLKPSQRCPECGKVHKDWAELSNRYHICDACGFEFDRDKTSAMVMFNAANGKQPGYGTDLEKRGFSSSTSKTSKHTGSIDEATGKDEASKITLIRWGS

SEQ ID NO: 201 - protein, 389 aa, unknown
  TnpB Polypeptide
VVRLKKILKGYTFRLYPNEEQKILIEKSFGCSRYIYNYFLDQTNGRKYIKKFDYIKDLSLLSKEKEWLKEVDSCLLRCSIFNLEDAINNYNKGNAEYPKFKSKTKSRSSYRTNNLTRVYKDKTYNSIEINLKDNIIKLPKLKEIKIRGYRNLDKMEGRIINATIYKEASKYYVSVCVEQYVDIKEVPIRRVIGIDVGVKDLLATSDGIIIKNMKFIEKYERKIKGLNKWLARCQKGSKNREKVKYKIQEVYSKLKNARKYFLHKTSKQLVEENDLIVTEKLKINKMVQNSKLSKKIYDASWYELIRQLQYKSKWQGKICYQINTYYPSSQTCSRCGSINKSVKDLKVRKWECPNCTNVNNRDINASINIMWEGIKAYMGCRNNIELQVK

SEQ ID NO: 202 - protein, 395 aa, Nonomuraea sp.
VGVRRSFRFLLRPTAKQAIALTQCLEDHRQLYNAALEHRRTAYRKAGVTIAYNQQSAELKEIRRADPYGQGRWSAGSQQQTLRRLDRAFAAFFRRVKAGQKAGYPRFRGRRRFDSVQWPAVKNGAAWDSQPHDPVTRVYLLGIGHVRVHQHRRVSGTVKTISVKREGARWFVVLSCDDVPAEPLPATGAAAGIDMGVASLVTTSDGGHLDNQRHLTACADRLAAAQRDLARRKRGSRRRREAVARVAALHARVRRQRLDGAHKAALALVRAYDVIAHEDLRITNMTRSASGTVEAPGRNVAQKAGLNRSILDAGWGVFLTILAGKAESAGRELIAVDPRNTSRTCSRCGHCAKGNRVTQAEFRCQRCGHAAHADVNAAKNILRAGLALREAAQAA

SEQ ID NO: 203 - protein, 369 aa, Kallotenue sp.
MHKAFKYRIYLTNGQRRMLERQLEECRWLYNETLAYRKNAWEQEQRSADWYETKRRIPLLKEDRPSLKAIHSQVLQNVTERVELAFKAFFRRVKAGEQDVGYPRFKGKGRYDSICYPQYGNGVRLDGDRLILSKVGAVHVVLHRPIEGTPKTITLTRSRTGKWYACFACEVEPASLPATGREVGVDVGLASFATLSNGEEIANPRFYRRDEADLKRVQQLKDAAKNAQRWDEHRRRKKALAHIHERIANRRNDFAHKRSRELVNCYQVIVFEQLAPMEMGRSRGMRKSIMDVAWSQFISMTVAKAEEAGRRVVLVNPRDTSKMCSSCGKLVQKTLSDRTHTCPHCGLVMGRDHNAALNILHRGLQTLQL

SEQ ID NO: 204 - protein, 290 aa, unknown
  TnpB Polypeptide
MKKSEKNINTVLDDNIKNISSNIFLPTDNNIKKVNVAKTLDEKWLGTSKFINSDASEKNIKLIDRREQERKFQNKYIFVKPRNKNILKNNNVCAIDPGTINFLTIFTDNSVEIIGKDVIHIIFKKCVKIDKLLFSMEEQNNDGTYVLKSKKRRGINKKICRILKKLNFIKEELHNKAIKYLTDNFSKIIISPFEEQTCNKLCSDLAINNCNLNFYVFMKRLRAKCIEFDIKLIIGDEYLTTKTCTACANINKNVNIKNRKIQCSNCKIIIDRDFNASRNILLMHNFEKKN

SEQ ID NO: 205 - protein, 521 aa, unknown
  TnpB Polypeptide
MFVSLQFKLELKKEEKEKLIQLMRKQSSAIRVAYNMLKELKKEKAKNIHSQIYQRLRQLFPDLPTQYITSAIYKAEQYPTDKSVVFGGKRLFEKLCKNHLTGKAREKLKKQWKELRQGTLISIGSKGDKGNRLMRFEDKEGRLHLRITTGNREWISAKVLREPSNSRDKWITFMLMLLESWKTKNYFAYTVELKLRDGEIYGSVSFELPTPEVKYTKENGVIAIDTNASPIHLAIAEVSKTGELLSYQTISLHHLLGLSKNAKDHQEWILANKIVDLAIEKGKAIAVENLKRLRKGKRGDGKVTLRKILHHWNPKKFLQKLKRVAMIKGVEIVEINPAYTSVIGMLKYAPQLNIDKDVAGAYVIGRRALGFKEDMPENYERLLKDKAYLEFALNRYEEREKELRELLEEETNQYKRNALESELRSVESSKKLLTNLLQSFQSESSGCEGAYGRNPEQGETKKVSQSAWQVLKVALLFPILGKVLPRDLSPLKPVLVEGVWDRVRSRLVPLEVGGTVPMRDF

SEQ ID NO: 206 - protein, 533 aa, Xylanimonas sp.
MVAFVAESGRGASGLRVIADPFVVAPPRGVHTRSRVRVTATEDAALTRIGEVLGVAYRQTLASRLRLGAATSGQVAEWRRVTKKSLTPDTSARWAGAITRTAQDSYRTGMRGLGAEVASLSAAVAAIAARLAVPMPESGRNVGRSERKAARGYATASERHAKSRRKAQLEERLAAAMERQSAGHPRVVVGGGQLWRNRHHLAAAKMTLVEWDRRWADGRMFFTADGESGKSGGNETIRVSADGSVDIKVPGALASEFGVRLSISAPVSMATHRGDEWTQRVADRQAIRYDLHRDARGRWYIDASWTRDEPVATPLAGLRAHRTLGVDLNNGHVDAAVIDPHGNVVGVPQRIDYRIDGTAGHRDAQVRHVVSRLIHMAVAAGCASISIENLGFDDARSTGRETMGRGRRGKRFRRVVAGLPTSRFRDRLAAMASTAGVSVIAVDPAYTSRWGKQHWLAPLRDSDSTVDGHRAAAVVIGRRGLGHRARRKSVEPLVRQRTHQGQSAVPAVRGSLTSRSRVTVRPRARDAAGSPDD

SEQ ID NO: 207 - protein, 387 aa, unknown
  TnpB Polypeptide
MQTITKTCKIKLNVSEDRKQDILETFKQYNFALNFCIEQAWKPERKIVNKSKLHKETYYPLREKTDLPANFICSARNKACDVIRGNIIKWHNHKKATKPVFKPLSAIQCDKRTLTIKNRHCTFSTINGRVKADYFLGNYQKQILDDPNYEFRTATLTCRNNNFFLNITITKPALVKKPETVMGIDLGIKNIAVTSTGKFFKSGFLNDSRRQFREKRAKLQSKGTRSCKKVLQRISGRENRFSDWILHNISRQIVNEAINHNAEVIAFEKLIGIKERAKQWRKEERAKVNLWTFSKLQQFVQYKALEAGIDTIFVEAKYTSQRCSKCGHIEISNRNGLSFICKHCGYSLNADYNASKNIAIKALSGKSPDWTEPPSKLALKTKHFACV

SEQ ID NO: 208 - protein, 358 aa, unknown
  TnpB Polypeptide
MDYKAEMVQVKVGDTFQEREIQVLSSQMKQALIKRLQDNVMALSKLKEKGLKVGRIKFVKAVHSIPLMQYGVTYWVKKDNKRVHIQGIGNFKVSGLDQIPENAEFSTANLVERNGDYYLLVTCFLPKEDKHENGKAIGIDLGVKNQVTFSNGVKLQYSVPLSQRLRRLYHFFSRAKPGSRNQDKLLSKIKSEFEKQNNEKMNIINKVTHFVTTNYSQVVFQDDNIRSWQKLFGKKIYETSIGGIRNALKRKASTPVEVGRFVKTTGVCPVCRTYVKLDLSQREFTCPSCNSTFDRDVASAIVILKEGLSLWNVGETPGDENASAMMEYLQSIPHVSVSMNREALSERAGSSHSFLIIK

SEQ ID NO: 209 - protein, 449 aa, unknown
  TnpB Polypeptide
MKGGFAVKITSSYAVEIRKQKMFDNTIKIYREAVSFLIDCFNKEWGSIQKVEGTKSRKSFAEKLIHTTKHSTAKYDFDAKFYKFPSYLRRAAIQAALGSVSSYYSNHKNWETNSKVGKEPKLQCDRFCFPAFYRTIMYEESNKPNQCYLKLYKDNDWIWIPIAMRSTDVKYITKYWSHCEKSAPTLEKKYGKYFLRFAFVEKVELSEIQIQDRRICAVDLGLNTDAVCSIMTADGTVLARKFINFPSEKDHLYHVLNRIKRKQREHGPNSAAAMWRYAKALNNDIAKKVAAAITEFAVLYSVDVIVFEHLSFTGKKHGGSKAQKLTMWKRNSIQDYVTQKAHRCGIRISRICAWGTSKLAFDGSGALERDKTNHALATFASGKQYNCDLSASYNIGARYFVRELLKPLPAMVRSQLSSNVPNAERRIQVTLATLKVLYPELKKLGTQAA

SEQ ID NO: 210 - protein, 493 aa, unknown
  TnpB Polypeptide
VSALNITSSYQVRIVNCSVNLNDTVRVYREALSYLIGIVNENWDAVKSITTGALEQRRYIEKLVHGNKNREAKYPEFDKKFRKYPSYLRRATITAAIGAVSSSRSNLANWENTDKQTAAPTLQIDRKAFPTFFRDDMFEVEGAPEKVKVPKNPKAKDKLTPEEKKIEKEKRQAAQLKNSQNEITALNDKHTVHLKVYHKNDWVWATVTLRKTDIAYLRKYWMHACASAPVLEKRFGKYSLRFSFEENIPLSKTPIKKQRICAVDLGLNTDATCCIMTADGTILARKFINFASDKDHLYHVLNRIKKFQRLHGSREAHNFWAYAKRINDELSKKIASAIVEFAVLYSADVIVFEHLDFKGKKASSKKQKIQMWRKNGIQHIAEHKAHRCGIRISHICAWGTSKLAFDGSGALKRDETNHALATFANGKQYNCDLSASYNIGARYFVRELLKPLPAMVRSQLSSNVPNAERRIQVTLATLKVLYPELKKLGTQAA

SEQ ID NO: 211 - protein, 398 aa, Lachnospiraceae sp.
MNKALKYRLYPTKSQMQMFAQTFGCCRKVWNLMLSDKIESYKTTGKFVSVTPAQYKSDYPYLKEVDSLALANTQLNLQSAFRNCFCKTRKKRNAFPKYKSAKRSHKSYTTNNQKGTVAILGNFIRLPKVGAVKAVIHRMPDQDWRLKSATISQDSDGKYFASVLFEYESTSVEPVLCTENAIGLDYSSKSLYVDSDGNNGSHHKYYRESQKRLAKEQRRLSRKTGSRKGESKSSNYLKQLHKINKIHKHISNQRKDQLHRLSTGIANRYDIVCVESLNMKSLANRSFGNGRSTLDNGYGMFLDMLEYKLSDRGKCLVRVDKWFPSSQLCHCCGAINPLTKKLDVRKWTCPVCGETHDRDINAAKNILTEGMRIYKQQLNKIAARWPARAMAQFYFIEK

SEQ ID NO: 212 - protein, 536 aa, Lachnospiraceae sp.
MADEEYSKVLKKFHKLSDRHILVVETDMSYSDVIKVVALSDKIRKAGNELVGLMKKNHDQLMRTKKYRKLRELYGGTEDKDKRKDLARQLNEMQAEYNVTWDFCRISMIPIGKKYGIDAIFALTKAEDVWRGIEKCLYGNGKSIHFSQYGELPCIRAKQINRGIPISVKDNKIRFKLGKTVFGLQLNDRFQQDEANAVLSYLTKPEIIDAKAVNILLEEAICIDTYRPCYATLVPKIIRGKYRVYLHLTIEGKAKPQYDKFGNPRHKYGKGIIGADIGTQTVAYTSDTEVGLKNLSERGNSIQKSEHLERLYYRAMDRSRRTTNPQNYNPDGTVKKGRKTWKYSNHYKKIKAKHSELCRINAVNRQLAINEDTNHLRSLGDVFVTEPKNAGKLMKRAKVTTINSKGKFNRKKRFGKSIKNRCPSGFQATIEKKFKSSGGTYIEVPQNYRASQYDHTADDYIKKKLSDRMYKLTDGTLVQRDWYSSYILYCYDYRTQGIDKNKCITEFDKHYNKEKALITWIKVNKIKVLNSGIKVA

SEQ ID NO: 213 - protein, 396 aa, Lachnospiraceae sp.
LKVRGRRNEAEIPVKRRNDTERYYMANKAFKFRLYPNQEQSVLLSKTFGCVRFVYNRWLDRKIKQYEEDKTTVTYTMCAGEMAELKNEEGYTFLKEVDSIALQQALRHLDTAFQNFFHLPQTGFPRFKSKKSNRNSYSTVCVNGNINIADGFLKLPKIGRVKVKMHRVIPEGYILKSVTISKTPCGKYYASILYAYELNTVEKKMDRYLGMDYSMHELYIDSNGNEPEYPGYYRQAEKKLKREQRKLSLMQKGSNNRNKQRVKIARLHERIANQRKDFLHKQSRQITNGYDCVCVEDLDMKKMSQTMKFGKSVSDNGWGMFVSFLQYKLEEQGKKLVKVDKYYASSQICSCCGYVNEEVKNLSVRQWICPDCGAHHDRDINAAINIRNEGMRIVSV

SEQ ID NO: 214 - protein, 384 aa, unknown
  TnpB Polypeptide
MKLIQTAKLVIDCSPTEFQSTLIAYTNAFNHICQVGFNSKDTNGVSLHHKTYQECRKTLPSQLSISARTKATETLKSVQAIIKNGKKATCPKSKQTSIRYDINSYSLWLSKKLVSISTINGRKKFNLVIPKYFERYLDWKYTTADLLIKDNKVFLHVVFEKEIADIPSNNQIIGIDRGINKIAVLSTNKFFDGKKIKTISRKYEKIRSMLQSKGHSGKRHLRKIKSKEQRFRRNVNHIVTKQIVNSIESGSTIVLEKLTGIRNAKARKEQRKELNKWNFFQFEQFLKYKAIAKGIKVEYTPAQYTSQKCSKCGIILKSNRKSQAIYECSKCSFCLNADLNASRNIRQNYLDAISNPSGASVNKPNAPSTVLQVVEQAQPSLVVG

SEQ ID NO: 215 - protein, 409 aa, Halomonas sp.
MQRLQAFKFELMPNGEQVRKMRQFAGMARFVFNRGLALQKARYEAGDKKLGYAGLCKQLTGWRNSDDTPWLKEAPVHPLQQSLKDLERAYANFFAKRADVPRFKKKGRHDSFRYPDPKQIRLDQGNRRIHLPKLGWLRFRKSREVLGTVKNVTVSQTGGRWFISIQTAREVEVPVPQGGAVGIDLGVTRFATLSDGRYLEPLDSFKRHQEALRKAQQSLSRKSKFSNNWKKAKARVQRLQVRIANIRRDFLHKASATISQNHALVVLEDLQVRNMSRSAKGSIEQPGQNVRAKSGLNRSILDQGWYAFRRQLDYKLAWKGAHLVVVPPRNTSRTCPECGHAAAENRRSQSRFACVECGFVANADHVAAINVLRAGHARLACEVSGAARPPAAGTHRSDSAPAVGCALAP

SEQ ID NO: 216 - protein, 402 aa, Escherichia sp.
  misc_feature (37)..(38): Xaa can be any naturally occurring amino acid
  misc_feature (59)..(59): Xaa can be any naturally occurring amino acid
  misc_feature (74)..(74): Xaa can be any naturally occurring amino acid
VKRLQAFKFQLRPGGQQECEMRRFAGACRFVFNRALXXQNENHEAGNKYIPYGKMASWXVEWKNATETQWLKDXPSQPLQQSLKDLERAYKNFFRKRAAFPRFKKRGQNDAFRYPQGVKLDQENSRIFLPTLGWMRYRNSRQVTGVVKNVTVSQSCGKWYISIQTESEVSTPVHPSASMVGLDAGVAKLATLSDGTVFEPVNSFQKNQKKLARLQRQLSRKVKFSNNWQKQKRKIQRLHSCIANIRRDYLHKVTTAVSKNHAMIVIEDLKVSNMSKSAAGTVSQPGRNVRAKSGLNRSILDQGWYEMRRQLAYKQLWRGGQVLAVPPAYTSQRCAYCGHTAKENRLSQSKFRCQVCGYTANADVNGARNILAAGHAVLACGEMVQSGRPLKQEPTEMIQATA

SEQ ID NO: 217 - protein, 402 aa, Escherichia sp.
VKRLQAFKFQLRPAGQQEREMRRFAGACRFVFNRALARQNENHEAGNKYIPYGKMASWLVEWKNATETQWLKDAPSQPLQQSLKDLERAYKNFFQKRAAFPRFKKRGQNDAFRYPQGVKLDQENSRIFLPKLGWMRYRNSRQVTGVVKNVTVSQSCGKWYISIQTENEVSTPVHPSALMVGLDAGVAKLATLSDGTVFGPVNSFQKNQKTLARLQRQLSRKVKFSNNWQKQKRKIQRLHSCIANIRRDYLHKVTTTVSKNHAMIVIEDLKVSNMSKSAAGTVSQPGRNVREKSGLNRSILDQGWYEMRRQLEYKQLWRGGQVLAVPPAYTSQRCACCGHTAKENRLSQSKFRCQACGYTANADVNGARNILAAGHAVLACGEMVQSGRPLKQESTEMIQATA

SEQ ID NO: 218 - protein, 527 aa, unknown
  TnpB Polypeptide
MFVSLQFKLELKKEDKEKLIKLMRKQSSAIRTAYNMLKELEKERTNNPPTQWKTTIYHRLRQLFPELPTRYIDSAIYKAKQYPADKSVVFGGKRLFEKLCKNHLTGKVRERLKKQWKEQRQGTLISIGSKSDKGNRLTRFEDLNRQLHLRITTGNREFIYAKVLREPSNSKDKWLTFMAMLLESWQNQNYFAYTVELKLRDGEIYGNVSSELPTPEVKYTKENGVIAIETNASPIHLAIVEVSKTGELLSYQTISLHHLLGLSKNTKDHQEWILAHQLLDLAIQKNKAIAVENLKKLKKGVRGDGKAKLRKRLHQWNAKKFLQKLKRVAMLKGVQVIEVNPAYTSVIGMLKYAPQLSIDKDIAGAYVIGRRALGFREDMPENYEKLLKDGAYLEFALKKYEEREKELTELLGKETNEYKRNALKSELKNVQNAKKLLTHLVQSLQGEPSGCEGAYGRNSEQGETKKVSQSAWQVLRVALLFPILGKVLPRDLSPLKPVLVEGVWDRVRHSNGLVPLSAGGTVPIRDF

SEQ ID NO: 219 - protein, 372 aa, unknown
  TnpB Polypeptide
MANKAYKFRIYPNDEQAVLFAKTFGCVRLVYNHWLDRKIKQYEQDKTAVGYTACAKEMAEMKKTEAYAFLKEVDSVSLQQSLRHLDTAFQNFFRQPKTGFPRFKSRKHNRNSYTTVCINGNISMSDGYLKLPKAGQIRIKQHRPVPSGYRLKSVTVSQAPSGKYYASVLFEHESKEPEQVLHSFLGLDYSMHELYKDSNGNEPQYPRYYRQSEKRLKKAQRKLSLMQRGSKNRDKQRIVVAKLHEKVSNQRKDFLHKQSRQITNAYDCVCIEDLDMKAMSQVLNFGKSVSDNGWGMFVGFLKYKLEEQGKKLVKVGKFFASSQTCSCCGYVNKETKDLAVRAWDCPECGMHHDRDVNAAINIRNEGMRIALA

SEQ ID NO: 220 - protein, 428 aa, Acidobacteria sp.
MPATIEFFTDPHGPKYIKTMLRRQAYRFELRPSGQQLRNLRQFAGSCRFVYNKALALNTARYNKKEKRLGYAGLCALLPNWKKEHPFLSEVPAQALQQTLKNLERGYTNFFEKRSEFPKFKKKGQRESFRVPQGFGNGRIKLPKIGWLGYRKSQEVLGEAKNVTISESCGKWFVAVQTEREVETPLHRSTSAVGLDWGVVRLYTLSNGEYREQCQPLKRCLPKLAKLQRRMAQKIKFSHNWKKAKAGIARLHQRIANIRKEFLHRSSNEISKNHAVVFVEDLQVRKMCKSSKGTKDQPGKQVAQKSGLNRAILDGSPFELRRQLQYKTEWRGGLFYAVPPQNTSRTCPVVWGGCGQVSADNRKTQAKFVCLKCGLSANADFISAVNIREAGLASLACSQPSHAVSASWQEPTEGIHRLGVEPVGIPGL

SEQ ID NO: 221 - protein, 503 aa, unknown
  TnpB Polypeptide
MAKKSKTSSFSHEFQLKTTPKDNRILDIRLDAGRNLYNACLGEALKRLARMRSSPEWQHAGKMSKGKQRTALFNSARNQANYSEYALHAGVGNLRNSCWIGDHIDSLTAQKIAARAYKAVEDYQFGKHGKPRFKRKGWMSSLEGKNNKAGIRWCNDHIEWSGLNIQCLFDRKDRFGVQAHALSHDVKYVRLVKKNIRGTARWFVKLVLKGTAKIKRENQIGAEAIGLDIGPSTLAVVGDTDAMLTEFCPEVGIPYKHIRLTQRKMARSLQTANPDNYNEDGSVKSGKKQWFFSSKYQALKSELAELQRILAETRKRAHGRLANKVMALGTRIKTEKLSYKAFQRAFGKSVIRRAPGKFVGILRRKAENAGGKVTEFSTRSTKLSQSCHCGRVTQKPLSKRWHACACRVKAQRDLYSAFLAKHVSNDILDTRQAAEAWPGANLLLERAVSRVQCEAANGRNHPASFGVNRRQSCLPVKDGSTTVEAGNIAFIARETAGIAVRTP

SEQ ID NO: 222 - protein, 359 aa, unknown
  TnpB Polypeptide
MQIQKVVKCKVVGLTKTKQNCIETEHDNLQNLLQLESQGVDFLPVYQSIQLHSANKQQALRFYKHINPDHEYALSLRNDLLKVEFKPNNKVAQHWAKIPNKSSKKLWVAIKPHIKGIDFSQYRLGESKLFRKEQTWWLYITVIKEVQMKESYSNVVSIDLGSKVMATVCGSQGNQRPMFLGREVRGIRRHYQHLRTELGMKKLNKKIKQLSDKEQRTVNDVLHKTAKQVVDYAEQTDSYIVLGDLKGIRKSSAKKGRRFRRIVSNMPYLKLTQYIEYKANERGIKVERINERGSSQTCSKCGYADKANRKSQGLFKCKSCGYEINADVNGCRNIAKFSKGYTPSERAVVTQPQTLRCIT

SEQ ID NO: 223 - protein, 351 aa, Actinobacteria sp.
MPRFKSKRKARLACRFTTGTIRANADGRHVTLPRLGTIRTHEPTGKLLARVQAGTARILSATVRHERGRWFVSFQTEVRRDLVRVARPDVAVGIDLGVKTLAVMADSAGEVREIPNPRHLDGALKQLRRTSRAISRRRGPDRRTGLKPSRRWEKANTARNKVHHRVANLRADALHKLTSRVAAEYGTVVVEDLNVAGMLRNRRLARQIADAGFAEIRRQLTYKTQRNGCRTVVANRWYPSSKTCSRCGAVKAKLPLHVRTYACDACGLVLDRDANAAHNLAALAAAAVTGTGVAGDLDTPKVSKPRGADQKTRTTRPSRKATAERAGGATLPHQRQTETRDRTQTEALTLR

SEQ ID NO: 224 - protein, 208 aa, Blautia sp.
IRIYPNKEQITQIEKTIGCSRFLYNRMLADKIRYYQEEKKMLKNTPAGYKKEYPWLKEVDSLALANVQLNLEGAFRKFFREPGVGFPHYKSKKHSRKSYTTNMVNGNICLQDRFLKLPKMQPVKIKLHRMIPEGWKLKSVTVSREPSGKYFASLLFDCENQTAEKRQAEKFLGMDFAMHGMCVFSTGERAGYPMFYRNAEKKLAREQR

SEQ ID NO: 225 - protein, 397 aa, unknown
  TnpB Polypeptide
MLVLEFKAYAKPDQFQAVDEAIRICQFIRNKSIRLWMDGGAKSWFDLSKYCAIWASEFDFANKLGAMARQASAERAWASISRFLDNVKKGIKGKRVGFPKFQKDCRSVEYKTNSWKLSEDRKSITFTDKCGIGKLKLKGTRDLNFYQPDQIKRVRLVKRADGYYVQFCISVDREEVISPTKNTIGLDMGLNHFYTDSNGKQVKNPRFYRQAEQSIKRSQRLVSRKVTGSSNRRKARVKLSKIHLKISRQRKDHAIKLARCVIQSNDLVVYEDLRVRNMVKNHCLAKSISDAGWYQFRVWLEYFGKVFGRATVAVNPAYTSQECSSCGVIVKKSRSTRTHVCQCGCVLDRDENAAINILNKGLSTVGHTGRSALDADNAGGDSISTSVGENLLGQIES

SEQ ID NO: 226 - protein, 412 aa, unknown
  TnpB Polypeptide
MAHQVLRSYKYRLYPNKSQAQFLDCNFGAVRYLWNKFVASFNNRDVGPCLPQNEKIIKDMPGHEWMSEAISYALQQKRMDWDEFKKQFFSKKRKTKLGRPKFKKRGVSNDSFRIPVASLGGPDKIDLDSGLLKLPKLKLPIKMVVDRKFSGEARSVTLSKNKCGQYFVSVLVLEDVELKQNTGRSIGIDLGLKDLLILSSGMKIANPRWFRESQSKLKRAQQHFSRKTKGSKRYEVQRVKVAKIYQKVTLQRQFVYHNLSSWLVDNYDTIVLESLKVKNMIKNRKLAKSIQDASWSTLVSMIEYKSNWYGRAFHKIDTWYPSSKTCSSCGHKLDQLELSVREWTCPDCGEIHDRDLNAATNILHKGLDDLYGITSAELTEYRRGEAIRPEVSLPKAASVKRLVSFIDFYKTT

SEQ ID NO: 227 - protein, 287 aa, Nocardia sp.
VQLRHNVRLYPTGGQQQSLARAFGCARVVFNDAVAARESARRSGLPYPTDSELSRLLTEAKRTPERAWLAEVSSVVLQQAVADANAAYRNFFASLTGKRKGPRIGLPRFRSRKDNRQSIRFTKNARFAITPGGKLRLPKIGDVSVRWSRELPSAPPSVTVIKDAAGRYFASFVVEVTDVPLPPRDSEVGIDLGLTTFAVLSDGTRIESPRFLRRAERRLRKAQRSLSRKMKGSSNRRKARVRVAKVHAKVADTRRDWAHAVHEDRPCAGWSASQNRCRFGSGRVRVG

SEQ ID NO: 228 - protein, 429 aa, Okeania sp.
MYCCQQVLVGKNPELIPILTFLCEQSHKLTNMGIYYGRQLYFKARIGIGKYDLEKVYKHNYNYKVLHSQAAQQILRTIAELFRSYYGLIIAYTESKIPDRPRIPNYRKKGGLTTVSYPAQALKLKGNQIRLPLGNTCKRWFGTDSFFIPIPSIRAFSAIKELRILPRNRCFYWEFVYDKEVVIKPQLNQENVLGIDHGVNNWLICVSNVNTSLIVDGKQIKSMNRWYNKQISTIKENQPQGFWSNRLGAITEKRNRQIRDGINKAARVVINHCLKNQIGTIVFGWNQGQKNEIKLGKKSNSEFVPIPTARLKKRIAQLCDEYGIIFIETEESYTSIASFLDGDNLPNYGEKPDDWKPLGKRIKRGLYRTGNNWLINADCNGAANITAKVSRKLGLNLSRLCRGTIKLPPETVSLVSARKNEATWIYPVA

SEQ ID NO: 229 - protein, 260 aa, Brasilonema sp.
MGWISTYEGLPHTTVKSFTISQQAGDWYISCSYEIEPQIREKEFDYVGVDLGIKELAILSTGLVFSNPKALKNAQNQLTRLQRELQRKEKGSNRRNRQRLRISKAHRRVSNIRKDATHKATSYICKNHAVIGIEDLNASGMMSNHKLAGAVADSNFYEFKRQISYKALRYGSDVVLVDRWFPSTQLCSCCEHKKPMNLSQRIYSCDRCGSVLDRDFNAALNIENYARRAFAVPGHAPDNRSHAPVEVSIEIDVISCLGFE

SEQ ID NO: 230 - protein, 251 aa, unknown
  TnpB Polypeptide
LKKEYPQIKEKLWKEADSLALANVQRNLEGAFRKFFREPKVGFPNYKSKKFPEILYNKYDKWKYLPAGKVSETAKDDTHKNKTSSFDTGVLRKSLPGNRENFPDAKRAAGTIRNRGKGLHYVMKRIKNQRKDFHHKLSHDLAEKYDAVCVEDLNLKGIAGGLHFGKRIQDNGYGQFLSMLGYKLEERGKYLIKVDRYFASSKICSVCGNRKKELALSERTYICECGNRMDRDVNAAVNILKEGKKVYKKCA

SEQ ID NO: 231 - protein, 405 aa, unknown
  TnpB Polypeptide
MRLTEKHQIHKKHKLYSICDELCFNSKNLYNASLYEFRQSYIDKNRKELTWIDINKLFVKKEQVDYKRLPSKVANAVLKKLGNNITSFKGLLKAKKEGTIKNKVRLPKYLHKTQGRFVVEFNSQMIGTKRDKNGYLIISPRDLKLTIPTRREEVKQIRIVPKLNHYVIEVVYEVKEEELRTGVVVGAIDLGLNNIATIVTNDKKEPLIVSGRKLKSINQYYNKNIAEKQSELPKNIYTSKNIEKLWTKRGNKIDYETHKISKYIVDFIDKREVSKLIIGNNGGWKQGINLGKKNNQNFVYIPYKKIIDQIIYKCQMKGIEVIVREESYTSKASFLDYDYIPTINEDDEVKDFSGKRIKRGLYRTNKGKKINADVNGAYNIMAKEDLNYIKTKREELSFSPKLVRL

SEQ ID NO: 232 - protein, 499 aa, unknown
  TnpB Polypeptide
MKKKKKKFGISDKILNKFEKIIKRNNKVIDTDTDIDIDGNEDKYDILFKKILVNTNNLWFPDKKNKLDDKISNNNGKNGTQYTSHSWFNITEYTSNLENSNYDAKISSPEVDELVKCQKIKMYPNQLQKELLLNWMKSYITMYNETLKIFKKFRFNKEKTLLNWKKLRTKYLKGIKNDIINKSQLEKGIPIIDNKPINTKVNGHILDFAIQDACSKLKSCITNVRNGNIKHFRMRYIKQTKKTMILKIEKSFINAKKNTFCSTIFKDSFKFQDNFQLKDINCDFIIHYNRKIDEFQLLNPIKIQQVNDNIPNNSCSLDPGIKTFLTLFSNNMCAKIGDNLKDKIIKYHYQIERMDRANKRERIKEKIRRKYHKKIENAIDDLHWKTINYLTKNFNNILIGNLSTKGIIKNKLNNELDKKTKIVAQFMSLYKFKQRLEYKCQVKKIGYEEIDEAYTTKACTKCGYKNEVGKKRYIKCAFCKLSIDRDFNGARNIMLRGTN

SEQ ID NO: 233 - protein, 404 aa, unknown
  TnpB Polypeptide
VFNLTFEFKLKPTKAQTTVFEDWLEQCRKVYNYALRERKDWYNSRKCRINACSLQSEFIIPADAPRPTYLSQCKALTAYKKTSSVLQRINAQALQQVLRRLEKAFVSMWEQKHGFPRFKKRGTMRSFMFPQLGVEPIQNSAIKLPVIGWVKFRQSRPIPDGAILRQVRIVRRASGWFAMLALQWDVEIPESMPHGEGIGIDVGISHFAAISNGKLVPNPRPFKTLECKLKLLQRSVLKKGKGSNNRKKAQAKVSKLHERIANFRKNYHWLVAHSLCDLAKMIFVEDLNLKRLARGFLGKHCLDAGWGQFFQILEQCCRKRGVFFLKVDSKKTSQICPNCLTETGKKELSERVHLCQHCGYTTNRDVAAAQVVLIRGLAAVGYTVKMLFEGKVITLPVMKESSCL

SEQ ID NO: 234 - protein, 435 aa, unknown
  TnpB Polypeptide
VKITQSYGIKFKGGYKAIKRTIAIFNDAVNYLITPVQENYDAIAKIGSSLKKMNYVEKLVHHTKGNKAVYDFDNKFYKFPSYLRRSAITKAVGIVSSYMSQIENWKANNCKGAMPKLDMGNHLMPCFYKKNMFNCTNGEAYIKVYRNNDWVWQQIKLNHSDLRYIENKASLDKWSAPVLEKKYGHYELRFTREFQVELFNKEIFEQKVCAVDLGITNDATVSVLDVHGTVLSRKFINCGKEKDSVTNALHRVSSFQREHGSHDAGRLWNIAKRRNLNHAHLAAHKIVDYALANSCDVIVFEYLDTKGKKKGSKKQKLSMWKHQDIQNTVERLAHSYGIRVAHVCAWNTSKLAYDGSGVVLRGKKVSEATPYDICRFQSGKTYNCDLSASYNIGARYIIKELIKILPNIMTEVSNIGSGTSRTLSTLWNINSVMMI

SEQ ID NO: 235 - protein, 405 aa, unknown
  TnpB Polypeptide
MKRIMKFYKTLKIPIQGNEEKLDELHNCWIKLLNAVVKYTVSLGSAKQLDIQNALYHPLRNYTKDRWNLHSSHLPVLFKTASEIVRSCLEACKSNCRTRFPKIHEKIPIVLCQNTCKIYKGDSLHARIAYEPNNPIDIKLLPSKEHEQLLEETIEKRNNLRIHGLKLLKREDRWWLYVSLKKDIEIRKWEDCQTAIGVDMGLNHIVVCSAFDGKPHKPLYIHGDVWKQLVKERKEKFSKLQGVGKDLHEVSQYYSRRLDEILHTIAKRTVEYAKNFEKPVIVMEDLDVTVKRQTENKKWNYLLSTWARRKLQNLIEYKANWEGIPIFKVNPYNTSKICHKCGNIGKRENGMFRCSNCNKKYEADYNASVNITKCFFVYKQRRLSRAIVSAQLSGASNTQTTTNFN

SEQ ID NO: 236 - protein, 312 aa, unknown
  TnpB Polypeptide
MGERQLRQIRDHSQHRQRPLLGHPEPSHSRGEIRPQQGRSGSIPREPAVRYQQPELGTRHNRERYGRRWLPVRLSQWWYTPIEVYDDIDDHVDRLVEGNAKKTRLQVYRRGDDWYCTFNIEYDTDTSGETPIGVDIGERHILAATAYDEDESMLVSGGEAKYVRRKYRSLRDSLSEAGALRARNRVGDKEQRRINDLNHKLSRRLITFAEQFENPVIRMEDLEGIRENSSWSGVHSWHFHQLQQFITYKAGRVGIRVEKVDAYHTSQQCSACGSMGTRDGDQFSCAECGRGRHADLNASENIAQREGEPCTA

SEQ ID NO: 237 - protein, 493 aa, unknown
  TnpB Polypeptide
VVLITTGKELKPFWNSYCEEIGSRLWLPTETNSQGLEQNCLSSYLRVTEENSWFSVMKRNLQNKNSQKVYSQFSMYSHTGVMEVINTKKIRIKPNKKQQQFLKEWIGSARNAYNYVISKSNDHRSLNEETLLSLQASGLTYDQAKEVIKTSTFPTWMELKKKDNFEFWETREEWLKPIPSKCFTEAFKHACDARKAGFKKGSKFSLKFRSRKDKIQSCFIPKSAIRSDGIFKLNMKRFCGIGEIIFTEDLPKNHLDSELVLDHGEWFLCVPYKKKLKPIESQNRVVALDVGIRKFLTFYSEDSCGFIGKNVTDRLFRLSKVLDGVVSKISRSSGKLKRVLKCKADKLRIKMKNLVKELHYKVCNFLVKNFDLVLLPHYEIKNFVIACGRKLNSKSVRNMLSLNFYKFSQTLIRKFNEKKGFLNINGTLYSRVVRVNEAFTSKTQTWNGEIVNIGSKETLKISENATIDRDINGARNIFLRALVDSPILRDLTS

SEQ ID NO: 238 - protein, 258 aa, Hydrococcus sp.
VGTASDMLLGFKTELKLNNKQKTLLAKHAGTARHAWNWGLDLTKAILNNNKICQPENKIKFPTAIELHKWLNRLVKPDNPWYYESSKCAPQYALRQLRDAWDRCFKKISSSPKFKKKGRHDSFTLDGSIKVEHFKIKVPVIGWLKTYERLPQSYQPLGTPEQVRVPARGRRPKSVTISRQADRWFISFKIEVAERETPKLINHVGVDLGVLQLATLSTGEVIEGAKSYRKYARKLARMQWLNRHKVIRSNNWKKPKSK

SEQ ID NO: 239 - protein, 467 aa, Xenococcus sp.
MVQQNIRSEKWSIVATSREKELLEKTVGEFRCLVRCLVGVIHTHWSNIGQLDAKAQISAIEKLIHRTAKNPNPKYQYFNSRFHKFPSYYRRGAIQFAVGQVSSFLTRYRMWQSGIRNRKNARPPRLNAECGAYPPLYKGQCIKFSDDLCSAGIKVFTGTDWIWITVGLTGHRQRHLDLANKRKSPYLVTKKKGCHLSVPFQYKRAKLPEAQSVLAVDLGINTTATVSVINYDGTVSHREFIHHGRDIDRRDKRLKRISAKASRTGKLQKGFCRNLYRKANNINREIGQKASTRLVKIAKQFKVKYIVFEHLKGWRPKGGKRRSTLKQRFHNWLHRRIVNLTEMKWLELGGKLVFVNPRGTSSYAFDGSGKLKRDRNNYELAIFSNGKQYNCDLSASYNIGARFIYSLGTRPLADYNSAESHRKLTSRNGSQDKQGKSSCLSPRSRGTLSMLWPQSIAIVEQDTTSSL

SEQ ID NO: 240 - protein, 384 aa, unknown
  TnpB Polypeptide
MVHMTKKNTARFDFDLRFPKMPSYLRRSAIQHALGSVSSYETRLGQWKETGVLSGRPKLTCRNHAMPVFYRDVMYREGAEGTDEAYLKLYDGHDWKWFRVYLKRTDMEYLRRNWKGKKASAPALEKRHRRYFLRFSYTEEVTLTKTPVKEQIICSVDLGINTDAVCTIMRSDGTVLGRRFIDHPSEKDRMYRTLGRIRRSQREHGSAQTQGRWAYTKRLNTELGKKIAGAIVRYAEENHADVIVFEYLEMQGKISGKKKQKLHLWRKRDIQKCCEHQAHRKGMRVSRICAWNTSRLAYDGSGAVTRDWENHSLCTFQTGKRYNCDLSASYNIGARYFIRELLKPLPATERSLLEAKVPPVKRRTSCVYADLRKLHSEMELLKAA

SEQ ID NO: 241 - protein, 398 aa, unknown
  TnpB Polypeptide
MYLVERHIIKSNNPLRKELDNVCFLSKNLYNKALYLVRQHYFSTKEYLDYYKLSKLLVDTKDVDYYALNTKVSKETLRLLDRNFKSFFALLRKKKNKDYNKSINIPRYLDKQGRYVAIFEKGAVSTKFLKKGLIKLANISITLVTKVTIDNVVEVRVLPRNNHHIVEVVYKKEEKPLLANNGRYASIDLGLNNLATISSNVEKPFIVNGKPLKSINQRWNKHKANLQSRLTNNTGSSKQIELITNKRNNRVKDYLHKSSRKIVNFLVSKNISTLVIGYNEEWKQNISIGKINNQSFVSIPFHSFIQQLEYKCRLEGINVVLTEESYTSKCSFLDNEPLEKKDTYLGKRVKRGLYKTAKGRLINADLNGSLNILKKVIGEFQYSIEACCTPARITPSFN

SEQ ID NO: 242 - protein, 354 aa, Marinobacter sp.
MSDTVTKTLKVRVRDKHAKALRRQAASVNVVWNYVNELSWRSIRERGVFLSAYDIQKYTNGAAKDLGLHSHTVQRIGKEYVLRRNQFRKQRLAWRKTHGVRRSLGWVPVNTGAAKWKNGQVYFNGQHYQVWDSYGLSQYRFKTASFVEDARGRWYFNVVVEVPKTQSAGTEAVGLDLGLKTTATPSHGEPLEAGRFYRDQEQKLALAQRAGKKDRVRAIHAKIRNRRHDALHKYSRQLVDNHALIVVGSVSSSGLAKTTQAKSVFDAGWSTLRTLLAYKCEHAGSVFLEVDERYTTQTCSCCGAISDNSPKGRAGLGIKEWTCECGVTHDRDVNAARNILALGHERLAGGIPVL

SEQ ID NO: 243 - protein, 390 aa, unknown
  TnpB Polypeptide
VNVVALKYRLYPSKAQETALNETLAVCRLVYNSLLHERTALHEQGMKSPTYYTQAPAITQWKKVHPELKTVHSQVLQNVAVRVDLAFAAFFRRVKSGETPGYPRMKGDRQYDSITYPGTGFKIGDSTVSLSMFGRLIQVKAKIHRPVIGKVKTCTVRRYGNKWFACFSVEQENAFLPPSSESIGLDAGLNSFLALSNGEFIANPRFFRKDEKALAKVGRRQAKTVKRSKERRKANRVLSRIHERIRNRRHDFVHQTARRLVNRFGVIAVEKLNVKSMVKRNPKNHNLAKSISDASWSMFRSVLTHKAESAGREIHAVNPAYTSQDCHACGYRAKKKLSERWHNCPMCTASLDRDTNAAINILILVIGTSHTGITVCQVTPVEAPAFTHGE

SEQ ID NO: 244 - protein, 406 aa, unknown
  TnpB Polypeptide
MRTYKLNIPHTEQLDALNAAAASVWNECLTLKTVWDYAHGYQTGGRIDTQCELWMDKQFSKSQPLHSQSIQVVRERYFKCRKAYRALRRNGNTTAKPPHKTKRFQTTTWKKSAIRFKAASCGHVVVLSNGRGNRPLQIPLPKSFKLSIVCDIAVVNLVYTHGKYELHFVYNTEKPEASKADGVVGVDIGEIHPIVSHDGHNTLIFNGRYIRSLYRLRNKVIASFGKKIDRCKRHSKRWWYLVRRKWKRIRKIDDQIKDALHQHTTKFVKHCSESDIGTIAIGDLTGIRDNINYGKRTNQKLHQWAFGKVTELITYKTKALGIKVALVDEAYTSQTCPKCGNRKKPTTRNYTCPCGFQYHRDGVGAINIRQKYLGHFGVRVVADTDNQAVKMTPPVGFRLEVKRCSA

SEQ ID NO: 245 - protein, 392 aa, unknown
  TnpB Polypeptide
MQRLQAFKYELMPDGNQQRDMRRFTGSCRFVFNKALALQKANHEAGNKFIRYVEMANQLPAWKSEFAWLKESPSQALQHALKNLDRAFTNFFEKRAEYPCFKKRGYGDSFRFPQGFKLDQANSRIFLPKLGWVRYRNSREILGTVSNVTVSSRNGKWFISIQTEREVEQPVAQGDAVGIDLGVVRFATLSDGTVIPPLSIFKRYAAELRKAQQEAKAGLGRLELLHVTISGGEVSVGAVEDIEGGLTVDAAQICAGFVRPNDGQAREGLLLTHISNSRRTSSCGMPSPRASDARARSNAVTVSGVRSSSSTGAIARERDSGSTMTSRRLRTTGTFSSGNASSRKCACWRSDWKLVSGIVNSCTISSVVDFVTVEAHKSHRDQKHHSCKVNQR

SEQ ID NO: 246 - protein, 392 aa, unknown; identical to SEQ ID NO: 245
  TnpB Polypeptide

SEQ ID NO: 247 - protein, 399 aa, unknown
  TnpB Polypeptide
MIKVNKTYKFRIYPNAEQEQNLARHFGHSRFVYNYFLNQRKEQYLEDKKSDNYYAQATSLTKLKKEEDTKWLKEVNSQTLQFALKSLDSAYTNFFRGNAKFPRFKSRRNKNSFTVPQNVKINDGKLDIPKFKEGIKIKIHREIETENIGKATITRTPSGKYFVSIFTGQEIKQLPINNKAIGCDLGIKDFVITSDNKKFKNNRYTKKYARKLKEAQQHLSRKQKGSNGFEKQKIKVAKIHEKIANSRLDTLHKVSYELVRDNGLIAIEDLNVKGMIKNKKLSKHIADASWGNFVNLLQYKCDWYGRELVKVNRFFPSSKTCNECGWINQDLNLSIREWTCSSCGVIHDRDLNASINILKEGLKIYRQGLSITKVEDKSDYLGSTSVETRSPSIAFGVGG

SEQ ID NO: 248 - protein, 376 aa, unknown
  TnpB Polypeptide
MKKAAVFRLYPTAEQEHYLAGLFGAVRFCYNKGLELKIHYYKVKGVNLHPIHDIKKLLPIAKKSRKYGWLADYDSIALQESVRNLHTAFSRFFKKEGGFPHFKSRRAEQSSYHCTGISVGDDFVKVPKMEPIKAVIHRKIDGKVKSITLSMDTCGDYWASILYDDDQTEVALETTVRESKMLGLDVGIETFCTCSNGKKIKSPKPFKRAMKKLKKAQRALSRKKMGGKNREKARKRLAKLHRRVARVRADFQHKTSRRLVDENQALIFETLRIKNMMKNHHLAGAIADVGWGEFMRQCEYKAKQKGKVFVKIGTFFASSKTCSACGHRLQTLSLATRDWTCPHCGAHHDRDVNASLNIKQEGIRMLKAAGLTVLRS

SEQ ID NO: 249 - protein, 377 aa, Gammaproteobacteria sp.
MMRTACIRLNVTTEQAARLSALRTAYADACNRLVPLVQAARCWNRVALHQLGYRALRQQTSLGAQMACNAIFSVCKAYRSQGALGRIPQDTPVPPLSFHRTSVHFDHRTYTLKGEALSLNTLQGRMRVPMILGDHQRKILTSGLPKEAELVFRAGQWFFNLAVESADGERVASGPVMGVDVGENTLAATSTGRVWGGETLRHRRDQHLALRRRLQSNGSQSATQRLRQVSGKERRRVRHVNHETSKAILEEARRIGAATIAMEDLTHIRDRLRAGRRMRARLHRWAFRQLQGFVEYKARAVGISVVYVNPAYSSQTCSACGQLGARLKHRFECSCGLRAHADLNASRNLARIGETAVSPRAVVNTPDVDCVACHASP

SEQ ID NO: 250 - protein, 406 aa, Moorea sp.
MRTAYQYRLRLTKSQVLKIEKWLDMLRCQYNYLLADRFSWYEQNRCSLNSCPLVCYLPDLRENPDYYSQKRTLPQLKKDRPWYKEIHSNVLQDCVKRVDLAFKRYLKGDCNGKRSGRPRFKNQARYRSLTFSAFSKEPIKGNKLNLPKFGWVKMIYHRPIPDGFTIKTAIVTRKADGYYVTLSLQDNTVPSIIPIEKVSNPIGIDMGLKSFLVKSDGSEVEIPQYYRKAQKRLKKLQKAVSRSKKGSNNRKKTVTKLGKAHKKVADTRKDFHFKVAKSLLDDYDLVAHEKLNIKGLAKTRIAKSVLDAGWGQFLDILSTKAEKAGLITKAVNPRNTSQNCSNCGNKVPKKLKERIHSCSCCNYVADRDVNAAINILKLAVGHPVGNKAYRVSEALAGVGKKPTLNL

SEQ ID NO: 251 - protein, 401 aa, Sphaerisporangium sp.
MIAVRLRYRYRLYPDATQRAALARAFGCARVVFNDGLRVRIEARAQGLPYVCDGELSKRVITEAKKTPERCWLGEVSSVVLQQALADLNTAYRNFFASISGRRKGRKIAPPRFRSRKDNRQAIRFTKNARFSVTAGGRLRLPKIGDVAVRWSRDLPCEPSSVVVIKDAAGRYFASFVVDAGDEPLAESVSEVGIDLGLAHFAVLSDGRKIGNPRFLRRAAKKLGKAQQALSRKARGSANRKKAVVRVARAHARVADARRDFAHKLSTRLIRDNQAVHVENLSVKGLARTKLAKSVHDAGWSQFVAMLEYKAARHGRTFVKIDRWFPSSKLCSVCGAVAESMPLNVRSWTCPCGVAHDRDVNAAINILAAGRADRLNACGDQVRPPLAVAQVGETGSLRGAA

SEQ ID NO: 252 - protein, 394 aa, unknown
  TnpB Polypeptide
MQISHKFRLYPNKQQEENLFETLNICRQTYNTLLAEFSEWDNISKYELQSVIPNLKICDSRLKKVYSKTLQYENYRLFSNLIGLSKRKKKGYKVGRLRFKGKRWFKTFTYNQSGFALINTGKRLQTLHLSKIGDIKIRCHRNIKGNIKQVTVKHMQSGKWFASITEERKEEIKQQPIKKIVGIDLGLTDTVWDSDNNKVTNPRHLKKEAEKLAHLQRRMSKKKKGSSNRNRWRIRLVRQYENLVNSREDFLHKLSRYYVNNYDAIAMEDMPISNMVHNHKLSKSILDSCWGKLRQYISYKAENAGKLYVPVDYKGTTQRCSQCNTKVPKELWEREHKCPKCGFTAPRDYNSALEIKRLCLRKIRQELPESTLVEMEALPLVTSVVEARSLFQNV

SEQ ID NO: 253 - protein, 407 aa, unknown
  TnpB Polypeptide
MQRTNVIRLKPNKKQGIILKELCLLSSCVYNIANYTVRQQFFNGEKISDFFNLQQNVQNSDDYQLLGRSYALPRVQIYSETNSARFKLLKSKKQTKVGLPKYYKNRKTNTTISSYLVIDNSQYSIGKSYVTLPLSRKMRKKYNIFQRSFRIKYNGILKWKGKQQRAQIKFKDNNFYFHQSVKLYDKPIRKSIVKAGLDLGIKKFLAFKMSNNEDCLIGNKRFFRQWEYYGSIISEIQSVLNKQNLKSSSKLKQLYRKRKKWQNNLFNNLVSKMFKIFNRNNVSELVIGDIRNILKSGSNVGKKANRMTHNYWSFDLLCHKIQNKAEEYGIKIFKVPEIDTTYRCPICGNLDYNNVHDRIFYCTDCSYIEHRDIIGSINILSKGMHGPLQSTHQDEIVLLGGGMSNDS

SEQ ID NO: 254 - protein, 310 aa, Planktothrix sp.
  misc_feature (7)..(65): Xaa can be any naturally occurring amino acid
LPTELGXXXXXXXXXXXXXXXXXXXXXXXXXXXXXXXXXXXXXXXXXXXXXXXXXXXXXXXXXXXKRVRVVKRADGFYCQFLIDVERSETQSPTGKTVGIDLGLEFFYTDSEGNQVENPRFLRKSEKSLKRLQRRVSKREKGSKNRKKAINKMARKHLKVSRQRREFAVKTARALITSSDVIVYEDLKVSNMVKNHKIAKSISDAAWSMFTDWVDYFAKIRGVHVISVPPHFTSQDCSGCGERVKKSLSTRTHKCPSCGLVEHRDLNAAKNILAKGLGLKSTVGHIGTQTLEEIEPLVFSEQSERVKFGH

SEQ ID NO: 255 - protein, 604 aa, unknown
  TnpB Polypeptide
MNPGMRRAKPSRVFQGVHARLVFPNKEDERAVLDLTRRFSAATRFAYQRLLEGKNREKLKRENGPLCTLFGLNTRYADGAIEKAQAPINSAEELGNNPRKAIFGGRKLFEQLKRKHLSGKALLALKREWKEKRQGLLYSRGDSTKKGNANLRLESENGALWLRINLGNGNHVQALVKTSHPQLNALRERVYASLSYNVTLQLKDGRFYAHFTWSEELPPPVHTKANGVLGIDINADPYHLALAVVSPDGNLTRYLTLSLEEVDRASNKGARELALWEIAHQVVSIAEGCGVAIATERLKYLRKSKRGDGSGRVFRRKQHRFAYQSLLEKIHSLARKRGVEVIEVNPRDTSTIGALKYAPQLHLSKDTAAAFVIGRRALGFEEKLPKGYKVSVSRSQNSVSWTEIYTLQSVSPTPQVSVRSYESASVTATYSGPLPGTLCYDTSCQQAAPGYYTAPAEQVIRTWTNTYTRSCPPGYTGSVTVTEQWRTVKYWTPSAGGLSSRGTLNFTSTTQDEKKSCRPRGGGRPGGGEAWSFPSRGDFNLGLGPPVGPLRFPPRESGRAECRPAPPPRPGPRPRSGRPRRRPSARGGRGGGPASRGPCPRPPP

SEQ ID NO: 256 - protein, 369 aa, Marine sp.
MVNQTRNGFVTRNDLNYFLTELKEQEPWLYSYHSKMLQMISTQIDGAQKSLIQLRKNGYAAKSLKFARYSKYRTFTYNQSGFKIQNGFLYLSKIGKIKIIQHRQIPENSKIKQVIITKSKSGKWYACITCNIETDVPKINLSKAVGIDVGIKTFAYDSDGHRIPNQLNLKKMLKPLARAQRKISRRKKGSNNRLKAIKHMQRIHERIKNRRKDFLHKLSTQYAKKYDRIFMEKLEKLNMVKNHHLARNILDSGWEIFSYMVAYKTTMIEVPARNTTIDCSRCGNKVPKSLAVRIHRCNVCNLVIDRDYNASINILKRGLSIFNISAKADYLLPQELREVTPVEISMRSLKQEEAINLFGGSSLKDSRKV

SEQ ID NO: 257 - protein, 217 aa, Marine sp.
LISKKSVGIDVGIKSFTYDSDGYSTPNPLNLKKMLKPLARVQRKISRRKKGSNNRLKAIHHLQRIHEKIVNRRKDFQHKLSTAYANNNDVVFVEHLEKLNMVKNRRLSRSIMDSSWGMFLQKLEYKCKLLVEVSSQNTTINCSRCGNKVPKGLTVRIHRCGKCNLVIDRDYNASINILQKGLKIFGQDNLPQELWKVTPVEISMRSVKQEQIIQRFR

SEQ ID NO: 258 - protein, 489 aa, unknown
  TnpB Polypeptide
MANLTVTRTYVGSIQNHRQVSDGLDSLGDSASKIWNVARWTAGRIWDVTGEIPDEGVLKSCMKNRSCWKDLNAQSSQKVIEELSDAFQSWFDLRHKFDEANPPGYRKHGDTRPRSTVTFKEDGFKHDPENNRVRLSKGSNLKEYWSDFLLCEYQTRPDIDLSEVNRVQNVRAVWNGDEWELHFVCKVELETNDSAGDEVAGIDLGIKNIATVAFPDEYVLYPGNSLKEDKHYFKRAEYDTEGENGPSEKSMWARRKLADRETHFYHVLTDTIITECVERGVGTLAVSWPEEVRESDWGKTGNKKLHSWAFDRIYQYLAYKGEIRGVEVLKENEWNTSKTCSACGDTTKSNRVERGLYVCSSCGLVGNADCNGAENMRQKITRVLTARIGVTAVWHSHRHTCSTARAGRFTRENKPCRRPANIPPAVREAPAFTPGRMSPVPFWGVGSVVDMLSLVESTVRRVAPRRATSCDHIPCSSYSKWRGYLTLRA

SEQ ID NO: 259 - protein, 402 aa, Escherichia sp.
VKRLQAFKFQLRPGGQQEREMRRFAGACRFVFNRALARQNENHEVGNKYIPYGKMAFWLVEWKNATETQWLKDAPSQPLQQSLKDLERAYKNFFQNRAAFPRFKKRGQNDVFRYPQGVKLDQENSRIFLPKLGWMRYRNSRLVTGVVKNVTVSQSCGKWYISIQTESEVSTPVHPSASMVGLDAGVAKLATLSDGTVFEPVNSFQKNQKTLARLQRQLSRKVKFSNNWQKQKRKIQRLHSRIANIRRDYLHKVTTTVSKNHAMIVIEDLKVSNMSKSAAGTVSQPGRNVRAKSGLNRSILDQGWYEMRRQLEYKQLWRGGQVLAVPPAYTSQRCAYCGHTAKENRLSQSKFRCQVCGYTANADVNGARNILAAGHAVLACGEMVQSGRPLKQEPTEMIQATA

SEQ ID NO: 260 - protein, 275 aa, unknown
  TnpB Polypeptide
MVKVFTGKAYAYRKITLAQAFIAPPGYACGSPSLIHRSYGWELHVPIILREKVDLKKIETLVKDKDLRICVVDLGINHHAVATIQDTKGRVYATLFISGAKDNRLRKRYLEKIVNLQMETKIIPKGERFARDLWDKISNLNDHVAHYVSKKLVEFATTYGAKIIVFEHLGRLKPSKGTKSYWFNQKFIFWVKGRIVKYARYKALHKGIVTCRVSAKNTSTRCPYCGTLTIIRYNKGTKKGVALAQCTNCKTHDVNSDYVGSLGIGTAFRLKHCCP

SEQ ID NO: 261 - protein, 394 aa, Chloracidobacterium sp.
MADSKDTTIKTFEYKLRMNRKFKEVCERELEHSRQIYNAALQERIDCYKTTSKGLNYVEQSRHLTEARTLPEVKSHIRTIQSDALERVDAAYKAFFRRVKEGSEKPGFPRFKGIYRYHTFSLKIEPQRACPLKGDKLTIPSVGSCRVRLSRPLEGKVKQLRITRRADGWYVLLVSEIPRPKPLPPTGESAGIDVGIKSFAVLSTGEEIDNPRTLKKAEQKLKREQQRLSRKKRGSNRRGKQRAKVALRHLKVARTRKDFHHKASTYMVRRFDAIAVEDLSIKGLLKNPKLAKAIADLAWAAFFQMIEVKAESAGRRFERVPAHFTSQDCSRCDHRQKMPLAIRVYECGNCGLVIDRDHNAAINISSRAGLARITPVESHPARGSRNGERLRFAG

SEQ ID NO: 262 - protein, 368 aa, unknown
  TnpB Polypeptide
MKKNKAFRFRLYPTHEQEIFFNKTFGCCRFVYNKMLAERKESYESTSESTSRTPAEFKEEFPFLKDVDSKALATEWMNLNKAYGNFFRDRRVGFPKFKSKKNDRKSYTTILSKTRAFDASGKFIKLPKIGFVRCKVHREIPLDWKIKSATISQTPTGKFCVSILCEYETEIKPITPDRNNAIGVDYKSNGFGVTSEGEILSNHRYFRENQSKLSREQRRLSRKKKNSKNFKKQKMRVALVHEHIANCRLDQAHQLSHLLAEKYDVICLEDINLQDMAQSLNLGKSTNDNGFGMFRGFLKYKMEERGKYLIYIDKWDATSTVCSECGAYHKDIVNSLSVREWICPYCGTCHDRDINAAKNILRLGLERL

SEQ ID NO: 263 - protein, 341 aa, unknown
  TnpB Polypeptide
MAVETLKRDGNVYAPDLINSLPEWTHECPRHIRVYAVMDAQKAFKQHGRNVSFRRKKDHTASMGIIASAIKHDGVYVRLLGKMKTTEPLPADLQGKGKKSERNTDIEIKDSRLKNEGGIWYLVVPYIAKKKARDTSDRIVAIDPGVRTFATFYSEDSFGWIGIDDIGRIIRLCHHADDLYARATQVKRPLRRKLRIAANRIKKKIQNLVTELHRKFAHFLVTNFDVILLPKFEVSNMVKRAARKIRKKSVRSMLTLSHYKFKVFLKQKAKEYRKKVIDVCEAYTSKTLSWNGEIDWKLGSKKIITDSDGNSMERDLNGARGIFVKNVARALLVQPPVPTGA

SEQ ID NO: 264 - protein, 391 aa, Parabacteroides sp.
LKQIDGARKLYNMLTELYWACWDLGLEVALYESQAWIVQIRKSNPGVNLVHSQVRQDVNRSVHQAFSMLYKEKGIPSWRSKKRDPQAITFPQNCVWDEDPVVKGKIGERPILSLSIPSLGSVRIKDTWSIDPEKVLIRQCKIVYDPLKDGFTLRMTCLIDMEYVKEIHHVDEPTKEMTAYDFGAHLVLAGSDGTKVKNPRTGEEIIERIKELQKELQKHVKGSNSWERCKKEIDRQYRKLANKRLDFRHKVTTGVVSDNQAIVLENLKTKNMTKSAKGTKANPGKNVRQKAGLNRKLAEVAFGTMQSMIRYKCALYGRKLYFVSARNTSITCSVCGHKDKASRKTQATFCCTKCGHKENADINAAKNIRGRALSLAEVEKATSIPNPPVIP

SEQ ID NO: 265 - protein, 376 aa, unknown
  TnpB Polypeptide
LLVKIRKTYSYKLYVTDRTKHLDEMIEIARQIWNHFLALQKRYYKIYGKYISANRMKTHLTKLKRLPKYQHWTQLGSQAAQDVVERLDRSFQAFFDWCKTRSGPRKSPPKFRKRWKYRSFTLKQAGWAIRDNVITIAQKYRFKFWKHRNFTGDIKTVTVKRSPAGEHFIFLSVEEQVFVPDAHTGNAVGIDFGLKTFLTMSDGTEIASPQWLKNSLSDIRRANRNLSHKELGSGNRKRARFEYEKVHEDVANRRKDWFFKLARELTTKYSTICIEDLNLDGMKRIWGRKVSDLAFSEFVKILEYEALINGCEIIKVDRWYPSSKACSNCGFVKEDLPLKVRDWVCPSCGAHHRRDLNAAVNILNKGLLDKHGKSIA

SEQ ID NO: 266 - protein, 427 aa, Escherichia sp.
MHQENTMLPRRISVSLFIDQSIIWPVKRLQAFKFQLRPGGQQEREMRRFAGACRFVFNRALALQNENHEAGNKYIPYGKMASWLVEWKNATETQWLKDSPSQPLQQSLKGLERAYKNFFQKRAAFPRFKKRGQNDAFRYPQGVKLDQENSRIFLPKLGWMHYRNSRQVTGVVKNVTVSQSCGKWYISIQTESEVSTPVHPSASMIGLDAGVAKLATLSDGTVFEPVNSFQKNQKTLARLQRQLSRKVKFSNNWQKQKRKIQRLHSCIANIRRDYLHKVTTTVSKNHAMIVIEDLKVSNMSKSAAGTVSLPGRNVRAKSGLNRSILDQGWYEIRRQLEYKQLWSGGQVLAVPPAYTSQRCAYCGHTAKENRLSQSKFRCQVCGYTANADVNGARNILAAGHAVLACGEMVQSGRPLKQEPTEMIQATA

SEQ ID NO: 267 - protein, 400 aa, unknown
  TnpB Polypeptide
MDSPLIEKFKYSFFKFSSMARRGNKAIRATVSMKIAVSDSLLALVNNYIKALRFTLFWLKENVPNPNEKGVLGKVHDALYEKLREEYNLPSKVAEDCYRDALSTYKGWYNNPRRGRFPRVYKPTVWLTPKASYNVSFEAITVRITSVGELPILGYPRNLKDYMSWRMKEARLVVKDGKAFLKVVFEKGKEKVEPKESVAVDINMSDIVVGKDDTHYVRIPTRLEEVHHWKSLAERLQKKYPRRWRENKRILHRIRSFHLKAKRIAEDFARKVGKWVVDVARMIGANVIKLESLKNLIKNVDRLPREFHDKLYLMQYRRLQYWISWQARKHGMVVKYVNPSYSSVSCPKCGRKMREVSHRWFKCSCGYENDRDVIAITNLNGRGSLTLSTAPQMRDVNPNR

SEQ ID NO: 268 - protein, 434 aa, unknown
  TnpB Polypeptide
MLEAVKVALDPTPRQERLLESHAGAARFAYNKGLAHVKDVLERGDAPEWSYYALRKWWNQAKDALAVDEATGEPWWPENSKEAYNSGLESLADALKNFSESRKGRRKGRRMGFPRFKSKDSGIRRFAYTTGSFGPVDHDPYALKLPRIGRVHCMEDASKRVDGAKVLRMSVSRRAGRWQASLTVERADDPAPKPPKGGSVGIDLGVKELATLSDGTVIRNPHALKSNLTRLRKAQRSLSRKRKGSNRRRKARANVARLHARVANLRRDLLDKTTTMLAHTYADISIEDLNVAGMVKNHRLAQSIQDAAFAEFRRQLTYKTARTGTRLHVIDRWHPSSKTCSNCGTVKTKLSLSERVYHCDKCGLSIDRDLNAAINIQVAGSAPETINARGGSGRQTRPKGGTMRHPAKREPSGGESRVRLGAGLGNEAMQMTSL

SEQ ID NO: 269 - protein, 300 aa, unknown
  TnpB Polypeptide
LEEGRLATQPGVLTGTSRCRKAGRQAFQAFFRRVKAGEKPGYPRFKSARRYDSFTYPQSGFQLQNGRLQLAKIGLVKIKLHRPLQGKVKTLTIHRQADGWYACFSVEVDPAVLPPSNKAVGVDLGLESFAITSDGEFFPSARYLRKSERKLKQLHRMVSRRQNGSRRRQKAVRQLAKAHLHVANQRRDMAHKVARSLVNRYGLIAVEDLNVKGMLKNHHLAKSISDAGWNLFVTILKAKAAEAGRQVVEVDPRNTSQICSGCGCIVEKPLSQRWHKCPHCGTSLHRDVNAAINILHRAVA

SEQ ID NO: 270 - protein, 412 aa, unknown
  TnpB Polypeptide
METIYRAYKYRLYPTKDQETLINKHIGSCRWLYNYALEKKTKMYKETGTNLSRFDLSADIPVLKKNEETQWLKDVNSQSLQMSLKNLDAAFSRFFKEKKGFPKFKNKRYSRQSFSVPQSVKPDWENKEVSIPKIKNIRFVVDRKPEGTIKSATISKSPTGKHFISILVDTGIKPPDKHQVEKETSIGIDLGVKDFLITSTGEKINNPKHLKKHLYRLKKLQSRASNKKLGSNNRKKSNLRVAKMYERITNLRNDFLHKLSSKLISENQTIFLEDLNVEGMLRNHKLAQAIQDCSWSRFNEYLEYKAEWNGVNVLRIGRFESSSKTCSVCGWIKRDLTLKDRKWKCLKCNSLHDRDVNASKNILAIGLRDQEFLGAGRPDVKPLENTTSGSYRKGKDKVGSVKEETQPSLAVG

SEQ ID NO: 271 - protein, 449 aa, unknown
  TnpB Polypeptide
MLKQKYTIVTQLHKINNKDIIEYFENASVYFCKLQRKAFHIFKNENIKGIKTEYKKFRQNFMKEHSISRRTADTILRDVQGRINALIELKKYEISQKEYKIKALKESIEKLDEKILNLQEKMKENIKINHSTYWDLKKSRVFKKMKLNTFKMILKQLKWEIATGHYKLCFGTKQLLKSNKKEFLLQRDSQISYIGSQDETGRNQMFQLSYNDRNNQFNIKIRKDFGFDTEEKYVFGKCYFNNHKNKLIDALKNKNSTPLTYSIIRKNNRYYLHCTLEYRIENKSNFLTRKTYGTIGLDFNKGFIALSETDRNSNLISTDILKYRFGNGNKTQSDLEKCISEILKRALEKGKDVCIENLNFKTKKSKTEKAKSEKGRKYNNMLHSLSYALYDKLITNMAFRNKVDIIKVNPAWTSWIAKNKFCNRMKLNIHTGASFVIARRGIGIEDEVK

SEQ ID NO: 272 - protein, 425 aa, unknown
  TnpB Polypeptide
MGIFGRRPTTLELLEMSAQKPSASTSKGLNTSRDAGKIVGLTKLVRTAVVRLKVSTEDSLKLHETQNLFGKACNVLVAILRKGDRNERLWQRFNLHRAGYASVRLAVPEIGSQLVCNAVRAVSSAAKSWISNNPKFVTDKTMELPEFDFSHPVVHLDKNTVSFSKDKTVASIYTLRGRIKAELCPGDFQKQILASGKWKESNLVFHKERRHGRPDYWALHITVEEPTLKINLDDLKPEEVEGVDVGENNPAANTSHIWKGGKLKNKRDRYLSNRTRLQRNGSRSAKQHLRKASRRERRHVKHVNNVISKQIVEEARKKGVRVICLEDLTHIRDRIKAGKRVRTRLHRWSFHELQEMIIVKAARAGIETIKVDPRFTSQTCNACKQIAKRRKHTLVCQCGNRAHSDVNSARNLRDLGYLLIAQELK

SEQ ID NO: 273 - protein, 152 aa, Roseofilum sp.
MLQYYHANRLPANQRQDFHYKRAKKLLSKGKHIGHEALNIKGIARTRMAKSTHDAGWGQFLQILSVKAANAGLMTIAVNPNGTTQNCSGCGQTVPKEIRDRWHSCPHCGLELDRDHNAAINIKYLAVGHPVNKAQETPDRIPGVTEKPALSR

SEQ ID NO: 274 - protein, 398 aa, Bartonella sp.
MIVAHKIALDLNNKQRSYMARASGCARFAYNWALKEWQQQYEAWKKDNNLPKPNDYALRRQFNSLKREQFPWMMEVTKNAPQMAIIQLGVAFKNFFSGRSRYPTFRKKGVHDRFTLTNDQIQLQGFKIRIPKLGWVRLREQLRFQGKILSATISRKADRWFVSLSVETDNQESLSENQAIVGLDLGINALATLSTGETIGGVKPYKALLNRLRRLSRRLSRKQKGSSNRYKEKQKLAKLHARISNIRTDHLHKVTTDLIQRFGTFCLEDLHVKGLLKNKHLSRALADQSFFEFRRQLEYKAARYGRQIVIADRWYASSKICHHCGCKIEQLPLNIREWRCSHCGTHHNRDINAAINLKNLAVSSTVSACGEEGSGQCPVTLVKPASKKQEINSIFNQK

SEQ ID NO: 275 - protein, 615 aa, unknown
  TnpB Polypeptide
LKTRGKRSLSPTSDCRRVSRPLRSAIRLPEPMMVDEDGVIQTPHQQEYHTNLLVGMVVEHTQQFIDNHYNNKSLGMLSGGVDPWGRELPKQAAALADRLGWREPTPNSRVLKLAQSNGVGVLKGQAWRARLYETIKPHLPPGPTLPGRNESGRVWQAHSQKIAKQALEWDNEPTIRQLLKGSARYYREHGRYPRTLLDAYPTPPRAPRKVDLGVVDKQFATRGLVETPGGGLSLEVRVKLPTGGERGGFSWFSLSFDIPHHARERVREAESVSLPTLILRDSGERIWQTTLSETPPPPRGDPHRVVGVDVNVGKPLTAAIISYDPITDSYSSGGSVFEWDDMGLIAKNQRLQTEQEYLSGKIRAVQTLIDPLPPSNSERARLEAKISVWVRERERVGRKRSRLGVELSHDAATWLRVITRVSGAGGVFVEDLRGLPHTLSPTTNRVLSSTPYARMLEFAKHRLAREGVVVERVNPRGTSSRCPYCLQPLSHPEYAVGECDSCGVREHRDHLSPLRIAQRGHAKHSRPRSRRRSKRARSLDQPIKRVRGPKTGPTPKRVRRLHEAGRSHTRVLARAKPKVFPTRRVFGDIDVATTRGVPAGVGVNARRLSTIRHRT

SEQ ID NO: 276 - protein, 370 aa, unknown
  TnpB Polypeptide
MLKAYKYRLYPNKQQIEQMQKTFGCCRFVYNQTLSHRKEMYETQKESMNKTSCNNYCNQVLKKEYEWLKEVDKFALTNAIYNMDSAYQKFFKEHSRYPKFKSKRDNKKSYSTNFTNGNIEISFENNEIKLPKLKWVKAKIHREFVGKIKSATISQNPSGKYFVSVLVETKHVPMEFTGCMVGIDLGIKDLLITSDGDKFDNIHNTKKYEDKLAKEQRRLSHKVKGSKNWNKQRIKVARIHEKIHNTRIDNLHKISHKLVNENQVIVSEDLAVSNMVKNHNLAKAISDCGWYEITRQISYKSDWNNRQYIKIGRFTKSSQPCNVCGYINVHTKDLSVRQWTCPQCGTVHDRDINAAINILNEGLRILEESA

SEQ ID NO: 277 - protein, 401 aa, Mycobacterium sp.
MAMRTAYKCRAYPTPEQVAVLNRTFGCVRVVWNRTLAWRHARWYSQRQRTNFPAANAYLTAMKQDPDLSWLGEVSSVPLQQSLRTQQTAYANFFAKRARYPRFKSRTGRQTAEYTRSGFRWRDGKLLLAKMDVPLEFVWSWPDIDPATIDPTTVTVSRNPDGRWYVSLAVESDDPDPLPPTGNAVGVDLGLKSFAVTSDGDLIDNPRHLERRGRNLARYQRRMARCQKGSANRAKAKAKVARAYRKVAAARADFLHRTSTQLVRHHDTIVIEDLAVKNMIRNRRLSKAIGDASWGTLRRMIEYKAAKAGRQLVVIDRWYPSSKTCSACGHLLASLSLGTRHWTCPSCSTRHDRDINAAKCILAAGLAVSACGGDVRHRGSPSVQSPLKQEPQPVKVGIPRL

SEQ ID NO: 278 - protein, 470 aa, Mycobacterium sp.
  misc_feature (354)..(462): Xaa can be any naturally occurring amino acid
MARLKVPEGWCVQAFRFTLNPTQTQAASLARHFGARRKAFNWTVTALKADIKAWRADGTESAKPSLRVLRKRWNTVKDQVCVNAQTGQVWWPECSKEAYADGIAGAVDAYWNWQSCRAGKRAGKTVGVPRFKKKGRDADRVCFTTGAMRVEPDRRHLTLPVIGTIRTYENTRRVERLIAKGRARVLAITVRRNGTRLDASVRVLVQRPQQRRVALPDSRVGVDVGVRRLATVADAEGTVLEQVPNPRPLDAALRGLRRVSRARSRCTKGSRRYCERTTELSRLHRRVNDVRTHHLHVLTTRLAKTHGRIVVEGLDAAGMLRQKGLPGARARRRALSDAALATPRRHLSYKTGWXXXXXXXXXXXXXXXXXXXXXXXXXXXXXXXXXXXXXXXXXXXXXXXXXXXXXXXXXXXXXXXXXXXXXXXXXXXXXXXXXXXXXXXXXXXXXXXXXXXXXXXXXXXXXKDHSLATV

SEQ ID NO: 279 - protein, 319 aa, Mycobacterium sp.
  misc_feature (267)..(314): Xaa can be any naturally occurring amino acid
VWWPECSKEAYADGIGGAVDAYWNWQNSRSGKREGKTMGFPRFKKKGRDQDRVTFTTGAMRVEPDRRHLTLPVVGTVRTHENTRRIERLIATGRARVLAISVRRNGTRLDASVRVLVQRPQQPNVAQPGSRVGVDVGVRRLATVANEAGAVLEEVPNPRPLDAALKELRYASRARSRCTKGSRRYRERTTEISRLHRRVNDVRTHHLHVLTTRLAQTHGHIVVEGLDAAGMLRQKGLPGARARRRGLSDSALGTPRRHLSYKTGWYXXXXXXXXXXXXXXXXXXXXXXXXXXXXXXXXXXXXXXXXXXXXXXXXKSRDH

SEQ ID NO: 280 - protein, 481 aa, Mycobacterium sp.
  misc_feature (360)..(462): Xaa can be any naturally occurring amino acid
MPKFEVPDGWTVQAFRFTLDPTEDQAKALARHFGARRKAYNWTVATLKADIQAWHASGTVTAKPSLRVLRKRWNTVKDDVCVNTETGVAWWPECSKEAYADGIAGAVEAYWNWQTSRAGKRAGKRVGFPRFKRKGRDQDRVSFTTGAMRVEPDRRHLTLPVIGTVRTHENTRRIERLIKAGRARVLAISVRRNGTRLDASVRVLVQRPQQPKVVHPGSRVGVDVGVRRLATVATADGTAIEQVENPRPLGAALRELRHVCRARSRCTKGSRRYRERTTQISRLHRRVNDVRTHHLHVLTTRLAQTHGRIVVEGLDATEMLRQKGLPGARARRRGLSDAALGTPRRHLSYKTVWYGSALVXXXXXXXXXXXXXXXXXXXXXXXXXXXXXXXXXXXXXXXXXXXXXXXXXXXXXXXXXXXXXXXXXXXXXXXXXXXXXXXXXXXXXXXXXXXXXXXXXXXXXXXKITHLQRSPRRCSSSASSP

SEQ ID NO: 281 - protein, 353 aa, Mycobacterium sp.
MARLKVPEGWCVQAFRFTLNPTQTQAASLARHFGARRKAFNWTVTALKADIKAWRADGTESAKPSLRVLRKRWNTVKDQVCVNAQTGQVWWPECSKEAYADGIAGAVDAYWNWQSCRAGKRAGKTVGVPRFKKKGRDADRVCFTTGAMRVEPDRRHLTLPVIGTIRTYENTRRVERLIAKGRARVLAITVRRNGTRLDASVRVLVQRPQQRRVALPDSRVGVDVGVRRLATVADAEGTVLEQVPNPRPLDAALRGLRRVSRARSRCTKGSRRYCERTTELSRLHRRVNDVRTHHLHVLTTRLAKTHGRIVVEGLDAAGMLRQKGLPGARARRRALSDAALATPRRHLSYKTGW

SEQ ID NO: 282 - protein, 490 aa, Mycobacterium sp.
  misc_feature (384)..(490): Xaa can be any naturally occurring amino acid
VRPAVRQARCAEPGQARIGGRRRRVGGCLMAKFEIPEGWMVQAFRFTLDPTAEQARALARHFGARRKAYNWTVATLKADIDAWQATGIQTAKPSLRVLRKRWNTVKNDVCVNIETGVVWWPECSKEAYADGIDGAVDAYWNWQNSRSGKREGKTMGFPRFKKKGRDQDRVTFTTGAMRVEPDRRHLTLPVVGTVRTHENTRRIERLIATGRARVLAISVRRNGTRLDASVRVLVQRPQQPNVAQPGSRVGVDVGVRRLATVANEAGAVLEEVPNPRPLDAALKELRYASRARSRCTKGSRRYRERTTEISRLHRRVNDVRTHHLHVLTTRLAQTHGHIVVEGLDAAGMLRQKGLPGARARRRGLSDSALGTPRRHLSYKTGWYXXXXXXXXXXXXXXXXXXXXXXXXXXXXXXXXXXXXXXXXXXXXXXXXXXXXXXXXXXXXXXXXXXXXXXXXXXXXXXXXXXXXXXXXXXXXXXXXXXXXXXXXXXX

SEQ ID NO: 283 - protein, 380 aa, unknown
  TnpB Polypeptide
MIKAFKYRIYPNKSQEVLLSKTFGCIRVIWNANVESFNSYDKDHNPKPKIITKSDLIIDKPWLNEVSAAAIQQKIRDFQETSKQFFSKTRKKKINRPSFKKKSGNQSYRLPNQKFSINGNKIRLEKIGWVRMSVDRIIPGDCKILSCTISKNCCNQYLVSISVDTVICHKPKTGKSVGVDLGLKSFATLSDNVVIDNIKFFREKQSEIIKIQKHLSRKKKGSNRYKKNKLRIARLHNKIANKRNDFLHNVTTLLINNYDIICIEDLNVSGMLSNHKLAKSISDTSFSIFRSMLEYKCNWYGKKLVVIDRFYPSSKTCSKCGWKKEDLALSDRVFKCENCGMEIDRDLNAAINIERVGVDILYNRTPRDEVANPVEAFKME

SEQ ID NO: 284 - protein, 252 aa, unknown
  TnpB Polypeptide
MAGKLDIRGMILDSNSSTMILYAVIQLIMIRIYILITYVANYCSGGKEVGIDLGIKEFATLSDGIVIDNPKYLRENQSKISRIQKYMSRKTKGSNRWHKNRLKIARLHNKVSNRRLWFLHNLTTYLVNNYDTICIEDLNVSGMVKNHKLASSISDASFSLFRTLLEYKCEWYGKTLSVIDRFYPSSKTCSNCGWKKDDLSLSDRTFACGNCGIKIDRDLNAAINIKRMGVDILYNRTSRDEVTSPGEAFKIK

SEQ ID NO: 285 - protein, 415 aa, unknown
  TnpB Polypeptide
VRALKSVKQRYQPTPILTEMMEDFRLMTNDCIRIGLEFERTQDKKAGTLSMRKLSLLCYRQLKRYGRYSGYRLCAISKAAGILSARRKSIRRGFLTRSPYARKPVLSSCYGFRVEKGKLNIHIDSRAFESIPLNSHTLKILSDPEVSVRSFTLTKDSLSLCLSKEVKAIETKSATGIDRNLGNLTVGNTQQVAYYDMTSVVKFAENTRSVIRSFRRDDVRARQGIASKYGRRRGERVRQLLHHVSKDIVASAKANQQVIVFEEIRGIRNLYGKGNGQGSAYRSKMNSWPFGEIKRQIEYKAPWEGIPVITLSRSETKGTTMDCPRCGERLQVPVRGDAGHYRQLWCIRCRKWRDRDLVAVLNISRRGWVRFAHSMREEQGGAGEAVKGNAEHEGEPLILRVDASKPGRNSYPTKT

SEQ ID NO: 286 - protein, 415 aa, unknown; identical to SEQ ID NO: 285
  TnpB Polypeptide

SEQ ID NO: 287 - protein, 382 aa, Petrotoga sp.
MLKTYKFRIYPTNEQIEKFSQHFGHTRFVYNLFLEFANKAYKNTKTYTNYYMWAKVLTVLKKTEKYQWLNDVNSQSLQQSIKDLETGYKRFFKKQAKHPKFKKKSSRQSFRVPQHIQLYENEGNDKYGILFVPKFKEGIKVRVHRKIDPNAKIKNCTFVKTPTDKYFVSITFEVEGSYPERDIDYENSIGMDMGLKDFVVLSDGTKYPALKVLSKYERRLKHAYKIFSSKEQGSQNWDKAKLEVARIHEKIKNTREDFLHKLTKEISENQADLFVVETLNIRGMLKNYHLAKSISDSGWYQFKTFLKYKAERLGKKVIEIGMFEPSSKTCSVCGYKNGGLKLSDREWICPECGTVHDRDINAAVNIRKFGLKQAFATQPYGR

SEQ ID NO: 288 - protein, 415 aa, Halorubrum sp.
MGVRRTAVVKLAVSDEQRDALHRTAQQYLYCANRTADYCWSDTSYAECKTNKREVRDALYAELREETDLQAQLVQAAIKRAVEAVKACVERWKKGQRVSQPTFTAETMDYDTRSATFYRNKVSLATVEDRVEPSFVLPADSPTPYERYVLSESYEFRESTLRYDAATDEFYLNISTRRTDGDDEVSEDTGHSDQTVLGIDLGVNSLAVSSTGTFWQGDDYDHWCREFEKRRGEIQQRGTQAAHKALLRLGKREEAWRKQYIHTTANELVSEAVEHDCDVIAFEDLSDIRERLPHAKWHHVWAFRRLFEYVSYKAPEQGVSVEQVEPTHTSQRCSRTDCGFTHDGNRQGEHFECQKCGYELNADYNAAKNIGVRYARKRQHKLRSSPKSGSGDAPVDVRVNGGTLNGESHQPIAGD

SEQ ID NO: 289 - protein, 358 aa, Exiguobacterium sp.
VSQTLTVNIKLHPTKAQQAILERMMDTYIRTANQLVAAMVQARESLKLTSKHVTADLPSAVKNQAIQDAKSIFKRAKKKDFQVIPVLKKPYCTWNNQNYSFDFESVSLPIIIDGNVKKTVIRADMVDPENRTATLLANKLGTLRITKKSTKWIAQIAVTIRTTEKTGTKVLGVDLGLKVPAVASTDCEKARFFGNGRENKYMKRKFRAKRKELGQKKKLKAIKKLDNKEQRWMKDKDHKVSREVVDFAKENNVSVIRLERLANIRQTARTSRKNNKNLHTWSFYRLATFIEYKAKLEGIKVEYVNPAYTSQTCPSCGSRNKAKDRTYSCSCGFNKHRDLVGAMNIRYAPVVDGDSQPA

SEQ ID NO: 290 - protein, 368 aa, unknown
  TnpB Polypeptide
MKMIKTYQYKLYRSKRNRHLDKAIDTAASIWNYCIAVHRRYYRLYGKHLSANRLMKHITKLKKGRFSQWNQLGSQAIQDVVQRVDRSYKAFFQHHKQKRQGRKSPPKFKKRNRYSSFTLKQAGYRFHEGSNVVTIMGRDYKCCKSRPIEGNIKTVTVKRNSLGEIYLYVVCEQEVNQVLPRAGKAVGYDFGLKHFLTADDGSTIDSPEWYKASLKELRQAHRAVSRCQKDSNNRKRAIRHLNRVYAKISNRRRDWFFKLANQLVGEYAVICIEDLNLDGMKRLWGRKVSDYAFAEFVGILEYVASRSGTTVIKIDQWAPSSKMCHICGDRNDELTLKDRQWICPQCGACLDRDVNAAINIKNIGMAKL

SEQ ID NO: 291 - protein, 239 aa, unknown
  TnpB Polypeptide
LGGVYFINIVVEIESEPTGKTPKVIGVDLGRTDIATTSTGKAWSGKHIQATRDRYSQTRSNIQSKRTRSARRLMRRLQGRETRYQKWLNHNISKQLVREAKQLNAALAFEDLTNIRQSLNQQPRNKTERRRTNNWAFYQLRVFVAYKAIIAGVRVVFVPPAYTSKSCSRCGHVHPETDRISSYRHGKKFKCGHCGFEHDADINAACNIAALGRSVSSPESPGFSCRLECQLDLFPVATL

SEQ ID NO: 292 - protein, 503 aa, unknown
  TnpB Polypeptide
MKSNIPTFVIELPLCVNDQQNRFLTQAFEFGRTLYNATLGSALGRLQRMRESLPWRQTRSMPRGKERSKRFSDLQKAYGLTENGLRTIANNHRKASGRNDIGAHEAQCVGRTVWRALERYMFLGAGKPRFKSYRQGLNSIEGTDNREIMFKPDRQSIVWRKQVMKLMIPDTSYFKEALADPIEPTQTKRIKYCRIVRRTLNGKKRWFAQICLEGMPPVRKIYAPKSEVMGIDPGPSGLAYFHPQKAGLVRVAPNVDMQEKAIRRLQSKIDRSRRANNPDHFNADGTAKPSPTSWKISRRMEKLQVKLAEHHRCLAATRKRDHGELANFLLQRAGTIKIEKNSYRSYQRNFGKSTTRTGMGTFVSHLKRSAERANSQVIELNAYELKLSQYDPATDTYRKKALKERWHRWGETDILVQRDVMSAFLACHVTEKGHDRTRLLNEWATAEALLSDSGLCRHELRNDQGTSKEVPRLTSPELEKPKERIRSLSRTLCAKSDVKPSAA

SEQ ID NO: 293 - protein, 478 aa, Aromatoleum sp.
MLTGYRFRLYPTRAQAAILLRWIGCQRFIYNAKVGEDRYFRTFARKALQHAGMFAPVDGTYAQFITDETAWLREVPAQVLRNGAASWVTAYSRFFKKLGGRPKLKRKSGQQSVWLTAELFRFEPAEGSYRFMVGTKKCPVGEIAYNAHRPHTPPASVRITLEAERWYLSFSTEDATILPDPQETADWLADFGHAELTERAVGIDRGVAVPFMCSDGARYDLDDIQKARVAKKQAAARRWKKKLARRAKGGQNRRKAARRIAALHRYETDVRRDFEHQTSHRIIADPRTLLIVFEALGVQRMTRRPKAKQDANGRWVRNGACAKAGLNRSILGAMWSRTKDCCAYKAQRAGKLVIDVPAHHTSQECSRCGYIHPENRMSQSAFLCQRCGHAENADSNAATNIRNRGVARIRSGGYRETEKKRIRRMRKKQQQVGGGSSEHTSVETMVSRAAGNGPALGSEKQKGGLARAAETPTSTTEG

SEQ ID NO: 294 - protein, 416 aa, unknown
  TnpB Polypeptide
MAIEVTRTYVGSIQNHGQASDALDSLGDSASKIWNVARWTADRIWEATGEIPDEGVLKSYMKNQACWKDLNAQSSQKVIEELSDAFQSWFDLRHKDDTANPPGYRKHGDSRPRSTVTFKTDGFKHDSENNRVRLSKGSNLKEYWSDFLLCEYRTRPDVDLSEVNTVQNVRAVWNGDEWELHFVCKVGLETNDSAGDEVAGIDLGITNIATVAFPDEYVLYPGNSLKQDKHYFTREEYDTEGENGPSERSMWARRKLAERETHFYHVLSDAIISECVECGVGTLAVSWPEDVRDSDWGKTGNKRLHSWAFDRLYQYLDYKGEIRGVEVLKENEWNTSKTCSACGDETKSNRKQRGLYVCSSCELVANADCNGAENMRQKITPSPHGEDRSNGYVAQPSVHLFDRESGTFHTREQVVS

SEQ ID NO: 295 - protein, 407 aa, unknown
  TnpB Polypeptide
MIKVEKHIIKQSNKHFKLIKHFCWLSKNLYNHANFLIREEFIKNGKWLRYQELDKILKNDSEYPDYKNMPTSQSAQQILRLLDKNWISFFKSIKDWKLHKDKYLGRPKLPKYKKKNGLCCLTITNQECRIKDKKITFHKSFNGFYLFPQFINKQYEKFRQVRFIPDGVNIITEIIYETKDVNFKKDNKKYASIDIGVDNLATLTTNVNNMPIIINGKPLKSINQYYNKKLAYVKKVCKQMNNKHSSKRIQKLTNKRNWKTNDYMHKASRKIVNECIKNDITTLVIGHNKEWKNKCKLSKKVNQNFIMIPFNNLIQKIQYKAKEEGITVILTEESYTSGTSFLDNELPIKENYDKKRRIKRGLFKSNKNKLINADVNASFQILKKVVPNAYSYGIEDVVVHPFVVNVA

SEQ ID NO: 296 - protein, 401 aa, unknown
  TnpB Polypeptide
MILVETHIFKQNHKFYKELDNLCFLSKNLYNATLYDIRQYFFNTQKYKNYCTINKEFSQNNQQDYRALPSKVSQQIQKIVDKNFKSFFELLKLKKQNKYNKKVSIPKYLDSIKGRQIVPYTKQALSLKEQNYIKLSGTDIKIKTKIDKNKIQALRIVPCNGYVKIEVLYNETEKKVKTNQNYASIDLGLNNLMTLVFTNHKPLIINGKPLKSINQYYNKKKAKIVSKLIKVNNKYTSKRLQKLSLKRNNKINDYLYKSVSYLMNQLVSNDISTLVVGYNKSWKQDINMGKVNNQNFTQIPFYKLLTMISYKCKLLGINLITHEESYTSKCSFLDKEDICKHDVYKGKRVKRGLFRSENGITINADVNGSYNILKKVVGNMTYDVIDPIEACNRPYKYSVQY

SEQ ID NO: 297 - protein, 503 aa, Mycolicibacillus sp.
VLTLTVELHQLAVEVTANVTHDLLQPGQVPLREHRMAELGHEDQVHVQCENAMPPCSYVLHRSHTPSIIVQVSTSVLRYRYRAYPNGKQQRAAARLFGGCRVAFNAALEHARNEHAAGNPYPKANGLQRHVLTEGKKQPERAWMNQLCGVALIQAVRDADMAYRNFFASCTGGRKGRRVGFPRFRSRRDSTQTARFTKAARFAVTAVGDRRAAVRLTGIGEVEFVLSRELPSAPSSVTLIREADGRFYVSFVVEEPDATLPGTDRVCGVDMGLSRFATVVTSESGSETITATDTPKFLRRKARALARSQRAMSRKQKGSRNRDKARRKVAVHHRKVRNARLDHAHQLATEIVTGHDVIAVENLSVAGMSRTNGASVHDQSMSQFLRVLADKSRRHGRSVVAVSRWFPSTRMCSGCGQLTGPHGKKDLSVRQWTCASCGVSHDRDVNAARNILAEGLRLLAEQRNRDADGLSESLNACGDETAAPPEGKSFDDEAGRLPGDREP

SEQ ID NO: 298 - protein, 383 aa, Mycolicibacillus sp.
MHCSHARYVYNLGLEHRRLRWRGRRENTGVAQQMRELTEARKEFTWLREGSTVVQQGALRDLDRAYVNFFAGRARFPRFRSVRDPRQGFVVRDLKVRRYSKRHGALLVPKAGWVKFRLTYPWEKITEATSARITVSGGRWHVALTTPPRGKLNSEAMAAPIGIDRGVANTVATSDSEFFQAPTWSPREQKRFLALQRHLARQQKGSTRRAVTVAKIAAMHRKLADRRRDWVEQTTTELALRHRSVGIEKLRTANMVRRPKPQPNPDNPGDYLPNGASAKAKLNKAIYASCWSRFATRLADKTDVIEVNPRFTSQQCHHCGHIDARNRESQAKFRCVRCGNSGHADVHAAMNIRDRALRSSRHPPGDTRHTGEAHNFDHHPAAA

SEQ ID NO: 299 - protein, 372 aa, Helicobacter sp.
MLIAYKQKLYSTSRNKHISKLLRLYGICYNHCIALHKRYYRLYKKHLKLYTLQKHITKLKRTTRFSFLKTLGSQTLQELVERIDKSYKKFFKKQNRPPCFKKVALYQAFTSKGKVGCKIQDNVISFNGYAFKFVKAYDLVGKPKTLAIKRNNLGDHFLCLVCEKEDEPAKAECLKPFASEPACGNSVGLDFGLKTFLTCSNGTQIPSPLFFSKYLPLIRACSRSLSKKKRGSHRRLKARLKLARLHRKIKNLRTDFFYKLANSLSKQYTTIFIEDLNLKGMVKLWGRKINDLAFGEFVAILERKTQVVKIDRFYPSSKTCSSCGTLKEDLSLKDRVFKCLGCGFEVGRDLNASINIHRVGASTLGVEALRPA

SEQ ID NO: 300 - protein, 404 aa, Anaerolineae sp.
MNAPFLSMRGKLEHTYHYSDMRLIAQVRLDTKPEQAGALKRTMNQTNEAQPHLSERAWDAGIFGQVNWHRLACYDTSAIFSDLSSPIIVRSISDVADACKPDRKGKRPFTPYAAITCDQRLLRWYTDRQEVSIWTLEGRLHIPHQCGRHQRLMLKVRQGQADLVYRNGGFYLHLTYDIESPDLDGTDGWLGVDLGPVNLAVDAAGETFSGAQLGAKRRRYAERRKQLQSIDTKSAKRRLKRLSGRQARFPKDTNHCIRKMLVAKVRRHNLGIALEDLNGISKSTAVGRAQRSRHYKGSFYPLPSFLSHKAELFGVSVQLVDPCYTSQAGSICGHVAKGHRPTLDTFLHERCGFSGPADGVAAVCIAARAAVNQPMVSTEKPKGYSPIAASSEVRDKLPVETGSS

SEQ ID NO: 301 - protein, 548 aa, Thermoactinospora sp.
MGKRYGLNSQIRAMWRQRTATPAIRIAVQVPHPVARSLRRGWFRRLPRATGFVRSAPTFSSGPGVKRTRRIAGRGKPIRRQGGSASLGGVELALPVGPPLVGDQDRERCAVALDDGDLAEVVGGIDPIAESFPGFSNTHANIHRSNGTLVTVQLRYAFRLHPTAGQRQALTRAFGCARVVFNDGLRIRQHAYDQGLPYVGDGQLSRRVITRAKTTPQRAWLGEVSAVVLQQALADLNQAYRNFFASLTGRRKGPKVAPPRFRARKDRRQAIRFTRNARFAVTPGGKLRLPKIGDIPVRWSRALPAEPSSVTVVKDAAGRYFASFVVEVAAQPLPPVEAETGIDLGLGHFAVLADGRKIDAPRFLRRAEKKLRRLQRALSRKQRGSANRAKARLAVARRHARVADARREFHHRLSTQLIRDNQAIYVEDLAVAGLARTRLARSVHDAGWSAFVGMLAYKAARYGRVFHRIDRWFPSSRLCSTCGAVAESMPLAVREWICLCGAVHDRDVNAVKNILAAGRADRLNACGGPVRPPLAVARPGEGSRRGAA

SEQ ID NO: 302 - protein, 456 aa, Moorea sp.
VKTPAKIIRTDKWQLNPTPDQKVLLGETVKVYRHACRYLVGIIYTHWSELGELTADQLTPAVEKLMHKTRSRPDIKYSQFNKTFYKFPSYLRRAAIAFSAGQVSSFVTRYREWQSGNRKRKDAKPPKLNADTGCYPSLYKGQCYKLHGYEQVEIKVFNGSDWVWTSVQITGLRERHQVATNKIMSPSLVINDKSCHLSVPFTCKPEKRKPEGNVTAVDLGINTTATIAVITDGGTVIHSAKPTLREREFIHSGRDIDRRDKRLKSVSTRASLTMGKGGKLHKGFCSKTYEKCRRINDQIGHIVSKRIVEIAEQFNSLAIVFDNLKGWKPRGGKKRSNLRQRFHGWLKSKIRNFTEMKWTELGGKVIEVVAAYTSKLAYDGSGTVKRDSRNYSLATFPSGKCFNADLNGSYNIGARGVLKLTRRNDGEGCSSKSTGRPLRSWACLCDLWATVSPRLA

SEQ ID NO: 303 - protein, 380 aa, unknown
  TnpB Polypeptide
MESIRTISCRLDVTDYQALHIEATMKAFADACNYIAEWGREHQISRQYDLHKGCYYDVRSLFGLSANLAVRAIARVAPKLRKAKTRNSVFKPTSIDYDKVIFRFFEKDWTVGLTLLNGREKIPLKIGDYQRDALRGQKPTSAVLVKKGKKYYLNIQVKETVPDPDEPTGTLGVDLGIKNIATLSDGTSFGGETLNAYRLKQHKTRKSLQSKADTGSKSTRKNTRRVLNRLSGKERRHQRQVNHEISKHVVETAHAANQAIALEDLEGIRERTNRRLRKSQRGLHNSWAFWQLREFIGYKSLRAGVEVIAVNPAYTSQTCSACFHIGSRKGSRFSCSNCGAEMDADFNASLNIAAVGGAVTCPEYSSLSCPLPQRMAVAAG

SEQ ID NO: 304 - protein, 546 aa, Bacillus sp.
  misc_feature (320)..(532): Xaa can be any naturally occurring amino acid
MMNKAYKFRIYPNQAQAILINKTIGCSRFVFNYFLSLWDHAYKETGKGLTYGTCSAKLPAMKKELVWLKEVDSIAIQSSVRNLADAYTRFFKKQNSAPRFKSKKNNLQSYTTKQTNENIAIIGNKIKLPKLGLVRFAKSREVEGRIVNATVRRNPSGRYFVSLLVETEVQELPKTHSYIGIDVGLKDFAILSNGTHYKNPKFFRSLEDKLAKAQRVLSRRMKGSSRWNKQRVKIARIHEYISNARKDYLDKISTEIIKNHDVIGIEDLQVSNMLKNHKLAKAISEVSWLQFRSMLEYKAKWYGKQVIVVSKTFASSQLCXXXXXXXXXXXXXXXXXXXXXXXXXXXXXXXXXXXXXXXXXXXXXXXXXXXXXXXXXXXXXXXXXXXXXXXXXXXXXXXXXXXXXXXXXXXXXXXXXXXXXXXXXXXXXXXXXXXXXXXXXXXXXXXXXXXXXXXXXXXXXXXXXXXXXXXXXXXXXXXXXXXXXXXXXXXXXXXXXXXXXXXXXXXXXXXXXXXXXXXXXXXXXXXXXXXXXKASNRKDCGVSLIN

SEQ ID NO: 305 - protein, 513 aa, Escherichia sp.
  misc_feature (313)..(399): Xaa can be any naturally occurring amino acid
MHQENTMLPRRISVSLFIDQSIIWPVKRLQAFKFQLRPGGQQEREMRRFAGACRFVFNRALALQNENHEAGNKYIPYGKMASWLVEWKNATETQWLKDSPSQPLQQSLKGLERAYKNFFRKRAAFPRFKKRGQNDAFRYPQGVKLDQENSRIFLPKLGWMRYRNSRQVTGVVKNVTVSQSCGKWYISIQTESEVSTPVHPSASMVGLDAGVAKLATLSDGTVFEPVNSFQKNQKTLARLQRQLSRRVKFSNNWQKQKRKIQRLHSRIANIRRDYLHKVTTTVSKNHAMIVIEDLKVSNMSKSAAGTVSQPGRXXXXXXXXXXXXXXXXXXXXXXXXXXXXXXXXXXXXXXXXXXXXXXXXXXXXXXXXXXXXXXXXXXXXXXXXXXXXXXXXXXXXXXXVRAKSGLNRSILDQGWYEMRRQLEYKQLWRGGQVLAVPPAYTSQRCACCGHTAKENRLSQSKFRCQVCGYTANADVNGARNILAAGHAVLACGEMVQSGRSLKQEPTEMIQATA

SEQ ID NO: 306 - protein, 211 aa, unknown
  TnpB Polypeptide
  misc_feature (168)..(192): Xaa can be any naturally occurring amino acid
LRLPKIGQIRLKQHRIIPEEYRLKSVTVSQTPSGKYYASILFEYEDQVQEKELQNFLGLDFSMHELYRDSNGKEPVYPGYYRNAEKKLAREQRKLSRMQKGSNNRNKQRIKVAKLHEKVSNQRKDFLHKQSRQITNAYDCVCIEDLDMKAMSRSLNFGKSVSDNGWGXXXXXXXXXXXXXXXXXXXXXXXXXAARPVLFVVTKMQKRKILR

SEQ ID NO: 307 - protein, 363 aa, unknown
  TnpB Polypeptide
MKATLTLKIKLEVTEQASQSLSDAQKAYVVALNHTSQVAFEKQAFNSVALHHITYRDVREMTKLPANLVCSARNVVAEAYKREKEKRHRWKETAAMRYDARTLTVKFDQQYATLTTIGGRIGVNLILSDYHRQYLDGTWEVEPTATVSRKGRIWYLHLILTKNVPGAQSDARVGVDSGIVRIATTSTGKVFKGGIIKHIRERRFKQRRDLQSAGHKSRSQRRLLKRLAGKEKRSVDWLLWNVANGIVDETLKAGAGTIVVEDLKGIRARIRVAKKRRLIHHGWPFSSLFLKMAHVASKQGIKLEAVDARNTSRTCHKCGHCESANRKSQRVFLCVRCGHKSNADYNASLNVRDRRVPFTDASP

SEQ ID NO: 308 - protein, 455 aa, unknown
  TnpB Polypeptide
LCYNTTKTRRSQGLKVYKTAKLEILGSHIIEPTIRIYREALSFVIDVCYKEKAGWLTLGGKNRCSYIEKLIHATSDNPNPKYVEFDKKFYKMPTYLRRAIINKAIGIVNSYLALCDRYIDKKTKALQEGKKFTDKPPRLSYDHSSSPVLYKGNMFENFDINGTCRIKLFIDNDWKYVDISLDNKSLYSSKIFRFDGYIMDSPSLVFKSKRFYLYVPFCRNVELSKEQDIAIGVDLGITNSAVVSAVMKDGTVIDRLFINQPKEKDHLKYQLDRLNRAHRISGHKNKKPNIWRKINNLIGAIATQTANDIVDFAKKNSAKVIVFEHLHFKKKKGDKKKKKLGSKRQYWTKIRIQEMVKNKAHSMGIRFSRVNARNTSALAFDGSGYVRRNTKGDIATFTTGKIYHADLNASYNIAARYFLRELERAKVPVRIDRTSQTLDTLINLAMMPHHPSKVA

SEQ ID NO: 309 - protein, 384 aa, unknown
  TnpB Polypeptide
MRRAYKFRAYPTRRQEQHALAMLDAHRQLYNAALEERREAWRHGVRVRYREQSAQLTEIRRADPAGQGHWSFTSQQQTLRRLDRAFDSFFRHVRAGRTAGYPRFKSVTRWDSVDFVDGDGARWRGPQGKWGRAYLQGIGQLKVTAHRAVLGRVKTVRLKREGRRWYVIVVAEQQPAPLPATGREVGLDVGVARFATTSDGQVIPNPRFLVTSARELAAAQRALAGCRPGSGNRRRAKRKLAKLHRKLANRRRDFHHQTARRLVDTCDVIAVEDLAIANMTRSASGTIEQPSRNVAAKAGLNRSILDASWGQFLVILLAKAEGAGRRAITVNPWRTSITCHRCGARCDRPRQNTVICPAHGGMDADLNGARNILTRAGLGSGRAA

SEQ ID NO: 310 - protein, 370 aa, Mycobacterium sp.
MTSSKVVKRAFRYRFYPSPGQAAALSRTFGCVRFVWNKALDERTRAYATESRRTTYVQAAAALTGWKKTDELAFLNEVSSVPLQQTLRHQQTAFSNFFAKRARYPKFKSRKKSRASAEYTKSAFTWRNGQLTLAKMSAPLDIRWSRPLPDGASPSTVTVSRDSAGRWHVSILVEDTVTALPRATEIVGVDVGLETLATLSTGEKIANPRHERANRRKLAKAQRALSRKERGSNNREKARHKVARLHARVTDRRTDFLHKLSTRLIRENQAIAIEDLTVRNMIANHSLARAISDASWRQLRTMLEYKADWYGRDILLVDRWFPSTRLCSDCGALHEHLPLNIREWTCRCGVVHDRDVNAAKNILAAGLAES

SEQ ID NO: 311 - protein, 485 aa, Methylococcaceae sp.
MQTGNRFRCYPSPAQAQILLRWLGCQRFIYNAKVSEDRYFRAFARKTLAMTGTCPPVDQIYAQFIGEATPWLCDVPSQVLRNGAVRWAQAYQRFFQGLAGRPKIRDKHGPQSLWLTSELFAFEPTVSTLTGEVLGHRLLVGTQKFPVGTIAFTAHKDYRLPASIRLVLDAGHWYLTFSAEDDAPEPDEEDTVAGLLRLSEAELLEKTFGGDRGVAIPLAGNHGQRFDFSPVQRARMVKKEARARRWQRRMSRRPKGSKNREKAKRQAAAAKRYVRNVREDFAHQASHQLVADERYVLYVFEDLAIRNMTAAPKPKPDGKGGWLKNGARAKAGLNKAILASAWGRTAAFTQYKARRAGKLSLRVSPHHSSQECAQCGHIHPENRPDQPTFLCQRCGNTDHADHNAGQVIARRGVRRLLSGEYRPPQRKRCALRRRTEQELGPGRSEVTPGESIVSRVAGNGQTRGTRNQEAKAVRPETPATTAPAI

SEQ ID NO: 312 - protein, 380 aa, unknown
  TnpB Polypeptide
MFRAIKVRLYPKKAQEQELNKVLGCYRFVYNQMLAKRKIAYETDKTNLSVTDLSKWFFGALRKDEQYPWLKEQNTQVMKQAIRQMDGAYQKFFKQHNGFPKFKPKKDKQSALFPREAISRRNTFETNHITLITSLQDIKFKCSDLYHIRLKKYKDNIRSATLSKTKSGNFFLSILIDIPEGELVKFNKTNKQVGIDLGVKDFVITSDGVVFENKHFFKKEEAKIAKLQRQLSRKAKGSNNRNKQRIRLAKAFERLTNKKENYIHSVVNEIFKSYDVVFMEDLNVQGMLRNHSLAKAIQEIGFYRFKEVLQDKALVNGKQVVLIDRFYPSSKTCSCCGYKKKDLKLSDRFWTCPECGEHHDRDINAARNILLEGQRKLQAV

SEQ ID NO: 313 - protein, 250 aa, unknown
  TnpB Polypeptide
VADVRHSGSPQIGDIKLRYHREIPDEADIKEVTVKKETPSEWFVSFGLETDDADLPEKPDVNSLGTINSVGIDLGILNYIHTSDGKTVDWLNLEDEYERLHREQRTLSRKEQGSNNYETQRVEVAKMKRHIRRKVLDSQHKIPTWLVRQSDAVFVEDLDVKEMLEQSHNARNKQDAAWRQFITLLEYKADLYGCHVAQVEAQGTTKECASCGVETENPIWVREHSCPSCGFECDRDANAAMNVLQRGFAE

SEQ ID NO: 314 - protein, 419 aa, unknown
  TnpB Polypeptide
MHYAYRYRLHPTEAQRETLDHYRDTCRQLYNHALTEFEHIPNSAGTLNQRVRQVRDQLPDLTDWWDELNDLYSTVAQAAVMRIEDSIKSLSELKQNGYNVGSLNWKAPSEFRSFTYVQSGFEFDNKNGQTVLSLSKLADIPLTVHREIPEDVSIKEVCIKKERTGEWYASFAVEDKEEPAKPENPDRCIGIDVGILKYSHDTDGRAVGSLDLQDERERLKREQRSLSRKQHGSHNWEKQRVRVAECHQQLTRKRHDFLHTLSNYYATEYDMVAVEDLDVKSMMESAGNSQSTSSAAWDTFTTLLEYKCKREGTHFAEVEPAGTTKECASCGVASEKPLWVREHSCPACGFEMDRDANAAINILSRGFEAIGLGQSEATPVETALPLFTSSGAFDVVDGKRVIETGSPTLRERTAKAVSE

SEQ ID NO: 315 - protein, 394 aa, Cyanobacteria sp.
MLKAIKYRIYPDSDQKTWLNRSFGCCRWFYNYTLDKTNQTYKASGKGLSRNTIIKLLPELKKEHEWLTEPPSQALQPVALDLSSAFLNFFEGRAKFPRFKQKGNRQSIRLPQGCKLLNDTIKLPKIGEIYCQISKRLEGELKSVTVSKIPSDKYYVSCLFDDGKELPEKSTDGKAIGIDCGLTHYAITSDGSKYGNPEYYRQYEAKLAKQQKRLSKKSKGSNNRYKARVKVAKVQEKISRCREDFLHKLSRKIVDENQVICVENLAVKNMVKNHNLAKSISDAGWGMFCTMLKYKTEWAGKTYIEVDRFYPSSKTCNNCLHQVNKLPLNIREWECPNCQTVNDRDINASKNIRDEGLRILGVGRIPIASGERVRPTKGTAFARHRSEKEESSRL

SEQ ID NO: 316 - protein, 223 aa, Escherichia sp.
  misc_feature (175)..(219): Xaa can be any naturally occurring amino acid
LQQSLKDLERAYKNFFRKRAAFPRFKKRGQNDAFRYPQGVKLDQENSRIFLPKLGWMRYRNSRQVTGVVKNVTVSQSCGKWYISIQTESEVSTPVHPSASMIGLDAGVAKLATLSDGTVFGPVNSFQKNQKTLARLQRQLSRKVKFSNNWQKQKRKIQRLHSRIANIRRDYLHKXXXXXXXXXXXXXXXXXXXXXXXXXXXXXXXXXXXXXXXXXXXXXQNQV

SEQ ID NO: 317 - protein, 390 aa, Geobacillus sp.
MYRTVKTSFSANKETIEKLFHIRRICGVIWNDCVQLARYYYRLGNHWITQTELQKELKGKYPIHSQTIQAVAHKFLQARDSAKEARKSDKNIRFPYKMKKTFNPKWVDQAFSIEKNTLYLSLGNTKGPDGKRLPKLKIKLHHVPEGEVKEVELVYDRGLKFCLSYEDGKQASSSTGTNIAAVDQGEIHAISAVSENGSSIIITGRKMRSIHRLRNKKLAELQKLMSRCKKGSRKWKTYNRAKQYILSKSEAQLKDCLHKTTKEFVDWCLEQQIKHVVVGDVEGVQRNTKKKRNKNTNQKLSNWSFGKLYDYLKYKLEAKGITIEKVDESYTSQTCPVCGKRNKVKNRNYRCACGYEQHRDIHGASNILTKYLYGKMIPISIQPPTYLRIT

SEQ ID NO: 318 - protein, 420 aa, unknown
  TnpB Polypeptide
MLVTWKQNLKHLSKDEYMLLKEMCRLSKNVYNESLYNIRQHYFSEGSFLRYEATYPIEKTSENYKLLGANIAQQTMKCVDAAFRSFFALLKLVQKKQYSKDAVNMPYYLPKDGLYPIHLPESFMKEDGTMIIPMSPLMKKQTDTRIKLHFPPQLRDKKVHQIHIVPRQGGKWFEARYLFDVEYDEIQDLDLNKALSIDLGINNFATCATSTGEAFIIDGRKLKSQNQWYNKQRARLSSVKAKQGIKCDTSRMSATTEKRNRRIQDFVYCSAKYIVDYCLTHKIGNIVVGFNDGFQENPNLGKVNNQNFVMIPYGKFKNRLKFLCNRFGINYIEQEESYTSKASFFDSDKIPIWNPQNPHQGSFTGKRIYRGLYQRSNGQVLNADVNGALNIMRKSKLNQIQHLEQCRGEVITPLRIRLSQ

SEQ ID NO: 319 - protein, 302 aa, unknown
  TnpB Polypeptide
VLSTNAIIIRGDYLMLPMSREFRALHPEVKEIAIPFPKRLSDKTIKEVRILPCGNGRVFKIQYVYEVTEEPINLNKDNVISIDLGIDNLATCVSTIGTSFIMDGRKIKSINHQWNKEMSRLRSIAMKQNLKTTNRIQRITTKRNNQVNDCIKKTARYIIDYCIENDIGSLVVGYNADFKRNSNIGKVNNQNFVQIPLGDLRNQLSFLCWKYGIDYIEQEEAYTSKSSFLDKDVLPEYKPEQPYTGKFSGKRLHRGLYCSANGTIVNADVNGAANIMRKCKQNVDFDKLCLGLLASPARIRLS

SEQ ID NO: 320 - protein, 422 aa, unknown
  TnpB Polypeptide
MKLSTWKCSLKHLTAKQYEYLREMCHLSKNVYNESVYNIRQQYFQEGSYLRYEANFSIMKFSENYINLGSNVSQATMRCADQSFKSFFALLKKVKDGVYENWKVKLPHYLDKDGVYPVTFIHAGESNYSSGKFKIPMSKYLRDKYNGMKFYIDVPEYVRDKKIHTISIVPKYHGKYFEARFVFEENDVTESHIDYNSALSIDLGVNNFCTCATSTGESFIIDGKRIKSINQWYNKENARLSSIKDLQGIKGCTKRQYLLARKRERRIDDLIYKSAKYIVNYCIEHQIGNIVVGYNDGFQDRVNLGKVNNQKFAMLPYGKLKSRIQYLCTKYGINYVEQEESYTSKASFLDRDEIPKWNPLNPKQGEFTGKRIYRGLYQTKDGILINADVNGALNILRKSSVVSLETLYSSGVVLTPTRVRIL

SEQ ID NO: 321 - protein, 315 aa, unknown
  TnpB Polypeptide
LENNKDKYLGRPKLPKYKDKSDRCVLTLTNQEVNLKNGILHFPKVFNGFSIKPLFISNENYVSFQQVRFIPKANHIELEVVYNIEIPETVCDNNRYYSIDIGLDNLATVTNNFGEQPFIINGKGLKSENKYYNKLLAHYKSIAMRMNKQYSTKRILSITEKRNQIIDNYLHQASRYIVDKAHSDDVSVIVIGNNKCWKQKSEMSKRVNQSFIQIPYNRLMEMIKYKAEEYGISVVLTEESYTSGTSFLDNELPIKENYNKSRRIHRGLFKSDSGVLINSDVNGSLQILKKVFPNAYSNGIEGVALHPIVVNACNI

SEQ ID NO: 322 - protein, 417 aa, unknown
  TnpB Polypeptide
MVIINMVIQRVEKHKIRQTNTYYYLIDGFCFNAKNLYNHANYLIRQEFVNNDNWLRYEDLDKTLKADARYPDYKNMPTAQSAQQVLRLLDKNWKSFFASIKDWKNHKDKYLGKPKLPKYKDKNGRSILILTNQEVKLKNGILQFPKVFNGFTVEPLFISKENYVSFQQVRFIPKANHIELEVVYNVEISETIGDNNRYYSIDIGLDNLATVTNNFGEQPFIINGKGLKSENKYYNKLLAHYKSIAMRMNNRHSTKRIRSITEKRNQIVDNYLHQASRYIVDKARKDDVSVIVIGKNKGWKQKSEMSKRINQSFIQIPYNRLIEMIQYKAEEYGISVVLTEESYTSGTSFLDNESPIKENYRKERRVHRGLFQSNTEKLINADVNGSLQILKKVFPNAYANGVEGVALHPIVVNACNI

SEQ ID NO: 323 - protein, 407 aa, unknown
  TnpB Polypeptide
MKRLQAFKYELQPNGEQARSMRRFAGSCRFVFNKALAMQKAIYEGGEKKLGYAGLCKMLTEWRNSPETAWLADSPVHPLQQTLKDLERAYTNFFAKRADFPRFKKKGQHDSFRYPDAKQFKIDQANSRIFLPKLGWLRYRNSRGILGAAKNITVSANGGKWFVSIQTEREVEQPVHPATSIIGIDVGITRFATLSDGSHIEPLNTFRKHQQRLARYQRAMSRKTKFSSNWKKAKARVQKIHTRIANARRDFLHKTTTTISKNHAIVCIEDLQVRNMSKSAAGSSDSPGRNVKAKSGLNKSILDQGWFEFRRQLEYKQVWLGGDVLAVPARNTSRTCPACGHVSADNRQTQAKFACVDCGYENNADMVGAINVLERGHRLLACGELAQSGRSVKQEPAEATTQGLALV

SEQ ID NO: 324 - protein, 449 aa, Lentzea sp.
MSVVLQAYRYALEPTSAQVAMLRSHCGAQRFAFNWGLARVKANLDQRAAERSYDLEGPELTPPVNWSAYGLRKDWNLAKEEVAPWWSENSKEAYSSGLANLATALRNWTASRDGRRKGRQLGFPRFKGKHTSSSCRFTTGAFGLVDYDRRHVKVPRIGTVRTHESTRKLARHVERGSARIRSATVSLRAGRWFVSFSVEIQRAQATSADSVVGVDLGINMLAVLSTGEMVPNPRRLEAAQRTLRRLQRRASRRTGPDRRIGRSPSVRWSKAQARIARLHARVANARRDGLHKLTTHLVRAHGTVVIEDLNVAGMLRNRRLARHVAGIGLAELRRQLEYKTAWAGTRLHVADRWFPSSKMCSGCGVVKAKLRLAERTYHCQACGLIVDRDLNAARNLAALVESSSSVSCTVTLNEPAGNPCESPPCGAAGTATGRPTWSTPRREATAHAQ

SEQ ID NO: 325 - protein, 417 aa, Actinomadura sp.
MRCCGFLVLSVVVGRLRSVSRYRLCPTPAQEAGLLEHCSHARYVWNLAVEQHAWWTPRRGSAPGYVAQARQLTEARAANPWLAAGSQTVQQQALKDFAQAMANFFAGTHRRPTWRKAGVHEGFRIVGARGRAWDVRRLSRRTGEVRVPKVGWVRFRWSRPVPPGVRSFRVIRDRAGRWHVAFAAIPDPVPAPGNGAAVGVDRGVAVSAALSTGETSTVPGLTPGEAERLKRLLRCLARACRGSNRRARLKAAVARLKAREADRRKDWVEKTSTDLARRFDVIAVENLNVRGMTRSAKGTIDAPGAGVRQKAGLNRGILAAGWGQLVARLEHKAPGRVVKVDPAYTSQTCNSCGHCARDNRESQAVFRCVACGYLANADVNAARNIKDTAVGRTVAARGGTPLGGPVNREPQPALLSV

SEQ ID NO: 326 - protein, 421 aa, unknown
  TnpB Polypeptide
VSKSQKDYLTYIIATAKPTEQLDRINRLGGQIYSQTLSLAFKTHRRKGFWLSDGGLKAYLKFKGYPCHSHSVQAIVDDYCGARRSYFANAKTNPNAKPPHKTRKFHTFTWRATGISYKHGNLRLSMGKDNEPLWITIDKKFHKKVPAEVSLVYHRTTKQYEFHATYIMQPKKTKTKSGSAIAVDMGEIHPIATFDGLTSEIYNGRLIRSVMQYRNKFLASINKALSRCVKYSKRYKKLKRVKQRTLQKIDAQIRDMRHKITSRFVSSCRERRIETIVIGDIKHIRRSIEYGKKANQKLHQWAFSKIRDMITYKAKAVGINVDTQDEAYTSQTCPSCRNRKKPSRRTYHCSKCKWQGHRDVVGASNILTKYQGWLFNPVVGAVVSPRGVRYEPHLRRLDKWSPFSGLKSSKPPTRKQRSTRL

SEQ ID NO: 327 - protein, 395 aa, unknown
  TnpB Polypeptide
MIVSYKYPIFPNKITQWKLAENLDACRWLYNRLLQDLNEAKKNGVTLKTYDTQNMIPSLKLENPKLNQVYSKVLQMVNYTLWSNIKGLAASKKNGRKIGHIRFKGHGWYNTLNYNQSGFKIDQDHCLLHLSKIGDVRIKLHRKIEGCIKAVIIKREGKRWFAIVQTDQELQPLPETGEAVGLDVGLTSFVVDSEGNDIENPRYAEQSASRLTKLQRKLARAKKGSNNYKAIKDKIAKLHKRINCQRDDFLHKLSRTYVNNFDIICVEDLDVKGLKEKGHNNGIHRSIHDASWSKFIFMLSYKAQSAGRELIEVDPRNTTQRCSACGCIVKKELSDRVHECPYCGFSCDRDYNASRNILISGMEQPVAPIESKSLHHISVMQVLAMKWEAAPFRTR

SEQ ID NO: 328 - protein, 403 aa, unknown
  TnpB Polypeptide
MEHILTHNLAHTIRLNPNKTQETFFKKACGCARAAYNYGLAEYQKQRKDGLKPKITDIKKQFNQDKKTLYPWMSETNKDANQQPFANLQAAFSRFFKHQSKYPKFKKKGIKDSFYISNDKFEVEENKFWVPKLGWVKGSEALRFSGKIMSAVVRRKADYWFVVISVQTDKTFISCENQTVIGVDLGIKTLATLSDGKVVEAVKPLRARLERLKLLQRWTSRKIKGSSNQRKAIQRVSKIHYEITCLRKDVLDKLTTYLCENYQVIVIEDLNVSGMLKNHCLALSLADCGFSEFRRQLEYKSVLTGNTLIIADRWFPSSKTCSGCGYVKETLLLSEREYVCEKCGLVINRDLNAAINLKNYGLNKIGTVSPESTPVDLEALACRAASETTEVEAGISECPVMST

SEQ ID NO: 329 - protein, 398 aa, Escherichia sp.
VKRLQAFKFQLRPGGQQEREMRRFAGACRFVFNRALARQNENHEAGNKYIPYGKMASWLVEWKNATETQWLKDSPSQPLQQSLKDLERAYKNFFQNRAAFPRFKKRGQNDAFRYPQGVKLDQENSRIFLPKLGWMRYRNSRQVTGVVKNVTVSQSCGKWYISIQTENEVSTPVHPSASMVGLDAGVAKLATLSDGTVFEPVNSFQKNQKKLARLQRQLSRRVKFSNNWQKQKRKIQRLHSRIANIRRDYLHKVTTTVSKNHAMIVIEDLKVSNMSKSAAGTVSQPGRNVRAKSGLNRSILDQGWYEMRRQLEYKQLWRGGQVLAVPPAYTSQRCACCGHTAKENRLSQSKFRCQACGYTANADVNGARNILAAGHAVLACGEMVQSGRSLKQEPPEMI

SEQ ID NO: 330 - protein, 449 aa, unknown
  TnpB Polypeptide
MKGGFAVKITSSYAVEIKKQKMFDNTIKIYREAVSFLIHCFSKEWSAILAIEGSKPRFNFAEKLVHTTKYSKAKYNFDAKFYKFPSYLRRAAIQAALGSVSSYYSNYKNWETNGKVGKEPKLQCDRFCFPAFYRTVMYEESNQPNQCYLKLYKNNDWVWIPIAMRATDVKYITKYWSHCEKSAPTLEKKYGKYFLRFAFVEKVELSETEIQDRRICAVDLGLNTDAVCSIMTADGTVLARKFINFPSEKDHLYHVLNRIKRKQREHGSNSAAAMWRYAKALNNDIAKKVAAAITEFAVLYSVDVIVFEHLSFTGKKHGGSKAQKLTMWKRNSIQDYVTQKAHRCGIRISRICAWGTSKLAFDGSGALKRDETNRALATFASGKQYNCDLSASYNIGARYFVRELLKPLPAMVRSQLSTNVPDVERRIQVTLATLKVLYPELKKLSTQAA

SEQ ID NO: 331 - protein, 388 aa, unknown
  TnpB Polypeptide
VIVLKVVRTVKVKVGESAEFDAVAVRYLKAANWVSKRVFKSKELNSNKLHRAFYATVRRKFKVPSQLACNIFRQVASSYKTAKALKRWRLCVYKQPTMPVTPGNDLMRSKKYGVRILGEVVTLTHHAIPITGWRESKLKRVGKVWYLILAHLVDVPEPKTEGCIIGVDFGVKRLMVATNSANSRTFFFKGGELNHRRTCIRNTRAQIQSVGSRSSRRLLQRMRHNEAAVTGHLLHVASKALVKYAVDNGARRIVLEDLTNIRDSSLRTRKDHRAKINRWPFAQGQFKITYKAQNVGIAVEKVDPRNTSRGCSACGYVSPSNRHGLRFHCKKCGHQEDADRNASVNIRLRSIVAAQAADAMGSFQPPESAEPLDILTDSPVLHDELVRV

SEQ ID NO: 332 - protein, 371 aa, unknown
  TnpB Polypeptide
MTVTVQLKLMPTAEQSSALAATLRRCNEAADWLSERAFLNETFTQYALQCGYYRELREKFGMGAQAACLVCAKVGDAYKLDTDTQRKFRPLGSMAFDIRNLKIHLEKQIVSIWTLAGREKVPFRCGDYQRELLRKGLIKQSDLVRRRDGKWFLMVSVVLPDDEELKATDVLGVDMGIAEIAADSDGNKHSGSALNKIRHRNHSLRKKLQRKGTKSAKRLLKKRSRKEALFARDCNHVISKKIVLLAKRTNRAIALEDLKGIGRRIRVRKSQRYGLKSWAFAQLGQFIGYKAEMAGVPVIFVDPSYTSQRCSECGHTERANRESRSEFSCKKCGHTSHADTNGSQNIRLKGLEVLRTGAFIRPHAEATTYAN

SEQ ID NO: 333 - protein, 380 aa, unknown
  TnpB Polypeptide
MIQRTVVFPIHLDRKQAEAVLKTIKLYFKAWKYCVDIAWDMKKLSSVDLHKVTYNKLKAELCLKSQYLCSARNRAVESVKSVRTLSKKGKKISKPTSDQIPIRLDARTLSFDKLREKVSITTQDGRIKIPLVWHKQANRYKEWHCKAGEIGINKAGKFVLRLIFEKEQIKPKRTQRVVGVDRGIRHAVVSSDNRFIGKRKWREHERKLLSLRAKLQFKGTKSSKKHLKTLSGRLRRFKKDCDHTVAKQLISKLLPGDTIVLEKLTNIRQRCGEKGKAVKKHRANMARWSFKRLEDYAISVAQLNGVYVEYIQPHYTSQTCSSCDIILKKNRKSQSFYSCSCGLKLNADLNAARNISKKWCCANGVAFGLSVNQPIVVRCF

SEQ ID NO: 334 - protein, 382 aa, unknown
  TnpB Polypeptide
MLEYTLNYALENNIKSFTKLKAEVYRELRSMYPELPSHYAYTVCQDITTRVKSFLKLKRKGLTYTDKPGMRRISLWLDDHLWKLNGYTEVKIATHKGWITLSIRHYKLYWKYMNNHTWKLCSEAKLKINSNSVVLLLTFRKEKHMPYEPKAVIPVDINENNITFKVGNEVYMVKTNFKKIIVKYHNHRKRVQEKYQQKLPKLFNKLVRALREKERKKNIRYQIASLIVKTARELKAIVVLENLPKKTPNNMISRFNSKILKHRIYQAGFRGLLSTIIDKCMEYDVPFVLVNPRKTSSTCPICNSALVRGNAPRQMYCPECNYQAGRDIIAVFNLEKRYLQMRGVMLFTPKPYEVGVKLMNPVQRVKLLPTIHYETKIYKMNG

SEQ ID NO: 335 - protein, 500 aa, unknown
  TnpB Polypeptide
MFYSSNMNFWESCIGLDILKSRGRFRELVFDQLGYPNKEEYWSKIEGNKAKYARISINIIRELLLSVSERREAARICQMFDFDISRLPEIREVLVEKELYVTSTVLKNICRERKISPLPKVSLFRLDGTAEDSQISTVMCEDGVVYYTIRVGSKTIKFSFPIPANIRPQATGKWARPVIQVKDGEVVARFSYEVCVNYFTSNPSERILGVDLGVKKPFSACVNYGDGSYSTELLPTKELTRLNNKIQTLNTEVSRHYAKLRNLEQLLTHNPDPKLLQHYLDVRYNLDSVKKKRVRLKVAAAWIYSRDLVNHAKENRCGVIKLENLSFLESKGGKWNFSGIQEKIISTASLENIEVQRVGARGTTGKDPFSNQVSKPKPDRTISTVIGPLDRDYASSLEVSSRDGKLVKNQRKIKRPKRGKPKPLRGKSCRDKHSPTPKRPKTRSRKSVLKEQVREIKELTKRSGSSESVEFSGVASLRTLHETETSHLMETSRPSINKYT

SEQ ID NO: 336 - protein, 394 aa, unknown
  TnpB Polypeptide
MDRTVRLSLVTPPDDAAALLETIQQWTSVFNAICAYGVAHRIRNGVTLHHRLYRMLKAQHPALRSDLHIQARVKAAEALKSAFTRRRHGLPVSCPRSTLCPPRYNCHTFAIDWDARTVRLSTTRGRRTIPFHLPAYAARYAKRPVSTADLVYRGGRFSLHVVVELPAPETVPSDDVLGVDIGEAQPAVTSRNQFLGQRFWKAIEGRYFRLRRALQRAGTKSARRHLRRIRHRQQRFRRDCDHVLSKQIVASVEAGAVIAVERLTGIRSRARKRKGRQNRRFHGWSFAQLRRFIAYKAEERGCTVAEVDPRHTSQRCSRCGYTARANRRLRALFRCRACGFTLHADLNAARNIAAAYRAGPGRSETGGLPVNQPDVALAAAAAGSCKPSPLGDGR

SEQ ID NO: 337 - protein, 479 aa, Isoptericola sp.
MTRHTTFRFSLDPTVEQRGVLERHAGASRFAFNQCLRFVFDARRARERGEDVTVPRTGYDLITTFNAWKKSAAAGRVFSVAPVGTTQVTDTGLVWRREVYQQVFEEAAVDLGRGLAAWSASRRGERAGRKVGHPGFRKKATARHSFRVRNQFPRRGRPAIRVGETTPRSVRLPGVGTLRVREDTRRLRRMLAKDRVRILFATVSRGQGRWWVSLNVEAADLHPARQHPDRGADAAEADSRWVGVDLGLTSLAVAARSDGTEVDRIDAWPRLLRSTARRRRALHRAVTRKQRGSRRRRRAVARLARYYAWTARRRRHHAHLISNRLVKTHDRLVLEHLDVRGMLARNPTLAESIHDVGWYQLTRQIAYKQAWRGGELVRADRWYRSSQTCSACRSVQGLGGVAVRRFDCRACGLSLDRDLNAAANLAAWAELHHGADVWARDLPAEGPVINAHRRERSGRRLRGGETDPEDVGTEARASA

SEQ ID NO: 338 - protein, 388 aa, unknown
  TnpB Polypeptide
MTTGDEGFLTLSIGMRVSPEPVALELLHRYRDALNYAIKKMLDNNLRTLKQIHDFLYKDLVERFNLPSRIALDCYRDALANANAWRNNPKKGKRPVVKRLSMLLHPGSGYRIKDGYIEIIGGMRLRIVGWDRRYNDYDNREARLVYKRDMMILWISKRIPKPKKYVPIDVIGVDINEKKIVYGDEIINIEKDTAINRAYKYIRLAEDLQKKYSSSRYLVWRRRKGILRRIRSYHEKARNILNDWTRKISLEIIKLAKDLRYAVSREDLTNLIKSLRKLPRDHKRKLIIMGYSRFEKWIDWQAEKHGVPYVKVDPNGTSSECPKCDYKGLVEVGYRRLRCPRCGFEADRDVIGKLNVRKKGLRKLGIKFSGGSLATPTAPQMTDVASNR

SEQ ID NO: 339 - protein, 285 aa, unknown
  TnpB Polypeptide
VIINIASKYGQPIRLVTTTSGKNVDLSGKNIRIVVKGNVTEIHYAYEKPMGRPHGTEIIAVDKGYTEAFVDSDGDEHGADLGKIMTEYSDKVSKTGKARNKLYALEKKHREAGHIAKADRIKVNNLGTKKINTRKNKVQKRIRNIAFKAAHSVVDKASLVISEDLTSPIAKKHPWKNYNRKMSSWAKGTLAEALESTTQQRKARHALVNAAYTSQADSNTHLLEGRREADKFYCANGDVLQADFNAARNLLHRYFDHEITLYTPYREVRRILLARSSGDTDRQGA

SEQ ID NO: 340 - protein, 420 aa, Actinobacteria sp.
VVVFAVALCEDRAEVLADLPEYFGQVADHLPGQEMMLARTFGCARVVFNDALRLREEAHGAGEKISDTEVQRRVIALAKATPERAWLGEVASVALVQACQDARRAYRNWFDSLSGKRKGRKVGHPRFRSRKDHRQSIRLTRNGFTLHGDRLYVAKVGDLRLRWSRPLPSEPSSVTVIREADGRYYASFVVEVAAVPLPVTTADVGLDLGLSVLAATSDGELIANPRHLRRRERKLACAQRALSRKQKGTANRQKARVRVAVQHRKVREARADHLHKTALRLVRDNQVVYVEDLAVSGLARTRLAKSVHDAGWATLVRLLEEKAERHGRSVVKVGRWFPSSQICSMCGVKDGPKPLAVREWTCGGCGTTHDRDVNAARNIRLEGRKVAAGQADTLNGCGGTERPEPVPAGPGETATHRSAA

SEQ ID NO: 341 - protein, 387 aa, Blastochloris sp.
MCHLAFFLIEYEHMSVHQKAYRYRLRPTPAQEAVFRQWAGARRWVYNTFLARRRSHYQATGTTLTVGEMCKELTMLKRQQATAWLRTCNAQSLQQAIRDLDRAFGNFFARRARFPRMKSKKREIPSFRLPAEVKVVDGHLYVPKIGLVRLVLHRPVDGTVKSATFKQDATGAWYVTLVVHFTLPDAPPPPPVPERVVGVDLGLHDLAVFSDGERVPAPKHYRRAERKLRRLQRRLARCQQDSHGRERARTAVARHHLKVRNQRTDHLHKLSARLVGQYDAIVVEDLAVAALAKTKLAKSVLDAGWGQLRFQLTYKARWNRTQLVVIGRFFPSSRRCGACGAINGDLTRSDRTWTCGCGATHDRDLNAARTIRDEGLRLLLAGGTTES

SEQ ID NO: 342 - protein, 304 aa, Okeania sp.
MKSLGKGFPRFKKRMRSFVFPAMLKNYLGCGRFKLPQLGWIKIRQSRPYPEVMVAKQARIVKKATGYYLMVSFTSSKSVPDNLVGKTSLGIDAGIESFVATSTGKLIKAPKFLSGQLRKLKLASDPAPPPGARERASLLQRRLKHKNKGSSNWSKLQNRIARLDEKISNTRRDWHFNIAHQLCDLADNIFVEYVNFNSWSKGIVRKQSLDSGIGQFINEILPYVCWKRGKYYAKVDKNYTSQEYPLCGHRQKKKLSDRKHNCSNCSYQINRDVAAAKIIRNRGLIAVGHTAKEKRTACAEVPSA

SEQ ID NO: 343 - protein, 392 aa, Okeania sp.
INHILDVCKSVYNYALRGHKDWLSSRKSPINICSIISEYIIPGDTPYPNYNYQAKNLTTAKKTNPKLKSVNAQVLQQTLKQLDRAFSEMKSLGKGFPRFKKRMRSFVFPAMLKNYLGCGRFKLPQLGWIKIRQSRPYPEVMVAKQARIVKKATGYYLMVSFTSSKSVPDNLVGKTSLGIDAGIESFVATSTGKLIKAPKFLSGQLRKLKLASDPAPPPGARERASLLQRRLKHKNKGSSNWSKLQNRIARLDEKISNTRRDWHFNIAHQLCDLADNIFVEYVNFNSWSKGIVRKQSLDSGIGQFINEILPYVCWKRGKYYAKVDKNYTSQEYPLCGHRQKKKLSDRKHNCSNCSYQINRDVAAAKIIRNRGLIAVGHTAKEKRTACAEVPSA

SEQ ID NO: 344 - protein, 381 aa, Azotobacter sp.
VTKRAYQYRIYPTPEQAELLVRTFGCVRFVYNAVLRWRTDAFFKEQQKVGYTQASARLTAIKKLPETAFLNEVSSVPLQQSLRHQQAAFRNFLEGRAKYPAFKKKRHRQSAEFTPSAFRYRDGKRFLAKCDEPLAIRWTRPLPCDPSTVTVSRDSAGRYFVSCLCELEPEALPVTRNMIGIDLGLKDLFVTSEGERIGNPRHTAKYAARLALAQRRLSRKKLGSANRAKARQKVARIHAKISDCRRDGLHKLSRRLINENQVVCAESLAVKNLIRNPTLSKAIADAGWGELVRQMAYKGAWAGRQVVAIDRWYPSSKRCSGCGHTLDALPLKVRAWACPECKAEHDRDVNAAINIKDAGLAVLALGENVSGIGQVPLSCSR

SEQ ID NO: 345 - protein, 212 aa, Anabaena sp.
MIVLEFKAKGTKQQFQNINEGIRITQFIRNKCLRFWMDNQGVKPYDLNKYTAVLANEFDFADKLNSMARQAAAERAAFAIKRFFDNCQAKTPGKKGYPKFQKNNRSIEYKTGWKLLEDRKHINFTDKCGIGQLKLIGTWDLHFYQINQIKRIRIVKRSDGYYVQFCIDAERNIEIKPTNKTIGLDVGLNSFYTDYQGDKVDNPRYLRKSEKS

SEQ ID NO: 346 - protein, 218 aa, unknown
  TnpB Polypeptide
LHPRRRRCGEPDWKITSKQKLHSLIYYDVRENSPLPANLLQAARNRTAEAVKGVVERWKEGKKASKPYLTSRFASYDSRTVTVNDDHATLATIDGRVTAEFVLPDEQRDTPHSAYLFNDDYDVKGATLHYDEFEDCFYLHVRTNSAVENDDAEVGDAKHVSVLGVALGITNIAITSTGKFWSGGELNHWHREYEKRRGDLQQTGTRWAHKNVQRVGRK

SEQ ID NO: 347 - protein, 422 aa, Cyanothece sp.
MLIREAKIIGTPEQYAQLDEAIRSAQCIRNLCLRYWMDHQGVGKNDLQKLCAVLAKDPLMPWIGKLNSQARQAAAERTWQAINHFYRRCREGAKHKGYPQFKKHSRSVEYKTSGWSLSEDGMTITFTDGFKAGGFSLWMNGAARQLILNSKINRVRVLCCADGYYVQFCLDTERQEQGDYTGSVIGIDLGLKYFTKDSNGEEVPCPKPLRKSEKRLRRAQRRLSKRFKKGVKRQGKNYHKQRRKVARIHLKIQRQRKDWAIKLARCVVKSNDLVAYEDLRVANLVRNRPLAKSISDAGWSQFTTWLDYYGRIWSKVVVAVNPVFTTQDCSRCGWRSPKSLSARTHHCPRCGLEMCRDENAALNILKRGLEIVGTRWNHSTVGHTETASQEETTGEISTAGLAGQPANLSAVIEPVRTVRKAV

SEQ ID NO: 348 - protein, 390 aa, Cyanothece sp.
MEKAFSYRFYPTAEQEHLLRRTLGCVRLVYNRALAERTEAWYQRNERVDYVQTSAMLTQWKQQDDLQFLNEVSCVPLQQGLRHLQSAFTNFFAGRSQYPNFKKKRNGGSAEFTKSVFKWKNGQVYLAKCLEPLKIRWSRSLPEGVEPSTVTVRLNPAGRWYISLRFDDARDLALPVVTESVGIDAGISSLVTLSTGEKVSNPKAFDRHYRRLRQTQKALSRKQKGSHNREKARIKVARTQEKIANSRKDHLHKLTTRLVRENQTIAVESLAVKNMVKNPKLCRAIRDAGWGEMVRQLEYKCQWYGRTLVKIDQWFPSSKRCGNCGHVVERLPLRVREWDCPNCGVHHDRDINAAQNILAVGHTVAVCGANVRPDRHRSKGQLQRSRKSQK

SEQ ID NO: 349 - protein, 409 aa, Cyanothece sp.
MRTCYQYRLRPNRQQQARMETWLELCRRQYNYRLAERFNWYEQNRCDVNACPLVCHLPELKDRPDHYSQKRDLVNSKVLFPEYKDLHAHVLQDVVKRVDKTFNRWLKGDCNGKRSGKPRFKGKGRYRSFTYFEVKQDCIQGNRITLPKLGAIKLVVHRPIPEGFKIKTVTVSYRADGWYVNLSLEDKSIPALTPDAPTFDNTLGIDVGLKSFLVTSFGESVDIPQHYRRAEKRLRRLQRQLSRNQKGSKRRQKAIRRVAKLHQKVANRRKDFHYKTAKRLLRAGQHIAYEDLNIKGLAKSRLAKSVTDAGWGQFLQILSLKAASAGVSTIAVNPNGTTQDCSCCGTSIPKTIADRWHSCHVCGLELDRDENAARNIKLRAVGHPVPARGGFQDAGPLMREAYTFVLARC

SEQ ID NO: 350 - protein, 201 aa, Cyanothece sp.
LVTLSTGEKVANPKAFDCHYRRLRQTQKALSRKQKGSRNREKARIKVARTQEKIANSRKDHLHKLTTRLVRENQTIAVESLAVKNMVKNPKLSRAIRDAGWGEMVRQLEYKCQWYGRTLVKIDQWFPSSKRCGNCGYVVERLPLSVREWDCPNCRTRHDRDINAAQNILAVGHTVAVCGANVRPDRHSSKGQLQRSRKSQK

SEQ ID NO: 351 - protein, 387 aa, Kibdelosporangium sp.
MWGVKLVVQVKLLPTPTQAAALAATLHECNTAADRVSVVAFERKVFSRNDLHKLVYPGLKAGGLGAQAAVRTIKKVVDAYTTLRANVRAGNLGRAGSKRRVKAESKPIVFRADSAQPFDDRMLSWQHDARTVSIWTTTGRLKDIRFAGHPDQLTLLAGHRQGESDLLCRDGRWFLLATCEVPEPDTFEPVDWIGVDRGIVNLATTCDGVNFSGRGLSRYRRWHARKRQELQAKRTRSATRLLKRRARREGRYARHVNHKIGKEVVAVAQRTGRGVALEELGGIRDRVRLRRDQRATHTSWPFHHLAAVLTYKARRAGVPTVTVDAHYTSQTCPRCGHVARTNRPDREHFLCRRCGLAGPADVVAAVNVRNRARRAWVFVNTPAPALA

SEQ ID NO: 352 - protein, 401 aa, Streptosporangium sp.
LIGVSRFRLQPSPVQEAKLAEHCGHARLVWNLAVEQHVHWKRGRKSAPGFAEQCRQLTEARAEFEWLRAGSIIVQQQALKDFHQAMANFFGKTHRRPTWRRRGQAEGFRIVAVKPGDVRRLSRHVGEVRVPKVGWVRFRWSRNVSDETKSFRITRDRAGRWHVAFVAIPKPIPAPGTGEVVGVDRGVTVSAALSTGDLLNVPTLREGEKGRLLRLQRKLAKAGRDSRRRERVKVAIAKLKVRESDRRKDWVEKTSTDLARDFDVIAVEDLKIGNMTRPARGTLEAPGRNVRQKAGLNRGILAAGWGQLVARLEHKAPGRVMKIDPRYTSQTCNACRHLARESRESQALFLCVACGHRDHADVNAARNIRDTAVGQTVAARGGAGLPEPVNREPQRDLLLVG

SEQ ID NO: 353 - protein, 298 aa, Natronorubrum sp.
VYDKRSATFHRDHVSLSTVGGRVECDYTLPDDSETPPTKYVSDEDFEFRMAHLQYRDGDWYLHASMRKVEADEESSESESKHRTVLGVDLGVNNFAVASTGRFWSADEFNHWRREYEKRRGSLQQCGSRHAHENIEAVGQKEYGRFEIYLHTVANELIKEAVENDCSYLVFEDLTHIRENILEATWQHVWAFRRLYEYVEYKAEEHGVEAVQVDPRNTSKRCSTCGFTYDDNRSDESFECQQCGYENHADYNASKNIGLQYLRRRQNAGDGGEPVDVRLNRGTLNVSGEYVPPASTEA

SEQ ID NO: 354 - protein, 546 aa, unknown
  TnpB Polypeptide
MSQKHPKKSGQEKKDREPRRKTPTFLLELPLCVNEGQAKRLRSHLEAGRQFYNAVLSEGQRRLSRMRADPRWQEARAIPRTLKAERGEAFSALRKAYGFSEYALHQYAKQARCTWIAEHLDSVLAQTLATRAYQALNRVCLGKARRVRFKSRGRGLCSIENKRNDTGLRFMLQPGTEGNRGVLIWQEDHLEALIDWNDPVVKHGLGCRIKYARLIQRKASSARAEGADVLSYRYYVHLVLEGKPHHKPKHSVGRDVIGADLGPSTIALVPRSGEASLSVFGAELAPDEKRMRRLQRRMDRQRRAANPDHYDAQGRIKKQGKRRLHWKSSPSYQKTRRRKAEHERRLVAHRRSLHGRLVHKIVAAGNIVILEKISYKAWQKQFGKSVGLRAPGMFVEQLRRTVASTGGTLIEVPTRAAKLSQFCHGCGACVKKPLSVRWHQCACGVGPVQRDLYSAFLASTLDQDHLTPSCAQSVILWESAEARLQAAHERVQQRANEGQSLPRSMGVPRAGARRPRMLSEATQEPALLALRGRLEAWKHRPEPSVL

SEQ ID NO: 355 - protein, 386 aa, unknown
  TnpB Polypeptide
MSKVIKGIKLRLYPTKAQQDQLWQMFGNDRKVWNLMLGMAKERYENNPSSHFVNEYGMNYLLKRLKQEYPYLKVSDATSFLVVNHNLAQSFKMLFKHRGGYPRFKSRHAWRQSYTGRSACKVTAKRRMQLPKLGSIRTSKTSQIGEAKIKRYTVSYDSTGRYYLSLQVEAEVNQLPKTGQSIGLDIGIADLAISSDGVKYGTFNAKWLEKQATNWQSKYSKRCHQATIAMRQWNNNHKDSKMELNDYQNWQRARVNKVRYQQKIANKRKDYLHRLTTDLVREYDIIVIEDLKTKNLQKNHHLAKSIANASWYQFRTMLEYKCEWYGKQLVVVKPNYTSQICSRCGFNSGKKPLEIREWTCPKCGTHHDRDINAAINILNKGLKAVG

SEQ ID NO: 356 - protein, 394 aa, unknown
  TnpB Polypeptide
LDGGSLSFRIGDITLFPIINKPRHTKTRRGHDTVVKEAHDFFAEEEIAAVCHYLENPEAADRAALELFRKKGELMDTYRPCYASLCFKEIRGRVRVFIHLTIEGLPKPKRRKDGSRRHQQGRGVVGCDIGPQTIACTSKKEVILKNLAERGMSIKNREQKEAAIQRKMDRSRRAMNPENYREDGTIRKGKKTWKKSRRYRKLQKQYRNLSRIAAENRHFAINEDVNHIRELGNVFVTEPGNAKKMQKWAKKTERREELSEVKQKDGTVKMIHKYKRKKRHGRSIHNRCPGYFQAQVKAKFERSGGVYIEVPFDYRASQYDHTCGSYIKKLLSQRMYCLSDGTRVQRDWYSSFLLFCIGHSWTRSADINVRLILRPCTGCTWHWSSISLRTISGS

SEQ ID NO: 357 - protein, 420 aa, unknown
  TnpB Polypeptide
MLRAVKIRLYPNKTQVTQFNKLLGCYRVVYNQCLSRKINSYKESGVTENLTTLGHFIHHELLKDDNFSWLREQNTKVLKQAVHDMLSAYKNFFEKHSGFPKFKSKHDNKQTCRFEIGAISKRNVYTDYKLSLANIKNIKFRCNKKYAEYLEKHKNCIRQATLKRLPCGEYYLSILVDGDFMHQVKETDNKIGIDLGVKDFVITSEGEVFNNLHFKKSETKKIKKLQKQLSRKQKGSNNWNKARIKLAKVYKKIDDRKQYYLHSVSNSLIDENQVICMEDLNVKGMSKNHKLAESILEMNFGEFRRMLEYKTSWYNRKIVFVDRFYPSSKTCHNCGYVNKELTLNDREWICPHCGEVISRDYNAALNILDEGMRIIGCSTPEFKFVENPTMDGPIRNDSLKSSGSVKQEVNKARSSTLCKF

SEQ ID NO: 358 - protein, 333 aa, Acidobacteria sp.
MAREVNAVWNVCNQHQLEVFRREGRLLSGFDFAPFVRGASAEFELIGSSTIDEIRDQYAVKRRAAGKVRLRWRRSGGRRRSLGWVPFKRRATRWTGDAVRFAGIDFGVWDSYSLGGYDFRAGAFVEDARGRWYFCLQVEVEVCSGHAGAAVGVDLGLKAVAVTSDADRLEHGRWYRQAQEAVGRAARARKRGRVRALHAKVRNQRRDALHKWTRSTVDRCSEIVVGDVCPSAVGKTRLAKSVYDTGWTLLRTMLRYKSEHAGIRCVVVPERDSTRTCSCCGSVPASSPRGRAGLRIREWTCSECGARHDRDVNAARNILVAGHRHPAEGIPAL

SEQ ID NO: 359 - protein, 423 aa, unknown
  TnpB Polypeptide
MITRRVTLRLYPNRQQLDKLHYWRKMHCNLYNAAIANRKTQYQHYKHSVSYFEQQNSLPEFKKVWHEYVELGSHALQATLKRVDLAFNRFFRNLGGYPKFKASRRYAGWSYPDIAGWKAFSSGKNGYLELSNLGKIQMRGEARTWGKPTTCTIFWRNNNWYASITVNCIPKRVAVGTGVVGMDLGCEQAITLWDGEKSQVIENPRFFGKTLAKIKKTSRQLRRKTAPNFKKKVRASSRYKKVQNKVNKLRRKSTNQRKNWIHQVAAQITKSNSLVATEELNIKGMTARAKKGNRKRSKAGLNRSILDVGMSEFLKTLEYKLQEAEGFLIKAPTRKLKPSQTCPKCGHQHKKDLSERTHYCEKCHFQTGRDIAAAMVCLNYALGLGTSFNTRGVQTSTVTATGGWQQVWAAKRETRVKPSGRAE

SEQ ID NO: 360 - protein, 442 aa, unknown
  TnpB Polypeptide
MAVFGQMFVGAASLVKHPKHFVLLRTPKVPRQQAVKVVISVLKAHHTRTAKWKAKRDFHLAQNSRVKTTRDRRAPRFNPGFKPNTFSSDSLSVEKVSISAAGEVAFHLFRNHQSILQSKYMVQHQPKNPRKQLWKTKYPTRNLRVASAGDVDQIRALERDFKVHFKLGRWFLLLPVAVSVTERLPVFKAPQGHIGLRWTEDVQSLAGADDVVAIDPGVRKPFTCYSPQGRVDVLGVNVLKVASKSLWRIRRRRAQLKAAQQGFLEFREKHLRQKTHYMASEPTRAAREVYIRGWRQAKRREAQVVHRVHQRYRRAEQKQRNIVKNFHYNVSHYLLRRYKVIILPSTSSHYWRKGKRLTRSTKRLIQFLALGSFAARLVQTASFYPGRQILRGSEAYTSKQCGRCGTLADKLGGSEVFRCRKCGAQGDRDVHAARNIALRFLQ

SEQ ID NO: 361 - protein, 308 aa, unknown
  TnpB Polypeptide
LGKPKIPKYLKKDGRQVFSLKNIQCTLKDGLFRISFKPFKGYTVRTHAKGRLIQCRFVPKGLYYVMEIVYEIEVPDIPKNSDRIVAIDIGVNNFITMVNNISENPIAVKGGIIKSINQFYNKQKANIQSELKKVNDKDWSKKLQKLTNRRYEMIKYQMHCISKYVVDWCVLYGIDTFVVGHNNEWKQKKQGMQNFTYIPYELFIKILSYKCENNGIRFIENEESYTSGTSFLDNEDPIKENYRKERRVYNRKERRVYRGLFIADCGKKINADVNGAYQIMKKVFPKIFINGIEGAGLHPTIINLACVK

SEQ ID NO: 362 - protein, 396 aa, Mastigocoleus sp.
MKTSYQYKIKPTKEQKEKIDRTLEMLRYQYNYLLAQRFNWYEQNRCSIDRCSLVCHLPELKDQPNYYNQKASLTQLKKDRPWYKDIHSGVLQGMTKRVELAFDRWLGGDCNGKKSGRPRFKGAGQYKTFTYPQFKMHWFVDNKIQLSKIGEVKVIVHRPFPDGFIIKTVSVTKKADGYYVTLSLDDKTIPTMKPDFNPEKIAGIDVGLIDFLVASDSERIKAPKYLRKAERKLKSAQRRVSRRKKGSNRRKKAIKKLGRQHKKVADTRKDFHFKTAKTLLDKHDVIAVEKLNIKGLAKTRLAKSIHDAGWGQFIKILENKAANAGLLVIPVKPNGTSQECSSCGHKVKKSLSQRMHNCPVCHASLCRDLNAAINIKNRAVGHPVLKAQLMSSKTSR

SEQ ID NO: 363 - protein, 411 aa, unknown
  TnpB Polypeptide
MKASYLYMNTKIYRGAERTMNLNYRFRLYPSKAQEMEMLETLESCRWLYNHFLGELKKTKKVPPKYELQAQIPRLVKKYPSLKNVHSKTRQYVLWQLYSNLKGLRGLKQKGRKVGRLRFKKYGRMKTFVYNQSGFKLLDGKLHLSKIGDIPIKLHRKIKGNIKQVCIKREQSGRWFAIFSVEQKPEKLSTTGRAVGMDLNTQNYLTDSEGGRVEHPHELLKLEERVKIQQRKLSRKKKGSKNWIKQASRLARVHERISDRRRDFLHKLSRYYIENYDLIAVEDLAVKEMIESSYNAKNKADSAWSTFIQMLFYKAEGAGRTLVKVDPKNTSQICSRCGAYVYKPVWIREHRCPTCGLVMDRDHNAAKNILNKALQEVGSGRPELTPVEMRPLLHSMGGASLVEEAGSPHHL

SEQ ID NO: 364 - protein, 342 aa, unknown
  TnpB Polypeptide
MALTNLAYRDYEVWTPDLPKRVQHQLYGFKDFKKSLVFGTEPKRWFARAWVPLKMQRVYNDGAKRGATDALVVLDFRNNIIKIRQVCRSEPGYSIELPMPRWVVERVGEGGDVRFAMIGLRDNEPYLALVAEREVEPYQSSGYILAIDVNSWRYGIAWGLIRSGRIVSFKQDGLNPQRIVSLYNQAIKREKKLGILKRLGLDDAINAKRAGRMARRLRSRAYRLINEEAMFMAGKLVRKALRYGAFVVIDDVDWEGLRELLTRKYGGRVGKLLLSGLKRFVKLLVTQLEWYGAPYEFRRLYSRKCPRCGHKLTQQRGRVMVCENCGFKAPRDKVPIHWAMKL

SEQ ID NO: 365 - protein, 272 aa, Okeania sp.
MHSQVLQDVIQRVQTTMDNFTKPDHKGKTSGRPKFKGRHYYNSFSYPQLSNANIVKNANGRFCINLPKIGLVPFVYNRSIPIGFKVKTGTVIRAADGWYISLTIEDQAVPLRRAEIQPTEDNSKGIDLGLLYYAVTSDGEFIEVPKFFRCSEHRLSKLQARLAKKHKHSKSWKILKGKISRLHQLIARQRLDWQFKLAYHLFSDCQVIFLEDLQIANLIRRCKAKLGDNGQFLPNGQSAKSGLNKSLQDAAFGQFVQVLEYVAWKLGKKLSK

SEQ ID NO: 366 - protein, 244 aa, Okeania sp.
MRTAYQYKLRPNKDQIATILLWLDLLRRQYNYRLGERFSWWEENRCPVNASPFIIPIPQLRDNPDYYSQKKDLVNTKDKFPEYRLIHSQVLQDCIKRVKLAFDRWFKIDKNGQKLGKPRFKGKGRYHSFTYAQIKQDCIEINRINLPKIGKVKLIQHRPLPEGFNIKTVTISRKADGYYVTLSLEDKSVPNFNSDVEPTSENTLGIDMGLKDFLVTSEGESVPIPQYYRSSRGSVKDSTKTFIP

SEQ ID NO: 367 - protein, 166 aa, Okeania sp.
MRKLPSEPSSVTVIKDSANRYFLSFVVEIKPETLPKTDNSVGIDLGIKTFATFSNGTKIDAPKPLKKRIKKYRKLSKSLSNKTKGSKRYEKARVRVAKFHAKLKDTRTDFLHKLSTEIICENQTIVLEDLNVSGMVKNRKLSRAISDLGWRQFRTFVRRKSRKVWS

SEQ ID NO: 368 - protein, 236 aa, Okeania sp.
MRQVMKARFKYRIYPTPGQKYRLAKLFGCVRVVWNDSLAYSQQRYKSEEKKSTNSELQKLFITQAKKTKCREWLSEVSNIPLQQSLNDLNRRGERPFAPTNFFKSTQGQRKGKPVKPPKFKSRKSKQTARFTKGGFKVGQHKVYLAKIGKLKIVWSRELPTATSSVTVIKDSAHRYFLSFVVEIQPEILPKTDNSVGIDLGIKTFATFSDGTKIDAPKPLKKRIKKLRKVKFVIIS

SEQ ID NO: 369 - protein, 379 aa, Bacillus sp.
MAKHNKAYKFRLYPTDEQAFLMRKTFGCVRFVYNIMLAERKETYEKFKDDQEQLKKKKFPTPAKYKAEFEWLKEVDSLALANAQLNLQTAYKNFFSGHNDFPTFKNKKGRNSYTTNLVNGNILLFARHIKLPKLKMVRIRQHRKIPPDHIIKSCTISMTTTGKYYVSILTEYEKEIVQKEVKNVIGLDFAMAELYVSSENERANYSRYYRVMSEKLAKAQCILSKRKKGSARWNKQRLVVAQLHEKVANQRKDFLHHKSKELASNFDAVVIEDLNMKGMSQALHFGKSVHDNGWGMFTTFLAYKLKEQGKQLVKIDKWFPSTKKCSCCGSEKLMKLSERTYHCSCGYTIDRDYNSALNIKNEGICLLLAQKQKLLEQEG

SEQ ID NO: 370 - protein, 401 aa, unknown
  TnpB Polypeptide
VRTRKAYRFRIYPSEEQRRILERTLQTCRILYNNLLAERRDNYKKTGRAPSYYEQKRGLTKRRNANPYLPQVHSQVLQDVALRLEGAFERFFKRDKSGRKAGYPRFKGRNRYDSFTYPQYGNGAMLKDGRLKLSKIGAVRIFQHRPIPPNSTVKTCTIRRDVDKWYACFTVEIDDTTTKPRGRQSLRVGVDVGLNLLVALSDGEKVQPPKFLRKMERKLKREQRRLSRKKKHSKNWTRQTIKVAKAHRKVRVQRGDFNHKLSRMLVNRFGMIVFEKLRIQNMVKNHRLAKSIADAGWGQLQAFTSYKAAEAGAIVKFVDPSNTTADCSRCGFHVPKTLSERIHKCPNCGFMLDRDWNAAVNILNRVGWGTAELTPGEIQPLLRPCVVAEQVGSRNQEAHDF

SEQ ID NO: 371 - protein, 500 aa, Calothrix sp.
MSTITYVKGLPTPEIEMNSLGNTSFEMFLTDFSSIFRQATIRAVEIIKKSKKFDKIKSKVNTELQKEFNLSKRQVNGVIALASSKVDSAIECRKNHIKQLEGKLKSALIWIKNAEKRLSDSQKFYALENWQKSKTGCKVPLCCDLNQGRSNWHGLKFQIHNKKRYVSVLEKKIAHLKKAPIQVKVSNSEIFIVGSSDESFGNQVCQYDGSKLSFRVPYCLEAKYGKHIETFIGSFDRNINRLPDNGAKTWHFYRKNNRWVVGVQFTPKTVEKVSKPIEYGAIGIDINSTSIGWAYVDYQGNLLATVTIPLISGLSKNFNTQQLVDACLELATLAAKYACPVVCEELDFSKKKEQIREKGRKYARMLSSFAYSKLYQLLESILSNRGISLYKKNPAYTSIIGLVKYSRMYGLSSDIAAALIIARRGMNLSERLPASVSAYLGVNPRKHVWSGWSKLNKLTLTAAIVKSRHDYFSIPNWGMVVKDTTEQVALIRERRVVSKS

SEQ ID NO: 372 - protein, 301 aa, Escherichia sp.
MKQQVSFKFRLKPDGQQERQMRRFAGACRFVFNRALALQNENHEAGKKYIPYTKMASWLVEWKKDTETEWLKDSPSQPLQQSLKDLERAYKNFFQNRAAFPRFKKRGQNDAFRYPQGVKLDQENSRIFLPKLGWMRYRNSRQVTGIVKNVTVSQSCGKWYISIQTEREVSTPVHPSASMVGLDAGVAKLATLSDGTVFEPVNSFQKNQKKLARLQRQLSRKVKFSNNWQKQKRKIQRLHSRIANIRRDYLHKVTTTVSKNHAMIVIEDLKVKYMSKSAAGTISQPPEHSAVLLLAGAESWI

SEQ ID NO: 373 - protein, 456 aa, unknown
  TnpB Polypeptide
VTLSSYRFALDPTPTQVRDLRSHCGAARVAYNWGLAHVKAAAGQRGAETTYGVPIEALTPAVSWSLYSLRKEWNAAKGEVAPWWGECSKEAFNTGLDGLARALKNWGDSRSGKRKGAPVGFPRFKSKHRSRLSVRFTTGAIRCETKHAVLPRLGRVKLHEDACGLVDKVDAGTARVISAAVRFERGQWFVSFTVDMDRRTRTSAIAGSVVGVDLGIKTLAVLSTGEQVPNPRHSGGGARKVRRLSRTVSRRVGPYDSATKTRQHPSNRWRAATAALAEAQGRVADQRRDSTHKLTTMLARTFETVVVEDLFVAGMAGNHSLARHVADASFGQIHRQLEYKTAWNGGRVVVVDRWFPSSKTCSGCGAVKAKLALSERSYVCMACGMVLDRDLNAAKNLAAMGEAMVAGSGPETLNGRGGQGVLALPVKRQPGTAQTGNTGTVQPQGRTAVRELTNAH

SEQ ID NO: 374 - protein, 456 aa, unknown; identical to SEQ ID NO: 373
  TnpB Polypeptide

SEQ ID NO: 375 - protein, 283 aa, Moorea sp.
NDSYDQAKAPRLGSYCDLRSGGEACPLTCSVSKNYSVGYPWKNSQKNPRRNAYEAQSSSLPTLKKQRPWYKAIHSTVLQQTLRQLDVAFSKFFKGETGYPKPKRRSRFRSFKYAPGQVKLNGDRIYLPGIGWMVFYNSRPIPEGFTLKSVTVRRKARGWFVSIQIEDKSVPTTPVKDKSEIKPQRVKGCDLGINKLISLSNGRTIANPAKQKSFKCRERRLKLRQKAASRKRKGSKNRGKSYARVASLHERITNKRSAYHWNVANQLVDGTDALVFEDLNMCG

SEQ ID NO: 376 - protein, 286 aa, Moorea sp.
MIVLEFKVKGNKTQYAAIDEAIRTGQFVRNKCIRYWMDNKGIGQKDLYRYNTWLRSEYPFVTDLNSHACQASVERAYSSISRFYDKCKKQVPGKKGYPKFKKFSRSVEYKTSGWKLSADTKSLKFLDKKGIGLLLLKGTWELWRYDQNLIKRVRLVRRADGYYVQFCVKVEIKESLDPSHTNVGLDVGLKEFYTDSKGNTEPNPRFYRKGEKRLKFYQRRVSRKKKGSANRKKAIDRLGRQHLRISRQREEHAKRLVRSYRKKSAAFIVGRLCIKGGRFCCKAALF

SEQ ID NO: 377 - protein, 558 aa, Oscillatoria sp.
MLKVVKVRLYPNREQKQLLEQSFGNCRFLWNYCLDLMNKTYKETGKGLSGYEVKKQIPSLKKEYEWLKLTYSQCLQQVCLNLGVAFKNFFERRAGYPSFKSKHGKQSIHYPQNVKVLDGSLKLPSIGEVKAIIHRPISGKVKTVTVSKNRCDQYFASVLFEEGKGKPESSAEGKAVGIDLGLTHFAITSDGSKFDNPRWLNKHKQNLKCKQQQLSRKPQGSNNRNKARKKVARVHNKISRCREDFHHKLSLSIVNENQVIVVENLAVKNMVKNHCLAKAISQVGWGQFCTMLKYKAEQEGKIYQEVDRFFPSSKTCHVCLNQVGSLPLDIRHWTCTNCGSKHDRDVNAAINIRDRHRLRILTSGTGDKAYRQTVRRSNRGRKKSTTTLVCWVGSPRCNLRFSAGEFTPKYYVDNGTASMGTVSERVGITPMSIPCQIVVEGNPAIIYASRNGAPDKVRRILKPFLGKFCQEREAAGEYHDTPECLVAQIVVRFGFEICEDDFSNLKVSMTYDPNAEYIYSVESDLTVQVWIPEEEYRKNPAVGLKGCRLLPEEGWKID

SEQ ID NO: 378 - protein, 419 aa, unknown
  TnpB Polypeptide
MLRAIKIRLYPNKEQATMFNKLLGCYRVVYNQCLSRKIESYKNDGKSENLSTLGQFVHHELLKNDNFIWLREQNTKVLKQAVKDMLTAYKNFFEQHTGYPKFKSKHDNKQSCRFELGAISKRNDYTTYHLSLANIKNVKFKCSKKYARYLQKHHGNIRQATLTRLPCGEYHLSILVDGDLTRKVKETNTAVGIDLGVKDFVITSDGEVFDNLHFKKTETKKIKRLQRQLSKKQKGSNNRKKARIKLAKLYKKINDRKQYYLHAVSNSLIDENQVICMEDLNVKGMVKNHNLAESICEMNFGEFRRMLEYKTNWYNRKIVFVDRFYPSSKTCHNCGYVNKNLTLKDRQWICPQCGEIIERDYNAALNILDEGLRIIGSSTTEFTLVDYPTVDDPIRNDLLKSSDRLKQEVNKEHTSLFKF

SEQ ID NO: 379 - protein, 214 aa, Archaeon sp.
VSCYGFKTRNGGLEIPIARGKRLSIPLTKHTLNVISQLGVKVRSFTLTKNRLSLCIALDVAKLECTSTVGVDRNLRNLTVGNEQGTSHYDLSKAVRIASTTIRIVASFKRDDSRIRTGIASKYGMRRTSRTGHLLHATTKTIVAAAVQRREAIVLEDIRGIRALYRKGNGQGRKDRGRMNAWSFSEAQRQLEYKAKWTGLQSSVYLDVRPEAPA

SEQ ID NO: 380 - protein, 431 aa, Firmicutes sp.
MRRTNVVRVLPGKQQRQVLETIGDRCAVLWNAVQYRCRQAFCEGEPVPSYAALCSEFKEHPAYRALPAHIGQEVIKKARKAWDSFFACLRLYRKGKLEEPPRIPRYWKDRRMGRRTFRVIPVKAPTSYALNFRTLSLTLPRDLRKEHGGRLVLRTKGVLRFSGTPKTLELRYDPVRRRWYAHQVVEVPEPVRKARLEKYAAADLGARVLAALAIEGLDRQLLFSAREVWKDFLYWTRRIAEEQSRLNRAGRRTSRRLRSLYQTRACRLKHAFVALAAEIARCLKRHRVTVLFLEDLTGIREDMDFGPKNLLVHNFWTFRMLRNLIEAACVRAGIRVIPVKPRGTSSRCAVCGSPVNRPVRRKVVCEKCSCVWHADANAALNILLQGSSKGHGVKAAPRKPLPYRWNHHRWVSRFESAAGTPKATSGSRMAA

SEQ ID NO: 381 - protein, 362 aa, Caryophanon sp.
MLKAYKYRMYPNNEQKVFFAKTFGCVRFIYNRMLADRIQNYKEHQENPNVKLIRPTPAQYKSEFEWLREVDSLALANAQQDLQAAYRNFFREPSIGFPKFKSRHMNRCSYKTNNQKGPVSIENGYLKLPKLKSLVRIKLHRQFSGLIKSVTISKTPTNKYYASILVEENEQLFPKLETRVGIDVGLKEFAILSNGKRYDNPKWFRRAEKRLRFLQKALSRKIRGSANYQKARLKVAKLHERIANMRNDFLHKLSHNITNENQVIVMEDLRVKNMLKNRKLAKAISEMSWAQFRTYIEYKAAWKGRDVIIAPSNYASSQLCSTCGYKNSEVKNVSLREWTCPSCHATWDRDMNAARNLVKLAN

SEQ ID NO: 382 - protein, 292 aa, unknown
  TnpB Polypeptide
MKLIVFKYRFYQNNKQSLMLAQTFGCVRFTYNSALGLSKEQYDLGNKTNYNNWSKNLTLLKNNINFSWLMDVSSVPLQQALKHLYKGSKSFFKSGFGYPTFKNKHNHQSASYRSNGFKWDKNKQALTLSKMKQPLKIKWSRSFTGTPISLTVSKTKSGKYFVSILVKESINQLPVVNKTVGVDVGIKDLAICSDGIKFNNPRTTNKYAKKLAKASRQLAKKKKGSNNFNKQKFVVAKIHEKIANSRKDLTHKMTSKLINENQVIGIESLKVKNMVKTVSYLNTYTMLILVKL

SEQ ID NO: 383 - protein, 410 aa, Gloeocapsopsis sp.
MVQRAYRYRVTPTPEQETLLRRTLGCVRLVFNKALVARREAWEERQESINYGQTSALLTTWKQQEGLEFLNEVSCVPLQQTLRHLQTAFGNFFAKRAKYPRFKKKRSGGSAEFTRSAFRWKDGQVWLAKCIQPLNIIWSRMLPDGCTPTTITVRLDAAGRWFVSLLVEDSTIQPLPVANKQIGLDAGITSLITTSNGEKVANPKHFERLGHKLRRVQKALSRCQKGSSNREKARGKVAKVQSQITNARKDFLHQLTTQLVRENQTIAVEDLAVRNMVKNRKLARSISDAAWGELVRQLEYKCQWYGRMLVKIDRWFPSSKRCGNCGQVVDKLPLSIREWTCPHCGMHHDRDVNAAQNILAAGLAVVDGNVDEVCGANIRPDRHKYIRQLRRPEGACISKTRKGKKQKLKS

SEQ ID NO: 384 - protein, 466 aa, unknown
  TnpB Polypeptide
MKYIYGYVSGCALIKGHRVFSVLRSYSLKHKCGEELFPLLKAYRDAVNSVLEELWDNIEWEKEKVKGKKQYRLLPKYKVDIHSKEYRRELRESLLEDWDYAAHWVDSAIKTAYSIFKSWRKNYVKGERKRRRPTARRLFARAKQTLIKLEGEKLRLTVKPGEYVYLDLSARYFPLPKEVSSAGLGEPIITPEKIHLPVHYGDDAQSGKPAVAWDFNLLSLDGYSPETGWVRIDTKKLASVHISSFEKRRSVQRKASKSKKARKVLSKYSNRERNRARKHQLEIARVIQSMCGSVGLEELEKQGMYTRSRIWNRRISRSDWRSISRIIIGKMGEAGVKELDPYGSSSYCSRCGWENKDLNGAVFECGGCALRINRQLNAAINLYMRMRFGYTEKWVGGRKRVELRMEGASQREWWDRVVLPSLLGGCVLTGAERSGTDEPVRFLNDALKPKLYAYDRYNDMYLRIPT

SEQ ID NO: 385 - protein, 150 aa, unknown
  TnpB Polypeptide
VGVDLGITRLATLSDGRSLENPKPLKRSLEKISIIHKTLSRKKFLSKNWLKTKRRLAKEYEHLKDFRRDLFFKLGVLLAGEYDVLVLEDLDTQGLIGKGVTGARRLRLYDAAFSELRGCLKWEFVKQGKTVLAVSAYNTSRECFLCGGIN

SEQ ID NO: 386 - protein, 194 aa, unknown
  TnpB Polypeptide
MLPSNLQSKARKKVARLHAKIMDCRRDFTHKLTTQLINDNQVISCESLSVKNMVKNRKLAKAISDANWGELIRQLTYKAEWYGRTVIQIDKWYQSSKRCNCCGHVVDSLPLNIRHWDCPSCKTRLDRDINASLNIKAVGQTVLDFHENQFDIQHVKSILQKCHPQKALDSIYNTRHTTQSLAIFNRHSLLSSEG

SEQ ID NO: 387 - protein, 352 aa, Streptomyces sp.
MQLRYSYRAYPDAPQRTALARAFGCARVVWNDCLRDRREAHAAGLPYVKSADLSKSKKDTRQSIRLNTNAFSVQDDGTVYVAKIGDIKVKWSRPLPAAPTSLTIIKDCSGRYFMSFVVDTSPDILPELDTEVGIDLGLSTFAVLFDGTRIHSPKFLRRAEKKLKRLQRELSRKAKGSKNRTKARIKVARQHARVADRRRDWHHKASTQIIRDNQAVYVEDLAVSGLARTRLGKSVHDAGWSAFVGMLVYKAIKHGRHFGKIGRFEPTSQVCSVCGVKDGPKPLHVREWTCKECGTVHDRDDNAAQNTLAAGRADRLNASQSAGKTRTKVLAQRGEAGTHRDGHTTVAGIPGR

SEQ ID NO: 388 - protein, 356 aa, Halorubrum sp.
LYSQSSQRVLQELAEAFNDWYGKRRNGDTRANPPGYRKHGDEHPRSTVTFKAAGFKLDTQYNRVRLSKGSNLKEYWSDFVLCTYQTRPDVDLSAVENVQQAKIVWTGDDWELHFVCKVEIDVDEAPGEKTVGVDLGINNFAALAYEDGHSELYPLNCLKQDDYYFSKRIALCDDSNSDQATGLNQKKSARRTHYFHTLSKRIAQRCVDEEVGTIVVGDLSGIREDEENAESKDWGIHGNLDLHSWAFDRFTDLLEYKAEMEGITVEQVSERDTSKSCSCRGRKRDATRVERGLYVCDECETVANADVNGAENIRQKVSPSPATDGGDRSNGWLAQPSTFLFDKETGAFVPQEQVTS

SEQ ID NO: 389 - protein, 424 aa, Thermoplasmata sp.
MTKAERIKIAILQTKEKRRQQIARVYQLKLQNLSKNDKEKLNRLFLEAKWLYNYIITNVEDHLDDNAWKLREVEIKTPKGIEKREIKTLSSQMRQSIVDRIKQNLLALKKAKQKGIKVGKLNFVSNVKSIPLKQFNITYKIDREKNRVKLQRIKKKFRILGLTQIPEDADFSNAMLIKKPSGFYIFVTCYIPKEKATKEIKDKQTTQPLGVDLGIKHQLTLSTGQKFSWYIPETKRLKKLQKTLSRKQKNSVNYLRIKAKIEKEWERICNRRKDILNKTVAYLKHFSFIAVQNDSVKSWHSGWYGKQVQNTGVGGITARLKRLATLMPVVFIDRFEPTTQICSSCRHRQKLSLSERMFRCPKCGLIMDRDVNAAKNILKKALADCFKSALPVDCGEVTPVERKTSASRFMGCKPGLCEAGSPSL

SEQ ID NO: 390 - protein, 390 aa, Oscillatoriales sp.
MEKAYRYRFYPTTEQENILRRTMGCTRLVYNKALAARTEAWYERQERVGYKETSSMLTNWKQEEELDFLNEVSCVPLQQGLRHLQTAFTNFFGGRAKYPNFKKKHSGGSAEFTRSAFRWKNGQLFLAKCNDPLPIRWSQQIPEGCIPSTVTVKLTPAGRWYVSILVNDYTIKPLPKTDKTIGLDVGIASLITTSNGDKIANPKQFKKLRKKLKRKQKALAKKQKGSNNRYKAQLEVARVHSQIVDIRKDFLHKLTTQIIRENQTIVVEDLAIKNMVKNHKLALAISDASWGELIRQLSYKCEWYGREFVKIDRWFPSSKRCGNCGHIVEKLPLNVREWECPKCGINHDRDINAAKNILAAGLAVAVCGATVRPEQSKSVRAGAMKQKPDR

SEQ ID NO: 391 - protein, 393 aa, Kribbella sp.
MSRSRLAPTPEQEAALLGHCKHARYVWNLALEQWSMWSAGRRSGPPRFVEQARQLTEARAASEWLRGGSQTVQQQALRDFDQAVSNFFAGTHRRPTWRKAGIHEGFRIVGAQARRVEKLNRRWARVLVPKVGWVKFRLSRPLADAKSYRVTRDRSGRWHIAFAVVPDPIPGPGTGELVGVDRGVTVSAALSTGEKLRTPTLTTGEKRRLLKLQQRLARSQKGSNRHAKTRAAIARLKAREADRRKDWVEQTSTRLARQFDVIRVEDLRIVQLTRAAKGTVDNPGKRVRQKAGLNRGILASGWGKLVQRLEHKAAGRVEKIPAAYTSQTCSRCGTRDARARESQAAFRCRSCGYTANADVNAAVNIAAGRAVTARGATAVPVAEKREPQLSASA

SEQ ID NO: 392 - protein, 445 aa, Kribbella sp.
MLRAYKYALNPTPRQARFLDGHCGAARKAFNWGLARVKAVMDQRSAEASYGIPDQLLTPAISWSMYSLRKAWNRAKSDVAPWWAEYSKEAYASGLTQLATALKNWADSRKARRGGRSVGFPRFKSKRTAVRSCRLTTGVIRCDERYAVLPRIGRMRLHETPAPELLDGTARILAATIRFERGRWFVSFTVEQDTPVRAPDRPDAVVGVDLGIKSLAVMAEPDGEPHTVPNLKHLDTSLRKLGKLSRRVSRRVGPDRRTGRVPSNRWKRANGQRNRVHHRVAYQRADALHKFTSAIAAEYGTVVVEDLNVAGMLKNKRLARRVGDAGFGEIRRQLAYKTEWNGGRLVVADRWFPSSKTCSGCGVVKAKLLLSERLYVCESCGLVMDRDENAARNLAALAVAASGAETLNGRGADQKTRATGQVAVKRLPGSPQHQTGTALPKAGSV

SEQ ID NO: 393 - protein, 446 aa, Kribbella sp.
VTLRAYKYALNPTPRQARYMDGHCGAARRAYNWGLGRVKAVMDQRAAEVTYGVPAAMMTPPISWTMYSLRRDWNLAKNEVAPWWAEYSKEAYASGLTQLAAALKNWGKSRNGTRHGRAMGFPRFKSKRKTVKSCRFTTGALGCEERYAVLPRIGRVRLHETPASELRDGTARILAASIRFERGRWFVAFTVEQHTPAQAPRRPDAAVGADLGVKNLAVLAEPEGEPLTVPNPKHLGASLRKLGRLSRRVSRRLGPDRRTGQGPSKRWTRANAQRNRVHHTAAYQRVDALHKLTTDIAREYGTVVMEDLNVAGMLKNRRLARRIGDAGFGEIRRQLAYKSDWNGGRLMVADRWFPSSKTCSSCGVVKAKLLLSERVYTCESCGLKMDRDENAARNLAALAVAVSGTETLNGRGADQKTRPTGQVVMKRLPGSLVCETGTASPEAVGA

SEQ ID NO: 394 - protein, 401 aa, Kribbella sp.
MDSMSRFRLYPTAAQQAALLQHCEHARYVWNLALEQWSMWTRDKGPTPGYVEQARQLTEARAAFGWLRAGSQTVQQQALRDFNQAVKNFYARTHRRPTWRKAGLHEGFRIVGSQASRIAKLNRKWAGVNVPKVGWIRFRLSRAVPDAKSYRITRDRAGRWHIAFAVIPPPLPAPGTGEVVGVDRGVTVSAALSTGELLTCPVLSEAEQVRLKHLQRRLDRCRRGSRRRQRVKTNIAKLHARAGDRRRDWVEKTSTDLARRFDVIRVEALRITQMTRRPGPKPDPERPGAYMANGRHAKGGLNRGILSNGWGGLVRRLEHKALGRVEKVNPAYTSQTCSGCGHRTPENRESQAVFRCAACGHRDNADVNAAINIAAGRAVSARRETPVRVSLKREPQLTTST

SEQ ID NO: 395 - protein, 332 aa, Kribbella sp.
VWNLGLEQRLMWRPARPATPGYVAQCAQLTEARAAEPWLKAGSQTVQQQALRDLDQAWRNFYAGTHGRPTWRCEGVHEGFRVVGMQAQRVEKLNRKWGRVLVPKVGWVKFRLSRKLPEAKSYRVTRDRAGRWHIAFAVIAEPIRAPGNGVVVGVDRGVTVSAALSTGEMLSCPGLSRSEQRRVKRLQRKLARAKRGSNRRGKIRAAIARFKARESDRRKNWVEQTTTNLARLFDVIGVEDLRIRGMTKSARGTRAAPGAMCGRRPSSTEESSPRVGACSFSVCITRRRAGSRRSILRTRRRPAAPVGTSQRRTARAKRCSGASPVGTRPTPT

SEQ ID NO: 396 - protein, 396 aa, Kribbella sp.
MCVMARFRLAPTPEQEAALLGHCKSARYVWNLALEQWSMWSVGRRSYPPRYVQQARQLTEARAAGEWLRSGSQTVQQQALRDFDQAVTNFFAGTHRRPTWRKAGMHEGFRIVGPQAGRVEKLNRKWARVLVPKVGWVKFRLSGPLPDAKSYRVSRDRAGRWHIAFAVVPEPIPGPGTGEVVGVDRGVTVSAALSTGEKLRVPTLTSGEKRRLRKLQQRLSRARSGSNRRSRTKAAIARLKAREADRRKDWVEQISTRLAREFDVIRVEDLRIVQMTRSAKGTVDNPGKRVRQKAGLNRGILANGWGRLVQRLEHKAAGRVEKIPAAYTSQTCSRCGTRDREARESQAVFRCRSCGYTANADVNAAVNIAAGRAVNARGATAVPVAEKREPQPPTSA

SEQ ID NO: 397 - protein, 389 aa, Kribbella sp.
MPDDSALLDKHPLVLRAYKYALNPTPRQARLLDGHCGAARKAFNWGLGWVKAVMDQRSAEATYGIPDELLTPAISWSMYSLRKAWNRAKSDVAPWWAEYSKEAYASGLTQLATALKNWADSRKGKRAGRVVGFPRFKSKRTAVRSCRFTTGAIRCDERYAVLPRIGRVRLHETPAPELLDGTARILAATIRFERGRWFVSLTVEQDTPARTPRRPDAVVGVDLGIKSLAVLAEPNGEPHTVPNPKHHDASLRKLGKLARRASRRRGPDRRTGRLPSNRWKRANAQRNRVHHRVAYQRADALHKFTSAIAAEYGTVVVEDLNVAGMLRNRRLARRVGDAGFGEIRRQLAYKTEWNGGRLVVADRWFPSSKTCSGWSRESQAALVRTRLPL

SEQ ID NO: 398 - protein, 509 aa, Nocardiopsis sp.
VNPVNTAIEPHTGPQTGPEREEKQKKRVKRGFEPRPGHVVQAFVFALDPGARTEQRLRSHCGAARAAYNWAISHVLASWEQRKAETSYGIAEDDLTPWRSWSLPSLRKAFNATKHTDPRFAGWWADNSKEAYNTGLAHAAAAFDAYTQSKRGERQGPRMGQPRRKSKHRSRLACRFTTGAIRVEEDRRHVVLPVVGRIRTHENTRKLHRRLANGTARILSATVSHRRGRWQVSFQVEIARTTRTPSRPQTVAGVDLGIKSLAVVADSEGGVRHVANPRHLNGELKHLRQASRRVSRRRGPDRRTGQAPSRRWVKANTERNRVHHRVANLREDAIHQLTTSLAREYGTVVVEDLNVAGIVKNRRLARHIADAGFGRIRRQLGYKTTWSGGRMIVADRWFASSKTCSGCGAVKAKLGLHVRVFDCDACPLVLDRDVNAARNLAKLAQSMSMTGTGVAGDRGAQAPKPRGADRRTRTTRPGHKAGAGRAGGATPRKRKEAGDRRWGTQSRLW

SEQ ID NO: 399 - protein, 365 aa, Hespellia sp.
MRKGIKFRIYPNREQQNIMNQTLGCCRLIYNKGLAMRNEAYQNGNKIGYSQTSAMLTALKKHDDFSFLKTVDSIALQQSLRDLDRGFVNFFQKRARHPQFKSKHNRHQSYRTINQGDNIRIASKYIKLPKLGYVKVRQSMEVGKINNVTIEHTPTGKYFAVLNVEFEPQPMIRQGGTIGIDVGIKEFYSDSNGNHVPNPKYLEKSMRKLIREQRKLSCKQKGSKNCNKQRIKVALVHEKITNQRKDFLQKQSTMLIRENQTICIEDLKVKNMMRNHKLAQHISSASWSKFFDMLSYKSVWYGNNIVKVPTMYPSSQTCSCCGFKNPLIKNLAIRNWECPECQTKHDRDTNASINILNKGLQMQSA

SEQ ID NO: 400 - protein, 369 aa, unknown
  TnpB Polypeptide
MRKSFKYRIYLTKGQRHILEQQLEECRWLYNELLATRKRTYEESALSLRLYDLQNMIPGLKVDRPSLTRVHSLVLQNVNIRVDLAFQAFFRRVKQGAEEVGFPRFKGFGRYDSITYSQYGNGVRLEGERLILSKVGATHVVLHRPLEGTPKTVTLTRSRTGKWFACFSCETEAAPLPPTGLVVGVDVGLESFATLSDGQKIDNPRFYRRDEADLKRVQRRKDAAKQAQNWPENAKQKGILARIHERIANRRSDFAHKASRALVTTYQLIVLEDLAPMEMGRSRGMRKSILDVAWTQFIRMTVAKAAEAGRRVILVNPRNTSKLCSSCGEIVPKTLRVRVHICPHCGLVMDRDENAALNILQRGLLSLSP

SEQ ID NO: 401 - protein, 439 aa, Synechocystis sp.
VVKRRKNSYYKMQCHFVGYNKAMLNLAWEFKLEPTAEQVSEIEHTLDVCRNVWNFALRERKDWLNSKKCPVNACSIRHEFILPVDAPFPVYALQCKALTSAKDKFPRLKTVNAQVLQQVLRKLENAWESWRLKRSGLPRFKKQRRMRSFVFPQMLKNCITPDGIKLPQLGLVKVRWSREIPQIFEVKQARIVRKASGYFVVLSLQADVSVPDTIPHGHPMGIDVGLEYFLSTSDGEQVKRPRFFSELHRKLKLLQRRLKTKQKGSSNWLRLQKKIARVHQRIADTRKDWHFKLAHHLCNNAGMIFVEDLDFRIMAKGMLGKHTLDAGLGQFTNQILPWVCWKRDVYYGKVDARGTSQECPDCGAEVRKDLSTRIHHCLNCGSIKPRDIAAGQVICTRGQRVIENACGVDAAGAGNTQSSWLALKQEIFGATQGISLHTR

SEQ ID NO: 402 - protein, 405 aa, unknown
  TnpB Polypeptide
MQRLQAYKYELQPNGEQQRDMRRFSGSCRFVFNKALAMQKALYEQGEKKLGYAGLCKSLTTWRSAAETLWLADAPVHPLQQTLKDLERAYTNFFAKRADFPRFKKKGMGDSFRYPDAKQFKVDQANSRVFLPKLGWIRYRNSRDMQGTAKNVTVSSTSGKWFVSIQTEREVEQPLPVATSAIGIDVGIARFATMSDESFITPLNSFKKHQQRLARYQRRMSRKVKFSNNWKKAKAKVQQIHAGIANARKDFLHKTTTTISQNHALVCIEDLQVRNMSKSSKGNSEKHGKMVKQKSGLNRSILDQGWGEFRRQLAYKVVWHGGILLAVPPHHTSQTCPACGHVSKDNRQTQAKFLCVDCGYENHADVVGAINVLERGYRLLACGESAQSGRSAKREPTEATQVVFV

SEQ ID NO: 403 - protein, 409 aa, Nocardia sp.
MNPARNSVADVQLRYTFRVCPTPGQRQALSRAFGCARVVFNDALRTRQSARAAGAPYVSDGDLSKALTVAKKTPERAWLGEVSAVVLQQALADLNTAYRNFFASLSGKRKGRKVSPPRYRSRKDSRQSIRFTANARFAVTGGGKLRLPKIGDIAVRWSRELPSAPSSVTIIRDAAGRYFASFVVQTDDQPLPEVDTEVGIDLGLTTFAVLSDGTTIASPRFFRRAERRLRKAQKALSRKQKGSRNRDKARVKMAKAHAVVRDTRLDWAHKHSTAIIRDNQAVYVEDLCIQGLERTRLAKSINDAGWGLFTRLLAEKAARYGRYFGKVDRWFPSSRLCSMCGVIDGPKPLSVRTWTCRCGAIHDRDRNAADNILAAGQAERRNACGVRVRPEPVPALRAEAGTHRQAVTV

SEQ ID NO: 404 - protein, 441 aa, Halomonas sp.
MVVNRIERIVIRPGHVNHGACRRLCVAARKVANATLYQMRQALFAEAPISASQADKILKREHKDIYSLLPSAGSQRITQVVGDSWKSWIKAKADYARHPEKYKARPRLPGYTQGARTYVVNRNGYKIVGGMIHLSGAKAFGFQPVKTTVCQHQAFNAKASEAVVTDLRIVPLGTSFCIEIGYTKEIKNTPLLDMNRVFSLDIGIDNLVAITSNQPDYRPVLIKGKVIKSINAKYNKDKEALAKKGKKRHIRSKVGKRHARIHDYFHKVSHWIVSECVRTRTGKLVIGKNPGWKQAVNIGRVNNQKFTAIPHAKLIDMIQYKAEAQGITVVLMNEAYTSKASALDLDPIPDYDEARQQKPTFSGRRVKRGLYRTASRQRINADVNGSANILRKEIGNEWISDHLRAGKGVVDTPIAITHIDARLSLEACHRASETTSNGAAA

SEQ ID NO: 405 - protein, 475 aa, Thauera sp.
MQSGFRFRLYPTPEQASRLLRWIGCQRFIYNAKVSEDRYFRTFARKSLQHVGQFAPQDQQYSHFITEATPWLREVPSQVLRNGAVRWKQAYSRYWKKLGGRPTLQKRHGAQAVWLTSELFRFEQVVDSETSAVGYRLQVGTRKCPVGALRYAAHRAHTHPASITLSVDAGRWYLSFTNDDGVPEPSDSETADWLSSFAEDELRARTVGVDRGVAIPFACSNGARFDLTPVQQDRIAKKQAAARRWQRKLSRRAKGGANRRKAAYRIACLRRYEKDVRRDFAHQTSHALVADPKALLIVFEALGVQRMTRRPKAKQSESGRWEKNGARAKAGLNRSILGAAWSTTKTCTEYKARRAGKLVVEVAPHHTSQACARCGHTHPDNRRSQAEFVCQCCGHTDNADHNAGRNIAHRGVRLLLSGEFKPKEKKRVMRMRQKQLGADRSEVTLGEITVSRGAGNGAALRSMNQETPTSTAVGG

SEQ ID NO: 406 - protein, 606 aa, unknown
  TnpB Polypeptide
MRRFSSAVRFAYQRLLEGQDRKELKREDGPLCTLFGLNTRYADGAIEKAQATLDSARELGQDPRKVVFGGRKTFEQLKRKHLSGKALLALKREWKERRQGLLYSRGDATKKGNANLRLESRDGALWLRVNLGNGAYVQALVQTAHPQLNAPRERVYASLPYNVTLQLKEGKVYAHFTWSEELPPPVHTKANGVLGIDVNGDPYHLALAVVGKDGNLIRHLTLSLEEVDRAPNKGAKELLLWKVAHQVVALAEEHGVAIATERLKYLRKSKRGDGSGRHFRRREHRFAYRALLEKIHSLARKRGVEVLEVSPQDTSTIGMLKYAPQLHLSKDVAAALVIGRRALGFEEKLPEGYEALLKDDAFLAHVQGFYGNRLQELQSLRGAEKNPYLRRRLSRDMGKAKAALTLVSSLQGSPGSREGVTKGRNPSGANAWRVLRVGLFLPFSGLRCPGTFLPSSPSCTDRGRGGRWAQVLILVGGRGALVCAFTDQDWCPDCHQAAPVLAKAAGERARFFFRDENPDLRKAYRLGEKRIVPTLVFLDRELKELARWHGPPEEARAFFRARLAEGAPASQKRALLAAYHQAFPQMAKAIREEWARLLRRASGPPG

SEQ ID NO: 407 - protein, 244 aa, unknown
  TnpB Polypeptide
VPLTKTPVKEQIICSVDLGLNTDAVCTIMRSDGTVLGRKFINFPSEKDRMYRVLGRISRFQREHGSAQVKSRWAYAKRLNTELGRKIAGAVTGYAEENHADVIVFEYLETKGKISGRKKQKLHLWRKRDIQKRCEHQAHRRGMRISRICAWNTSRLACDGSGTVVRDPGNHSLCTFQNGKRYNCDLSASYNIGARYFIRELLKSLPVTERSLLEAKVPSVKRRISCVYADLRELFSEMELLRAA

SEQ ID NO: 408 - protein, 417 aa, unknown
  TnpB Polypeptide
MQRGYVFRLIPTKEQEQYFWKASNAARFIYNWALAERKRIHTEQGISISGYDMCKLLTQLKKESEYQWLNEVHNKVLKKSVLDCSDAFDRMFKGQNKFPKFKSKKNTTPSFYIETSIENKGIVITEDGNLVDKCNAKIKFLHDNTVNLSGIGKVRLSNNAKDYNLWYLTENNIPVYNGRVKYDGEHWNLSFSVDIPQKKAELTNEVIGIDVGIKDTAICSNGELYKNINKTSSHIKQLEKRKKRYQRQISRKYEMNKVKDESTGKIKYVKTNNIEKLGKKIAKTDKTLSNIRKTYNHQISREIIDRKPQMIVMEDLNIKGMMKNRHISRAIQQQNLYQLKTFIKYKAESQGTKFVEAPRNFKSTQICSKCGAVHTMNLSQRVYKCPICGHIEDRDLNSAHNLQNYGKSLLHVYEYTA

SEQ ID NO: 409 - protein, 530 aa, Sphaerospermopsis sp.
MRGKSKALKTQQDKDCTMSNHTSGAIQLELPLFATVGLAPQSSEMTSIDKSLICNPSTQTQKSSKISGQDSTSKEKVCAPYWTDFCKEINSSLLLPVGTDSQDLDLSLYNTWSSKTVDKSWFSTKLYTVHNQNLPKWFGFAHHKIYYQSFTFFPVECRTGENTLKKSKRIYLKLSPAQKRKIKYWFGVSRFVYNETIRYLQTPETKANWKGIKTGIIQGLPEWCKDAPYQIKSIAIKDACQAVKNAKKKYIDGGGISRCRFRTKKDPVQSCYIPKSAVKDAGIYHTVLGELKYKDPLPDGFGDCRLVSFYGDYYICLPIESLRHKTENQGRVVALDPGIRNFLTFFADNCFGWLGENANLRTQKLCFKLDKLISKISQAKSKQKKRLKNAATRLRGKIKYLVDELHKKTARFLVDNFDVILLPTFETSMISRKVKRRIKSKSVRQMLTLSHYKFKQFIKHKAHEFNKIVVDVNEAYTSKTVSWTGEIINNLGGSKTIKSRIDGKTMNRDLNGARGIYVSACARHKSSCIG

SEQ ID NO: 410 - protein, 365 aa, Sphaerospermopsis sp.
  misc_feature (203)..(353): Xaa can be any naturally occurring amino acid
MLLSIKTQLKLNKTQEILMAKHAGIARFTYNWGLATWQDLYNDGLKPNKYILKKFFNNHVKPELTWMKEKGICQKITQYAFDSLGEAFQRFFQGQSKYPNFKKKGKNDSFTIDAGGKPIPVGGISIKLPTIGWVKTYEGLPHTTCKSITISRTADSWYIAFSYEQECQPTIKNYTIVGVDLGVKELATLSTGVTFPNPKHYKXXXXXXXXXXXXXXXXXXXXXXXXXXXXXXXXXXXXXXXXXXXXXXXXXXXXXXXXXXXXXXXXXXXXXXXXXXXXXXXXXXXXXXXXXXXXXXXXXXXXXXXXXXXXXXXXXXXXXXXXXXXXXXXXXXXXXXXXXXXXXXXXXXXXXXXLFVNTTKCNAIR

SEQ ID NO: 411 - protein, 299 aa, Sphaerospermopsis sp.
MLLSIKTKLKLNKTQEILMAKHAGIARFTYNWGLATWASLHKDGLKPNKYILKKFFNNHVKPELAWIKEKGICQKITQYAFDSLGEAFQRFFKGQSKYPNFKKKGKNDSFTIDNGGKPIPVGGTSIKLPTIGWVKTYEGLPHTTCKSITISRTADSWYIAFSYEQECRPTIKKHDAVGVDLGVKELAILSTGITFANPKHYKQNLAKLQRLSNIYSKKASCSSNKHKAKIKLARHHARIANLRKDTLHKITTYLCKNHGKSFWIIYPLIGTSLALRGEFNRLNQLALRELMLLQIDYKI

SEQ ID NO: 412 - protein, 426 aa, unknown
  TnpB Polypeptide
MIELARKKKSESDALMQTLTARAKVAGLSDQDALLLGLLGFSATKLWNAANHHRRVAWNETSKIPGFAEQCRELKNNRWYRLLPSQSAQEVLGEQDDSYRSWFSHRKNGDVLAKPPGFRKKDTLSTVTFKQNAFEILPDNRVRLKLPKTYGRREIKLEYRLPPGVTLGKVQQVKLVYEPGTGDWYLHITRRVPVTYKETGNVMALDLGIVNIVAGLISDGFSFIIPGGELLALDRYFQKEKAKCTRSTSRRCAELNIKWGRQRNHYLHVLTKWLVNLAIAHNVSTIIVGELKGIRIDKDWGDACNQKLHAWPFSKIISLLTYKAALAGIRVVKVSEKSTSTTCPVCGRRAKKARVHRGLFVHCGVVLNADLVGAYNILQRYLRESGLALPARPGVVGALARPAVNLFVWRKTTPLGREQGTFRQAA

SEQ ID NO: 413 - protein, 347 aa, unknown
  TnpB Polypeptide
MGFRAHHAKEIYVYANSSVGSARSNGGRKPVLRRLSARIDKYDYRLDLDNMVLILKLHSDYEVKLRLITSRKRIEKFRGWSNYELVVKYEDGEFWVSVYFRRTIKPLKPKTVVAIDLNFDNVTIALFTLNGRLFRLKRFKTPHGKILTHKIWIERIQKNYPRSWRFIKGVRKAIEKHGERIKNISRDYSHKIGDLIAELALKYQSVIILEDLDELKENNKKSREFNKKLGLWFYRRIQFCIEYEARERNLEVVKINPKGTSSKCPRCSGKLVEYKYRVLGCKKCGFIGDRDVTATLNIYRKYISKYSRCGAPGVALNTPKPSENTSGMRGNQDEAMPTSSYMNSYES

SEQ ID NO: 414 - protein, 665 aa, Streptomyces sp.
MTRTACAPGLLRAGVEERTGELLTATVLAERVGWAAGLVSGMAADLLTAHWNAADVDVLASGLDAGGRKLPSNAWMALRRLGWTVTPAEGIVVNDRIVRMAQEHSGRTLRSAKWRADLTRGVTGTWPADPAKRTPEEWDAVREAIPGGRHLPSSVITSRTRQVDVFTRKHDRLPVDVFELEAAPHSARMLLLSACDGQQATIARADDPGRALLRLQLPTRPDPRSYQDWTWVACPITLPPTIPPGALLHLPTLRIHQGKVRADLAYTHAVPKARRTGHAIALGVDWGLNTLLSAGAVRLNNDGKVTALGTGGMFRAAGVLAKQHRLRRESQHLHAKTDHFQRLMSGDAQHQLTTKHHMLIEETRHVSNRRSNLNDALAWAAARWAVDQAIATDATVIYVEDLRSMEARGMGRTMNTRLSQQIRGQIVERMRHLAAETGIAVVTVPAHNTSKQCPRCLVPLRHRKAPDRPTTSGWKWAICPNPDCGWQGDRDTGAWQRIAARGLTHQAKTVADCSTGEMVIRSVVDRLEVNAVVAQATIETRRDRSKTGPTRRRTTRPAPRRRRAPSPARPQGSAGQRPEGHAPTGRTRLLRAAHRNQGVTTISTPSAKLSAPPEQGRPHPGHRPRGAALGAGFHLHAHATPPRWTHPAARHACLGIPQLIRDAHS

SEQ ID NO: 415 - protein, 412 aa, Trichocoleus sp.
MFALEFKVKGKTTQYAAIDEAIKTAQFVRNKCIRFWMDNRGVGQKELYRYNTSLRAEFPFVNALNSHACQASVERAYSAIARFYDNCKKAISGKKGYPQFKKNCRSVEYKTSGWKLFETRKQITFTDKKGIGKLKLKGTWDLNFYQLDQIKRVRIVRRADGYYVQFLISAENKVEVEPTGKTIGLDVGLKEFYTDSNGHSEPSPKFYRTSEKRLKFRQRRVSRRKKGSANRKKAINRLGRVHLKISRQREEHAKRVARSVIQSNDLVAYENLRIKNLVKNHCLAKSLNDAGWYQFRKWLEYFGVKFGKITIAVNPAYTSQECSNCGATVKKSLSMRTHVCECGFVLDRDWNAAINILKSALSTVGHTGTWVLDPNASGDSTSTLAGAILSEQVKSVNEESPLMKGTVSVNAV

SEQ ID NO: 416 - protein, 367 aa, unknown
  TnpB Polypeptide
MLKAYKYRIYPNNEQKIQIAKTFGCCRFVYNQTLAYRKEVYEKEKKSVSKTDCNNYCNRQLKKEYEWLKEVDKFALTNAIYNMDAAYQKFFKEHAGYPKFKSKHDNHKSYTTNFTNGNITVDFGCNRVKLPKLKGIKAKLHRNFSGQIKSATISQVPSGKYYVSILVETEHVELPHINQNTGIDLGIKELCITSAGKKYENPKIIRKYEKKLVKLQRQLAHKEKRSQNYYKTKKKIALCHEKITNTRKDYLHKMSHEIISENQVIVSEDLQIKNMVKNHRLAKSISDVSWYELTRQLEYKAKWNGRKYVKIDRFYASSQLCSVCGYQNTETKNLSVREWTCPVCGTNHDRDINAAKNILEEGLRQIA

SEQ ID NO: 417 - protein, 380 aa, unknown
  TnpB Polypeptide
MLKTLKLPLYPTPDQHDRLLATMHRFNAACTWIATQAYRTRTTNKFALQKLVYYAVRDQFGLSAQLTIRAIAKVADVYKRDPTKLPHFRPQGAVVYDERVISFTPTWTRASILTLAGRIPVSLHVCAYHATLLQQTAVRGQADLVYQHGRWYLLLVVTLPEPLCASGADFLGIDLGIVNLATDNEGTVYSGAGVERTRRILAHRRRNLQRKGTKAAKRKLRQLSSKQARFQRNTNHVISKRIVQTAKDTGRGLALEELTGIRSRVTVKRPQRARHANWAFYQLKSFLVYKAILAGVRVQTVDPRNTSRTCQICGYCAKANRKSQSAFLCVQCGFAAPADHNAAVNIRQRALAVRAAVMPPMVSVSIDTVSDGDQGQAAGL

SEQ ID NO: 418 - protein, 316 aa, Streptomyces sp.
  misc_feature (214)..(290): Xaa can be any naturally occurring amino acid
VWSRPLPEGATPSTVTVSQDAAGRWFVSLLVEDPAVKPLPATGTAVGIDVGLDHLLTLSTGEKIANPRHERRDRARLALAQRRLAKKAKGDGTNRAKARQRVAKIHARIADRRRDHLHKLTTRLVRENQTLVIEDLTVRNMVGNRGLARAISDAAWAEFRSMLEYKAAWYGREVVAVDRFFPSSRLCSACGTLQERMPLHVRTWTCADCGATHXXXXXXXXXXXXXXXXXXXXXXXXXXXXXXXXXXXXXXXXXXXXXXXXXXXXXXXXXXXXXXXXXXXXXXXXXXXXXRKSSGPLSARVRPAGRLGGGEGRSER

SEQ ID NO: 419 - protein, 499 aa, unknown
  TnpB Polypeptide
MAHKAKSTTTDKPKRRKTPSFIVDLPLRTSREDDKHLNDRFLCGSRLNNVTLQEGLDIVKAMHNDQEWQSARKIKDIEKRKVAYQAVRTRHGFSSANFDDLVAQHAKAAHFNKRIGSHEMQAIAKRVFNALNRWVVAKGGKPRFKGKNRALHSVEGKNNDGMLRWFKEEQVFQVEKGWQIPVILPNLKNNEWLADALQADTKYCRIVWRRLNGVKRWYVQLVQEGLTPQKAEFLEKLAQEGSEGGLDLGPGTVAWCTATEAGLVKLCPEIDRPEKVIRAIQRSVDRKRREANPDNYKPDGTIRKGRKTWNVSNRQKKDESRLTNMQRKEAATRNSSHGRLVNRFLTKARNWKDDNVSAKSLQRNYGKSVGKRAPGMLMSELTRKAARTGGKREAIDIRNLKTSQYDHSTDTFKKKKLSERWHFFGDGRGKVQRDVYSAFLALHSEGSTHNPCVLETAWQALEPALRVAGLFVVAQGARESYADPRKDFDFRQSTSPVRF

SEQ ID NO: 420 - protein, 397 aa, unknown
  TnpB Polypeptide
MLLVKLVVQVKLVSSPVQAAALEATLSAVNEAANWVSGVAHAHGVPREYALRKLAYGELKARGLGAQAAQHVIKKVRDAYTALQGNLRAGNLGRCGSVERWKVESKPVEFRPDAAQPYYDRYLSWQFEPGTVSIWTVHGRMKAVPFACSPQQLATLRNHRRGESDLVLRDGVFYVVATCEIPETPLNEDPARWIGVDLGIVNIATTSAGYQAAGRGLNRHRKRLQELRAKLQKKRTKSAQRALKRINRVESHRLRDANHVISKCIVAEAERTRAGIGLEDLSGIRRRARSSSRGRAALHGWSFAQLGQFIACKARRAGVPVVHVDPAFTSQTCSRCSHVERRNRVRQSRFVCRSCGLALNADRNASRNIARRAEAAWDAGAAVSRPYRRRIGGWTRE

SEQ ID NO: 421 - protein, 443 aa, Moorea sp.
MYGCQQHLITTTPDNNAVIEFICSESNKLTNCGLYYCRQILFKAGKYLNNAELDKIMKTNVHFKAMRSACAQQTLHGVVESFKSYKALNKLYKKGKLTNKPRVPNYRRKGGMAIVSYPARWVKLVNGQLKFPLGKQVKAWFGIDHFILPMPSNIDFKSVREFRFVPRNNYFYLEFVYKQPDLPTVSPTNNTLGIDPGLSNWLTCVSTTGKSFIVDGRKVKSQNQWYNKKVAKLKKSKHQYYWDEQLAFLTEKRNRQMRDNINKASRFVVNWCLRNGIDTVVFGWNKGNKDGIQIGKKNTQQYVQIPTARLRGRLEQLCIQHGIKFIETEESYTSKASFLDNDFLPTFGEKPVRVACAKAQGWKQSGKRVRRGLYRSANNEIVNADCNGASNILRKVATQLGISLAEVGRAALNLPRRYKLDSLSKSYREASWSAVLTREVTSA

SEQ ID NO: 422 - protein, 334 aa, Bacillus sp.
MLVNKAYKFRIYPNKKQEIVIAKTIGCNRFVFNHFLALWNDTYKEAGKGLTYPSCSAKLTQLKKQQDTIWLKGVDSIALQSTLKNLADAFSRFFKKQNDMPRFKSKKNTVQSYTTKQTNRNIGIVGNTIKLPKLGLVRFAKSREVEGRILHATIRRNPSGKYFVSILVETNVQEMPKTESTCGMDVGLKDFAILSDGTTYKNSKFFRTLEEKLVKAQRILSRRTKGSSNWNKQRVKVARIHEHIANTRADYLHKLSTEIIKNHDVMVWKTYKSVTCSKIESLQKRLMKYLVHNFELCWNIKQNGMANKLLWYLKHLLLVNYVPIVNTKTKTLKI

SEQ ID NO: 423 - protein, 388 aa, unknown
  TnpB Polypeptide
MLRGYKTEINPTEEQKIIIHKTLGVCRFIYNFYLAHNKEIYEKEKRFVSGMDFSKWLNNEFIPNNPEYQWIKEVGSKAVKQSIMSAEKAFKRFFNKKSKFPRFKKKKNQDVKAYFPKNNKTDWTIERHKVKIPTLGFVGLKEKGYIPTNAIVKSGTISFKAGKYSVSIVVEDTKDYTFDEFNEGIGIDLGIKDLAIVSNLESPFKNINKTKEIRRLEKQLKREQRKLSRKYESLKKQNKDKKGVATRQNIQKQIAKVQRIHNRLSNIRENNINQTVNKIVKTKPSYITIEDLKVRGMMKNRHLAKAVSQQRFNQFKIKLQCKCKIYGIELRIVDRFYPSSKICSECGTIKKDLKLSDRTYICSECGMIMDRDKNASINLANAKIYKVA

SEQ ID NO: 424 - protein, 184 aa, unknown
  TnpB Polypeptide
MWYTMCMKENLIHSRTCVYNINYHVVWSVKYRRNCIHDYLHKVTRAVVNYCKANDIHTVIIGDITNIRRNKNLGKVTNQKLHALPYAKIYGMLEYKLAMHGITLAKQTEEYSSQCSPHAPQVTKEYAKKCNRTSRGLYKDQLSVYNADAVGAYNIMRKYFAGCGKEKKISVTGLSSPLIIKVAV

SEQ ID NO: 425 - protein, 309 aa, unknown
  TnpB Polypeptide
MEETYGIHERFLYLENKIFRDMDHIKQLRIYPPENGKCDLIVIYEIEGTEQLSQNGHYLSIDPGLHNLMTCYDSGNGQTFILGRRYLSLERYFHKEIARVQSVWYAQQSERGIKYPRSSKHIQRLYRKKQNAVKDYLHKVTRWIAEYCRKEDIRCVVVGDIRNIRKEKDMGHKVNQKFHGLPYNKLYIMLGYKLKLYGIQLIKQEESYTSQCSPLSPEVSKRYAEASNRKERGMYITEGVSYNADAVGAFNILRKYLSASGKEKTLSVTGLKKSRNNKSSCIAERQAVLVSWSTLKKGGIPPDFRCSGN

SEQ ID NO: 426 - protein, 387 aa, Geoalkalibacter sp.
MMSMARQAFKYKLYHADRNRRLDRQRRIAGQIWNHCIALHKRYYRRYRKHLNQKRLKSRIAYLRNHLRPEWKNLGSQAVQDVIERIERGYELFFKAYRLRKEKKSKRVVRPPSFRKSVKYRSFTLKQAGWKLISPGKVKVGGCVYRFHQSRAIEGKVKTVTIGRDSVGDFWITFSVETEDAAPIKAATGRTAGFDFGLKRFLTGSDETTVEMPEPLKSELKRVKKANQRLSRKLKKSGGRKKARLSLARLHRQIADRRREFHHQTARALSRKYDVICIEDLNLTGMKSLWGRKASDLGFAQFVDILAHHCRKNGSRLVKIDRFFPSSKTCSVCGHVHRELSLRDRTWECPSCGSHHDRDKNAAINIEREGLRLIAHQAGHRLEGEAA

SEQ ID NO: 427 - protein, 381 aa, Geoalkalibacter sp.
MRRTYCFKLYKNKRNRHLHDQIDLASQIYNHCIALHKRYYRRSGKHISLYTMQKHIAKLKKLQKYQSWRVLDAQAIQNISERIEHGYQLFFRNLKAESRRRVAPPSFRKRIKYKSITLKQTGYKLLYDNRIRIGKRTFRYFKSQEIEGRIKTLTIKRDALGDIYLYFSCELPDVQPTRIMTGKIAGFDFGLKTFLVASDGKQIEMPLFYRQGQRKLAQAQRRVSSKKRGSNNRKKAVRQLARVHKKIANQRKDWHFKKAKELSDEYDFLFFEDLNLVGMKALWGRKVSDLGFWSFMQILGHMTAKAGSRIGTVGRYFPSTKLCSSCGFLNDKLDLRVRSWACDCGVSHDRDRNAAINILLEGASSSGLGDVRRVLAPAVAV

SEQ ID NO: 428 - protein, 415 aa, Geoalkalibacter sp.
VRSADSSGSAVCPFHHRTDRVSAGSPCRRVAKRSLPLAAGVPAVLLRGLPGPPEDQIPQGPAIGPAHPRAVRAGPSRRRHPFGGRNQKVPSGRDPGKSAPPGREDARVDYSQRRIGTMASVLCRRGRSAGTDRSPDRRRTATDGRRDSASGGPGHRPGRGNSGGGLRRQPVRFLSYSEKRLAGAERHRKRWQKIAARREKGSRRRTKAHQRAARYALYEARVRSDMAHKASRALVDDLQARLFVFEDLRTKNMTRSAKGTVDKPGRNVRQKAGLNRAILHSAWGRIHQFTRYKARRMGKLAIVVPPHHSSQECRLCGFTAPGNRLTQAEFACQRCGHAENADLNAAGVVKLRGVRLLLAGEIEFKTPRRSGIRKQLGPERSEVTPGEKVLVVREPTPRTPSSLNRETPTTTPIGV

SEQ ID NO: 429 - protein, 417 aa, Geoalkalibacter sp.
MIKARHHILQTTPEQCDLLKQVQQEAAGCWNAIVAEAKAHYDAGGGWISKNDLQKRLKGRFDLHSQTVQGLVDRFCGNRRTAAENRRMGLDKNYPWREKRFVTVPFKQMAIRCSASGTVQLTLKAGIRFDTGFPFSDGIHTCEIMWRHGRYVLSCTAEYQPAEPAEQGLRAGIDIGEIHPVAVCAENGAGLVVSGRQIRSAKQQRNKSLGTFAKRLSRCKKGSRRWKKLRRAKARLRAKTDRQVRDLLHHATRKAIDWCREQGVSELVIGNPAGVEKNTRKAKRLNRKARQKVSQMETGRIKQYLSYKAEEAGIQTCLVVERGTSRDCPVCGSQNRARGRLFVCAACGFSAHRDGKAGFMMLWKKHPQIPLPQLRIEHRQAYPKYRKRLSPACVDGPDVAPSSLAIPGPLLGEHIAA

SEQ ID NO: 430 - protein, 348 aa, Geoalkalibacter sp.
LPQWKKEHPWLKTQAHSQALQQTLKSLDRALMDAFDRSNPKQFPRFKKKGVHNAFRFPQGIKLDQGNSRIFLPKLGWLRYRNSREILGDVKNVTVLQRAGKWFVSIQTEREVAAPIHPSGSTVGIDMGVARFATLSDGTAISAQNSFQKHQRALRLAQQSLSRKVKRSNNWKKQKHKIAKIHARIADARNDFLHKTSTAISKNHAVVVLEDLAVKNMSAAAKGTVENPGRNVRQKTGLNRSILDQGWYELRRQLEYKLAWAGGMVIAIPPRNTSRTCPQCGHVCADNRKSQAVFLCVRCGHAGHADLVAAINIKRAGHARLACEVSGATMPPAAGTLRSDSVAAQCCA

SEQ ID NO: 431 - protein, 398 aa, Geoalkalibacter sp.
MIVAHKIALAPNNKQGTYFAKAAGTARFAYNWALVEWQRQYDAWKQDNSLPKPSQAALRRQLNTIKREQFPWMLEVTKNAPQMAIMQLGDAFKNFFAGRAKYPKFRKKGVRDRFTLTNDQFSIDGCRIRIPNLGWVRMRESLRFTGKILSATVYRVADRWFVSIAVDTQDDPRLPEAENQGVVGVDLGVSALATLSTGETIIGPKAHTLLLKRLRRLSRSLSRKQKGSSNRNKAKAKLARLHARIANVRSDALHKLTADLTRRFHTIGIEDLNVRGMMANRHLARSIADMGFFEFRRQLNYKASQRGGLVVVADRWFPSSKTYSACGSALNDMPLSLRHWICPDCGSRHDRDLNAARNLATYAVSSTVSACGEEGAGRACKSTVKPASVKQEISTEPV

SEQ ID NO: 432 - protein, 372 aa, unknown
  TnpB Polypeptide
MLKELEKEETKNPHAQIYQRLRQLFPELPTRYIDSAIYKAKQYPTDKPVVFGGKRLFEKLCKNHLSGKTREKLKKQWRELRRGTLISIGSKADKGNRLMRFEDLNGQLCLRVTTGNREFIYAKVLREPSNSKDKWLAFMTMLLESWQTKSYFAYTVELKLKEGEFYGSVSFELPTPEVKYTKENGVIAIDTNASPIHLATVEVSKTGELLSYKTISLHHLLRLSQNSKDHQEWILAHQIVDLAIQKGKAIAIENLKKLKKGMRGDGKAKLRKRLYQWNAKKFLQKLKRVARLKGVEVVEVHPAYTSIIGMLKYAPQLNIDKDIAGAYVIGRRALGFKEDMPENYEKLLKDKVYLEFALKRYEEREKELTELI

SEQ ID NO: 433 - protein, 420 aa, Methanomicrobia sp.
MIKEVRTVALNVLLLTKAKAEKLNNLLDNCIQGTDYLLAALSYMTLHGDKLSRYKLQENTYMYLRQTFNIPAQITVDLTKDVFAMNNSFGFSQYSISYNNPRSGRLSETKNSNPVMSIATATKKRMGIPIAQDGAWHRFNELVKSGYSWTAFKIAKSDTGWKLLISLKKEFATIEKQSIIGIDIGSRILAAITLVTDNGIEKQLYFGRDIWDKQRDISIRRSKLQQYRDTGTDKEKAWQKLKTLKSKERNYVKTRCYQIAHEIVEIAKAHKSVIAIENLKGLQNARGHRKSNRRTKRMPYRIFRAALESIATRAGAELMPVSPRYTSQWCPKCGRIGKRRNKGKTFVCKCGREVNADRNASLNIALRAAEVIRNHNVLSSQYSQGSVPVNARGWQDEGEGVTSWHGYFPPDCKPLCFSLG

SEQ ID NO: 434 - protein, 532 aa, unknown
  TnpB Polypeptide
VEFPGLLARVHRWLDPRRSGHHPPSRLTLPTSRVFAERSRTWCPRSLGARRLPSDAINVTSEVNDEDVNSCQNGAPLSHTGQVLSRAVTFQFALDPNAEQRVLLAKCAGARRFTVNHHLARVKANLDVRSAERKVLGEHGVPSEPSTPSLSWSGFSFINDFNAWKNGQSDDSPLNDDGSRGLSWRHELPSDVFECASVDAARALENFTASRRGERSGKPVGFPRFQAKGKVAPSFRLRNRATSGTTPSSQPIRFTGPSHLRLPRFGPVKLFGRTRKVRRMIEAGRFHIYSATVTQRAGRWIVSLTGVAAELHQVKRSRFQRHGVPIGVDRGIISLAVAADANGTLIQCFEGVKTLKQAQQSLKAANQALARTTPGSKGRQQARSRLAKRHRKVANTRRHLVHQASKSLVDRAQVLVIEDLNVAGMVKNRHLSRSISDAAMAELSRQILYKATWHGVEVRVVDRFFPSSKTCSGCGLVKSDLDLSTRTYSCGTCGLVIDRDLNAAINLARWQPRESTFEKRAEPPSALLLATA

SEQ ID NO: 435 - protein, 543 aa, unknown
  TnpB Polypeptide
VRAALRKAFGTPTCGAGFGSGAGRLMQHPGTYQTRVAEYADVERQAGDAALSAYGELYGRVERKLFAEVAAGQSAVSLKRAYLKRYGIPARMFNAVRVSLEGRMASVRAQQPLRLDSLDRRIARAERRIRAAAGCGRRDQVHQQKRQWAALQSQRAALQEDLETGRVRLCFGSKRLWRKQHHLAENGHASHQAWLRDWREARSDEFFVLGSRDETSGCQLCVASVADDGSLTLRLRLPDCLAPQHGRYLVIQGVRFAYGHAQVLAAMESNAEYARYRRKHGEKAVRATTLGQAISYRFKRDQKGWRVFATTNMMEVPVVTDKRRGAIGVDLNAAHLAVAETDASGNPVNAFRVPLVTYGKSRPQAEAIIGDAVARVVAYARETGKPIVIERLDFRQKKVELEGESRRYSRMLSSFSYGKVKACFLSRGYRQGVEVQQVNPAFSSVIGRVKFMERYGLNVHQAAALVLARRWLGCSERIPRRRVAPVDHGVQVAFTVPARTRVKHVWTYWGAVSGQLGPALAAQHRLGRRRGPPNPVQAARRVA

SEQ ID NO: 436 - protein, 378 aa, unknown
  TnpB Polypeptide
MLKAIKIRLYPNKAQEQALNKVLNSYRFVFNQMLALKQNTYKENNKSLGLKELSKYFHGTLLKDEQYSWLKEQNTKVMKQAIRQMLTAYDNFFKQHNGFPKFKSKKDKQSALFPLEAISSGNKFNEKKITLTKPLKDIKFRCSDLYHKRLQRYKDKIRSATLSRTKSGNYFLSILIDLPQEEFIKFEQTNKHVGIDLGVKDFVITSDGEVFENKHFFKKQEKKIAKLQRQLSKKVKGSNNRNKQRVKIAKVFKKLTNQKNAYIHYVVNELLTYYDTVFMEDLNVKRMLRNHHLAKAIQEINLCRFSQIIANKAINNYKKVVFVDRFYPSSKTCSICGYVNKELTLNDRYWVCPNCGKHHDRDLNAAINILHEGKRIIT

SEQ ID NO: 437 - protein, 380 aa, unknown
  TnpB Polypeptide
MLRAIKIRLYPNKTQEQTLNKVLGCYRFVYNHMLALKQNTYKENKTSLGLGELSKYFHGILLKDEQYVWLKEQNTKVMKQAIRQMLTAYDRFFKQHNGFPKFKSKKDKQSALFPIDAISKRNEFNERKITLTKPLKNIKFRSSDLYFRRLQKYNKDIRSATLSKTKSGNFFLSILIEMEDTELKKFEHTNKQVGIDLGIKDFIITSDGEVFENKHFFKKKEKQLKRLQRQLSRKVKGSNNRKNVQVRIAKLFDRITNKKDAYIHYVTKELLTYFDTIFMEDLNVKGMLKNHHLAKAINEVGFCKFKEILANKAAVNNKKVVFVDRFFPSSKTCSQCGYKKRDLKLSDRFWTCPICRSKHDRDINAAINILLEGQRMLIVV

SEQ ID NO: 438 - protein, 378 aa, unknown
  TnpB Polypeptide
MLRAIKIRLYPNKAQELKLNKVFGCYRFVYNQMLALKQNTYNENKNSLGLTELTKYFHGTLLKDEQYDWLKEQNTKVMKQAIRQMLTAYDKFFKQYNGFPKFKTKKDKQSALFPLEAISKRNEFNERKITLTKPLKNIKFRCSDLYFNRLQRYKDKIRSATLSKTKSGNYFLSILIDLPQEEIIKFRQTNKHVGIDLGVKDFVITSDGEVFENKHFFKKQENKIAKLQKQLSKKVKGSNNRNKQRVRIAKTFERLTNQKNNYIHSVVNELLTYYDTVFMEDLNVSGMLRNHKLAKAISEVGFYKFKEILSNKAIVNNKQVVIIDRFYSSSKICSTCGYKKQDLKLSDREWTCPICGKHHNRDLNAAINILHEGERILN

SEQ ID NO: 439 - protein, 418 aa, unknown
  TnpB Polypeptide
MLRAVKVRIYPNKEQRVQLNKTLGAYRFVYNYILDLKQKEYKESKKDLSRFDLTSVLTKLRKDENCLWLSEVNISVLRQSIHQMLVAYKNFFKEHRGFPKFKSRNNVQTALFPINSISKKNTFERKTITLTKNLKDIRFRCSEEFYSRLKKYKDGLKGATLTKSKSNKYYLSILIEIDDSEINLLPHTKKDVGIDLGVKDFVITSDGEFFENKNFLTKEEKLLKKLNRQLSKKKNGSNNKNKQRLKIAKLHDKIANKKDYYVHEVVNKLLSNYDNVYMEDLNVKGMLRNHKLAKAISEVGFYKFRNLLETKAAENAKNVGFIDRFYPSSKTCHNCGYVKNDLTLNIRKWTCPECGMEHNRDVNAAINILKEGSRLAMEDVTVEKVTKKKAATTKKKTVKKAVDSTTKEAVTVAAEISA

SEQ ID NO: 440 - protein, 496 aa, unknown
  TnpB Polypeptide
MLKELEKEKTKNSHAQIYHRLRQLFPDLPTKYIDSAIYKARQYPTNKPVVFGGKRLFEKLCKNHLTGKAREKLKKQWRELRQGTLIAIGSKHKTAQGNLLLRFMELDGKLHLRITTGNREFIYAKVLREPTNNKDKWLTFMAMLLESWQTQNYFVYTVELKLRDGEVYGSVYFELPTPEVRYTKENGVIAVDTNASPIHLAIAEVSKTGELLSYQTINLHHLLGLSQNSKDHQEWILAHQLLDLAIQKGKAIAVENLKKLKKGMRGDGKAELRKRLHQWNAKKFLQKLKRVAMLKGVEVVEVNPAYTSVIGMLKYAPQLNIDKDIAGAYVIGRRALGFKEDMPENYERLLKDKVYLEFALKRYEEREKELVELIEKESNEYKRNALKSKLRSVEDAEKLLTSLIQSLQSEPSSCEGANGRNLEQGETKKVSQSAWQVLKVALLFPILGRVLPRDLSPLKPVLVEGVWDRVRRSNGLVPLEAGGRSQQGIFRTASGL

SEQ ID NO: 441 - protein, 400 aa, Synechocystis sp.
MKLRYRYRFYPTDQQQRSLAQLFGCVRVVWNDALAFCKESEKLPTYTELASRLTQCKQTEEREWLGAVSAVPLQQSLRNLSTAYKNFFDSIKGKRKGLKVNPPRFKSRRSKQSATFTNNAFVVKDNSKVYLAKIGFLDVVWSRPLPSKPSSVTVIKDAANRYFLSFVVEVNPEQLPDNGQSVGIDLGIIDFATLSTGEKVKSPKPLKAKLKRLRKCQRNLARKQKGSMRREKARLRVAKLHAKVKDTRTDFLHKLSTKLIRENQTVILEDLNTAGMMKNRRLSRAISDLGWRSFRTMLEAKAEMYGREFRTISRWEPTSQRCSCCGEIGGKKALNIREWTCLFCGANHDRDVNAATNILVAGGLSETLNGRGGGRKTTLVAASGEASTRRKAIQLTLFAS

SEQ ID NO: 442 - protein, 288 aa, Synechocystis sp.
MQGGKMMFGCQQVLIDPSPELRAILEFVCGESNKLHNCGTYYARQLYFKENKIPSRFDLHREMSSNVHYRAMYSQVAQQCLTTVAESFKSFIGLLKGIKKGTVTQKPKLPNYRKPGLNLVTYPKQSVKLKDAGLRFPLGKQVNAWFNVDCFYLPMPSNLDYKKIREYHILPRNGAFYLELVYKTEPVKSDVNPNNVLGIDPGLNNWLTGVSNVGTSFSVDGLHLKSLNQWYNKRVSILKEEQLQGFWSKQLARITEKRNRQMRDAVNKAARIVLSHCLQHRIGTVVFG

SEQ ID NO: 443 - protein, 390 aa, Synechocystis sp.
MLRATKYRIYPTAEQELHFRRSFGCCRFAYNFALNLVNETYKETGKGLGRFAIQKAITKLKKEYEWISEPYSQCLQVVALNLSRAFINFFERRGGYPRFKSKHRRQSISYPQNVKVVDNGIKFPKIGKVDAVIHRDIEGSVKTVTVSMNAKGQFFASVLVDDGKETPNQSMDGKAVGIDLGLTHFAITSDGSKFNNPRWLSKHQRNLKQKQKRLSRRNKGSNNRNKTRKQVATVHDKIARCREDFHHKLSRRIVDKNQVIVVENLAVRNMMKNHCLAQSIGQVGWGQFLAMLKYKSEEEGKVYVEVDRFFPSSKTCNVCLNRVDSLPLDIRFWRCDKCGTNHDRDINAALNIRDEGLRILTSGTGDSAYCLAVRQGSKGRKPSTTLQAIG

SEQ ID NO: 444 - protein, 393 aa, Synechocystis sp.
MLGMEKAHSYRFYPTLEQENLLRRTLGCVRLVYNKALHERTQGWYERQERIGYNETSSMLTAWKREEELAFLNEVSCVPLQQGLRHLQKAFTNFFDGRAKYPNFKKKHHGGSAEFTKSAFKYRNGQIYLAKCQEPLDVRWSRQIPQGCEPSSVTVKLHPSGRWHISIQFDDPTIKPLPANNNAVGLDLGVTSLIATSNSDKVANPKQFKKHHPRLQLAQKRLARKQKGSKNREKARRKVAKIHLKITDSRKDFLHKLTTQLVRENQTIAVETLAVKNMVKNHKLALSISDSGWGEFVRQLDYKCRWYGRNLVKIDRWFPSSQRCSSCGHIIDKMPLNIRDWQCPSCGTHHDRDINASQNVLAAGLAVSVCGATVRPEQSKSVKAGAMKQKPKS

SEQ ID NO: 445 - protein, 490 aa, Moorea sp.
MPKSVGATKRISTQIVPVMGMTEPVEIELLSTMKKLGTVRSESYNKLGSISHWGLDWKKAYPEVRSFRTPESLGLPSKLMEWTVSDVAKTITAQQAACTEAVIKKVYKRFPGKENKKNRKELCKQLKTLALLDNPLLHRLVRKEFQRGHSWVKNQIVYQQGGYKCKRISRNTYQLELAGLRRGKRNKIVVKSNRKIKGQIRLIYNTDIGHFEIHFLADHGTIDIPANRKAVGIDKGYTEAFYDSEGQAHGKGLGKVTTQKSDRICAKNRNRGKLWALHRKSEKIDPAKSARILENNLTRKTENRRYRKNQSELTAIIGAASKSLFDGKSLKVFAEDLTQPIRNKRQSKAVSRKLNSWMKGAMRDSLQKWADWTGSVVTEVQPSYTSQIDSRNGTLLGKRTGDNFTGFDGVVLQADYNAAKNILVRGTDKEITRYMNKTEVQAVLLRRTARFLKGMGLSLLDAVELGWLDPKHSKTKAFKQLLVGMPGTSK

SEQ ID NO: 446 - protein, 476 aa, unknown
  TnpB Polypeptide
MKAVLINVDPEQKQAIDKLMAMFCSAVRYSFGRILDGKKIGEIEKDVAFKYSLNIRQAKDAVENARQTVVSQKELVRMNHENAQKKVAATEKQLKNIKLSDKKRKALLSKLDKRKRKCDYWKNFIDTDTIPSVIFGTKEKFIKRCKGLITHEEWVDARTNRVYSRGDKTKKGNPNLRVVIHNGMSLLEISTLEKTEMNRAVKTQVPIYLPQKLSKKTGKVNGINYRQLFLNHVSIGEAYQVEIIRKNGKYYCHITFEMPKPELRYTGHKGMIGIDTNPDGFALTVIDHKGNYKEQFYLKQHELLYARTDRRKNLCGELIRRAINIAKEQGLGIAIEDLKFKDDKDVCSKFARIKHQFIYSQLLTMLESACIREGIEVKKVKPQYTSKTGLYKYCHQYGIAVHNGAAMVIARRSYGFKEKVPKVLKDIFVKEKHVFDKQNEWKRWMIINENIKKKEVNKPDLWIVNRKEILGLDLPF

SEQ ID NO: 447 - protein, 448 aa, Methanosarcinales sp.
MFQFTPFYAFNALFKMSYPSIYRWDTADIKLYITKAILIYKMYLTTRVKIAEGGEEREALREAGNICTKIWNKANYYCREQWEQTGKIPSYYELQRVFKDDFWCRKLHSHTAQAVLHKLAESYQSWYKLKKTDPKAHPPGFRKKNSISTIAFTNFAVRVEDHRLRLTLTKGKHIWLDYQVQPGVEITQGNIVRVEITNGYSNIVYRVEEPEPKKKGQVMAIDLGIINTATTVKEDGEAKIYSGKGVLSIQRYFNKEIAKLQSIVMNQSGGKKKWSRQLSELSRKRRRQIKHALHALTRSIVEDCVKSNVKEVVIGDLRNIRKGKRWNKKSSQKLHAWGFKQFTELLRYKLALEGIRLVTVNEKSTSKMCSRCGYVDRYNRKKRGWFKCRKCGYEENADINAAINILKKYLHQTGRPVEGSSGVVNAPRVIRWDGNIPSEPDARQFIGG

SEQ ID NO: 448 - protein, 486 aa, Mycobacterium sp.
MARFEIPEGWTAQAYRFALDPTPKQVRALASHAGAARFAHNHMLTLVKAVMDQRAAERSYGVAQDQLTQALGWSLPALRKTWNARKDQVAPWWAENSKEAYNTGLDGLARALDGWSKSRTGQRAGKPVGFPKFKTARARRSVRFTTGTIRIEADRNRITLPRLGAVRTHESTRKLARRIEAGTARVLAATAAQDSAGRWYCALQTIVEAKTRPTHARRSAHPVVGVDVGVKADALLVVATPDGTEVDRIPAPKSLTAAQSRLRALQRRAARQHGPYDPATKTRQVPSKRWRKTQARIGRTHAHAAAVRRNVLHKATTVLAQQHQIVVVETLNAAGMRSAGGSRKRGLNRALADAALAEIRRMLGYKTRWYGSHLLEADRYFPSSKTCVACGRRKPNLTLADRVFACDGCGMRIDRDLGAAINLARLGEPAGVGEQSSAGSGPVAGRGATRETEPAPAGDAAGCETSTPHHRSVDQTGTASPQGEAA

SEQ ID NO: 449 - protein, 504 aa, Mycobacterium sp.
MIAAHRHKVAANAGKVAALRALFPQFGSAMGHLAALSRRELLAGEQLVHWRVMPNDRLWFDTGLSARQLKSAQNMLHANLSGWLVRLQDRVRELITGSTLPEHEKAVLYRINARKAWWAVGLELPWILDADRLVPVEHNRAATTPGVVYLPVTSETLRLARRLVKHAQKRIGFPNLSRVNTLTLDGIVAKTEPAQIATQRGRVDHWLKVATLVRGKPVSVPLVANPRFARELDTARARGGKLCAAIQLHRTEHGVEVSLIIDQPDSTPRTTGAVVGIDFGFSSALFATSSGQLLGRAMLMRLRELDTVLESVTSDLQRRGISLKTDPTYRSLQARIREFVANEIGRLLNRLAADDVCELVVERLDFRGGGLSRRMNRLCTRTGRRVLKTRLARLTERHGITITVVPAPYSSQQCSGCGYVHNTNRKTQSRFVCGFCGKKLHADVNASRTVASRRSRPLPDGAGPRSRKNTRRLLDSEHRKRWNLPTQGAVHGITGARGRSPTAA

SEQ ID NO: 450 - protein, 370 aa, unknown
  TnpB Polypeptide
MMKTVKTYKYKLYSSKRNKILLAKIELACEIHNHSVALTRRYYRITGKHLSAYQLKKHYTKLKRLPKYAHWKGLGSQAIQDVAERIDRSYQAFFTHMKDKRAGRKSPPHFQNRKKYKSFTLKQAGYYFHGRNIVTIMGREYKYVNHRPFEGKIKTLTVKRNRLDELFLYVVCEQEANEVLPRLGKTTGYDFGLKHFLTDSEGGFIDSPEFYKNSLTELRKKHRNISKKAKGSNNRKRAIADLSRIHEKVSNQRRDWFYKTSIAILSENACVCFEDLNLQGMKKLWGRKVSDFAFAEFLIILDAQCRKTGSTFVKVGRFEPTSKACHHCGTVNKDLILADREWICPGCGATLDRDKNAAINIRNLGMKMTA

SEQ ID NO: 451 - protein, 623 aa, unknown
  TnpB Polypeptide
MVKKKKKDTFQEFRSTDKSTYTTIKTTLKSVLHNHKEVQPVITNLVFEMNDLMIHSYQFIRLYVLNCYNNNKHLPEINEKFILYCIKTLGIRSNQGAKSKDTDLLETLQEFYNKEYQPLLNHEKTKLKNTTFLLPYLATQLHTSLSNNTQERFIQHFLRFINKTTTNITEDKVILFKFKKQLLECNDETDPIFDDWKRTHLPNILPTNIKKSVHYDVKVKPFDYLKGMLYMNAVLEKEEHKLFQPLPLRNNIIPKHIILDTACIISLFCPENKKKGELLKNVKENQYDVWNNILNLQHKTFKIKHYQYHHQLQTDGISCSLLFIRKDLKDKKWGSRVPTLPAQDFHNIEDLSTEQLNNLKERNIVGCDPGKHSLVYMMDKQGNKLQYTASQRKIEMYGKRNERILLQERKRNNIIEKETHLSSKNSKSVDYEKFKEFLVEKDKLNKETSDFYQKELWRKMKFRQYSYGKKSIDTFLNKIKETFGDNILIGYGNWSRSSQMKHIMPTMNKGLRKLIHKKYDTLTINEYYTSQKCCECYKDLKHYKDKKGKEIYRLFHCSNCVSYENKNTVFRTRDKNSAISIMKLTKEWIETQTRPSEFQRHPSFTCGTIAGVSKTIGNEKIAY

SEQ ID NO: 452 - protein, 375 aa, unknown
  TnpB Polypeptide
MIKGYQYRIYPNKEQTQQINQMLGNARFVYNWALDRRIKEYQSEKKSISAFTIMTELTQLKKQDEFEWLQLSVAQSLQQSIVNMDKAFTRFFKQKKGFPKFKSKHIGTHHVGFPQNTKIDFEINKISLPKIGWIKTKVSRTFDGKIKTTTIKKTPTNKYFVSITVELSDVKIKQKPISKKNAVGIDTGIKTFAVLSDGTEIQNPKHLKNSIKRLKVLQRRASKKQKGSANRKKANLKVAILHENITNQRLDFLHKTTTSIAKKYDTVACENLNISGMVKNHKLAQSISDLGLGRFYTLLEYKMKEQGGNYLEIGRFAPSSKMCSCGVINKDLKLSDRVWTCKSCNTTHDRDVLASNNILRFALTKQNKLTAGTVG

SEQ ID NO: 453 - protein, 309 aa, Ktedonobacter sp.
VQLVLEGSAYQKPRNTVGTDTIGVDIGPSSLAIVSQQGHVQLKTFCEELKPNAGAKRRLARKMERQRRANNSQNYDDKGRVKQGRLTWKESQQYKATRRRYATAERKLAAYRKGLHGKLVNDLLRVGQTIQIEKTSFRGWQKRFGKSVALRAPGLFYEHVKRIVAKTGGTLREVSTYTTKFSQYCHGCRTYRKKPLSQRWHTCACGIGPVQRDLYSAFLLAYLTSTDNTPSIALNEWEGAEPRLQAEIERLKQRANEGQSLPGSFGLPKVGARQPKSLSPNQQELCSPSLQYRKGKLEALEMGKEPPRL

SEQ ID NO: 454 - protein, 299 aa, Burkholderia sp.
MLTTGSSKELGIHSGTVNATCEQYAKSRGQHRRAYLRYRGRKSLGWVPLKGRDLKREGQAFRFAGNTFRVFDSRPLPEGKIKDGTNFAQDARGNWFLNIAIEVADVPARPIRTGVGIDLGLKHFAALSTGEKLPNDRFGRRTADKLALAQRARKHKRHIAKLHAKVANARADSQHKLALDLVRRFDYIAVGNVSAARLARTRMAKSVYDASWSSFRDKLRYKAIAHGATFEEVNESGSSQSCSSCGSKDSTTRPKGIAGLRVREWACSSCGVVHDRDTNAALNILRCGRASPVVGIPCL

SEQ ID NO: 455 - protein, 389 aa, unknown
  TnpB Polypeptide
MKAYKFKLKPSPRIAHGFDQWLMVCREVYNAGLQERREAFAVCHKSINYHAQAIQLPQIKAQREDVAAVNAQVLQDALRRLSNAFDAFFRRVKLGTAPGYPRFKSRARFNSFTFPQAKSAFQINGKRLHLSKIGKVKIIQHRPIEGTIKTCTIKREADGWYAVFAVEESQSRFIPKTGDTCGIDVGIENFATLSNGQVIENPKHLRVAEKRLKTAQRKVSRRRKWSGRRRKAVGLLARQHQKVANQRKDFHHKTALGIIREYDEIAVEDLHIAGMVKNHHLAKSISDAAWGTFIQILGNKAECAGRRVWKVPAAFTSQDCSGCGNRVRKTLAIREHRCVGCGLVLHRDHNAALNIKKKREGIAFSDRGNRAAKRSENLPDYDPEAVCFS

SEQ ID NO: 456 - protein, 351 aa, Pseudonocardia sp.
VRTAYKVRAYPGPEQAALLRRTFGCVRVVWNRALAARQKRYTVEKRPTSYRETDAALVAWKRTDELAFLSEVSSVPLQQTLRHQHNAFQSFFARRGRYPRFKTRRGRQSAPYTRSAFRIKPDGLWLAKTSAPLRVAWSWPDVDQPDPTPLPATGETVGVDLGVTDFAGCPTGARIVNPRPLAKRERNLARYQRRMARSRKGSHNWATAKQKVARAHSKVRAARRDFPHQTSTGLVRRFDRIGVEDLAVVNMVRHRCLAKVISDVGWGEFRAMLAYKAVRAGRQLVVLDRWYPSRKTCRSCGHLLAHLSLGTRQWTCPGCGTRHDRDLNAAQHIDTAAGLVAAASGGTVRPA

SEQ ID NO: 457 - protein, 502 aa, Streptomyces sp.
VAVRDRLKHLTSQDERVLRAVGAHQGSLASRDLKARCADGLEHGADTWAARKRELTKESSSRIAGAITKATHDQWALARRCHAAHIQKLAAGIKTLRHRLSLPLGEKGTKRAAGGYRSKGEWFRKSRRLAALEDRHTAAVSDWQAGRVRVVRGSKRLLNTRHHLTQAQLTEAQWRERWEAERWFLAADGESGKRFGNETIRVTPDGEVSIKLPAPLAHLANAKHGRYVLASTVLFAHRGAEWADRITANRAVAYRIHLNVARGRWYLTASWQRPVVQTIPLETARARGMIGVDTNADHFAAYRLDQHGNPVGDPHRFPYDLSGTADHRDAQIRHALTRLINWAGRAGVAAIGIEDLDFTTEKTREKHGSRKRFRQLISGIPTGKLKARLVSMAAEHGLSIVVGRRALGHPVRDGVSPARTELRARGRTAPPPHDQSDRAGHRTAQAERGARGREGTRPPTTDRPPGGPAPSRKRKRGTSASKTVRDAPRTQQWAQDSLTHTG

SEQ ID NO: 458 - protein, 361 aa, Chloracidobacterium sp.
LKPSKRVAQQLDSTLNLCRELYNAALQERRDAYRTTGKSVSYFDQALQLPEIKVERADVSAIHSQVLQDVLRRIDRTYSAFFLRCLKGQNPGFPRFKSRDRYHSFTYPQTGFKLVGNKLSLSKIGSVRLRLSRPVEGRIKTCTIKKQVDGWFCVFAVEENQCPFIPRTGEAAGLDVGIESFATLSTGEVIENPRYLRKAERELKIAQRKVSKKKRGGRNRKKAVRVLAKKHLKVANQRRDFFHKTANQIIRGFDCVAVEDLNIAGLVKNPSLAKGISDAAWGTFIQILSNKAACAGRRVLKVPAAFTSQDCSRCGERVKKSLAVREHRCIGCDLVIHRDHNAAINILGRADRLVRVNTVTR

SEQ ID NO: 459 - protein, 233 aa, Cyanobacteria sp.
  misc_feature (90)..(117): Xaa can be any naturally occurring amino acid
LSSFYTDSEGNKVDNPRHLRKSEKALKRLQRRVSKKFRRGQPQSNNYKKAKERLGRKHLKVTRQRRDFAVKLARCVVASSDVVAYEDLKXXXXXXXXXXXXXXXXXXXXXXXXXXXXKNLVKNRALAKSISDAAWSQFTEYLQGGVFGRIVVAVPPEYTSQDCSGCGTRVRKSLSTRTHECPKCKTALDRDQNAAINILIKALREIADTVGQTEFQAWGEGTSFDDGQLTVPK

SEQ ID NO: 460 - protein, 419 aa, Haloarcula sp.
MPTTRRTYVCRITNHSQVAGVLDRHGWSASKLWNVALYYARQQWDETGEIPDEKELKRELKTHPKYRGLHSQSSQKVLEELSEAFSSWFGSDDDRDNPPGYRKTNYYDSDGNRVHEEHPRSTVTWKKKGIRHDTKHDRIRLSKGKNHKDGRDFILCEYQTPPAVNLENIQQVRAVYNSAKRRWELHVVCETEITAESPGEKTAGVDLGICNPAAVAFPDDALLYPGDTLREDKHYFQQEEYQTEGPHGPSQKAQWAREKLSRRKDHFLHALSKDIVERCVDHDVGTIVVGDPSGVDEDDWGRHGNKRLDNWAYKRLMNLIDYKARERGIEVEMPDERGTSSSCSVCGHEDEDSRVERGLWKCDRCGIVAHGDVNGADNIRQKTLPVTPPLGDSGNGCLAQPCVIQFSRTRGFQPRAPAE

SEQ ID NO: 461 - protein, 383 aa, unknown
  TnpB Polypeptide
MKVIRGYKTELDPTSEQYMLLCQCAGISRYAYNYGLARKQEAYKNGEKTPYSHHLQKELTAHKHDDLVWLNSVSKWIVQNSLRDLDTAFDHFYRKCQLKKQGQWKGKCGYPKFKSKHKGRGSFRLDCPVHVHEGAVQLPKLGTIPLKEHGYLPTWGVKVLSATVSEKAGRWFVSVQVEEDHQEPVQATGEAIGIDVGIKALATLSDGRTFDNPKALRSRLKALKRASRQHGKKQKGSNNRRRAQRKLAKLHMRIANIRKDTLHKVTSQIVAKTKSPEERPSIIVLEDLNVKGMLKNKKLSRAISDVGLGEFKRQLCYKSAQAGIEVKQVSRWFPSSKTCSSCGNVKEELALTQRVYICVECGYRADRDYNAAKVLAATAETNT

SEQ ID NO: 462 - protein, 378 aa, Mycobacterium sp.
MAKFEIPEGWMVQAFRFTLDPTAEQARALARHFGARRKAYNWTVATLKADIDAWQATGIQTAKPSLRVLRKRWNTVKNDVCVNIETGVVWWPECSKEAYADGIDGAVDAYWNWQNSRSGKRDGKRMGFPRFKKKGRDPDRVTFTTGAMRVEPDRRHLTLPVIGTVRTHENTRRVERLIAKGRSRVLAITVRRNGTRIDASVRVLVQRPQQPKVTDPGSRVGVDVGVRRLATVATADGAVLERVPNHGLDDLQRLGKRGDSVANRRERDAVGLRLAPKPAGAQSQIETSLGNDVQRRSHLGQHGRMTVGIAQHAGAQPQLRGVAGQCRKCGPALEQGQRPRRGALARPAGFGAGRGAGVGGDAGDLRILAGAYRQEVVA

SEQ ID NO: 463 - protein, 413 aa, unknown
  TnpB Polypeptide
MEILKAFRFRLEPDEVQERFCQQTADSCRFLKNLCLEQRSRAYARGKHRIRYEMQSKELSGLKEMLPWLAEAPSQVLQQAMMDLEKAFQRFFDKVADYPTFQKKGERDSFRFPQGFEVDEANHRIKFPKMGWVRYRPGRGRSARNIQGEVRSINVIREGNHWFASILCKVEAATPPAIHGFAVGADLGVAKAIALSTGEVLEVLGMTKAEQKKLAKLQQAMAKKKRFSKNWQKLKRRIARLHSTVARRRRDSINKATTYLAKNHRLIVIEDLRVKNMTRAPKPKADPDQEGSFLPNGAAAKAGLNRVVLDKGFGEIRRQLDYKHVWYGSLLLAENPAYTSQKCSECGHTEADNRKTQDRFVCLECGHAENADTNASKNILSAGLLTERTVGHTGVKKEATPLRRPAKNRKPAA

SEQ ID NO: 464 - protein, 426 aa, Cyanothece sp.
MSKKQQCWGCQQVLLSPDKELSAILEYICTESNKIYNCAVYYARQIWFKTKRIAGRAELCAAMKQNRHFTAMYVSASQQVCNGVAEAFKSFRELNKLFWEGALEQRPKPPTYRKSGLFTVSYPRRWLKLVGDKIRLPLGNQVKAWFGLSEFFIDMPSNLDWQRVKEVRILPRNGAFYAEFAYKLDPQRAKVDSNKALGIDHGIDNWLTCVDTVGNSFIVDGKHLKSLNQWYNKRVATLKEGHDESYWTKQLAAITEKRNRQMRDAINKAARLVVDHCLTHGIGTIVFGWNQGQKNGANLGHKTNQTFVQIPTARLKQRIAQLCSLYGIQFVETEESYTSQASTLDNDDLPVFGEKPAEWKPSGKRVKRGLYRTGQNGYVNADCNGAVNIIRKVAGTIGIDLMELSRGALTTPVRIRIWTLNESPSL

SEQ ID NO: 465 - protein, 447 aa, unknown
  TnpB Polypeptide
MAASERKGLWRRFCHVGSYEAVKVRLDPTPRQERHMVSHAGAARFAYNAGLAHVKEAIENGESPEWSHYSLIRWWNANKDTLAVNRATGEVWWSQNSKEAYSGGLRSLAQGFSNWSKSRKGQRRGRRVGFPKFKSKNTTMRFAYSTGFTAPKASDPYGLKLPRIGRVHCMENVHERVAGAHLVRVSVSRNAGCWYASLTVEREPHPSSTPRNGTVGVDLGVKHLATLSDGTVVPNPRALGTRLKALRKAQKELSRKVKGSARREKAKKRVTRLHARVADVRADAINKATTMIASNYSVVCVEDLNVAGMVKNRSLARSLSDAALGEFRRQLEYKTARTGAALRVVDRWFPSSKTCSNCGVVKAKLPLSERTFNCDDCGLSIDRDLNAAINIRVAGSAPETLNARGGDVRRNQHTVGNADPGEARTKQAQKSAVRLGAGLGNEAMQPK

SEQ ID NO: 466 - protein, 544 aa, unknown
  TnpB Polypeptide
MTVGVFVDIGYIAGVECIFGGVLAKNQTYRAFTARPSHVLDLNGELLDSARVLASLASEVRDISAYATFVVRNDVELGDELARVAATQPTTAGRRAGVTMPDFLVSGKSGRSRKEMLVQHRVVTEFRSWQERDKAANGESSKYVSQGWKRTANGSAPSYGEGYVNLGAVDKCYAVIENNPFVDGEIVLRMVIQGQWHRLIFDFDNKRFTEGKVTLPVIKVESGQPVFIFAVVTDNPVVQFSVDYTIGVDVGVNNYATVVVRDVKTGRIVYETTLSQRVHSLWSSVRASEQQVRDLRRKVALLLCDRQARMAALDEARFHREAASRKKRELAILAAQEIAYLSHTWGNAVVAVEDLGWVANTMQNGRWNRGAFVRWLTHYVSQNGGWVVAVNPSNTSQLCHKCGARVSHPTHEVSVCPEHGVMDRDVNAASNIAARAVPRVAKARVTRAKNRKLQPQQPLKTPASRSSLKYPGGDRTKNKPTPKRKNHRRVSKGVILPLRPARAQVQRLEVMVLADQGACGALGTNVAALKQGNVAYKCRLCSLI

SEQ ID NO: 467 - protein, 434 aa, unknown
  TnpB Polypeptide
LLEAVKVALDPSLAQERLLASHAGAARFAYNAGLARVKAALDAGEVLDWAFFALVNWWNSCKDELAVGGDGKPWWSENSKEAYCSGLRSLASALSNWSKSRKGDRKGRKVGFPKFKSKSGSVPRFAYTTGFKLIEGDPKGVWLPRIGRVHCMENVAERVNGAKVLRMTISQRAGRWYVSLTVEREDKPVMKPPNGGAVGVDLGVKNLATLSDGTVVPNPRYLKKSERKLKKAQRELSRKTRGSNRRNKAKDKVARLHAHVANRRIDGLHKLTTRLAETFSDISIEDLHVAGMVKNHHLAKSISDAAFGEFRRQLEYKTARSGARLHVVDRWFASSQTCSKCGSVKAKLSLSERTYRCDSCGLVLDRDLNAAINIQVAGSAPEMLNAHGATVRRSDRSSGHATRVAVKYEPSVRRPGAVSLGAGDHKGALQTNVK

SEQ ID NO: 468 - protein, 425 aa, unknown
  TnpB Polypeptide
MLVQHRVVTECRSYQERVKAANGESSKYVSQGWKRTVDASAPGYGEDYVNLGAVDRCYAAIENNPFLDGEIVLKMVIQGAWYRLIFDFNNARFTEGKVALPVIKVEDGQPVFIFTVVTDNPVVQFSGDYTIGVDVGINNYATVVVRSVATGRIVYETALSQRVHSLWNSVQASEQQVRDLKVKAAALLRDRQERMAALDEARFHREAASRKKRELAILAAQEIANLSHAFDNTVVAVEDLSWVVNTMQHGRWNRGALVRWLAHYVSQNGGWVVAVNPAHTSQRCNACGAKVSHPTHELSVCAEHGTMDRDVNAAANIAARAAPRVEKARKTRAKNRKLRPQAALKTPVARRSLKYPGRDRTKSAPTPKRKNRPRVVREVILPFSPARVTVTRVLADCDAQGATGTCQAAIKQGNMTDEWRLCSLI

SEQ ID NO: 469 - protein, 389 aa, unknown
  TnpB Polypeptide
MVVRKVAQRIPFKPSKTQAALLEQCFGVRRFAYNQQVEAFNAYDKETNPRPTYPSTKDMKAANGWLRDSPIPSSALSNTIMDFRKAQSSYFRKAQYEKNRPRFASKNDKVQSFRNSSPIRRMEGNRYPLSRKLGSVRIRRRDRFRYPIESLSSWTVKRENGVYYLVLLFDVDVQPKPPVSGEVGIDVGVKDFLTLSTGEKINYPDRLHQLEGRVRWGQCKLSRRVKGSSNYRKQKAVVAKAYAKVRYFRENFQHQLSHKLIEDNQFIGMETLAVQNMTRKAKKELDANGKPMRNGQSAKRVMNRNILRNGWSSFAGKLAYKAQWYGRAFVQVDRFYPSSRLCHNCGYKYDELRLSEREWVCESCGVSHDRDVNAAMNILGEALRISQTG

SEQ ID NO: 470 - protein, 148 aa, unknown
  TnpB Polypeptide
MRRFATTARTSKHQVSHRLIEDNQFIGMETLAVQNMARKAKKKLDENGKPTRNGQSAKRATNRSILRSGWSSLVDKLSYKAQWYGRTFVQVDRFYPSSRLCNGCGHKYDGLLLSEREWVCESCGVLHDRDVNAALNILDEALRLIPKG

SEQ ID NO: 471 - protein, 326 aa, unknown
  TnpB Polypeptide
VQERRDSYRLERKSIRYVEQANQLPAIKKIRSDVASVHSQVLQDVLKRVEKAFDGFFRRVKAKQKAGFPRFRSHKRYDSFTYAQSGFALKDGKLRLSKIGDVKIKLHRPIEGKVKTLTITRSATGKWYACFSVECTPEPLPKNDRTVGIDVGLNSFATLSTGEQIANPRFFRTDKKALAKAQRQKKRQVAARIHERIKFRRNNFAHQLSHALVTLYGAIFFEKLNIQGMVRNHCLALSISDASWNQLIQCTTYKAADAGREVRTVDPRGTSQSCSACGAVVLKDLSQRIHDCSCGITLDRDHNAALNILALGLQCVGIKAKEAPSF

SEQ ID NO: 472 - protein, 564 aa, Scytonema sp.
LSIITIQTIAPNSPDNTIALDYLRDYALVFGQATRTAFSKRNRIGQNKTKESEIEKQICKELETRFGLSNSEAKNVYNKASAAYASQAELVDTYIDEAFDRIKGISKTIKKLEFKLSKAVASGQTSTVKKFKKKIHYKQQKINQLEAKIARLKKSKSDGTFSVTFGSSQLFEKQYSLERNGYKSHEEWLEDWRNARSNRSFFIGSKNFLSGNQLVRYDALQHTLTITCTPGLRAKYGDSVTLHDISFARGEEWLLAAIEPVRRTSTRNGKNGEKIETYRNGSNLPCTWEIVNRDGKFYINATLESPDPQLKSSLENGALGIDFNPGSIDWTLIDRHGNLKRHGSLKINVQDKRSLQTKDIIGKAVALLVRIALEYGVPIVIEDLDFAKTKASMKEKGAKYARMLSNMAYSQFTQMIKSRCLKEGVELIKVDAVYTSVIGTTKYMAVYGLNSGCAAALVIARRGQGRTEKLPNSLHTYFKKPEDFSKSGAWKKVARKINICGGYNRHKFYHPSHKKQVKTNSLLYGKLRQTKVSSRRDTVQVLVTPYIHQKPRAVGCPDLKGVNP

SEQ ID NO: 473 - protein, 395 aa, unknown
  TnpB Polypeptide
MELRMYEYRLYPSGEQQVKILNQFSVCKDVYNTLLDLNQKLWITNKFRLNSLVLDIKTTCPEYYTQVHSQVLQNISDRLAKAFDNFFNRLKLKKQGRKIKAGFPRFKSRIQSITYPQSGFKFLSNKRLQVSKIDSMPIVLHRLPKGKIKTLTIKRNNAGQWFAVFSCEVDIPVVEHPHPEAKIGIDVGLEKFLTDNRGQSIANPRFYLNAEKKLARLQRIRSKRVKGSKNREKSRIKVARQHLKVANQRTDFLHKLTNSLTRDFKIIAGERLNIQGMVHSNLAKHILDVSWGRFYQMLSYKAVTCGGELRKNPKTRGSSKRCSGCGAEVDMPLRKRTFKCPECGFVCHRDKNSAINHLNDTDGLSGISTPVEILPLPSVSRKASRVCESGTICNT

SEQ ID NO: 474 - protein, 380 aa, unknown
  TnpB Polypeptide
MMLNLVETHRNYKCRLYRCDKKDRKLRHKLFVASLIWNHFVALQRRYYRLTGQYISLMTMNKHVLKLRRTSKFKLWKGLHSQCCQDVCKRLDDGYQRFFKKLAKGRPKFRKARKYSSFTFPQSGYTVKDNTVSIDGSVYKFVKHREMGDLVKTLTIKRDKVGRLWLVFSVIEKIVVGEASTGESGGFDFGLKRFLVNDSGKHYPNPLYFTQDLRKTRQLNQVLSRKLPGSKHYKRARRELAKHNAHIANKRRDHQFKLAHELCDGYDTLYFEDLNLQGMKALWGRKVSDLGFASFLTILSWVAFKRAKTVVKIDRFAPSTKTCSSCGTQHQLTLRDRTLSCPCGLVIDRDHNAAINIRVFGALKTYQTVGKPQVRLRSRV

SEQ ID NO: 475 - protein, 402 aa, unknown
  TnpB Polypeptide
MKKAYKYRIYPTKEQEIFFAKTFGCCRVVWNKMLAEKLSAYEKGEPIPRITPAKYKEEFPFLKEVDSLALANVQLQLEKAFKNHLKNPKHFGLPKFKRKKDKQSYTTNNVNGSIKVDFEKGLLYLPKIKDGIKIELHRTFEGQIKSATVSKTKDGKYYVSILVETEEPRNKVIEPESKACGIDLGLEHFATITNDFGTYKVEHPRHLRRAEKRLKKLQKDLSRKQKGSKNYEKVRQKLAKLYAYISNARNDFLHKLSKAIIDENQVVVVEDINVKGLMQSNLAKSISDSSWSKFLTYLRYKAEWYGRTLLRADKFFPSSKLCHCCGYKKEDLALDERIWTCPVCGKTHDRDVNASINLYFVGLERPEVKPVEHALVDDHIPQGIPKKPSCVEAGSSTFYKVE

SEQ ID NO: 476 - protein, 390 aa, unknown
  TnpB Polypeptide
MYTLRYKLQQPKRLRRLHADLGTLCHVHNHFVALIRRHYRIYGKCDGYKHPRRNRLARHLTKLKRMAKYAHWRNPYSWTLLDLLDRIDKAYQRFFKKLAKRPSRFKRRADMQSMTFAKGQCKIERHQKKKAGGCPVAKIRLNGRWYKFWLSRPIVGDVQRVTVKQDNVGDWFITLLTDAEYTEDMPKTGTAAGHDFGLKTFLTSSEGSREQSPEFYRRSLKDIAYRNRRLSRSQFGSNHRRQRRVELARAHRKIARQREDYFWKLARRLVETFDWHFFEDLNIAAMKKLWGRKVSDLAFSKFLSIVKQVVRKCKKHVAFIARWYPSTKTCHGCGYVNDAITLRDRTWRCPQCQRHHLRDLNAAINIIKVGASTHELGTVRQAIACNCCSS

SEQ ID NO: 477 - protein, 391 aa, unknown
  TnpB Polypeptide
MTITVKCRLYPTAQQQEMLEQTLDGCRWVYNYFRNKPMSIYDMQFALTELKESHPWLRNYHSKMLQMVVHQIDVARSGLRVLSKRGKKTGKLKYAEECNTFVYNQTGFKIERHGDTDLLWLSKVGYVGEIRLHRRQPYNIKQISITRKPSGRWYANIVCEQSRPLVVPPINTSKSIGIDVGITKFVHDSDNHSVDNPQFLKKMLKPLRRADRKVSRRQFGSCNYKKAKGMRARLWERIYNKRHDFLHKLSTVYAKRYDLIFVEKLNIMNMVRNHKLARSIVDSGWTTFKAMLEYKAKLVFEVNSYNTSVDCSRCGNKVAKSLAVRTHRCDKCGLVLDRDYNASLNILQSGKALLGDGIGLPMGHGEFTPVEIAAQQQSLKQEEEAHELIRG

SEQ ID NO: 478 - protein, 183 aa, unknown
  TnpB Polypeptide
LIFKLFAKFGEFVIFSARSFQIEFLDCKLEGKYLKLPKMTAVRMKLHRPISEKWKLKSVTVSREPSGKYFASLAESFDAVCVEDLNLKGMAGGLHLGKGVHDNGYGLFLSMLEYKLEERGKYLIKVDRYFASSKICSVCGNKKEELSLSDRIYYCECGNRMDRDVNAAVNIMKEGKRIFAECA

SEQ ID NO: 479 - protein, 371 aa, unknown
  TnpB Polypeptide
MKLILQIKLLPIQEQFASLKNTLIEANTACNEISNIAWSKKLFNQFKLHHECYYRIKNNFNLSAQMVVRCISKVADSYKIDKKVKREFRPLGAITYDARILSYVKEGISMWTVGGRLKIPFVCHNQKYIPYIKGEADLVFKKEKFYIFQTVEVPEEDMKDIEEFIGVDFGLVSIATLSNGKEFNSKKLQDYREKRQKVRSSVQSKRTRGSKKLLKRLSGRERTTTSIINHTIAKQIVQIAKEENKGIAIEELKGIRFSSLKKGKKFRTRVGKWSFNQLRQYISYKAILNGVQVVLVNPRYTSKTCSNCHHIGNRKGKVFVCNNCGNNMDADFNASRNIAMLGASVNKPEKSDMYSCTLHYSDLKSFCFSSG

SEQ ID NO: 480 - protein, 469 aa, Cyanobacterium sp.
MILNYQYRCYPETPQKSQLNNWLRVCQYWYNVQIGDRFRWWEQNRSNYVIPNGDFCYISCSLPPLELRDKPNFYSQKKLLPEKKKDLTIVRHSGELLDFSIVPSQTLQDVSKRVNLAFTRFIKGDTNGSRSGKPRFKNRYRTLRIEAQAIKIKRVEKNWLYLQISKLSGWLKVRLHRSLPQGFSLKNILITRKADGWYCTLCLDDPSVPHFTPDIIIPTWDNSMGIDAVLYENDYLATSEGDKLPSVKSYRKNQKQLAEISQRKNAKKKGSKARRKLAKKEGRQHQRIARARKDHAYKTAHALVHSDKKVFFVEDLNLKGLRKRNKTKKDHKGNYLPNGQSAKSGLNKSWSDASFGQFFDIFSYIAEKAGAVVKKVNPAYTSQLLSYRDEFVFTDCSIRSYYDAIERIVVDRDVNSSINLKRVGLELFPTINRRSGKITKSKTDSTTKEVLAVLKGILEANALSSDERG

SEQ ID NO: 481 - protein, 423 aa, Cyanobacterium sp.
LRLVQRHIIRPDHKYYQYFDQQCYLSKNLYNLSTYRYRQHFFQTGQKLSFNDLYHQVSKTSAYYALPNTKVAKQIIRRIDQSWKGYFQAHKDWKRNPSKYLGEPKIPKYKDKEKGRYLLVFPIETISKPYLRKGIAKLTTCPIEFLTGLTEVVEVRVIPKTGCYVVEIVYEQESLKPSTDKAIAGGDIGLVNLITLTSNQTGTKPLLIKGGALKAINTNYNKKKAKLQQELEVKHGKKTSKRLNALTHKRNCRVDNYLHTVSRRVIDWCLLNSIGTLVIGKNDHWKQSINIGKKNNQQFVSIPHARLIEMLCYKGELMGIKVVVTEESYTSQSSFLDFDTLPSYGEKKPKFSGKRIKRGLYKTSTGKLINADVNGSYNCIRKHLQQEKVKSNAFHSHDLMALPFMPVTYDPLRTHNLNFLQIV

SEQ ID NO: 482 - protein, 385 aa, unknown
  TnpB Polypeptide
MKRTSIVELVVDKNSEERLRLLCNLSSKLWNEVNYARRRMFFEKRGVELKATYKEFYEKYKTLIGSATAQQILNKNDEAWRSFFKMLKLKKEGRLPPFIMKINPPGYKKKNNKRSLWSVLRKDQYKIEDDKIILKGLGVIGRIELRYKGLIHLKGEQGRLEIHYNPDRKRWYAHISFEVSEKVVRRVWTNVPKKPRGDLVAGIDIGINNLMAVYVENGLAKLVNGRPLKAISHYWRSRIAEYQSMLNKYGLKTSKRLRSIYSKWRRQVKSYIDSRVRHAVEWLYDMGVSIIKIGYPKYIAQENGNFNNVHIWTYGYLLRRIYEVAEEYGIVIVYVNEAYTSSKCPIHKEKCGKRVKRGLFKCTRLNKVFNADLVGAFNILITPSP

SEQ ID NO: 483 - protein, 567 aa, unknown
  TnpB Polypeptide
MARSAVTGVAGRKPRPSGRGKAGTCVNRASLLLDVLADDGQPRAAAGRGEVGRGPEMAVHDVSVHAAGELRSQPAGRYAFEGVHQCRDGHLWRILHQQVHVVVFPVELPQLRAEVLADLPHGVFAAGEHVRVEDSASVLRHEDQMDMERGNYVPATAVILRECHRPMIGSGAVQIRYRYRIYPSPGQRQALARTFGCARVVYNDCLRLRDTCHAAGEKISDTEVQRRVVTLAKQTPARAWLGEVASVALVQACQDARRAYRNWFDSLSGKRKGRKAGHPAFRRKHQRQSVRFTRNGFSLHGERLYVAKVGDIKVEWSRDLPSVPSSVTVIREPDGRYYASFVVEREATPLPACDRDAGIDLGLASLAVTSDGEVVPNPRFLRAKERKLARAQRALACKQKGSANRGKARHRVAVLHRKVRETRLDHAHKTALKLVRDNQAVYAEDLCVSGLARTRLAKSVHDAGWSQFLRLIEEKAAQYGREFRRVGRFEPTSQVCSACGVKDGPKPLNIREWMCAACGTVHDRDVNAAKNVLALGRRESLNACGGQVRPASVLAPAGETGTHWSAA

SEQ ID NO: 484 - protein, 368 aa, Psychrobacter sp.
MKTLKLRIKDKHITELNRLSGSVNYVWNYVNALSFEHLKRTGKFFSAYDLSEYTKGSGDCLGLHSQTLQAINETHAKSRRQFKKAKLNWRTSRPNAKRKSLGWIPFKKSAIKHLNTRQTGKKALKSTIGLSLSKGQKLIIDVWDSYNLSLYQINTLEIVQDRRNRWYACITVKDYPKQISGKGSVGIDLGLKEAATTSTGDKLQIKQTLKYAEKLAIAQRAKNKKRAKAIHAKIKNARQDIIHKFTTNLVQNNALIVVGDIKSHSFTNKKTKLTKSIYDAGWFEIKRQLEYKCKHAGCHLEMVNESYTTQICSCCRKISDSSPKGRAGLGIRRWTCAECSTWHDRDINAAKNILAVGLDRLAVGIPSV

SEQ ID NO: 485 - protein, 474 aa, unknown
  TnpB Polypeptide
VARPSSDSFRGYSGLQAGEETELLRSRAGKADPPPGRIGVHPTRDPTAHDRIVRLWTVSRTVKRAFRYRFHPTPGQAAELARTFGCVRLVYNMALAARTEAWTLRRERVTYNATSAMLTGWKKTDELAFLNDVSCVPLQQALRHLQTAFTNFFAKRARYPTFKSRKRSRRSAEYTASAFRWRDGRLTLAKMSDPLDIVWSRPLPEGAVPSTVTVSQDPAGRWFVSLLCDDRIEPAPATTAVVGVDAGLDSLFTLSTGEKIPNPRHERRDRDRLARAQRNLARKAKGSANRAKARLAVARVHARIADRRRDHLHKLTTRLVRETQTIVIEDLTVRTMTANHSLARAISDAGWRQFRTMLEYKTRWYGRDLVVVDRWFPSTRLCSACGVLADRMPLTVRSWTCRCGQAHDRDVNAARNILAEGLSVIACGGGVRPHRESSSRTGRSSVKQEPPGATQGIPVLRAGRIVNGACAIRC

SEQ ID NO: 486 - protein, 331 aa, unknown
  TnpB Polypeptide
MLKLKQKAYSIFELKLSYIKISSILTKLKQRKSWLCEVDAVALQQCLRDLDAAYIKFFNGAGYPNFKSKRGKNSYRTNGRNIYIDQDNKMIKIPKIGWIKFKDKSNFSGLTKINNITISKSSSGKYFASISAEVDITAFAKTKKSCGVDLGLKDFCILSDGAKFENPKFLVNNEKRLRMLKKSLSRKVHGSKNYEKARIKLAKFHEYIVNCRKDYLHKISLFLVKNYDVICAETLKVNNMLKNHCLAKAIQDVSWSEFCQQLEYKCLWYDKKFVQISTYFASSQLCSNCGYKNPDIKDVKIREYDCPECGIHHDRDVNAAINILNEGLNLI

SEQ ID NO: 487 - protein, 414 aa, Streptomyces sp.
MHLRYAFRIEPTPGQRMALARTFGCVRVVYNDALAARKAAYTADKSRIATGVLAKRVITDAKKTPERAWLAEVSVDALQSSLRDLDTAYANFFASLTGKRRGRRMGLPVLKSKKDNRQAVRFSRNGFRLRENGRLNLAKIGDVRVRWSRPLPAPPSSVTVVKDASGRYFASFIVEVEPEHLVPVEDEVGIDLGLTHYAVLSNGQVIDHPRFLRRAERRLRKAQQTLSRKAKGSKNRAKARLKVARAHARVADARKDWCHQTASRLIRDNQALYLEDLAVSGLARTPLAKSVHDAAWGMFRRVLKEKAARYGRHTGTVSRWLPSSQTCSVCWVVDGKKPLHVRAWRCEGCGTEHDRDLNASRVILAAGQAERLNAPGGPVSPGVEIPHQARPVERGTHPEAQPITTGSQAGSPVL

SEQ ID NO: 488 - protein, 410 aa, Halorubrum sp.
MYYGYKYRLNPPEALTETLLHHVDTCRQLYNHVLYKLNETDEIPARYKVQGQLPDLKSWWDDLNDVHSKVLQMVVKRVYDNLSTLRAQKENGRAVGMLKWKPPQEYRSLTYNQSGFELKNTSGRPVLRLSKIGEIPIHLHRDIPENATIKQVTVKREPTGEWYATFGIDVDEATSEKPENPRDVVGIDVGIVKYAHDTDGTAVESPDFSDERERLERAQRNLSRKERGSNNWEDQREMVARRHADLKRKRRDFLHKLSNYYAREYDLVAVEDLDAKGLIELPGNSRNRAGASWGTFLRMLEYKCEREGTHFVAVDPGGTTKECASCGTETDKPLWVREHSCPSCGFVADRDANASWNILSRGLDKVGVGHSESPPVETALPTDTTSVSAKRVVETGSPTLKERTASAVSE

SEQ ID NO: 489 - protein, 439 aa, Streptomyces sp.
MQLRYSFRMYPNGPQRSALARAFGCSRVVYNDALRARETARAEGAPFPRTGDLSKLLITEAKKTEERVWLGEVSAVVLQQSLRDLDTAYRNFFDSLKGKRPRMGAPRFKSRKDNRQAVRFTANARWKITTGGDLSLPKIGDVRVKWSRSLPSTPATVTVIKDAAGRYFCSFVVETEAHETLPKVTPEVGIDLGLSHFAILSDGTKIESPRFLRRAEKKRKREQRRLSRKAKGSNNRTKARIKVARAHAQVADARREFHHQLSAKLIRENQAVAVEDLAVNGLARTRMAKSVHDAGWSAFVTMLEYKAARYGRTFVRIGRFEPTSQVCSQCGVKDGPKPLGVRVWQCQACAAWLDRDINAAVNVAKAAGLAVSACRARVRPGPVPAQREEAGTHRDGQPTVVGIPALQGGERKSKLPDLRRAPRPAADHGRLRDARRRGS

SEQ ID NO: 490 - protein, 389 aa, Streptomyces sp.
MSRFRMYPSPAQAERMLTHCAHARYVWNLAVEQHAHWRPGRRSAPSFAEQCRQLTEARREHVWLGAGNADVQQQALKDFARAKNARFTSGFGEPAWRKKHVHEGFRVIGTDRVPECHADGSPKLNARTGRPVMGRSVVVRRLSRRWAQVRVPGCGWVRFRLSARGKGAKPPEAKTFRGTFRNGQWHVAFAVVPDPVPAPGTGGVIGIDRGVTVTAALADGRMLNCPQLTVKERAQIRKHQRRAARAPKGSPRKAAEYAKMARLRAREAMRRKDMVREDQHHARPHLRPGAVREAEHQEHDPLREGDRGAARQERGAEVRSQPVDPRPGLGPAPATHRAQGARPGRGRSRPVHESAVQCLWMDRQELAQEPSRVRLFRLRLHLQRGHQRQ

SEQ ID NO: 491 - protein, 451 aa, unknown
  TnpB Polypeptide
MQQIITAKLQLITTPTQFQALRTTQLAYRDALNAVGSYAFEHGKTSSNITLHRGMYAELRARYGLPSQLACSVERQVATTYKGLWTKLKKNAEHRRKKITRKRFKGLDKPPKYSSQTVHYTYERDYTFQRDSRVSLGTLNGRTTIPYQGYDKHLALIRCGASIGDAKLWYDKARETFYLLVPLEIEVPEPTYEQLSEVVGVDVGIRYLAVTSTGTGRATFHSGKRVRHKANHYARLRKRLQKKGTRSAKRRMRRIEQRERRLKLQANHTIANQIVKQHPHALIGLEQLTDIRERTTRRKRRRKKNGKGYEQVSPKARKANRVYSQWSFAELHDLISYKAALGGGLSIKVDADYTSKACPVCGHTADSNRPRKGLLFACQNPRCRYALHADLIGARNVTMRTLLVRQDWIRTGTLSMCPDASDNEAKAARLSRYAELRWSPDASLRLLAGGH

SEQ ID NO: 492 - protein, 427 aa, Escherichia sp.
MHQENTMLPRRISVSLFIDQSIIWPVKRLQAFKFQLRPGGQQEREMRRFAGACRFVFNRALALQNENHEAGNKYIPYGKMASWLVEWKNATETQWLKDSPSQPLQQSLKDLERAYKNFFRKRAAFPRFKKRGQNDAFRYPQGVKLDQENSRIFLPKLGWMRYRNSRQVTGVVKNVTVSQSCGKWYISIQTESEVSTPVHPSASMVGLDAGVAKLATLSDGTVFEPVNSFQKNQKTLARLQRQLSRKVKFSNNWQKQKRKIQRLHSCIANIRRDYLHKVTTTVSKNHAMIVIEDLKVSNMSKSAAGTVSQPGRNVRAKSGLNRSILDQGWYEMRRQLEYKQLWRGGQVLAVPPAYTSQRCACCGHTAKENRLSQSQFRCQVCGYTANADVNGARNILAAGHAVLACGEMVQSGRSLKQEPTEMIQATA

SEQ ID NO: 493 - protein, 249 aa, unknown
  TnpB Polypeptide
LPKDAKPTTVTITKDCANRYFVSLLVEEDIQPLPVINKMIGLDLGIKSMVITSDGHTYGNPKFFSQDEKKIAKAERRKAKKKKGSKNRNKARLKVARLHKKVVDRRRDYQHKLSTQIIRENQVVCVESLQVKNMVKNHKLAQAIQDVGWSEFVRQLEYKAAWYGRTFVKIDKFYPSSKRCFDCGHVLDSLSLDVRVWTCPECGIVHDRDINAAKNILAAGLAVSACGEAVRPGRVKTQPGKPRRNRKAQ

SEQ ID NO: 494 - protein, 403 aa, Moorea sp.
MIILEFKAYGNKKQYKGIDEAIRTVKFVRNSCIRLWMDSKGLTKYDLNKYCKTLAKNFPFANELNSTARQAAAERAWSSIARFYDNCKKKVPGKKGFPKFQKHCRSVEYKQSGWKLSPDKKSITFSDKKGIGKLKLKGTWDLWRFDKKQIKRVRIVRRADGYYVQFCVSVDINEQLEPADATIGLDVGLKYFYTDSRGDSEPNPRFYRTGEKRLKFYQRRVSRKKKGSANRKKAINRLGRTHLRISRQREEHAKRLARCVIRSNDLVAYEDLRVKNLVKNHCLAKSINDAGWYQFRKWLEHFGKKFGRVTVAVNPSYTSQNCSHCGEEVKKSLSTRTHICKCGCQLDRDHNAAINILKRALGTAGHVGTWILDPNACGDLASTLLGSDQVEQAESMKQESPRL

SEQ ID NO: 495 - protein, 403 aa, Moorea sp.
MIILEFKAYGKKHQYLAIEEAIRTVKFVRNSCLRLWIDNRGISKYDLNKYCRVLAKDFDFASELNSTARQAAAERAWSSIARFYDNCKKKVSGKKGFPRFQKHCRSVEYKQSGWKLSPDKKSITFTDKKGIGKLKLKGTWDLWRFDKKQIKRARIVKRADGYYVQFCVSVDVKEQLKPADATVGLDVGLKDFYTDSRGKTEPNPRFYRTGEKRLKFYQRRVSRKKKGSTNRKKAINRLARHHLSISRRREEHAKRLARCVVRSNDLVAYEDLRVKNLVKNHCLAKSINDAGWYQFRKWLEHFGQKFGRVTVAVNPAYTSQNCSDCGEVVKKSLSTRTHICQCGCQLGRDHNAAINILNRALGTVGHTGTWVIDPNPCGELTSTLPDSGLVEQVGSLKQESPRL

SEQ ID NO: 496 - protein, 496 aa, unknown
  TnpB Polypeptide
MNYNYRYRLKPTESQRETLYYHRDTCRQLYNHALYRFNQIPEDEGTVEQRVRKIRDELPDLKDWWDALTDVYSKVLQPTVMRIAKNINALGKLKEQGYKVGELRWKSPREFRSFTYNQSGFELDKKSGQTVLSLSKLADIPIQLHRALPEDVHKSDSSCAAHQKSPISEDATVKEVTLKKEKTGEWFAIFGVEMDTEPPAKPPLADIDPDGMVGIDVGILKYAHDTDGTAVESLDLLEERDRLEREQRKLSRKEYESNNWEKQRQTVAECHKQIKRKRRDFLHKLSAYYAREYDLVAVEDLDVKGMLESPGNSRNTASAAWNTFTDLLEYKCKREGTHFVEVDPEDTTKECASCGVKTDKPLWVREHSCPACGFEADRDANAAWNILSRGLTDLGVGHSEGTSSESPCDSDGLRKSLSDFRTPVETALPTGTAVVPAKRVVEAGSPICSRARSARSHGQRDLRSRTTLSERSEAQSASDHSSGQSPREDVSASRVG

SEQ ID NO: 497 - protein, 275 aa, Mycobacterium sp.
VLAITVRRNGTRIDASVRVLVQRPQQPKVTDPGSRVGVDVGVRRLATVATADGAVLERVPNPRPLDAALNELRHVCRARSRCTKGSRRYRERTTEISRLHRRVNDVRTHHLHCLTTHLAKTHGRIVVEGLDAAGMLRQQGLSGARARRRGLSDAALGTPRRHLSYKTGWYGSQLVVADRWFPSSKTCHVCGHVQEIGWAEHWQCDSCSASHQRDDCAAINLARYEDTSSVVGPVGAAVKRGADRKTRPGRAGGREARKGSSRKAAEQPRDGVQVA

SEQ ID NO: 498 - protein, 416 aa, unknown
  TnpB Polypeptide
MAVQSRVYPAPAQLPGLQEHCGQARYVWNLAVEQQSWYWPGRGSAPSSAERYRQLAEARRAEPWLGAGSSSVQQQALRDFDRAMAAFFDAANPARKPDYRSRRGIQGFAIRDTTARRLNRRWGEVFVPKVGWLRFRWTRQLPGKLGVSRVTCDRAGRWHVSFPAPQPAVEREPTGRPVGIDRGVRTALVTSSGQHYRAPRISDRRAARYVALQRKLARQRKRSKSRERTRHQMALISARVTDRRKDWAEKISTRLVQGNDIIVLEKLNTSGMVLRPAPKPDPDKPGAFLPNRARAKAGLSRGILASCWGQLGQRLQDKAGASGVPVVFVDPRFTSQQCHACGHAQPENRESQAVFSCVACGHLDHADRNAALNILARGLQLLATGELVPAHAPGHGAACSRQSALPAAAGTTLEAA

SEQ ID NO: 499 - protein, 114 aa, Okeania sp.
LIRENQTVVVEDLAVKNMVKNHKLARAISDANWSELVRQLEYKAEWYGRQLIKIDRYFPSSKRCSNCGHVVEKLPLNIREWDCPECAAHHDRDINASINILAAGGAVSVCGARF

SEQ ID NO: 500 - protein, 419 aa, unknown
  TnpB Polypeptide
MKANTGRRYRLYPALRQAERLTNWGHTSRAVWNVALAQRQFAWTQRGVTLRAVGQNRQLTEARAELPWLADLPAQSAQQVLRNLDAAYDNWWNPQHPAGSPKFKKRGTHLSVALPGQSVAVRALNHRWGQVRLPKIGWIRFRLSRPFGGEIRNATVSRDALGWHVSFGVATRERPAVANGLPGCGVDFGVACSAFVSDESTPRRMPSTLSAGEWRRLLSLERRKARQLRWAKRHNAGRYSKRLRRSINEIAKLRARQARRRADFTHKFTTDVAKRHGWVGIEDLRVVAMTASASGTIEMPGRNVRRKATLNRAILDNAPGERRRQLAYKTRRFGSELRLVAPAGTSQTCAACGHRDPASRPGCGRVFACTDCGYQAHADANAARNIEALAAGQAVNRTRSHPRVARPSSRMREPLGSVA

SEQ ID NO: 501 - protein, 395 aa, unknown
  TnpB Polypeptide
LYRVLNVNRKVPLSACTLTEKLGKSPVLLGRLYCISLKSILTLANISYGIIRQEDRAMFNLTYEFKLKPTARQAAIFEDWLEQCRRVYNYALAERKHWFGSRSCRINACSIRSEFIIRAETKRPTYASQCKSLTTARANIPALADVQSSVLQQTLRRLEKAFVSMWEQKHGFPRFKKAGNMRSLVFPQLGVNPVQNQAVKLPKIGWVKFHQSRPIPDRATIKQARVVRRVSGWYVMLTLQWDVSVPNPMPHGEGLGIDVGLTNFIATSNGLLVKRQRFFRIRRTQAKTLLQQRVSRKTLGSNNWRKAQKKVARLHEYVANCRKDWHRKLSHQICKGVGMIFVEDLNLIGLSRAMLGKHCLDAGWGQFFTIKRANLPKTWRVLPEGKRTQDKPNLP

SEQ ID NO: 502 - protein, 430 aa, Actinomadura sp.
MVTIMSEGGLVKRRSGHRARLTLSPNQVAKLDEQAHAARALWNLLHEWWTLLPKHKRTLAAANAAIRQARKDIDWLAVLPAQAAQAVLRTYHQAWTNCWKGLACAPNFKARFRTPMSVDITQERRMRIVRVHRRWGMVTIPKVGRVRFRWTRDLPIGRHADEGNRVTGARLIKDALGWHIAFRVQTAHLRPGVHPGPEVGIDLGIAVPLALSDGTEFHHGDWLNDKEKATLLCLEQHAARRKQHHKPGEKTSRRLQHTYDQMAGLRARAKRRALDWQHKTTTDIAERYGTVVVEALKITNMVASARGTVDQPGKNVAQKRGLNRSISAESWGRMIGMLAYKTVRRGGTLHKVPAPGTSQRCSACGATTPGSRQSQARFVCKNTGCGWSGNADHNAARNILHLYRIGLVAVPAAGRCSRQAHKRVKPATAR

SEQ ID NO: 503 - protein, 371 aa, unknown
  TnpB Polypeptide
VSQRIQISFPGFQDRQHSRWSKQSVTDFKNWLASLREYKKHPEKYLGKPKMPRYKKSDLTTVIITNQDAVLYRDDIGMSLKLPLQKQRLYFSNLSSDPVLKEVKIKPYYGRFLLCLTLEEPDVAFDPSGSHVCAIDLGTDNFAAIVCDDHSSAIYKGGAVLSKIQWFHKQRAKYVSIITKGHEKKHAVSKRLRDLSFHYANFVKDQCHKISRSIIDFCMEHQCGTLILGVNLLWKQRSNMNKINNQNFVSMPITLLRTMITYKALNAGIRIIEQEESYTSKADLIANDRIPTYGVDDKDASFSGKRIKRGLYRCSNGMILNADCHAAANIMRKAIPDIWKDTRDYTFLSAPDVYGFHKLNPKGIPVKGIAA

SEQ ID NO: 504 - protein, 319 aa, unknown
  TnpB Polypeptide
MPVFYRDVMYREEKEGKDEAYLKLYDGHDWKWFCVRLNHTDMEYLRRNWWGKKASAPTLEKRHHKYFLRFSYTEEVTLTKTPVKEQIICSVDLGINTDAVCTIMRADGTVLGRKFINHPSEKDRMYRTLGRIRRFQREHGSAQSRGRWAYTKRLNIELGRKIAGAIVKNAEENHADVIVFEYLEMQGKISGKKKQKLHLWRKRDIQKRCEHQAHRKGMRVSRVCAWNTSRLAYDGSGSVSRDSKNHSLCVFQTGKKYNCDLSASYNIGARYFIRELLKSLPVTERSLLEAKVPSVKRRTSCVYADLKELHLQMEILKAA

SEQ ID NO: 505 - protein, 207 aa, Geitlerinema sp.
VRLVYNKALAARSQAWKERQEKVGYRETSKMLTQWKKEEALQFLTEVSAVPLQQGLRHLDKGYRNFFGGRAKSPRFKKKRNGGSATFTKAAFRWRDNSLYLAKCNAPLDIRWSRQLPKGAEPSTVTVRLDPSGRWHVSILIDDDTVKPLPKSEKSVGVDVGIAHLAITSDGEKVKNPRLYSEQPTVSSGHCSLLAVHCSLKKRWDTP

SEQ ID NO: 506 - protein, 402 aa, Paenibacillus sp.
MCYNLDEVVIPILVHKAYKFRIYPNKEQATLMNKTIGCTRFVFNFFLAKQLEKDAYWHIVEEMKQSGQLPSNEWKGEFFNKYEAIKGVRELKHHYPFLKEADSIALQKSLENLNDSYTRYYKKQNDKPRFKSKKNAVQSYTTKQTNGNITVSGNHIKLPKLGLVRFSKSREVEGRILNATIRLNPSGKYFVSLLAETEVQALPRTHSACGIDVGLKDFAVVSDGTVYPNPKWFRRLEHKLANAQRILARRTKGSSNWHKQRIRIARIHERIANSRNDYLHKISTEIVKNHDIIGIEDLAIKNLLKNANLAKVISEGSWSQFRTLLAYKASWYGKQVIAVARNFASSQICSCCGTKNKDVKNLALREWECPICGSHHHRDLNASINLRNEAIRLLTVGTTGIA

SEQ ID NO: 507 - protein, 394 aa, Nitrosopumilales sp.
MILTRNYKFRLYPNEVQEKKLQNNLAVCRWVYNKFVEHAKNGFVSRNDCNYYLTELKQAESWLYNYHSKMLQAVSTQIDGSQKAIMELSKKGHKTGQLRFCRYSDYRTFTYNQTGYKFEQCGKHRYLHLSKIGHIEIRLHREIPANSKIKQVIVTKSKSRKWFACITLDIQEPLIPKKIFCKCVGIDVGIKSFTYDSDDNHTPNPRNLQKMLKPLARIQRKVSRRKKGSNNRLKAILHMQRVHEKISNKRKDFQHKLSTQYARNNDVVFIERLEKTNMMKNHRLAQSIADASWGSFVQKLEYKCRMLVQVPARNTTIDCSRCGNTVPKSLAVRIHKCNKCGLTSDRDYNASINILQKGLKIFNHDKLPQELRKVTLVENPNGSMKQEEIIQFVG

SEQ ID NO: 508 - protein, 403 aa, unknown
  TnpB Polypeptide
MLIRKAFKFQLMPNGAQQRDMRRYAGNARKVWNLAFAQQQANYAAGEKFASAMAMTYWLPAMKETFAFLKDSPSQTLQQVTTDLAFAYKNFFAGRADFPKFKKKGKSSDSFRFPQGFKLEPHNNRAFLPKLGWIRYRNSRDVVGTIKNITVSCTNGQWFASMQTEQEVAQPLPTATTAVGIDVGISRFATLSDGTFIAPVNSFKQHQVKLARYQRSMSRKKKFSKNWHKAKSKVQKLHTRIADVRKDFLHQTTSTISKKHAIVFVEDLKVSNMSRSAAGTIAKPGLKVRQKAGLNRSILDQGWSEFRRQLEYKQAWNGGWLDAVPPQYTSQECPCCGHTAKDNRKTQAHFVCMDCGFAEHADLVGAINIRRAGLARLACGDTSLEVRASAQESTEDTSQLLAA

SEQ ID NO: 509 - protein, 396 aa, unknown
  TnpB Polypeptide
MRVVETLKVQGLPEEGDEFLEFLRAFRDYTQYIIDRVWNEKNIPSIKTLHKRFYYELRGKGFRAHHIKQIYYHARSIVKAVKKVKGNKPVLKKLTARVDKYDYKLNLKSQELVVKILNGREVKVKLVAPKERFIKYMNWNNYELVIKYDGLRFWVCIEFSREVKQYTPWSILAVDANFGNVTMVVVRGRKILSIKRFNFPLRKALTHRIWIERIQKRHSKQWRYVKGIREAIRKHGRRMRNIVNDSCHKIAEELTSIALERRSLIVVENLKNLRINGKKNSRFNKKLSLWAYRKLLSYIEYECLEKGIPLVKANPKKTSKLCPRCNGKLTSLKGRILKCSRCDFIGDRDVIACFNLISRCGVFGVTLNAPDGDVNSNPMKGNQNEGMKFIIKCHKT

SEQ ID NO: 510 - protein, 322 aa, unknown
  TnpB Polypeptide
MLQTTPAQYKKAYPYLKEVDSLALANVQLHLQTAYKNFFRDKKTGFPKFKSAKHCRKSYTTNCQNGSIRIENDRIRIPKAGSVKAVLHRLPEKDWKIKSATISQYGDGTYYISVLFEYEETPVSPVPVTEEQVIGLDYKSAGLYMNSNGKCQNMPGYYRMAQMKLAKKQRKLRHKVSGSRNYQKQQKRIARVYRHISNQRKDYLHKLSTATAKQYAYVCVEDLNMRSMSNKGFGNGKSTLDNGYGMFLSMLDYKLAERGGKLVKVDKFFPSSQICHCCGCRNPEVRDLRIREWICPDCGAVHDRDTNAAINIKTEGMRLLAA

SEQ ID NO: 511 - protein, 400 aa, unknown
  TnpB Polypeptide
LYSRGDKSKEGNLNLRLVNLNNQWYLRINLGNGEYVWASVIRSAKRKTDKWIDFISSLEHSEKTGDWFPYTVRLKLRNGKIYAQFSREEKLPEVTITKDNGVIGIDINAYPFHLAIVHTTKDGNLEKYERISLDKLLEGNSEKREYLSWQVVHQVVGIAKRERKAIVVENLEKLPKGKRGDGLPKLRQKLQKWIYKALLQKIEIVAKRNGIQVIKVNPAYTSIIGKLKYAPLYNIDKDTSGAYVIARRGLGFKERLPKNYKDLLKDAEFLSYAIAKIEDKIAKLKQEIREEKKEYKRNRLKSVLWKTRKELDTLLRYLQGSGGSESAAQQTVNRKMERVRGSTQVEQKSWQVLSVALAFSCLESFRDLSPLKRVILTRDWVGAAKRNGLVPPYLVRGRVY

SEQ ID NO: 512 - protein, 293 aa, Moorea sp.
MFVLEFKVNPKPTQISAIEEAIRTTQFVRNKALRYWMDHRGVGKKELFRYNTLLRKEFKFVEDLNSHACQVGIERVVRAINRFFENCKKSQPGKKGYPRFKKRSRSVEYKISGWKLSQNRKHIEFTDKKRIGRLKLIGSRDLNYFQPEQIKRVRILRRADGYYVQFIIALDPRDIVPAIEPSQKAVGLDLGIKYFLAQSNGQTEPNPQFYRKSERQLNRANRKKSKKFRKGKPQTQNYIKARQRYARKHLRVSRQREEFAKRVALRLIQSNDLVAYVRAACRSRSVAYGQGKT

SEQ ID NO: 513 - protein, 387 aa, unknown
  TnpB Polypeptide
MMQKAFKYRLFPTKDQEQLLAQHFGHCRFIYNWGLNQKLTQYQELGKSDSCITLINKLTQLKKQEDTIWLKDINAQSLQMSLRNLDNAFTRFFREKKGFPKFKKRNNRQSFQCPQDCSIDFENELLSIPKFKGKNQIKVRVSRRFEGKIKTVTVSRNPSGKYFVSLLVEVPQELPQKPVVREDRTIGIDLGLKDFATLSTGEKISNPRHLKTTLTKIKYQHYKLSRTKKGSNRRDKARRSLAKTYEKIKNQRDDFLHKLSYRLTHENQVDTICMEDLNIQGMMKNHKLAQSISDVSWSRFVELLRYKCEWYGKNLFQIGRFEPSSKMCTCGKLNNDLKLSDREWTCSGCGVTHDRDILAAQNIKRFGLIRLDSVPWEARESTLVETA

SEQ ID NO: 514 - protein, 450 aa, unknown
  TnpB Polypeptide
VHRTARAGLRLTRGQRRRLSGLLVSAGDVWACVLELNAWRRARQDAPLVSYQGLCRELAASGPGCFGELDSVGARSVLRRYSDAWFAAAARRKKGDISARFPRRRRRMMPVRWYHGIFAFDGRRLRIPVTRGCPPLWVRLDRDLPYPAAQVRSVTLLYDAGRLWADVTAEVPVAAYPPGAEPDRGRVAGVDLGIIHPYAVAGPDGQALLVSGRAVRAEHHLHLKDTKARRRAVARRAPKPGQRGSRRWRRYRRRQRVVEARHRRRVRQAQHEAARTVIGWAAERRIGTLAVGDPRGVLGIDAGRRHNRRTREWRVGHLITALRDKAQQAGITVALLDERGTSSTCPACRARVPKPRGRVFCCPRCGQSGHRDLIAAANIAGRLPGGTTPAIPADVTHRRAGNHLPGVSAARRDPRRRPHHGDARGSPGRHLPAPPTTVGRGVARPTARTS

SEQ ID NO: 515 - protein, 248 aa, Gammaproteobacteria sp.
MILGDHQRKILASGLPKEAELVFRAGQWFFNLAVESADGERVASGPVMGVDVGENTLAATSTGRVWGGETLRHRRDQHLALRRRLQSNGSQSAIQRLRQVSGKERRRVKHVNHETSKAILEEARRIGAATIVMEDLTHIRDRLRAGRRMRARLHRWAFQQLQSFVQYKARAVGICVVYVNPAYTSQTCSACGQLGTRRKHRFECSCGLRAHADLNASRNLARIGETAVSPRAVVNTPDVDCVACHASP

SEQ ID NO: 516 - protein, 432 aa, unknown
  TnpB Polypeptide
MDRQSARKLTKQKRKSQTCKVYEIKVDKSHLSQKSINHLHSLFTEAKWFYNYVLSNKNINDADYTIKSVQVKVKDQFEERKFTVLKGQMKQSIKTRTFGSIKALSSLKKKGKKVGWLKFKSFVNSIPLVQLGTNKHSGTYYLDNSLSRIRIQGMTQWLRVRGLEQIKDGVDIANAILVRKDNDFFLQVTTFETKEQKLVPEQSIGIDFGCQTQLTLSNGIKIEFQVPESDRLKRLSRRIDKKVNGKTGKNRGSKNRRKLQAKRRKEYGRLTNKKKDIKNKVVSVITKNYKYVCFQDESISAWKAGGHGKKIQNSGIGGIISDLKHKSETPVMVDKFFPSTQLCPQCGCLNKLHVRDRTYKCACGFTEDRDFKSAKCIKVEGMKKLKIPTDYRNFKPEENWSSACFDLLINIGGIKVSKTGSMSQEATGLAPS

SEQ ID NO: 517 - protein, 354 aa, unknown
  TnpB Polypeptide
MKANNILIRRSKLNINYANQGKLDVLDSLMNESIRVVNLYINIYWNSLLNGNCPKFSTTKVDTWLSARMQQCLGKQALAIVKSQRKKKIKTKPVFNKSVIELDERFVDIKFDENIFDIWVRLKSLGQGIQIKLPSKKHKHFLKYYENKKWKLKKAIRLYKDSKGRFFIDAFFERETPEPKQFGEAVGIDIGYKKLLALSNGTCLGKTLEKVYEKISCKKQNSKAYKRALQERDNIINRELNKLKLNTVALIVVELLKNVKKNKRKEKKISRKFMNKLQRWCYSKVLDKLQRLCEETGIELRFIDPAYTSQRCSKCGVICKSNRKGEIYKCACGNIMDADINAARNILHLGVYSP

SEQ ID NO: 518 - protein, 415 aa, unknown
  TnpB Polypeptide
MDVRRTVPVKLDVSDADAELLHDTFAEFRDAANYVVSHARDDSGNIETSKQRLHERTYSEVRERTSIQANLVQAARSRAADALKGVLARWSDGDYASLPTFTADFAEYDKRSATFHEDHVSLSTVDGRVEVEYVLPPDTDGTPFGEYVASGDYSVGGATLHHRDGAFYLHLRTTAEVDEPDPAEHPTVLGVDLGIENLAVTSTGTFWSGGLLNHRREQYEQVRGGLQQTGTESAHRTIESIGDRESRWAEDFLHNLSKEVVAEAVEHDCSTIAFERLNGIRSRMPRAKKFHTWAFNQLYEYVEYKAEAVGIDVTQVPPQYTSQRCSKCGHTARNNRPTQADFFCQNCGYEVHADYNAAKNVGFKHVRSGQKSPTGRANRQLALKQGALSANGEFSPASGESRDGQSGSSPASSAL

SEQ ID NO: 519 - protein, 421 aa, Veillonellaceae sp.
MYFLAGCMAYGNTKNRLKGTRLLLKAFKTEIAPTEEQKEKIIRSIGVARFMYNQYIAYNRRLYKMYQRGLLDEKQKHFVTANEFDKYVNHKLKKELPWIDQCGSKARKKALVNAEQAFKRFFAGVSGFPNFKKKANQDVKLYFPKNNKGDWTIWRYKLMIPTLKQVRLKEFGYLPIGAKVTNGTVSYVAGRFYVSVVVDIDEKSKYNNDLESCYAIRTEGIGIDLGVKDLAIVSDGRVFKNINKSSKVKRLEKRLRREQRRLSRKYEFRKKKGGKPATASANIEKQKLKVQKLHQRIARIRKDYENKTIHEVVKQKPRFITMEDLNVKGMMKNRHLAKAIAAQRFNHLLAKLERKAEIIGIELRKVDRFYPSSKTCHACGHIHKGLKLKDRVYVCPECGYTADRDYNASLNLRDAKEYRVA

SEQ ID NO: 520 - protein, 405 aa, Herbidospora sp.
VGSDTFIRVSRYRLSPTPAQEAALAEHCGHARFVWNLAVEQHSFWKPGGGSAPGFAEQCRQLTEARTEFEWLRNGSVVVQQQALKDFAQAMANFFRRTHNRPTWRKRGQNEGFRIVAITPSDVRRLSRHVGEVKVPKVGWVRFRWSRSVPDGVKSYRVTWDRAGRWHVAFAAIPEPIPAPGRGEVVGVDRGVAVAAALSTGEHLVMPTLRDTEKARLLHLLRKLARAKRGSNRRRKVKQAIARVRAREIDRRKDWVEKTTTMLARRFDVIGVEDLKVAAMTRSAKGTIERPGRNVRQKAGLNRDILAAGWGRLDARLKDKASVRVVKVNPAYTSQTCNRCGHRDPDNRESQAVFRCRACGHQENADVNAARNVRDIAAGHAVNARGGDRATGPMNREPQLVLLSA

SEQ ID NO: 521 - protein, 436 aa, unknown
  TnpB Polypeptide
MQIQKTIKFKVGELSNAKKEKLSKVLDKSLSCLKDIIQISIIENTISNKKIHHLCYKDMRKKYKLPACVIHQCRNKAVEIMKSYNKNNRRLKGKAGLPSPKALRIRYDNVVFNILKTESKKFEYFVSFLITSGYKKDNSRIYIPLIVNSYYQKEYIKDLVDKKYKLCASDLVKKDKDYFIHITFSKEINTSKLNSSFQPIGIDIGINNLAVVSVAQQKNPIKFFSGKRLIWRLKQTQKKNAEFQKNCNLRLQRKLNQELVDYRDFLNHQISSYVIERAKQLEKPVIVLENLKNIMKTTKHRKKYKNIFFNWCFRKLQEQILYKANWEGIPVLFIEPNYTSQICLKCFSINKRVKHNYKCSHCGYSANSDFVGAVNIRKKFFEFIQFEEQASINYALNTTCSESKALKIGSVQNSIKMENVSPPNPEGMGIRNIEIL

SEQ ID NO: 522 - protein, 360 aa, unknown
  TnpB Polypeptide
MEYTYTYRIYPTVEQEILINKTFGCCRFVYNEFLNDFNNNGYISKYNKNNKCNKVLKQEYVWLKEVDKFAISNSIYNLDNSCKRYMNKLGGKPKFKKKNGLQSYQTNYTNNNIEVLDNYIKLPKLGKVKAKIHRNIEGRIINATVKRYGNNKYKVMILVKKEIKPKDKNSYIVGLDMGITSFVTDNIGNTYDAPKALIKTYDKIGKLQQELLRKKKGSNNYKKLQNKINGLYDRCNNIRNDFLHKLSTTIINENQVIIVEDLNVKEMFQTKKIAKVLGDISISKFINMLEYKARWYGRELIKVNRYYPSSQLCNVCGYKNTEVKDYYVRNWYCPRCGEFHDRDINAANNILDKGIEMLFA

SEQ ID NO: 523 - protein, 113 aa, unknown
  TnpB Polypeptide
VKENQIICVEDLAVKNMIKNRRLSRRIHEAAWGEILRQLTYKSLWYGRTLVKISRWYPSSKSCSTENCGYVMSKLPLSVRSWVCPSCGTNHDRDINAARNIKASGLLVLASRV

SEQ ID NO: 524 - protein, 232 aa, unknown
  TnpB Polypeptide
  misc_feature (207)..(212): Xaa can be any naturally occurring amino acid
MKTGAKYRFYPDKEQEMLIAKTSGCTRFVWNHILAFRNEQYQQGVKLNSKAISKALTALKREPENTFLKEVSMVPLQQTLIHQNKAFVKFFNKKAAFPVFKKKHNRQSFTLMKNAFNIENGQVFIAKCKTPLNIVWSRKLPGEVSSLTISKEPSGKYFISFVCEKTIKPLPVTSKICGIDIGLKDLLCFDNGDKVKDLKSYLKYEQXXXXXXKEKNWALNLATAVAKGKSSE

SEQ ID NO: 525 - protein, 415 aa, Nonomuraea sp.
VNAALRRRILSVLITRLIGVSRYRLAPTPAQGQALLEHCGHARFVWNLAVEQHAHWRPGRRSSPGYLEQCRQLTEARAEFAWLRAGSQMVQQQALRDFAQAMAGFFAGTHGRPSWRKQGRHEGFRVVAVKPADVRRLSHNVGAVKIPKVGWVRFRWSRAVPEGVKSYRVTRDRVGRWHVAFAAIPEPIPAPGTGQVVGVDRGVAVSAALSTGKMLSVPTLSEAEKRRLALLERKLARAKKGSERRARLKSDIAELKAREVDRRRDWAEKASTELARDFDVIAVENLNIRGMTRSARGTVEQPGRNVRAKAALNRGILAAGWGRLVERLEHKVAGRVVRVDPRFTSQRCSACGVVDREARESQAVFRCRSCGYACNADVNAARNIRDTAAGHAVAARGGSPLGRPVNREPQPVLLS

SEQ ID NO: 526 - protein, 402 aa, Nocardia sp.
MLTGRRYRVAFTAEQAALAEETGAACRAVWNTALEQRREYRRRDAWVGYQQQARELAEAKAEHEWLKCAPSHCLQQTLMDLDRACRERGTFAVRWRSSRRWSPSFRFPDPKQILVERLGRRWGRVKLPKLGWVRLRWSRALGGTVRSATVSRDGNHWYISLLVEDGQVTPDQHVCASVVGVDRGVAVAVACSDGGMYDRAFTTAGEQKRYRKLQQKLARQKKIGANRKRTLAALRVLKRRERDRRRDFAAQVGNRLATLHGTVVLEELNTRAMTASARGTIAEPGRRVAQKAGLNRAILAKGWHRLELALRNAARYTGTQIVKVPAAYTSQACSRCRSVDPVSRESQAVYRCTGCGHCENADVNAAKNILAAGLAVTACGDLAVGRSVKQEPPTLEVGIPRH

SEQ ID NO: 527 - protein, 407 aa, Gammaproteobacteria sp.
MDREVRNVTYRLLPCTKAKAHALSRLAGACRFVWNATLDEQDRLLEIARREGGEKPSTSFFSLGTRFKSLRDQTPWLRELPYAPVRYALKHQSDAWRRFFDGKGGRPRFKARRGDDGVTIPDKVRIFRGRIRIPRLGWYVLRRHGGNPYPDGIAKQARVTRSCGRWYCTVSYEVDIEEPLENGLALGMDRNAGQVALSTGDIVPLTDLARHEARKRRYQRMMARREDGSNRKRKARHLVAKSSRKIARKRRDWCHQVSRMCADTASEVVIEDLDIRAMTSSARGTADEPGTNVKAKSGLNRAILSSGWGLLEGMLSYKTRELTKVPAPYTSQTCHACGHRNSENRKSQSRFECAACGHEGNADVNAALNILASGSGATGRRGALALATPMIRQHLHCVANNPTPNCN

SEQ ID NO: 528 - protein, 319 aa, Microcoleus sp.
VLKRQKGYSIATKSAKAKLIRNGFDLQETKSAYNEVVHFYFLLVDEDPTGLSIPVTENGGWRYYELKTQGNPFVGGFPSPLKRAAIRQAIGAWESWHSNYQRWLNRPKKHRHHKPPVRSRSFNFNPQYDAGMWKNDDGSSLMLKLLVNGAWKWVKHQYQCWDIPPEWVKGSPRVQVTGSSLWLVFPLEKYVAATGGIKTIMSSSTFRTCGIDMDLDRHIAICSILETNDRGETIEVARHFINQSRHVARRKRDLGRIAVKMGQTGAIERGFSRRYWERLSAREREYSRAVSREIVEFARHWKARVISFEHLGNFAPQTR

SEQ ID NO: 529 - protein, 447 aa, unknown
  TnpB Polypeptide
MTENKPQETLALTLKLKILPESQNQVTSFKQTMITYKDACNIVSQYIFDNIPKAAETKSMSSLLSAMNLQKVATINGKRIYTILTNDLELPSQIACEVFKTVVSNYKTVQTMFKKQTVPDGYQYDDNGDILLYKKGKHKGEPKLAYIYKDLTFLPKPLCYEKPQLALPVARSYSFVNDFSRASISVMNNRIKLPFKLTAKQKELFTNPNWKRGNARLVQTGKKWFLHISFTKKVPEVDVSKFDNIIGIDAGLRQIMTIYNPKTGQTFFKNGQNIKKKRQNYAKKRQSLQSKNTKSAKRRLKELSGRENRWMTDVNHCLSKTLVSENPNTLIVVEDLTNVTFDTVSHRKKENRYEHHSWAFYQLQQDIAYKAREHGSYLIKVNPAYTSQRCPKCGTICKENRDKTNHIYHCNNCHYQSNDDRVAAMNIVQLGQLKQQGVKKPSFKTIN

SEQ ID NO: 530 - protein, 363 aa, unknown
  TnpB Polypeptide
LSKDIRALKVRLYPNREQERILLNTLVQCTELYNSLLDHCKECHENGGKHPSAYDMMKLLPPMKRERPIMKTVYAQVYEDVCLRVSRAFDGFFRRVKEKKEDAGYPRYRSLSRYDSFTYPQSGFILSKDHLILSPGKQRIRIRGYRKMDGRIKTCTVIRKGCGPDYRWEAAITYETEKRNVDDIAAAKGGKSIGIDMGLSKLIVTSEGKEYPNGKEFIKAERQLSKILRKMSRYEKGTPERERYRQRLFHAFENIHNKRKGKIYEIVTELIERYDMIFIEDLEIRKMMDNSKGKGMRKSYRDAGWRKFLFVLGYKAEEAGVTVRTVDPAYTSQRCSECGTLVPKDLSIRRHQCPCCGLDVDRD

SEQ ID NO: 531 - protein, 394 aa, unknown
  TnpB Polypeptide
MTQKAFKYRFYPTPEQETLLRRTMGCTRLVYNLVLAARTEAWYEHQERVGYVETSAMLTEWKKQEDLQFLNEVSCVPLQQGLRHLQKAFSNFFEGRTKYPNFKKKHHGGNAEFTKSGFRWKDGKVFLAKCSEPLTIRWSRQLPEGVEPSTITVKLSPSGRWTVSLLVDIEIEPLPESPNQIGIDLGITSLVTLSNGEKIGNPKTFKAKHRKLRQAQKALSRKKKGSNNRHKARLKVAKVYAEISDARNDFIHKLTTRLVRENQTIAVENLAGSNLVKNPKLSQAISDASWGELVMQLEYKCDWYGRTFVKIDRWFPSSKRCGHCGHIVDKLPLNIRAWDCPKCNTHHDRDVNAANNILAAGLAVKVWVANIRPNRDTSKGQLRNTRKGQKQKPK

SEQ ID NO: 532 - protein, 392 aa, unknown
  TnpB Polypeptide
MTQKRAYRYRFYPTSEQASVLARTFGSVRFVYNWALRLRTDAYYQRQERIGYHEASAALTALKQQSETAWLNDVSSVPLQQALRHLDKAFRTFFEGRAKYPSFHKKHGRQAATYASSAFKWDAQARALTLAKMDASLDIHWSRSFTGTPTTVTISKDTAGRSFVSFLVEEELEALPVVSATIGVDVGLKDVVVLSTGERVANPRHVRRSERRLAHAQHHLARKQKGSKKREKARLKVAREHARIADQRRDGLPTLTTRLIRENQTICVESLAVKNLVRNHTLAKAISDVGWGELVRQLEYKAAWYGRTLVKIDRWYPSSKRCHTCGHVLDSLPLDVRQWTCPACGVRHDRDINAAQNILAVGRTVYACGEAVRPGRAVPNPARPNEAGIPRL

SEQ ID NO: 533 - protein, 420 aa, Calothrix sp.
MLDVLKVRIYPNKEQEISLAKSFGCSRFVWNFYLKKTNTQYQETGKGMTYCQMAKDLTQLKKLANYEWLRFPTAAVLQQSLKNLESAFKNFFSKRTGFPRFKSKHSKQSIRFPESCSIKDGSLKLPKLGLVKVSLSKSVNGKMKSVTVSKTSTDKYFAAILFETDPLGSQVLNRREAPRRGLAHKLTATKQGNISGIDLGLNSLVTVFNGENCYKVDPIKPTRKYAKPLRIRQKALSRKVKGSNNRRKAIKVVAKVHEKISNTRQDFLHKISRKLVDENQVIVAENLCVKGLARTKLAKSIHDASFGMLLNFISYKLDREGGKFIQVDRFFPSTKLCSCCGYKNDSLNLSIREWICPSCQTTHDRDENASRNLRAKGIRILSENTVGHTEIQACGEAVRLVGTCVKKRVSEKQESPPTLR

SEQ ID NO: 534 - protein, 413 aa, Halophilic sp.
MEYSHRYRAYPSDEVAEGLEHHLNVHRQLYNHVRWDYENSPEDDKPGEYDQNNELPEWKRKWPVFGDLHSKAAQATVARFHRNLSHLRKKKEKGYTVGRLKRQSPAEYRSVTYNQSGFDLDEKRGHDKYAYVRFSKIGWVKIRYSRPIPDQATIKEVTFKKERTGEWFVSFGLETDDEHIPEKPDVDSLDARNSVGIDLGILNYIHTSDGKTVEWLDLEDDSERLRCEQRKLSRKVKVSDNYEKQRREVAKVKRHIKRKVLDYQHKITTWLVTEYDAVFVEDLDVAGMLQGDGNARNKQDAAWRQFITLLEYKGDLYGTHVKQVEPRGTTKECARCGVETPKPIWVREHSCPSCGFETDRDANAAMNVLQRGFEKLGLGWPEDTPVETVTATDTADFQRVSASHVLETGSLPS

SEQ ID NO: 535 - protein, 869 aa, Micromonospora sp.
MDTAATTAPAAGRRAWAWARTLGGLGMLAGLLCWVGAGPFLDGLRLIDAPALAAALAIGVLTTVCCAWRWSLVAGGLGVRLPLRTAVAHCYRAVFLNATLPGGILGDVHRAVRHGRDSGDVGRGIRAVVWERTAGQVVLAAVAMVVLAAFPSPVRPYLPAVAAALAAIGLGVFLLARALPVAGPSRFARAVGAAVADVRAGLLARRTWCGVLLASALAVAGHLATFVLAARTAGSTAPLSLLVPLTLLALLAMGVPANVAGFGPREGVAAWAFGAAGLSAAEGVSTAMVYGALVLVASLPGAAVLVARRVRVPAVHRRIEMWWALARPLGAGSARVVVRRGGVALHVRPGSRSGLWLRRSVVIDPGLGDRGCAGRCGVSVRLGMMCGVGRGRKRPKGAPTFVATFRIAFSPSQRRRVGARFNAGTALYNAALREALDRVGRMRSDSRWEKARSLPKGDPERGRLFAEARAAAGFDRSALASFGSRLRVGWLREGVAAQEAQALAERAFAAVELWAYGSRGRPRFKSMRRGIRSMSSKDRNGAIRIAATGRQLQWGRGFVAPLVIDPANPVHSHALDAVDAERVLSVRVVRRVIKGRQYYEAQLVCDGQPAQRDQVADGMVGVDLGPSTVAVVSDTRVFLEQLCAGLDANHAEVRRVQRKLDRQHRRGSPGCFDGAGRHRVGHCAWVRSGQAGATAARLAETHRRQAEHLRSLQSNLVNRVLGQGSTVHVERLSKIAWQKRFGRQVGFRAPGMFETLLRREAANAGGAVVLINPYRARLSQACVCGAMVKKPLRQRVHTCVCGVAEQRDVWSAFLARHSSGQAPDLVAASQELRRRHDVGGAPGSGGRNLRVPAARRLVPAAAGRAGGAV

SEQ ID NO: 536 - protein, 266 aa, Micromonospora sp.
VTARWWAVRSCVGSWRGRGRARSASWTARVPGRCCAGFRMRGSRRRNAAATVIHRRGFRVGGVGWCRCVGITAPSPSMGAGCASRPRRGAVGCGCGWPARCGYPLEQVRSITLLCEGGRLFLDVTAEVPVATYPGGEGPDPSRVAGVDLGVIHPYAVAGPNGDGLLVSGRAIRAEHRMHLADSKARRRAAARRAPKPGQRGSRRWRQYRRRARLVEGRHRRRVRQAQHEAAATVVSWAVRQRVGVLHVGDPRGVLDIAAGRRSVPA

SEQ ID NO: 537 - protein, 372 aa, Micromonospora sp.
MCGVGEVVKRAYKYRFYPSPEQAEQLSRTFGCVRLVYNRALEARTRAWAVDRQRITYVQTSAWLTEWKRTEGLAFLNEVSSVPLQQALRHLQAGFAAFWDKRARYPRFKSKRKSRVSAEYTRSAFRWRDGQLTLAKMDTPLSIVWSRPLPEAAQPSTVTVSRDSAGRWFVSILVETTIERLPATEFAVGVDAGVTSLVTLSTGEKIANPRHERIDRGKLAKAQRALARKQNGSANRTKARLKVARIHARIVDRRRDHLHKLSTRLVRKNQTVVIEDLSVRNMVRNHSLARAIYDAAWAELRSMLEYKAAWYGRTVIAVDRWLPSSKTCSACGRINTTLTLSVRAWTCPGCDAVHDRDVNAARNILAAGLAER

SEQ ID NO: 538 - protein, 367 aa, unknown
  TnpB Polypeptide
MLVAYKYRMYPNKWQQEYFAKCFGCVRFIYNRMLSDKIEYYKKTKQKLNNTPAQYKKEFPWLKEVDSLALANAQMNLQAAYNNFFKHSEVGFPKFKSKKTHYYSYTTNNQKGSVSVSSKYIKLPKIGLVKIKKHRGFDGLIKSITVSKTPSGKYYVSVLVNQDEKKKLPKGKNSIGIDLGLKEFCITSDGEMIENPRYLRKSEKKLRKLQKDLSRCKKGSKNRKKCRIRVARQYEKISHQRKDFLNKLSRRLIDENQIICLEDLSVKNMMGNHRLAKSIADASWAEFVRQLEYKAEWYGRKIIRIDKWYPSSQICSNCGYKYGKKELHVREWTCPVCGSHHERDINAAINILNEGLRTKTVGTTGLA

SEQ ID NO: 539 - protein, 259 aa, unknown
  TnpB Polypeptide
MKYATVSVTSTGKWFVSILVDDEEPEPKPVPFTSDTTVGIDVGLTDFATFSTGEKIENPRYLKTSLQRLKVLQRRVSRKKKGSKNQEKAIRKLARCHEKVANQRNDFLHKISFRVVSENQAIAVELLNVGGMMKNHCLAQGIGDVSWSTFFTMLDYKCRKYGKTLLKIGRFDPSSKICNNCGYLERDLALSDREWVCPVCDTHHDRDINAAINIKKFALQEQNLVGVSGAGRTVEPVDSLPVGRRMKQEATPEARGSSP

SEQ ID NO: 540 - protein, 392 aa, unknown
  TnpB Polypeptide
MRQVSYKYRLYPKPKQEILFAKHFGCVRFIYNWGLETKIKKYQAEKKSFNFFATCNLMKQKKSELIWLKEVNAQSLQMSLKNLDNAFTRFFREKKGFPKFKKKNNRQSFSCPQGIKINWNNSTITLPKIGEVKTVFSRKFEGKIKTCTVSKTPTNKYFISILVETPEQNKQKPKIKEKTAVGIDLGIKHFATLSNGTKIENPKYLSKLEQRMKILQRRAFKKKKGSNNRKKAFLKVTRYHEKIANQRDDFLHKLSTKLIRENQTICLETLNVAGMMKNHCLAKSISDVCWSRFMTFLKYKAEWYGSNILQIGRFEASSKTCSNCGSIKRDLELKDRNWTCKECDTSHDRDVNAAINIKKMALQKQNLISPTDCGVVLLESLPLGRAVKEESL

SEQ ID NO: 541 - protein, 424 aa, Lactobacillus sp.
MVVRTQKVRLYPSPQMQQVLDDLCDYRRYCWNQGLALWQDLYFNRQVMFSDELKQKLQLYAKELRKPKAKRKSIDFTSKEANLLELCPSPSAQNVRNIMVNEKQDWQDKLSARCLQLAISDLGKAWANFFNKAQPDWGMPKFKSKKAPRQGFKTDRAQIIENKLLLDRPHYADISKKDWQPVKFKGAKTLNGKLGVVSVYRENGKYYASLPFKIEVQEKGKTGKKTAVDVNVGHLNYTEGVIDTLPQRLEKLYLRIKHYQRLLARKRNANGKLATQSNNYVKTRAKLQRDYRKVANIQHDLMHKFTTKLVGQYDTIVIEDLNVKGMQMSHVASKGLQRSMFGLFKQVLSYKCDWYGKELILADRFYPSTQRCSHCGHVKTGEDKITLVGNKKHGTKHNEYICYECNFVCDRDVNAVMNLLALAQ

SEQ ID NO: 542 - protein, 449 aa, Okeania sp.
MVEKAYKFRFYPTPEQESLLRRTLGCVRLIYNKALAARTQAWYKLQERVGFAQTSAMLTSWKKQDDLDFLKEVSSVPLQQGLRHLQTAFPSECCANTNFFSGRAKYPNFKKKRNGGSAEFTKSAFKWKDGQVYLAKCPEPLPIRWSRQLPKGCVPTTITVKLDPCGRWSVSLRVNDTRDLTLKPVTKQVGIDLGITRLLTTSDGEKVENPKNLQKLHKKLRLAQKSLSRKTKGSNNYYKARLKVAKIHARIKDSRLDYTHKLTTQLIRENQTVVVEDLAVKNMVKNHKLARAISDANWSELVRQLDYKAKWYGRELIKIDRYFPSSKRCSNCGHVLEKLPLNIREWECPECAAHHDRDLNAAINILRMGTRVGVRRKGTPTKKAAGLAVSVCGATVRPEEITRRAGAMRQKAPNSNARESRAVTQVQRREDVNAQSLYGRNLFFGCFME

SEQ ID NO: 543 - protein, 471 aa, unknown
  TnpB Polypeptide
MSSVAPPGKHARDTRRWNEQQEQHCTSRECVPSEEEGKTTTSSSLVKKRNIGRNCFIWGHSMLLCKKIKIEVSPQDAEALEFMQAKCRGLYNWWVLKLRNGERWNVYESKKTLQASRAVDAELNGVYSKLLHEVYFHLDKAMQAFFRRVKAGEKPGFPRLKPRHQFFTLCYPAMYLNRIEGNILILPTGGGYKWGAKRYPDIQARLTEEPPENFREVAVSRDARGNYYCSFVYEDGEQDENDERKAHKKRKKRKQRPLRDDGIVVFDLGIKTLATGVTDQGRFYHIGGFKGYRWYNKQLDKIRSKRDKCKKKSRRYIHLSQVYKRVSEHKRRKQQDCLHKASHLISHRLAERAVVIGDLSQRQMVIKKQEGETPKDRRKRQIRNRMVYNDWGLYGFVQMLVYKCLRFGKELHIISERDTTKMCHVCKRKKDMPLWVRTYRCKNCGLVMDRDENSAINIYERFLARPGPHTL

SEQ ID NO: 544 - protein, 404 aa, unknown
  TnpB Polypeptide
VAAAVKTYKFRIYPTKTQEVFLAKSFGCCRFIYNYFLQRRIEEYRKGNKKYKYYDCCKELTQLKKKEEFSWLKEVSNPTLQQTLINLESAYKRFFKKISRFPRFKSRKSKQSFRHVEQVSIKNNKLYIPKVREGIKIVLSRKIEGKIKNVTITKTKTNKYFACLCCEVDQKPLEKLDTKIGLDLGIKTLITDSNGLKIENPKILSKFEKKLKYLNRQLSKKKKGSNAWNTVRLKLAGVYEKVKNIREDYIHKISHRLINENQVICIEDLSSEEMLGKNKNINRSIYDASLYELKRQLDYKSLWYGRDLIKVDKYFPSSQLCNSCNYRNYNLKLIDRTWKCPSCNIEHDRDINAAKNILREGLRIHLVQGFESDAKQKQVEPPSCGLFRNKRSSKDEAVIPEIPE

SEQ ID NO: 545 - protein, 447 aa, Vulcanisaeta sp.
VEVMSEVTRTVVVGSVQLPRWLFRVFVELEGMYRDMVGRLVAYAVGNGVTSFVKLKALKYLELRSLYPQLPSHYAYTACQDASVRSKSFLKLRRRGLVRKDHPEVREVSIWLDDHLWRMSGLTSIELATHIGWVRVELEPHRQYWRYINTGWRLASEAKLRLDRRGRRLIIYLTFRKTVETYEPRDLVPVDVNENHVAVMIDQDVYLLETGFKDITLGYHYRRKAIQRKYDKLCGVKCKAKRRVLRKLREGERKADLRWKLANIIVRAAVERQSAIVLERLGKNPAKDMINHIKDAQLRHRIYQASFKGVQRAIEEKAREHGVPIIYVNPRNTSRMCPIHKAKIIYENGSRVGRCSRGGELWHREVVACHNLRLKASSHLGGEGDAQSPGGSSLDGSPMPLGSTATHEPTGIPKTLWTRWKSLGATNKNKHLGTNGLAVWWGCVGSV

SEQ ID NO: 546 - protein, 242 aa, Conchiformibius sp.
LGALSQRRQVNGVIKNVTVSQKCGKWFVSIQTEFEQEIPTPKGGAIGIDMGIVRFATLSNGEYFYPANAFQTLKGKLAKLQKRFKHKTKFSNNWQKLKTKIAKLHHKIANIRKNHLHQITNAISQNHALVFVEDLQVANMSKRATNQNVKAKSGLNRAILDQSWFEFRRQLDYKLLWRGGHLIAVPPQNTSRCCPACNRTAKENRITQEKFECVRCGYQNNADVVGAINVLLRGQEVLTAQK

SEQ ID NO: 547 - protein, 376 aa, unknown
  TnpB Polypeptide
MLKSFRYRLYPTKSQARSLNTQLDECRWLYNHFLEERKEQWEKHKKSIHYHAQATSLPPLKASRPSLDKVHSQVLQNVALRIDLAFQAFFRRVKAGEKPGHPRFRGQGRYDSMTFPQVPSGCELRDGFLRLSKIGAVKVILHRKLEGKPKTCTIRRSSTGKWYACFSCEVNAPKPLRKNNDGAGIDVGLHSFATLSTGERIDNPRFFRMDEKALAKAQRRLSKETKGTPERAKRRKPVARICERIAFRRLDFAHQTAQRLVNQFGFLAVEDLEVNRMVHNRCVAKSIADAAWSLFFTILYFKAASAGRTAVKVNPAYTSQDCSQCGHRQKMPLAERTFRCPCCQAVLDRDHNAALNILRIGLGLQAVGSIPSSRRL

SEQ ID NO: 548 - protein, 536 aa, unknown
  TnpB Polypeptide
MIIRSKYTKVFRSKDLTRLKYDELYDFAVLIRNHKNVVSQYVNDNLLRFLEYNKFQFHKEMRNHFKNVIPSSFDTQLYTQVFTCYQNKFDRIQRTLVFETKSFKGFEIYKRDTKNHNKGDLKRVIFDKKQTPLTICLTYLARYGNENIINYIKANIDKCDDKKRDFYNNILRCSNKFGFERLYNLALSKREHTVKHYSAYPIEFKTLSFGGRSRKKYIIDFNKKFGSKINSFVSLSGFNRKALEIPVVFHKGWHGSMKDYRKKTPNYAYTITFNEKEHQVRINLCKDGERYIPEPNGKTIGIDVNCKHNLFSLSDETTYDYNRKLVNDYCKLSLKIDKLKSDKSYTVGKRKQRKLDVMKSKMIRSEQQLIANMCKTLQTKGVGHIVMEDLDISFGKCYIKDKDNEDINYNRKVKFLGLSSLKQEVEHIARKYDIAVSTVQASYTSKMCPICGCIEDENRPNQETFECIECGHKDNADFNAAKNIRNRVLVTVLRESLLKQLDNGAFEPKKLKRKKVKEVLLSFRRNLQRTARYECT

SEQ ID NO: 549 - protein, 380 aa, unknown
  TnpB Polypeptide
MFRAIKIRLYPNKTQEQTLNKVLGCYRFVYNQMLARKQNAYKEDKTNLSVTDLSKWFHGTLLKDEQYVWLKEQNTKVMNQAIRQMDGAYQKFFKQHNGFPKFKTKKDKQSALFPCDAISKKNTFETRHISLITSLHDIKFRCSDLYFRRLQKYNKNIRSATLSKTKSGKYFLSILVEMDDTELKKFEHTNKQVGIDLGVKDFVITSDGEVFENKHFFKKKEKQVKKLQRQLSRKVKGSNNRRKVQIRIAMLFERITNKKVAYIHYVTNELLSYFDTIFMEDLNVKGMLKNHHLAKTIQEVGFYNFKETLVNKALVNDKKVMIIDRFYPSSKTCSQCGYKKRDLKLSDRFWVCPICGTKHDRDVNAARNILLEGQRMLAAA

SEQ ID NO: 550 - protein, 401 aa, unknown
  TnpB Polypeptide
MLIVEYKLRGNKARYQAIDEAIRITQFIRNKCLRLWMDTRGITGYDLNVACAQLAQAFPFASQLNSQARQAAAERAWFAITRFYDNCKTHKPGKKGYPRFQHDNRSVEYKQTGWKLSPDGKHITFTDGCNIGRLRLVGSKNQRIEEFPTKQIKRVRLIKRADGYYVQFALDAERRIEHISTGKQAGIDMGLKEFLTDSEGHTVANPRHVRKAEKRLKRLHRWLSRKQKKSSNRKKARTHLAKAYLKVSRQREDFARKTASTLISSHDLIAYEHLKICNLVKNRKLAKSISDASWGRFLSWLTYYGQVHTIPVIAVEPAFTSQDCSACGTRVKKALSVRTHMCPGCGMVLDRDHNAALNILAKALDRTGGQSATGTPKRVRNASGQTASTRSGKAKAGKWAG

SEQ ID NO: 551 - protein, 557 aa, unknown
  TnpB Polypeptide
MARSKGVIISVKIPIYWEVMTERTKQRLRQTVGRDTRVIRAFLGIIEQNENMLLTGRRNDRIDEGKLDQLTITALKIKHGLCPRTSVPHDFKLRFSRISPNELTECRQTAVAHYESYLKLRQKKGRRASRPTSIKGSRRIPRWVFSRRFKLIDKATAVSRWWLDIRDSLDSVREGRTYHDRLNIPLRMSPFHLNQIRRGEMKAIQLFNDWKRKWWVTIAVRVSNQESIESDLLVAILGIDLGIKKAACTTLLTPEKTRETRYYVQREKIKILIMIDRLVSCLQSEMHSRRNNGQSYDRVAEKLRRMGSKRKNVAREYDRVLVRQILDYVSELSKKYTLYVAIGRLKNIRMRAKRGNYKGRRFRGMIHSWAFARITESLKHGLTQLGWKVDGKDARFRVVPETWTSIICWKCGNKGKRPKQNYFYCPHCEQKTNADRNGSINIAARMLMLTKSLHSVRGLGMWIRALDKARHARLKAQRKSSRGKSLLSKKELTSGSRESAAVHFVHSDLDSFSDETGESDNDPAVVRTVETLTVAGNDAPASAQEKEARSSGGIPSQ

SEQ ID NO: 552 - protein, 509 aa, unknown
  TnpB Polypeptide
VKYYDTVTRHRFTAENGVDVDSVSADLVQMVAWVAETEREVLASQEFHDLALRSLKGDRPSGSLTSWGRKRLPRYDFEFQKHNMNEMLVSNVVSTLELYAMSVGLFQVMSTHPKETKPEKILSCYRGTYPDAPQPTSGMIRSHLRRYRIKGERKASLPGVSAKLNLAVCDTYFAPKAFRDEKDPLNVIVQVKTPSYGLTRLYFRLPDNESRFGGGKVCRPTIRLNNKEQVVFDIAIEHKVDGRQTSKVVGVDLGKVEPFVATVIDPRAKHRSAPYHANYKRRLGSLVKAEKKRRDLSAHLYEKADLCERYNRTNHANVLRTEAKRVSAKATRIKHEISQCVASQIVSVADQNDAHVVVENLSWLDAQGGRWPHAEIQYRIENTAKRYGLKVVKVSAKDTSKTCSHCGGRVSNNSKTRVSTCSGCGFSLNRDVSASREIGLRSVSNARNRDRMRSLLRQRREKRSSAVTRQSKPVTALGGNQGHTGTSSMSLGATLMMVRENLDSRGSPT

SEQ ID NO: 553 - protein, 469 aa, unknown
  TnpB Polypeptide
MSIIVNGKEYASEKNAQIALTRNNTRKRRETQVCKVYDLKIDMSKLTRKQEEALKGTFLEAKWIYNAALNTEKPTSYLPGKTVEVKNRDGDFETRDLQYIGSQVKQSVISGIGSSLSSLKAKKKKGYKVGKLKFTRRVKSVDLKQHGTTYRLFPENDKVRVQGVPGKMKVYGIHQISEHAELANAKLIQKSSGYYLKITTYLPKDDDVLVDDYVPGTVEGIDMGVATHITLSNGVKISTTVVEPPRLKRLQRKLDRQYKRAEKLQKSQGLNYLPFSQNYYDTLEELRKEYEKLDNKKDNLAKQIVSVIMKNEIVFFQDEMITSWKKWFGRELHHSVLGRVKALLKAHPRAVMIPQSEPTTQWCRHCEQKTKHDLNDRVYTCQYCEYSEDRDVHAADNMIWFGQSVLENNVPMERRELTPVLVDQYLKLFPLGCTIKYTERVIDLSELESRTPGTSPSLKQETNSSSVSW

SEQ ID NO: 554 - protein, 418 aa, unknown
  TnpB Polypeptide
MLLSKKTSIKVSREYANLIGHMCYAASKLWNVCNYERQHYKETGMAQYPDWYYQKKAHKEDLWYKQLPSQTAQEVCKLLDKAWKSFYALKRSGGIETPRPPRFKQESIPITYMQMGIVHERDTGRVRLSLPKALKKYMEETYQIHENFLYLENKIFRGMDQIKQLRIYPPEKGNCKIIVVYEVPDQEELPQNGHELSIDLGLHNLMTCYDSGNGKTFILGRKYLALERYFHKEIARVQAQWYGQQSGKGVKYLATSKYIRKLYKRKHDSVTDYLHKVTRYLTEYCREQGITCVVAGDIRNIRREKDLGHRTNQKFHSLPYNRIYIMLEYKLKRYGIRFIKQEESYTSQCSPLSPEVGKRYAEPSKRKERGLYRDGNRTYNADAVGAYNILRKYHSVSGVKKELSVTGLKTPEIIKVAV

SEQ ID NO: 555 - protein, 514 aa, unknown
  TnpB Polypeptide
MEPKSELSELLPSKSMEVVKVLKTELHLSDEDRQYLLKFFDDNRKLVEVIYNVLKSYGYMEICRGMRGKRCPTKLRRLIRECVRAKGILPEWKASLMELQIDKVWESFVGTYKAHRKMPSEKIIDSLSNILRVRISKVARSGRFYRRMLTFEEEGGLITASLKIGRKDITSIIGKKEDFEVIIKGMEASDGLMLGDPAELVRYGDRVFLHLPIIKRVTIPKEHERVVGVNLGLSRYFLVAVACDVKNNEVMGVLKVPSDELRKLWEVMELVQRRRTLAFRKVRGTIGSKYRRGIRNFKKKLLKLAKKGRISYDDLLLFPKPVRWLLPFEHNPRRALKMRESRSKTTIAPRDELGRSVWKWSTRQFVYSCVNRLIDFAKKYNCTLIVCENLKYLRYRVSRLKRESRELGKLYSKTRDFRLLREKRRIDRAIKLLARFPYGVFMEDLRSEGLWNGIAVRLVSPKGAYTTCPRCGYDDRNNRMDRDTFRCGKCGYSDSVHFVASLNIALKPFAKSST

SEQ ID NO: 556 - protein, 407 aa, unknown
  TnpB Polypeptide
MLKRERIRQTLQQTKQRRKNQIPVVYQLKINLDCASKATKEKLLRLFLEAKWLYNYIVADVDNRLNDDAWKLKEVEIKVGENLERRKIENLSSQMKQSLVERIRWNLYALHKQKQNGDKTGKLQFKQHVNSIPLKQFGNTFKFVNRQKTKVKIQGIKKPLRVLGACQIPEDSEIAKAELVRKPSGIYLFVTCYIDRDKYTEAWEARKSRKSVIKPRVWQTFDVAAGIDFKPAGLVLSNGLKLEWQIEETKRLKKLQRQLARQQKGSKRWYKTKQKIAREYERLTNIKRDVINKTCSLLYRYKTVCFQDDKIKGWKDGYFSKSVHYSAVRTIKRRLSDSLRVSTVAIKSSVPTTKTCSRCSSQHDVSLSERIFRCPVCGLEIDRDLNAAINMLKKVVGLDRPEVKPVK

SEQ ID NO: 557 - protein, 383 aa, Thaumarchaeota sp.
MRNYKFRLYPTVSQEDVLVNNINVCRWVYNKFIEYSKKGTVSQFDLQDYLMELKQQESWLYNYNAKMLQMVCVQMSGSQKALKSLKENGRKTGSLRFARYGEYRTFIYNQSGYKLENGKLILSKIGDIKIKQHREIQGKIKQVIITKTKSGKWYCSVTCELDKTQLPIINFKKVVGIDVGIKNFTYDSDGFVAPNPLNLKKLLKPLIRVQKKMARRKYGSNNYLKAKKWYQIMHERIASRRKDFHHKLSTIYARKYDVIVVEKLNLTGMVKNHHLAKSILDSGWNDFLQKLEYKTKMLIKVDPRNTSVECSECKTKVPKTLAIRIHSCPQCGLEIDRDHNASINILHKVIPSERRESTPVEISKRSVTQEAHVFRHRQFTLSA

SEQ ID NO: 558 - protein, 369 aa, unknown
  TnpB Polypeptide
MGYMRTATVYINEGHPLFKYADNLTALTNNLSNAARFRQRQVLSAVSKEEADWTANEREVMEEIRKTVPLREKASMPTKGKHFLGYMFLEGILRVNHNPDFYAEGLPRQTAQHVLKTAVKDMKSFYKAIKEYNKNPDRFTGQPELPGYKRKGGHSTALITNQDCTIKTCDGKWYAYFPHAKDKPVCLGYPIPNARLKQACITPNNGRYKLSFQFEVDADIPEIPEDIRPERICAIDFGVDNLMSVTNNCGLPSLIYKGGVAKSVNQKYNKTIAALVSEQTLRTGEKFVPDAAYHAATNRRNDQISDFMRKCAKHFVAWCIENRIDTVVMGINKYWKQEAGLGKRNNQNFVQLPFDRLRNIIRFLSRKNC

SEQ ID NO: 559 - protein, 347 aa, Chlamydiae sp.
MIQAQVKLRINPKQEAILISWLIMLKCVWNWAVRKIELDAKDGRFHKKQQFQNLLADHGKRMGVPSHTLQGILLMAWEPWDRCFKKISKRPRLKGVRNKLNSIPFPDPIKYPINQRIKIPGLGIFRFHKQEIPEGKIKCGRIVKRASGWYLCLFIEADAKAVPAKANGKIGIDPGYKNTLTLSNGETISMPKEFQKRQERLAQSQKGHRKNLSARLHERIKNTRKDNNHKLSRRLVAENSCIVFSKDNISGIAKSYGKSVAEAGHHQLRQMLSYKCTASGRKYVEVDSKFSTMTCSHCLARTGPTGKAGLSVRQWECTECRTSHDRDQNAAINTLIAGLGTSLEKVA

SEQ ID NO: 560 - protein, 494 aa, Bacillus sp.
MILIQLLDPKGITMKKMFLFYFFLNINLSKIILIIPLRKVVKTMARKKAVKVLRKQKKRENMQRFTQKQNIGRACLTAREFRLLQCMSHSSKALRNAGLYTMKQSYLNDNKMATVKEVDTAMQTDMNYSGVQSNSVQAIRRALFTEVKSFFKALEQWKKNPEKFTGRPKFPNYSHSTDKRIIEIYQVPKVDESGFWMIPMSVAFRKKFGSIKIRMPKNLRNKKISYIEIVPKQKGRFFEVHYTYEMHVSQMKKQSATISNALSCDLGVDRLVSCVTNTGDAFLIDGKKLKSINQYFNKMIRNLQQKNIENGISKRVVTNKMAALWHKRERQINGYISETVGLLFKKVKAFGIDTIVIGYNTGWKQKSDMGKKNNQKFVQIPFHKLIAAIENKCIKEGIRFFKQEESYTSKASFLDKDPVPVWSKDNRAQYYFSGKRITRGLYQSKAGTCIHADINGALNTLQKSQVVELDGNLKVKTPILLEVQKRKAVASRIA

SEQ ID NO: 561 - protein, 380 aa, Rhodococcus sp.
MAGKVVKRAFKYRFYPTAVQADQLARTFGCTRYVYNRALAERSQAWSQEGRRVSYADTSTMLTGWKREAETAWLSEPSKGPLQESLRQLQGAFDKFWRKQARFPQFKRKGRSKESATYFSNCFTFRGGQIRLAKQSEPLDIRGSRPLPEGATPSRVTVSRNARGQYHISILVEDTIPELDRTDRVVGLDAGITSLYTLSTGEKIPNPRHERRDRARLAKAQRVLARKQKESRNRAKARLTVARIHGRIADRRRDYLHTLSTRLVRENQVIAIEDLSVRNMVKNRSLSRAISDAGWSEFRPMLEYKADWYGRRVVAIDRFHPSSKTCSVCGEVVSAMPLDVREWTCRCGVVHDRDVNAARNILAVGLAVAACGDGVRPPRT

SEQ ID NO: 562 - protein, 364 aa, Rhodococcus sp.
VKLPTTPVPTGRAQWRRVRLTATLPAHLHDRPISDWHLPTLVLDHRGLLLRCAATETVPAAELTSGTTAVGVDWSPATLGAAAITTETPDGLSSDFQGWTYDDDRGLGTKLARLQAEGHMLHRKAARLTQLATNAEPEVRTQLEAKIALLDAHRTAVGAKRGKINRELGFHFARQVTDYATAASATVIAVEDLTTLESRGHGRVNNNRAAQSARRKAVIALAHTAAGVGITVVSVPARGSSARCPGCDAPLARPGGYHTAWCQGCRVGGNRDHIAGVNRAKRALLGKTKVTRRRGQMPAIRVAEHAPVRKSRDKTGPTPRPPRHRRVRRSLPTVTPRAGVTPKQICSCTSSVGVGHGPTRTTSE

SEQ ID NO: 563 - protein, 601 aa, Rhodococcus sp.
MTGPGSTAPRQFAFTTRAHVAVDDITGEPIGLDDVDTRVGWLLDLIAAAGAELTARLWQPVTFDVLAAGRDHQDRRLPAQGHVAAARLGWNPHYPDGVYVPSRVTRVVTAQVMATLRILAYRDTAITSLSQRFDPATGALAPPTEPGDWVPLGFARGVRRQLIARARREGGALAGRLRITDMQGPPQVAAMARLSAADRQLAHIAVSDAVMTLTVKLPTCPVPAGRAQWRRVRLTAAIPGHLDGRAVSGWHLPTLVLDQRGLLLRCAATELVPAADLMAGTVAVGVDWSPSTLGAAAITTENPDGLSSDFRGWTYDDRGLGTKLARLQSEGQMLHRKAARLTQLATNAEPEVRTRLEAKIAVLNDHRTAVGVKRSKINRELGFHFARQVTDYAASAGARVIAVEDLTTLESRGHGRVNNNRAAQSARRKAVIALAHTAAEVGITVVSVPARGSSAQCPGCDAPLARPGGYHTAWCSHCRVSGNRDHIAGVNLAKRALLGKGKVTRRRGQLPAVRVAEHAPVRKSRDKTSPTPSRPRHRRVRHSLPTVTARAGVTKKQHVPALEASVWDTVQPAPPHGDTGSRDTRPSPTHATQVADSMRST

SEQ ID NO: 564 - protein, 270 aa, Rhodococcus sp.
LPKIGDVDVRWSRELPSEPSSVTVIKDASGRYFASFVVVLDDEPMPELDTDVGLDLGLATFVVLSNGKVVDSPKFFRRAERRLRKAQQNLSRKQKGSKNRAKARITVARAHAKIRDARLDFAHKRSMAIIRENQAVYVEDLCVKGLARTRLAKSVHDAGWSMFTRLLEEKATRYGRHFSRVDRWFPSSQLCSVCGRIDGLKPLSVRWWTCPCGAEHDRDLNAARNILAAGRAERLNACGAQVRPERVPAQRGEAGTHRERQSALVGIPGL

SEQ ID NO: 565 - protein, 974 aa, Rhodococcus sp.
VQLRYQFRLYPTPGQQTALARAFGCARVVYNDALAAREQARRDGLPYLADAQLSRALTDAKKSPDRAWLAEVSSVVLQQALADLNSAYRNFFASITGTRKGPRLGSPRYRSRHDHRQSIRFTKNARFQITDGSKLRLPKIGDVEVRWSRGLPSEPSSVTVINDASGRYFASFVVVLDDEPMPELDTDVGLDLGLATFAVLSNGKVVDSPKFFRRAERRLRKAQQNLSRKQKGSKNRAKARITVARAHAKIRDARLDFAHKQSTTIIRENQAVYVENLCVKGLARTRLAKSVHDAGWSMFTRLLEEKATRYGRHFLKVDRWFPSSQLCSACGRIDGLKPLSVRSWTCLCGAEHDRDLNAARNILAAGRAERLNACGAQVRPERVPAQRGEAGTHRERQAALVGIPGLRPRRASKADGVQFLQNTLRAAGRDGAGPRRELVEQGVPCPFAPLPHRGERPHPLQLHGVVAVGAQSFRDLDSEPADQALQLGDVVGGQSHLGGPQPPEQAQFLETVHVGQQPFGRHQDVARPRQRMRGEDPLERHERRVGLQLIGPLPELDVDHLTQFVEPAAFHQFGRQRRRVLGAQPDQGDGHPDPEEPEAVCQLGPHPRVHGQRTVLPREPVGRQHRQVQIVHRDLGEVLERGELGLSHRAGTERQQTRDGDDGLAQPGPFEFAREPGRHLLRRHHGVQPARPHLVGARHDTDHAEWPRLVAHVVADLAEELDVGRVEGAQQVDHGVGAGRLVVRGQHLEGAGRDVPRQRGRAGGVDDGRVRERGRRPLHIEAVHLIGGEVAQVEREVSVPAQHRHVGGTLCPGARLGLVPRRHGGRRPAAVPGDDAGALGRVGGRDVLPHQGIEQRGLARLQRAGQRHPQRLFQSPGASAQLIPDVGTARVQPASGRDQRAGFVQRRGAHAVTAPASPATSCAACCFSADATCRSFSSCAMRRVRSVDSRFAASCAARSDSLIERSACSAMAVK

SEQ ID NO: 566 - protein, 380 aa, unknown
  TnpB Polypeptide
MITYKYKLYQSKQTKHLDAMLSEACFVWNHALALQKRYYRLYGKYISCAAMQKHFAKRIKRTYLHSQSAQEVLERLDLAYTRFFKHLAKRPPKFKKTADFTSFCYKQGGFSLCGNVFHVNKIKKDYKFSLSRHYNGKVKQVRVKRSHLNEWYIYVITDASPKSYTKTHDGASVGIDFGLKTYMSLSNGKKISNPQFLKKNLRRLKKVSERYSRCLSGSNHKEQARLTLCRLYESISDKRSDFQWKLAHDLCKQYDIIFIENLSLSGMIHLWGRKMNDLAHAQFVSILEQVAAKYGCTVHKIDKWFPSSKLCDCGFKNNNLSLNNRSWVCPHCGQIHDRDVHAAEMILRRGIYELASNGKTIEPIGFEAVVFEPRISSLQG

SEQ ID NO: 567 - protein, 365 aa, unknown
  TnpB Polypeptide
MNKAYKFRIYPNEEQKILFAKTFGCVRFIYNKMLSDKIEYYHKTQKKLNNTPAQYKTEFEWLKEVDSLALANAQLNLQKAYNNFFRDTKVGFPKFKSKKHNRYSYTTNNQHGTIYLCDGYIKLPKIGLVKIKQHRNIPSEYILKSVTVSQTPSGKYYVSILFEYENQISKVDIHNSLGLDYSMHELYVDSEGGEPEYPRYYRRVEKRLQTEQRKLSLMTKGSKNRNKQRLKVAKLCERISNQRKDFLHKKSRQIANAYDLVSVEDLDMKGLSQSLNFGKSVSDNGWGMFISFLKYKLEEQGKQLIKVSRFFPSSQLCSVCGCKHSITKDLSVRKWTCPDCGTHHNRDVNAAINIRNEGLRIALSM

SEQ ID NO: 568 - protein, 416 aa, unknown
  TnpB Polypeptide
MYLTVKQKVKHLSKGEYSILRELCHTAKNLANEAIYNVRQYYFTEGEYLKYEKNYALLKDSPNYKILNSNMAQQILKEVDGSFKSFFGLLKPAKKGKYSFRDCKLPHYLPKDGFVTLVIGFVRLNGNKLILPYSNTFKKTHKPVEIKIPPILADKHIKEIRIIPKSGARFFEIQYTYEAECIQRNLNKNNALALDLGVNNLVTAVSSEGRSFIIDGRKLKSVNQWFNKENARLQGIKDRQGDKRRTTNRQKILADKRNRQVNDYMSKTARKIIDYCIAHDIGTLVVGYNETFQRNSGMNKRNNQNFVNIPYGKLRSKLEYLCELNGIVFVKQEESYTSQASFWDRDNIPVYNADNPQSYKFSGTRIRRGLYKTADGILLNADVNGALNILRKSSVVDLTVLYGSGEVDTPVRIRVA

SEQ ID NO: 569 - protein, 374 aa, unknown
  TnpB Polypeptide
VFRSFRFRLHLSTFQSAQVRQTFGCCRFVYNYFLADSIKQYKADKQSFNLFQSFKQLSAMRKLSEYSWLQQADSEALRYALKQLNSAYQNFFRSLESDKHICFPKFKFKRFAKQTYTTSAVNEATFRIENNKIFIPKLGFVKFRGRQHMQGKPIHATISRSATGKYYISVVCKDVQIDKLPETHQSVGIDLGLKDFAITSDREKFSNPKFFAKYQKQLAKAQRKLSRKPKGSHNFEKQKLRVARIHEKITNCRTDFLQKLSTSLIRRYDILCIEDLSVQGMMQNHKLAKSIADVSWSRFVSMLSYKAEWYGRTLQKINKFYPSSQLCSCCGHQNPDVKDLAVRRWICPQCNTEHDRDTNAAKNILAEGLRLLSA

SEQ ID NO: 570 - protein, 377 aa, unknown
  TnpB Polypeptide
MYKAYKFRIYPSDTQKQKLNKTFGCNRFVYNYYLRKIISEGYINAYSCIKDYTNKLKYEYPFLLEANPLLIKKTIFNLQDNYKRHLNSGISNPKYRSKYGKNSYTIKAIYNKYCNIELDLISRTIKLPELEELKIRGYRNITKINGKITNVTISKDKNSKYYVSILYELPEPSKRKPNTIVGIDLGIKKLITMSDNTSYDNNKYINKYEEQIKREHYKLSKKNKGSQNYYKNLKRLNKLYSKLSNARKYYIHKITKEITDNYDIIITESLNIKKMIMDKNINLSKKINDATFREILKQLEYKSKEKGKYFFKINTYYPSSQTCSVCDNIDKKYKNLNERDYVCQCCKNTLDRDLNASINIMFEGLKLYMKKVYSRYQ

SEQ ID NO: 571 - protein, 402 aa, Escherichia sp.
VKRLQAFKFQLRPGGQQEREMRRFAGACRFVFNRALARQNENHEVGNKYIPYGKMASWLVEWKNATETQWLKDAPSQPLQQSLKDLERAYKNFFQNRAAFPRFKKRGQNDVFRYPQGVKLDQENSRIFLPKLGWMRYRNSRQVTGVVKNVTVSQSCCKWYISIQTESEVSTPVHPSASMVGLDAGVAKLATLSDGTVFEPVNSFQKNQKTLARLQRQLSRKVKFSNNWQKQKRKIQRLHSCIANIRRDYLHKVTTAVSKNHAMIVIEDLKVSNMSKSAAGTVSQPGRNVRAKSGLNRSILDQGWYEMRRQLEYKQLWRGGQVLAVPPAYTSQRCAYCGHTAKENRLSQSKFRCQVCGYTANADVNGARNILAAGHAVLACGEMVQSGRPLKQEPTEMIQATA

SEQ ID NO: 572 - protein, 415 aa, unknown
  TnpB Polypeptide
LGYRYRLSLTAEQDERLAQWVGCARVVYNAALQQRQVAWREYGVSLRYNDQGASDLTDAKRAFPWLADPHCDVLQQALRDLDRAYVNFFEGRAGPPRFRRKGAAESIRIQNRTAGKITARRLNRRWGELRVPKLGTVRFRWTRQPIGEIHHLTLTRSITGWHVSLACDGPAGTTAAPQRGAVGIDRGVSATVALSTGELHRCPGLSPGQARRLRRLARKAGRQETARRHRSADQRRRSRRHQQTLDHIAHLRARETLIRDDFLHKLTSDIAKSHGTVVIEDLRVRSMTRSARGTIEHPGVRVAQKRGLNRSILTQGWGRLEQMLTYKLAMTHSELLKVPAAYTSQTCSACGSIDPRSRISQATFRCVACGHAANADVNAAQNILAAGLAVTARGAHGEEAGAMNREPPEGLADAA

SEQ ID NO: 573 - protein, 414 aa, Campylobacterales sp.
LKPKNSIPKSLLVSLPASAIPITEKGQLKEEKTQKICKKIRFYPENELGYHQMLTLYRRAYNLSIEKYKNNEYKDENGLWRDLRKEVRFQCEEEQKNKNSVYNSNVVNEAVLSAKKSFKAILKYNKKIKDNKKRATLKFKSRKNPISSFIIDRMPKGLNPALKTLGKIFLTESIPNEAIGKSCIITYNKGRWFIQVQKQIQTSTEIQGSVECIAIDPGVRTFATCYSQKEVIIAGDQFSKDILLPLVKKVDKLLSKKKKLENIKQEDKQWYKDRYRNLEKKINKLKCKKDDLILDLHHRISYELVSNYDVIFLPTFETKKMFKKQQRNIRRVTVRQMLDLNHYKFKETIKWYAKKYGKHIVDCNESYTSKTLSWNGTIDDKIGGKRIISDGNIIVDRDINGARGIFLKQLTKAT

SEQ ID NO: 574 - protein, 372 aa, unknown
  TnpB Polypeptide
MQRTFKYRLYPNGKQRETLAAQLDLCRELYNAALQERMESYKTTGKGVTWLQQQSQLPAIKEVRPEFKRVHAHTLQAVLIRLHRSFQNFFRRVKKNESPGFPRFKGRNRFNSLVFTPAAFQVQGHHVAISKVGNLKIKTHRALPEKHGTLFLKQICGSWYACFSCTVAPQVFPPSTQEIGVDVGLDSFAVLSDGTPIENPSWYRKAQAKLRQAQRRVAGGKKGSERRRKAIAVLQKIHEHVANQRKDFQHQEALKLVQRYGVIAVEDLTVKGLAGGRLAKSVQDAGWGGFLQILAYKAESAGRKLFAVDPRGTSQTCVCGAKVPKRLSDREHVCTACGLVASRDHVSAQVILQRARTVPSSANVGEVMPCVA

SEQ ID NO: 575 - protein, 469 aa, unknown
  TnpB Polypeptide
MAAAKDEERTRTNTFHLAPREEWKTTCLIELLDSAAALVNVVTYHRRQAYLNPDKTRNDVWNAITKTSIRNRFQPVLGRAITDKLLDKCDETWDAFFEQLDNYHDGERDTKPGLPGYWKEDGRRVLKTVVRNDAYTIQWGERSRIELALGSQLKEKYGIPLNQRLRVPIRGNPQYEGKGGRLELVYDRDAESLTARQPVTFLHDTTRATHSSDEECVAAVDVGANNFVAVTTTNGHQRVFHARPLFDRFHRYTERIAELQGKLPEDVDSSRLIETLYDKRGRQRDHAQDALVRHLARLFEEWGVAKVYVGKLDDVREKHWSATVNEKTDLFWAHGRFRRRMHTVLEEWGVEVVEKSEAGTSSRCSQCGEEEYVSRSGDVFRCGACGFEGHSDVVGSENFLQNVVGGDVEIEGPMARPAVSSQNGREKGHRVVPCLEWDDHRWRRRDRSTKEEPANRSTREGNLASGVSA

SEQ ID NO: 576 - protein, 222 aa, unknown
  TnpB Polypeptide
MRLVERHIIKDNRFEDICLKSGLLYNYVLYLVRQGIFDKEYLKEYDLSTRLGRENQFDFRQLPCNVSQQVVGQVFKNINLWIKNKKDFDKNPSKYSNHRSHLPRYKKGKKQNMVVFTKCNCRIKDDGYIHFVKNVIEPIKTNVKNDELKQVRIIPQATCYVVEVIYERKEIDLNLDKDNFLSIDLGLNNLCSCISNVGIKPFIINGRVMKSLNRWYNKKKPD

SEQ ID NO: 577 - protein, 264 aa, Clostridioides sp.
VIAVEKAYKFRMYPNKNDKETFTYKQCSSDLTNLKKELNWLKEPDKFSLQNALKDLDNAYKKFFKEKAGFPKFKSKKINRFSYKTNFTNGNIMYCGQHIKLPKLGMVKVMDKQVPQGRILNATISKEPSGRYYVSLCCTDVDIEAFKNTNNQIGLDLGIKEFCISSCGEFIENPKYLKKSLNKLAKLQRELSRKTIGSLNRNKARLKVARLQEHIANQRKDFLQKLSTKLIKENDIICIEDLQVKNMIRNRKLSRLISKTIKVR

SEQ ID NO: 578 - protein, 375 aa, Psychrobacter sp.
MIRAYKYRIYPNLEQKVLIEKHFGCARFVFNWALALQKRYYSLFKKSLSRSQIQSQLVKKKKTERFAWLNEVNSQSLLNALLNVHTAFTNFFKGRAKFPRFKSKKRPRRSYQNPQHGSVNFDNGTIDLPKLKGIKAKFSREFVGKVKTVTVSETATGKYFASILVENEDVLPVATTVESSLTIGIDLGISHLLILSNGTKFDNAKHLAKASRRLAVQQKIFARKQKQSKNYQKQKLAVARIHEKVRHQRLDLHHQITHQLVCKNQATSFGVEDLAVKNMVKNRKLAKAISDAAWGQFVTLLSYKAKWHGKNVLKVNRFFASSKLCSHCDHKLDSLPLSVRSWICPSCQLEHDRDLNASNNIRRQALADVAGLATV

SEQ ID NO: 579 - protein, 389 aa, unknown
  TnpB Polypeptide
MKGILQKVTASMNRAYKYRIYPTTEQRILFTKTFGCCRKVYNLMLSDKIEGYKAAGKFLTVTPAKYKKDHPYLKEVDSLALANKQLDLQATFRNCFSKSRRKNTGFPKFKSAKHSRRSYTTNNQKGTVAIVDGGFIRLPKAGKVKAAIHRMPEDNWIIKSATVSQEPDGKYYVSILFEFETPINTYVADKTNAIGLDYASDGLYVGSNGNVGTNHKYYRESHRKLARAQRRLSRMQGSRKNEVRSGNYRKQLRKVNRIHRHITNQRLDNLHKISTGIANRYDIVCVESLNMRAMANKGFGNGKATLDNGYGMFLSMLEYKLADRNKYFVKVDKWFPSSQICHCCGSVHPEMKNLTIRTMKCDCGMTMGRDRNAAINILQEGLRTLTAAA

SEQ ID NO: 580 - protein, 163 aa, unknown
  TnpB Polypeptide
MSRCVERSSGWRKACQLVAKLHRYVFDQRHDFQHKWSRELVNHYGFIAVEDLRVKGLAGGRLAKSVQDAAWSSFMAKLSYKAESADRLLVKVDARRTSQQCSCGAPAPKKLWDRKHRCTLCGLNTTRDHASALEILRRGLRLRTTMPAIAGMALEAPAFRHGA

SEQ ID NO: 581 - protein, 320 aa, Cenarchaeum sp.
MKYKGEKYVMKTLQYRLKTSTRLTRYFNSMYSESHIWLNAGIRARKAGLTVFDTNKIATICQTIPQAWVRGAIREGHKIEGCTHVRYGRKVYPLFSNVPLGKKSKGTTVYFPRCNIPFKLQKGRLPNTSQSYKIVDVTNTTDKERQFELHVTIREHVPDRVATGVHAGIDMGGKHTLVVGKSDGSIAMLTLREKDTIRNIARMQKKMSRCKLHSRKWRNLHDTLNSIYRKLGNRQKDKLRKFSKKLMRQCDRIIMEGMNLRTMTTKGPGQTPKNRTMRQSHCGEAREHISQQYLRYNVEYTEINPKNTSKQCCMCGSLNT

SEQ ID NO: 582 - protein, 522 aa, Cenarchaeum sp.
MVDVLLDSVKYVIKPYYMMALVKNSRAITRTYTKNLGMQYVFEHVRKVAEVAYIIADNTGKNTYGVNALMYRTMRGPDPKVHSSITQTAIRDGVAAHKTYNTKTAQGMKVSEPVFRNPVVKLKNQNWRLNPIAGGYMTIANVGSSKHPHMIAIPISSDVVRRIGQNELGELWITPTTYTITYYNKVPEVDKPHPYGKSEIIELLTDVGYVGGTPKDVIGVDINEKNITVGDKDTMVRFDLSDTIQAIEDAKTDDANNTYTRTHDNAAYAARTGRRVVHKKEEERREKQQVVCGGHKLYNKLKRRYRKLKREGKHKRAAEIKKQMNKCILNIQHNHTKSKKNAKKRKVTKAVRHHEHGLNVMALCIAQWAAQSGCLVVLEDLTRISYNWQKGGKFGHNMRRRLHSAMMRKASNLIYEKSRFLGVEALHMRPHNTSKLCAVCRTPLTGTYHKKDYTHCRTVGVDRDVNAVENIRRTSAVSRYGRKVSASLGEVRRGVDVILDPTPLIQGCWSNWADRLSRIAGV

SEQ ID NO: 583 - protein, 472 aa, Acidilobales sp.
MSGGGNPRGVSVREPDPLQSFRGLVEKRKKSSKRAVRLRLLPEEHEEKILFDIGLTCVRLWNELNYEKRQLFFKDDLTPEKRIEINRRYYHKYKNFLGVNAGQIINKNEEAWESFFKLLKMKRQRRLPLHIRKISPPGYWKDKIIGKKKIYMLIRNDRYYLEPVDEGEGRLVLKDFKLNIRYAGRIKWEGKQGRLEIIYEANRWFAYIPIEVGVDPPKSNLKGYIKLNYRDEKDKIFNPRSIKQKDPIGDKKAFIDIGLNNLFAVVVSDGSALLVKGGVIKSEYYWWKREISTYQSIRDLLKNAGISTWIDYHEKYLKALYKRNERLRHLYRTAIRFLAEMLWSRGVEKIYIGYPIMLNQDNGNEYNANIWWYRKIILWIIDVFIEYGIDIEIVSEDYTSQKCSICGEIHRDGRIYRGLYICRKTKKKINADINASLNIARRAGYKIIISRKIESYLVSHNGVKIINPPPEG

SEQ ID NO: 584 - protein, 437 aa, Blastococcus sp.
VSHGAERVRLDVTDVQAGMLLRAAGARRFAWNWAVAKIKANADQWQAEASHGIEKPDRVRPLSFFTLAKLWTAEKPDVCPWSGEHSTWTFRYALRDAANAHAAFLAGMRRFPRFKSRHKDRARFTVRDGLALEAGRVRLAKLRRLLRRGHATLQHITATRHSDGHWYATVNYIREARMPAEQHMVPMGAVVGVDRGVKTAAVAATMNGQAVAELPASRALRDRLRHVKHLQRAVSRTQRGSTNRRRAVARLGRAHAKAAAVRADALHAFTAALARSHGAVVVEDLATKNLMANRSLARAIGDQGWAELARQLAYKTTRHGGQLIVADRWFASSKTCSACGAVRPKLTLAERTFHCGDDACGHVADRDVNAAANLAAWGEHTLGSCPCVTRAGDRHPGGPSVEKPRHACGGWVSGAAVPAALVPPGEAGTSRPRTHVA

SEQ ID NO: 585 - protein, 402 aa, Escherichia sp.
VKRLQAFKFQLRPGGQQECEMRRFAGACRFVFNRALARQNENHEAGNKYIPYGKMASWLVEWKNATETQWLKDSPSQPLQQSLKDLERAYKNFFRKRAAFPRFKNRGQNDAFRYPQGVKLDQENSRIFLPKLGWMRYRNSRQVTGVVKNVTVSQSCGKWYISIQTESEVSTPVHPSASMVGLDAGVAKLATLSDGTVFEPVNSFQKNQKKLARLQRQLSRKVKFSNNWQKQKRKIQRLHSCIANIRRDYLHKVTTAVSKNHAMIVIEDLKVSNMSKSAAGTVSQPGRNVRAKSGLNRSILDQGWYEMRRQLAYKQLWRGGQVLAVPPAYTSQRCAYCGHTAKENRLSQSKFRCQVCGYTANADVNGARNILAAGHAVLACGEMVQSGRPLKQEPTEMIQATA

SEQ ID NO: 586 - protein, 267 aa, unknown
  TnpB Polypeptide
MSNDTSNPRVIRNYKFRIYPNKEQERKLLRWLETCRRIYNTALAQRKEAWEKEKRSVTRTEQQVWLKEAKKDNDYFKEVHSQVAQEVLFRVERAFAGFFRRVKNGDTPGYPRYKGKGRYKSLTFTQFGDGLGASFQNNKLKLSKIGLVKIKLHRDIPGTVKTVTIKHEASGKWYAILAAETELKQPETHPGIAAGLDVGLEKFATLSDGSAIENPGYLRKTEKRLKHAQRALSRKQKGSRNREKARLKAAKLHTKVRNQRTQRGREW

SEQ ID NO: 587 - protein, 420 aa, Prochloron sp.
VEQSWFSTSLLAVQNPNSQRTFCPSFMSSLVESTASENTVTKSKKILIYLTASQKEMVRQWFGVARYIFNKTVELLKDGEIKANWFAVRPLIMDALPDWCKEVPYQIKNKAVRDACIAVSSAKKKYKKTGEIQRVKFKSRKKPIQSCFIPKSAIKARGIYYTKLRELAYSQELPENLCDSRLISNNGKYYLCVAYKVAAFPAENQGRVVALDPGVRTFITFFSENSVGKIGHGDFSRIQRLCHHLDNLQSKISKAITGQKRRRRKAARRMIIKIQNLINELHHKTARFLVDNFDVILLPTFETSQMSKKRDRKIRSKTVRNMWSLSVAEVLTFAHYRFKEFLRFKAQETGKMVVDVCEAYTSKTVSWTGELVNIGGSKKIKSKVDGQVMDRDINGARGIFLRALVDTPWLRNQLALVSQV

SEQ ID NO: 588 - protein, 382 aa, Rhodococcus sp.
VQLRYQYRVYPTPGQQNKLAQAFGCARVVFNEAIAAREAARRGGLPYPTDAELSRALTAAKRTPERAWLTAVSAVVLQQSLADANTAYRNFFASLSGQRKGRRVGPPRFRSRRDNRQSIRFTRNAHFAVTAGRKLRLPKIGEVKVAWSRELPSEPSSVAVVKDAAGRYFASFVVDTCDEPLPELDTEIGIDLGLTTFAVCSDGTILASPKFFRRAERQLRKAQQNLSRKQKGSRNRAKARLRVARAHTKVADARRDWAHKESTRIIRENQAVFVEDLCVTGLARTRLAKSVHDAGWGIFTRMLEDKAVRYGRHFSKVDRWFPSSQLCSVCGRVDGKKPLSVREWTCLCGAVHDRDLNAAVNILAAGRAERRNACGETVSLPA

SEQ ID NO: 589 - protein, 423 aa, unknown
  TnpB Polypeptide
MMVEGAAKRKVSYRLYPNSTQEALLLALLRSHQQLYNAALEERIGAWQKQRLNISYADQCRSLTVIRQSMPEWTIPNCSSQQMTLRRLDKAFKAFFLRAKGGKTPGFPRFKSLARFPGFSFKSHGDGWTFNPGKDWKHGRLRIGGGVGRIRCRGKARQGGRICASDLLYRNGQWWLSLTVEPERIIRERIADGAIGMDWGLEHLLTLVDHEGRVRHEENPRWHQQEADDIARMQQAVSRRKRGSQRRKKAIRALARTRAYQARRRLEHQHQLSARLARENALVVMESLSISNMTRSAKGTCEEPGRNVGQKAGLNREILDTAPARLMQLIRYKVMETGGEFIEAPARTLKPSQTCPACGTVKKKGLGERVHACPCGHSEQRDAASARVVLNWALFGSPNAPIRSGTGRDRVAHRRPVKLHPIA

SEQ ID NO: 590 - protein, 421 aa, unknown
  TnpB Polypeptide
MVDTAPRRTVLIKLDVPSDREADLHHTKTQFLDCANQTSDWAWRYDDYCITSKAKAENVLYNDLKAEYDLTANLVQKAIRRAIEAVTGGVEKLKEGKKTSQPKFDSWSVVYDKRSATFNADHVTLSTVNGRVKADYVLPSEDEREDTPFGRYYESDEWAASSATLQYDEHSEEFYLHVTLKNPDYQVDGTERQEATSRGETPKNGVVLGVDLNVTGAFAVTSTGEFIGSADYLTHKRDEFEKRRGRLQQTGTRSAHLTIKSIGSRFSDWSLDWLHNRVNELLEEAERVNADGIIFENLTHIRENIANGSKFQQWVYSKFVELADYKVEDRELFVDFVSPAYTSQRCSHCGFTHEDNRDDKSFVCQQCGYEVDADYNAAKNVAVRYCGYIHRGQKSRGGWAGCQSALKSGTLNVNGDFNASA

SEQ ID NO: 591 - protein, 378 aa, Halomonas sp.
MLKAIKVRIYPTAEQASLLNRQFGSVRFVYNAGLRIMSHRYRRHGESLNAKHDIKKLLPVAKKSRKYDWLKKADSIALQQACIHLDQAFQRFFDPKQKAGYPRFKSKRGRQSSYHCVNVRHGDNWIKVPKLKAIRARIHRPMDGKLKSITLSRTVTGKHYAALLFETEQAAPAPLKAVDTAGVVGLDMGLSHLVIDSNGHKTANPRFLKQAQRNLKRKQQALSRKQKGSAKRARARLLVAKAHERVVNARKDFQHKLSRQIVDDNQAVIVETLKVQNMMKNARLARHIGDASWHALMAKLAYKTEEKGKHLVKLDPWFASSKTCHACQHKMDMMPLHLRSWACPTCHTRHDRDINAALNIKHQGIQQLKTAGLSVSAH

SEQ ID NO: 592 - protein, 381 aa, unknown
  TnpB Polypeptide
MSGRVVKRAYKYRFYPTPEQAGLLNRTFGSVRYVYNRALAERSRAWTQEHQRVTFAETCRMLTAWKRDPGTAWLYQVSNVALQQGLQHLQNAYVNFWAKRAKYPGFKSKRKSRASATFTTSGFRYRDGQIWLAKMPAPLDIRWSRPLPEGAEPSTVTVSRDAAGRWHISILADCPVEALPPTTLAVGVDAGITSLVTLSTGEKVTNPRHERRDRARLALAQRRMAKKQQGSANRARARGTVARAHARITDRRRDHLHKLSTRIIRETQTVIIEDLPVRNMVRNHSLARAISDASWAELRRQLEYKADWYGRTLIAVDRFYPSSKTCSACGAITAKMPLNIREWTCAACGARHDRDVNAAKVIRAEGLSVQACGDGVRPSRA

SEQ ID NO: 593 - protein, 383 aa, Blautia sp.
MCYAASKLWNVCNYERQHYKETGMEQYPDWYYQKKAHKEELWYKQLPSQTAQEVCRLLDKAWKSFYALKRSGGIEAPRPPRFKQESIPITYMQMGIVHERDTDRVRLSLPKTLKKYMEETYQIHENFLYLENKIFRGMDQIKQLRIYPPEKGSCKMIVVYEVPDQEELPQNGHELSIDLGLHNLMTCYDSENGKTFILGRKYLELERYFHKEIARVQAQWYGQQSGKGVKHPVTSKHIRKLYKRKQDSVTDYLHKVTRYLAEYCREQGITCVVTGDIRNIRREKDLGHRTNQKFHSLPYNRIYVMLEYKLKRYGIRFVKQEESYTSQCSPLSPEVGKRYAEPSNRKERGSYRDGNRVYNADAVGAYNILRKYHSVSGVKKNCP

SEQ ID NO: 594 - protein, 437 aa, unknown
  TnpB Polypeptide
MLRTVQFACTLPKSEADELNLDSGHIYTDMLVRHYRLYRKQGVWLAPKSGERLEDALGGPTSLHAHSRDAAQQGFYKACKTARACRQQGLDVKYPHRRKRFRTTIWKRTGISRTARTLVLARARGLAPVLVTLPPNLLVLSEAVFLEARLVWDRAARHYAWHLVLEDGRLPEPEPGTNTAAVDLGEIHPAAVTDGQETVIFTCRALRANAQYTAKRLAQIRAKQDRKQKGSRAFRRLQRRKSRFLAKQKRRARDLEHKISRAVVTWAKDRQIGTLVIGDVREVANGKRLKAKSQQKIGLWSHGRQRAYITYKAEAAGITITLANEAYTSQTCPGTLPDGAGCLQCYKPKGRVYRCPACGFTAHRDGVGCANLLSQHFTGEPGHVRPPKEKYRYPFVGKRSRLDTADLARIPTVGSGRVREAAGLQPRQSVTYLPASL

SEQ ID NO: 595 - protein, 472 aa, Thermococcus sp.
MKRTVTVKLQPSKEQAKILHQLADAGAKAWNRVNYLRRQEFFQHKIVDFNSTEKTVYEEFKREIGSATVQQICRKNAEAWRSFFSLLRKKRNGELPSWLKPKPPNYLEEDGRRRPLIVLRNDQYKVEGNKLILKGLGKFKRLEVQFKGRIHLKGKQGRLEITYDPVKRKWYAHVSLTVGEKLEGEEWVSVPRTPKGSLSAGIDLGVNNLMAVYVENGESFLVNGRPLKSIAFYWRRKIADYQSKLNKSGAKASRKLKRMHVKAKLQAKHYINTAVRGTVRKLYELGVSKIVVGYPKGIARNSDRGKRQNFVLSHVWRFKYVIKRLTEVAEEYGIVVELVDEAFTSKVCPVCGKPHEGARFVRGLFKCPATGLVFNADLVGAFNILKKVVKTITPNLGGLYAQRRGNGGKALPEGFEEPVLTGSLMRTPPNLSALGEGLTRWNPRPLGRGGGQFNKPHSNFSSYPRGIQKKES

SEQ ID NO: 596 - protein, 436 aa, Thermococcus sp.
MKRTVTVKLQPSKEQAKILFKLADTGAKTWNRVNYLRRQEFFQEQIVDFNKTEKTIYEEFKREIGSATVQQIARKNAEAWRSFFSLLRKKRNGELPNWLKPKPPNYLKEDGRRKPLIVLRNDQYKIEGNKLILKGLGKFKRLEVQFKGRIHLKGRQGRLEITYDPVRRKWYAHLSFNVEEKLEGEEWIKLPRTPRGNLSAGIDLGVNNLMAVYVENGESFLVNGRPLKSIDFYWRKKIADYQSKLNKSGAKTSRKLRRMHEKAKLQAKHYINTAVRGTVRKLYDLGVSKIVVGYPKGIARNADKGSRQNFLLSHVWRFNTVIKRLREVAEEYGVRVVVVDEVFTSKVCPVCGKPHEGARFVRGLFKCPATGLVFNADLVGAFNILKKVVRTITPNLGGLFAQGRGNWPKTGPEGLKTRFSAGLNGTPQTSPSMARG

SEQ ID NO: 597 - protein, 425 aa, Thermococcus sp.
MSSETIKLTAKFKLKETPEGLGALFQTYREIVNFLITHAFENTVTSFYRLKKETYKSLRQEYPELPSHYLYTACQMATAIFKSFRKRKKKGKAKGKPVFKREVIMLDDHLFKLDLENKTVKLSTPNRRIQLEFYPAKYHEKFKDWKVGQAWLVKTPKGVFLNVVFSREVEVEELKAFVGVDLNENNVTLSLPNGEFVQIITHEREVRTGYFLKRRKIQRKIRAGKRRRGLLEKYGRREKNRLNDLCHKLANKIVELAEKYGGIALEDLAEIRDSIRYSAEMNGRLHRWSFRKLQSIIEYKAKLRGVRVVFVNPAFTSSLCPVCGEKLSPNGHRVLKCSNCGFEADRDVVGSWNVRLRALKMWGVTVPPESPPMKTGVGKVIRYDWFTSSKSSGQPERWANLDAAFPSAPQVPQRVPQSTDRARSP

SEQ ID NO: 598 - protein, 437 aa, Thermococcus sp.
MKRAVTLKLQPSKEQEKILFELAQATAIIWNKINYERLKQLKEFGKIDFATTEKEAYYTFKNWIGGSTVQQLARKNAEAWRSFFTLIKKKKSGELPSWFKPRPPKFVREKHGRKLFIIPLRNDQYRIGSNTIELRRLGKFGRLKVQFKGRIHLKGKQGRLEIVYDEVKRKWYAHISYTVEEKLEGTSWVSLPRTPRGNLSAGIDLGVNNLMAVYVENGESFLVNGRPLKSIDFYWRKKIADYQSKLNKSGAKTCRKLRRMHEKAKLQAKHYINTAVRQTVERLYQLGVSRIVVGYPKEIARNSDKSRRQNFILSHVWRFNYVIKRLKEVAEEYGIRIVLVDEAFTSQACPLCGQRHPDGRIFRGLFKCRREGVVMNADLVGAFNILKKVVRTITPSLPGLTAGRGNWPEAGPEGFEEPVLTGSLMRTPQTSLPLARG

SEQ ID NO: 599 - protein, 455 aa, Thermococcus sp.
MKRTVTVKLQPSKEQEKTLFKLADAGAKVWNRVNYLRRQQFFQDQIVDFNSTEKTVYEEFKREIGSATVQQIARKNAEAWRSFFSLLRKKRNGELPDWLKPKPPNYLKEGWQRKPLILLRNDQYKIEGNKLILKGLGKFKRLEVQFKGRIHLRGRQGRLEITYDPVKRKWYAHVSFTVEEKFEGGEWVSIPRQPKGSLSAGIDLGVNNLMAVYVENGESFLVNGRPLKSIDFYWRRKIADYQSKLNKSGAKTSRKLRRMHEKAKLQAKHYINTAVRGTVKKLYDLGVSRIVVGYPKGIARNSDKGKKQNFLLSHVWRFNYVIKRLTEVAEEYGIRVVVVNEAFTSKLCPVCGKPHEGARFVRGLFKCPVTGLVFNADLVGAFNILKKVVGTITPNLGGLFAQGRGNGGKTLPEGFEDPLFSGFEWNPSNLPATGEGLTRWNPRLSWEEVRRRTVT

SEQ ID NO: 600 - protein, 224 aa, Thermococcus sp.
MVRAFCNKSGAKTCRKLRRMHEKAKLQAKHYINTAVRQTVRRLYELGISRIVVGYPKGIARNSDKGKRQNFLLSHVWRFNYIIKRLTEVAEEYGIKVVLVDEAFTSKVCPVCGKPHEGARFVRGLFKCPATGLVFNADLVGAFNILKKAVKTITLNLGGLFAQGRGNWPEAGPEGFEEPVLTGCSDENPSNLPVNGEGLSRTLALAGEEVRKTLLALNSKINCP

SEQ ID NO: 601 - protein, 419 aa, Thermococcus sp.
MKRTVTVKLQPSKEAERILSKLADLGAKTWNRVNYLRRQQYFQEQIVDFKGTEKTVYEEFKREIGSATVQQISRKNAEAWRSFFSLLRKKRNGELPTWLKPKPPNYLKEDGKRNPLIVLRNDQYKVEGNKLILKGLGKFKRLEIQFKGRIHLKGKQGRLEITYDPVRRKWYAHVSLTVEEKLEGEEWVSVPRTPKGSLSAGIDLGVNNLMAVYVENGESFLVNGRPLKSIDFYWRKKIADYQSKLNKSGAKASRKLRRMYERAKLQAKHYINTAVRQTVRKLYELGVSRIVVGYPKGITRNSDKGSKQNFILSHVWRFNTVIKRLREVAEEYGIEVFVVNEVFTSKVCPVCGKPHEGARFVRGLFKCPVTGLVFNADLVGAFNILKKVVRTITPNLSGLYAQRGVTGRRPGQRGRRPTF

SEQ ID NO: 602 - protein, 436 aa, Thermococcus sp.
MKRSVTLKLQPSKEQEKALFGLADTGAKVWNRVNYLRRQQFFQGKIVDFNSTEKTVYEGFKREIGSATVQQISRKNAEAWRSFFSLLRKKRNGELPNWLKPKPPNYLKEGWQRKPLIVLRNDQYKIKGNKLILKGLGKFRRLEIQFKGRIHLKGKQGRLEITYDPVRRKWYAHISLMVKEKLEGGEWVKLPRTPKGNLSAGIDLGVNNLMAIYVENGESFLVNGRPLKSIDFYWRKKIADYQSKLNKSGAKASRKLKRMYERAKLQARHYINTAVRQTVRRLYELGVSRIVVGYPKGIARNSDKGKKHNFILSHVWRFNTVIKRFTEIAEECGIEVFVVNEAFTSQTCPVCGKPHEGARFVRGLYSCPATGLVFNADLVGAFNILRKVVKTITPNLGGLFAQGRGNWSKARPEGLKTRFLVGLNGTPQTSLPLARG

SEQ ID NO: 603 - protein, 394 aa, Lactobacillus sp.
MLRTHKIRCYPNATMRRALAQACDYRRYCYNQALATWNEMYGASVVLADKTARPNERKVRDELVANKADWQYARSARILQLAVHDLALAWANFFNSKMPDHRKPRFKSKKRSRCSFKTDRAAIVNGKLRLDKPRRYRDRWYDIRLAETPRWPGALKLTSIVKEADGYYACLSIDVTPPEPLPENERICGVDANIGKFVYNNGASMAYIRGLTEQLTGLYSRVSLYQRRLARKRQANPNHFRSNNYRAAKTKLQRTYQKVTRIQGDFVQKLTTMLVRLNGTIAIEDLDALHMKMNKRLAKNLHRSLFGRFKVLMKDKAPWYGRQLVMVDRFYPSTQRCSRCGMVKTGDDKLTLAGNALHGTKHHEFHCYGCGAQLERDENAVQNLIQYAQGQAMS

SEQ ID NO: 604 - protein, 253 aa, unknown
  TnpB Polypeptide
LIEKIGWIKTNEQIPRNVKYNNPRVTYDNKYWYISVGVEVDKKQEELTDISLGIDLGLKDLAICSDGKVFKNINKTKEVKNLEKRLKQKQRQISRKYEMNKIKKEGGGRCQFIKTKNIEKLENTTKLIHRKLANIRNNYLHQVTTNIVKTKPYRIVIEDLNVSGMLKNKHLSDSVRKQCFNKFRKYLTYKTELYGIELVITDRFYPSSKTCSECGFIKKDLKLKDRVYRCPHCGAVIDRDYNASLNLSMYKLA

SEQ ID NO: 605 - protein, 486 aa, unknown
  TnpB Polypeptide
MRAKFKGSVPSSFYEQIYTQVFTCYETKFNNIQRRLVFEVFKVKGFELYKRDTKKYRKGDLKRVLIEKKRTKLSSCLTYLARYGNEGTMAYINSNIDKCDEKKRDFYNNIIRCCEKFGFERIYALALSKRKHILSKYANNPIEFKSLTFSGRCRKKKIIDYNHRFGSKINSFISLSGFSRKSFDIPVTFNKCWHGNMKDYRKSHPDYEYTLTFNEKKHQVNIHLCKDGERYIPEPNGKTIGIDVNCKHNLFCLSDETTYDYDRKLVNDFCKLSLEIDKLKEKNKDYKVGKRKQQKLVTLKIKMIRSEQQTIAIMCKNEKAKGIGHFVMENLNNGFGKCYVKDGENEDINYNRKVKFLGLSSLKQEVEHIARKYDIAVSTVQASYTSKMCPVCGCIEDGNRPNQETFECVECGHKDNADFNAAKNIRNRVLVTVLRDKLLKQLDNGAFEPRMLSREKVKEALLSFRRSLPLVGSECIGSHITTSEYV

SEQ ID NO: 606 - protein, 334 aa, unknown
  TnpB Polypeptide
MSNLTYKVKHGTDLTDELDKAYKIAVFAVKTKSRSSSDVKHLGLKSAIANQILKKYSRNKKIKRIKSVKLTVPGQGIKWNSDSLYISCLKLKIVFEKDILKINQVELDSVYAYITCTVYDIPETVPDGYIGIDRNATGHIAVAVCDSTVLKLGKDAPHIKKKYYRIRKKAQKRGAYRFVKKLKGKESRIIRDINHKISRKIVNTAAALGKGVKLEQLRGIRKPKRNKGKNFNRTVSNWSFYQLEQFILYKARLLGVKVSFVDPYMTSQTCSKCGLKGMRKGKVFTCSCGHKDHADANAAFNIAKAPVLHDPSTVDRDAVESTSGSARKALSECA

SEQ ID NO: 607 - protein, 430 aa, unknown
  TnpB Polypeptide
MRGRAKALLVLNFFLIYIVIYNVETYNIDYINHLLGFMIIRQGFKYRLDTSETQSARLRVLCGHARFVWNQALAHCNELLDVKGEYVPRYESMAKWVTRWKTEEETQWLDQAYTDNLQQKLKDLDTAWKRYFKKVNDAQRPRFKKKGKSRDSVRFVNFKKYCKLEGNRVKLPSGLGWVKFRKSRDIVGDIKNCTVGFDGGHWFVSFQTEQKVKVPKHPSASMIGVDLGIARFMTLSDGSFILPVNSFKTCQDKLARAQRALAKKVRFSANWKKQKAKINRIHTRIANIRRDYLHQASFALSKNHAMIVIEDLKVSNMSRSAKGTEENPGTNVAAKSGLNKAILDQGWYEFRRQLTYKQVRLGGEVLAVPAHYTSQTCPECQKVSAENRKTQSKFLCIKCGHEDHADWVGAKNVLARGHRVLACGETASAA

SEQ ID NO: 608 - protein, 405 aa, unknown
  TnpB Polypeptide
MPYATSYCVVAMKRAYRFRFYPKAKLAEQFEQTLTLCRRLYNAGLEHRIVAYRNGQSVTYLQQQNELPTIKKALPEYASVHSQVLQETLRRLDKAYKAFFRRLVEKRNGKNVKVGFPRFKGENRYDSVTCPQSGFRLLPNGHLLLSRVGEVRMFMHRSPKGKIKTLNIKRDRCGCWFAVLTVERPTAEKRVRQTVGVDLGLHSLVALSNGETLPAPQFLRRSEKKLKRLQRWTSRKKKGSGKRRKAILRLAKGHRLVERQRTDFLHKLSRDSARCDVVFEKLNVAGMLKNHRLAKSIADASWSRLVGMTVYKAEEAGGRVVLVDPTYSSQECSVCHSRVKTLLADRIFKCSNCGLIICRDVNAARIILGRGFSVGRGTAEFTPVENPPILAKPASRFKETGSPSL

SEQ ID NO: 609 - protein, 369 aa, Bacterium sp.
MPTVAHKIRLTPTPEQVVYFRKACGTARFAYNWGLTEWRRQYKAGGHPSMFALKKQFNAMKRQAFPWIADVTKCAAESGLINLGKAFSNFFQKRAKYPRVHKKGKHDSVTLANDKIALRPFAVQIPKLGWVRMTESLRFSGYIKSAVVSRIADHWFVSFTVEMTDSPRPQCKNHATVGVDVGIETLATLSDGTRFENPKATLKLQRRLARLNRALGKKQKGSKNREKAKIALSRLHYRIACIRKDAAHKLTDYLAKHFQTIVIEDLNVNGMMKNKRLAKHIADANFFEIHRQATYKAALSGGNVERVNRFYPSSKTCSQCGHIHRELKLSDRVFTCPACHHRQNRDENAAVNLEQYSVRAACPELTLAD

SEQ ID NO: 610 - protein, 389 aa, Nostoc sp.
MRLTYQYRLRLTKKQIAIFENWIELCRRQYNYRLAERFNWYEQNRCDIDRCSIISCSIAPLKDKPNRWSQQKDLANTKALFPEYKELVSHTLQDVIARVDKTFERWLKGDCNGKKSGRPRFKGKGRYRSLTFPDPIKLKHIQGKFIQLPKIGKVKTILHRPIPDGFQIKMATITRKADGWYIGLSLEDMAVPSFTTDAIPTPDNTVGIDMGLKSFLVTSDGEEVAIPQYYRKAQKHLKHLQRQLSRKHKGSKRRVIAVRRVAKLHQKVASQRRDFHYKTVLWLLSLGYKFIAYEDLNIIGLTRSRLAKSITDAAWGQFLEIVSLKAANAGGAGLPQNPYKSTIECSDCGAEVPKTLADRWHNCQCGASYNRDHNAARNIKHRAVGHRVL

SEQ ID NO: 611 - protein, 426 aa, Bifidobacterium sp.
MLEAVRVALDPTPRQERMLEGHAGAARFAYNLMLAHIQSQLARNEKADWSMYAQRRWWNEWKNEIAPWWAEYSKEAYNSAFESLAAALNNHFASKTGRRKGKRMGWPKFKSKRHTTPRFAYTTGSFGLVEGDPKVLKLPRIGRVHCMENIAGRVGDAKVVRMSVSRRAGRWYASLTVEHEDKPVSSPPKGGSVGVDLGVKALATLSDGTVFDNPRLLKRAHRKLRKAHKALSRREPGSNRWKRARLRLQKAHAHVASQRRDGLNKLTTQLAGTYTDIGIEDLNVSGMVRNHNLAQAISDCGFRELRRQLEYKTARTGAKLHVVNRWCPSSKTCSNCGTVKAKLPLNERTYRCDACGLRIDRDLNAAININVAGSAPETVNARGGVVRHDRPAPAAQTPVNREPSSQNNGMRLGADLGNEVMQTTAN

SEQ ID NO: 612 - protein, 338 aa, unknown
  TnpB Polypeptide
MIAQQIIKAAPEARLQHNQLRGNLYKPTYVIPLEPLTDQMVKVMDYHLATDLYRLPSAEYSALVRSVPAFRQPPDLTKILQATSQHPADYVWITSPKSRYETQIPILSLPNEVAFTATWDPGRWALLERHGEWFLVLWFDLLCIGGGIKGTADVALDLGASPLVCAVCPDGFVEDVESQLPATLSQFADLFRIDRALHNRVEFELQRATLLRFTLFLMSYATTVYTEDLTYRDMDKTFVRWARRTGLLDWHESWLPNRLAAAGIPLEKVDSRGTSQCCSACQHPHGQRYRSEFHCPRCGNEIDAHENAARNILLRGQAKGAQWQHAHIRTRQRRGVIT

SEQ ID NO: 613 - protein, 413 aa, Bacillus sp.
MYFLSIIKIERRETMKRSKLIRISKNNSKYKLIDSLSLKSKNLYNYANYLIRQEFILNGKWIRYNELNKRLKEEIVYKELPIQTSQQTLMLLDKNWKSYFNSIKDWSKNKSKYSGKPKLPKYKKKDGRFNVVFTNQQAKHKNGIIKICPASLDLIFNINIENKIKQIQIIPKNNFYQLEIIYEIDKKEVELNDELYCGIDLGINNLITLTDNLHNNPIVINGKIIKSINQYYNKKRAEIQSTLLIKNKKTWSNKLTQLTEKRNNKIKDYMHKSSRYIINYCLSNKIKTIVIGYNQNWKERLIVSKQQNQNFFQIPYLTLIEMIQYKAEEYDIDVILTEESYTSKASFLDLDEMEKDFKFNGERIKRGLYKTNNGILINADVNGSYNIIRKVAPNVFTDGVEGVKLHPLKINFS

SEQ ID NO: 614 - protein, 215 aa, unknown
  TnpB Polypeptide
VWESETPPASGTREHGSRYHELNGREIKFIKQYRKLEKRIAKEQRRRSHMIKDSNNYNKQSEKIARLHAKAKHRREDFLHQIAVRLVRTYDVIAIEDLDITAMKQALSLGKSVSDVEWGRFTAILEELCLKYGRILVRTSRWYPSSKTCHHCGYKNDDLQLSDRVYVCPVCGNIMPRDKNAAINILEEGLRILKENMLRPSVDGYSKPTLITTIA

SEQ ID NO: 615 - protein, 351 aa, Serratia sp.
VRFVYNSVLRWRTDAYRERQEKIGYIQANARLTALKKEPEFTWLNDVSCVPLQQTLRHQQTAFSNFFAGRARYPTFKSKHHKQSAEFTASAFKYRNGTLYMAKSTTPLHVRWSRELPSTPSTVTISKDASGRYFVSCLCEFEPKSLPVTAKMTGIDMGLKDLFVTDSGFKTGNPRHTAKYAKRLALLQRRLSKKQKGSRNRAKARLKVAKLHAKIADCRMDSLHKLSRKLINENQVVCVESLKVKNMLRNPKLSKAISDAGWGEFVRQLQYKAKGSGRSVVTIDQFFPSSKRCSCCGFTMEKMPLDVRHWHCPECGAEHDRDINAARNIKAAGLAVLAHGEPVNPESQHAA

SEQ ID NO: 616 - protein, 638 aa, unknown
  TnpB Polypeptide
VGARGRPRRRVRRGRPAGRRHPRLAGPRCGRGRARGDDLRRRWLLRPAPAATPARHPAPVPRPRPRRARPAGRGPLRRVGAHRVALRAEQVQPGTARHHPRRRRAQRLLRAVGPPRRAGARGGAPGRPAAAPTGPLTPVPPPRVRQQGEMVVDKSGLVTPPLHHRDMTEEHVTRAVVFNLDPSHPQERLVYSYAGSRRRAYNWVLAEVSKNLKIRSEQRAVGVTESDLTPSLSWSAYSLGKAFNAVKEEVAPWWRDVSMHAFRSGIADAAAALANFSDSLKGRRAGKRVGFPNFKSRNRSILSVSFVEINHQLSWFHPDRHHIRLMLPRSPLDSELKRRSGNLSWIHTTESTRRLYNLIESGRARIQKVTISLRGGHWQVAFSVRYLVGLPIRRPVGRSARQAGTVGLDAGLLHLATLDGVVPGLTDADGHIANPRILESQLKRLAKLNRACARTERGSKNRAKLRRRRARLHGRIAKTRSLYLHHLTNALVDRFDAVAIEDLNLAGMANKKSRLGRSVADASLGELRRQLEYKSADRGTTLVVVDRFYPSSKTCSCCGAVRAKLLLNTRVFECDTCGASIDRDVNAARNIAKEGARLLLGRSSQEEQHVAGLRPETQNADPRSQKTIGADAPMAAIA

SEQ ID NO: 617 - protein, 181 aa, Parageobacillus sp.
  misc_feature (142)..(148): Xaa can be any naturally occurring amino acid
RKRQSPLVVKIDKEKLPNGKVKEIELVYDRGLWLCLSYEDGKKPKENPCKNRVAIDPGEIHTIAAICENGESLIITGRKIRSIHRLRNKKLKELQKLMSRCKKGSKQWKKYNRAKQYVLSKSEAQLKDALHKTTRQFVRWCXXXXXXXRHWRYRRNPTEYEKETKQKDQSEIIQLVVWKII

SEQ ID NO: 618 - protein, 524 aa, Streptomyces sp.
MAVRTRLKQLTTTDVEVLRQVGAHLGALASRDLKARCRDGLGHDAVAWAGRKRELTPLSSARWAGAITKASNDQWALARRSAHAHLQSLDAGVRTLRHRLSLPIGENGSKHASGGYRSQREWHAKARRLHVLEDRLARARADWAAGRVHVVRGGKRLARLRHQLPDVGLTEAGWREQWEAARWFVQADGESGKRFGNETIRISPGGEVSLRLPGPLAHLANAAHGRYVLTARIRFAHRGQEWADRVAANRAVAYRIHHDTMRGRWYVTASWQKPVTHTVTLAAALAEGVIGVDMNADHLAAWRLDLHGNPVGHPRRFAYDLIGSADHRDAQVRHALTQLLHWATSHGVKAIAVEDLDFTAEKTREKHGHRKQFRQLISGMPTSRLRTRLASMADRTGITVIAVDPAYTSRWGAQHWQKPLTTSTRRTTRHDAASIAVGRRAQGFPIRRRTAPPRTHQSDGRGHRTIQADRKALGREGPRPRIPGPRTRSVPPDTARTRATRTPNTVRGARSEQGWVQDSLLLTE

SEQ ID NO: 619 - protein, 244 aa, unknown
  TnpB Polypeptide
MIRAIRIRLYPTPDQKKYLAGLFGAVRFCFNKALYLKTHFYKVKGVNLHPIHDLKKLIAIAKNTKKYAWLAEYDCMALQESVRNLNKTYSRFFKKEAGYPRFKSRRGEQSSYHCTGVSAGDDFVKVPKMKKIKAVMHRKIEGKVKSITLSMDACGDYWASVLYEDGLPEAVPATCVRQTKTVGVDVGIETFGTCSDGEKIKSPKALKRAEKKLKKAQRAFSRKQKGSNLKVVQNGHDTQVKMTF

SEQ ID NO: 620 - protein, 386 aa, unknown
  TnpB Polypeptide
MELTVVAKLDLSAQDKERLERTLEVFADACNAISQAAFTKRCFHPVALHHLTYYNIRQRFNLLANYTVRAISRVAKAYKTAKAKKQPLKLLTFKAQSLDLDARLFRLFWKDDEVCVSLAVCDGKRIKCPVKIGQRYLPIIKASNPTFAVLKRHRDGELYLHIVVSVSEPKPTDSPQTVVGVDLGEIDLIVASNGVKISGVESIERRKRFRARRRILQRKGTRAKRARTRLGDKERRWARTYLHTVSRRFVDSLPPNSLVVLEDLGGIRDRCKRSTAEQRAQFHTWAFRELQWMIAYKARLAGHQVVFVRPAYTSRTCPRCGHVGSANRLSTRLFRCQQCGFQHNANFVASLNIATRAVQAGLDSAGLLSTSLRLREFNLLSASRRL

SEQ ID NO: 621 - protein, 436 aa, Deinococcus sp.
VKLTISAKLKLRHTPEQKTALDAVTLAYRDALNFASEKAFKLEKTSSAPKIHKAVYETLRDQEGPFRLGSQLACTVSRQVAASYKTQWTKLKQNISARQKGFTKRRYKGLDTAPKFVSRTLEYQYGRDYSWKKNGKVSVGTLAGRLVLEFDGYQKHLDLIQAGAETGAAKLYYQKSKKQYYLIVALNIKLPDPQPTDHQKVVGVDVGQRYHFVATNLNGQSLFEKGAAIHHRKDQFSRVRRSLQRKGTRSATRRLVALSGRERRFVADRNHVLSKTLLTRFPGSIFGLEDLTNIRDRTEGRSNPQSSLRARRSRRRRSQWSFAELQANLAYKAPLHGSLAVQVDADYTSQACPRCGHTSKGNRPNAGLMFVCEVCGHAGHSDRVASVNIALRTLLVRQDWMSTGALSMRPDVSDVEVKVARLSRYAELRWNPDTNP

SEQ ID NO: 622 - protein, 400 aa, Planktothrix sp.
LLKSFKTKLNLNNQQHTLASKHAGVARHAWNWGLEICLKALDTKEKLPTAIDLHKQLVAEVKSANPWYYEVSKCAPQEALRHLQKAFKHWLKVPGRGKPRFKKKNIKDSFYLEGSIKISGNKIKLPKIGWVKCHEILPSVQPKNVTISKRANDWYVSFKYELEPQPTPKIRQKIGVDVGINSLATCSDGTVFPNQKAYRKAKRKLAHLQRSVSRKQKGSKNRSKANLKVARLHRKIANIRQDALHKITTWLTKNHSEIIIEDLNISGMLKNHRLASAIADCGFYEFKRQLEYKADWYGSTIIKVDRFYPSSQLCSCCNHRQKMPLSKRTFKCGNCGMEIDRDLNASVNLEHWHALIDYPKTVSSTGLACGESRQLNSSAVKDSVKQEVNVEFTWLGAFVV

SEQ ID NO: 623 - protein, 332 aa, Thermoplasma sp.
ILTDVPSFLDNAFKNFFHKNTEHPKFKKKGINEFFAVPQHIKIRGNSIYFPKFSEGIYFKGSEKKLSEIKDINEIVITKDSGYYYCSIIYENEEELPEKKPLSEENSVGIDLGIEKFATLSNGIAIENPGFIKKVEKRIKRLQKQLSRKQKGSKNRRKHILKLQKEYMKLRNMREDFDDKISTAIAKQYDTIVIEDFNVHGMMQNHHISKSLSDVSFYSFKQKLEWKAEKYGKNIIEIGRFDPSSKICSSCGNVKHDLKLSDRIYHCDVCGLIIDRDHNASKNIRKIGLIKVGLVQSELTPVEIATSGLYGIYPYRQRSVVESGSSDASAEE

SEQ ID NO: 624 - protein, 376 aa, unknown
  TnpB Polypeptide
MKLIAQVKLNPTPEQAQALKETLQIANAACDYLSELAWGTQTFGQFALHKIGYAGAREKFDLSSQVIVRCVSKVADAYKLDKKVKRTFKPLGAISYDDRILTYQFDKGQVSIWTTAGRIKIPFVCGERQAALLKTRQGESDLCLVKGKWFLLATCNVEEPPSVSGNGVIGCDFGICEIVTTSEGKSYSGDKVKALRRKLREHRRRLQSCGTKSAKRRLKKAAKRQERFVRNSNHVISKEIVHDAKASNKALAIEDLTNIRKRSTSFNKEMRWQIGNWAFAQLAAFVTYKAKAAGVAVVRVDPRNTSRTCAVCGHCEKANRKSQKHFKCLSCGHESNADANASINISKRALVNAPIVVYSQNTVRVGTTSPAPCGRG

SEQ ID NO: 625 - protein, 453 aa, Natrinema sp.
  misc_feature (395)..(395): Xaa can be any naturally occurring amino acid
MEYSHRYPAYPTQQVAAVLDSHIDIHRQAYNYTLYEYESVDADDIGSAYKHHYRLTNWKDEYPIFSEVNSKALQRTVTRFYQNLNGLSEQKQNGRKVGKLTWKSPTEFQSMTYSQSGFELKNTSGRRATLWLSKIGDIPIRYHREIPDEADIKEVTIKKETTGDWFVSFGLETDDADLTEKPDVNSLNTSNSVGLDLGILNYIHTSDGTTVDWLDLEDEYDRLRHEQRKLSRKEQGSNNYEKQRREVAKVKRHIRRKVLDYQHKITTWLVGEYDAVFVENLDVKGMLEQSQNARNKQDAAWRQFITLLEYKADLYSCHVLQVEAAGTTKECAKCGVETAKPIWVREHSCPSCGFECDRDANAALNVLQRGFSELGLGWPEDTPVETALPTDTHSXDANAALNVLQRGFSELGLGWPEDTPVETALPTDTHSMSAKRVIETGSPTLNEAAPAAE

SEQ ID NO: 626 - protein, 449 aa, Halopenitus sp.
MKRTNTFAVRPLSATGERLLRDLLDASAALWNEVNYQRLMRYNDEDGFEGDVWDADTGRLEGRYKGVLGASTAQQVIRKNSEAWRAFFRVKAQYHDESNTSVTEHPDPPGFRGNEDGGRHLRTVIRNTSYTVEWGECSRLEILVGSELKERYDHPGRLRLEIAGAPNWPDYEKQGRLDLWYDETESTFRASQPVTVSEAARATPLAAETAALDIGANTLVACTTTTGEQYLYEGRALFQRFRDTTRHIAELQSKLPEGRYNSERIRRLYRKRTRRRDHAQEALCRALLDRLYEDGVDTVYVGGLTDVLDTHWSVETNAKTHNFWAFKHFTERLACTAEEYGISVEVRSEAWTSQECPQCGSTDRTTRHKDTLTCPCGFEGHADLTASATFLKRQTKQAVRPMARPVRFKWDDHTWSGKPHPHERPNEQRTDRSTVHRDGNVASGGSQPG

SEQ ID NO: 627 - protein, 385 aa, Streptomyces sp.
VKVVVQVKLMPTSEEAAALEATLRTVNRAADHTSATAFATGKTSRNDLQREVYSALKAEFGLSAQAAVRTVKKVVDAYATLRANIKAGNLGPPGTKRRRKAESKPIAFRLDAAQPYDDRILSWQHDAATVSIWTTAGRIKGVRYTGHPDHLKTLREYRKGESDLVHRDGKWFLVAVCEVPEEPRFEPVDWIGVDRGIANLATTSDGTNYQGRRLGRYRRHHARKRAELQAKMTHSAKRRARRRARKEQRHAANQNHKISKEIVAIAQRTGRGIAVEDLGSIRDRVRPRRDQRAMLSSWPFRQLEEHLRYKARRAGVPVIAVDARYTSQRCPRCGHTERANRRTRDHFCCRRCGLAGPADHVAGVNVRNRARSAWVLVNGPVPQRT

SEQ ID NO: 628 - protein, 171 aa, Enterococcus sp.
  misc_feature (16)..(49): Xaa can be any naturally occurring amino acid
MDKKLIIINSRPKWKXXXXXXXXXXXXXXXXXXXXXXXXXXXXXXXXXXRTDFLNKLSTEIIKNHDIICIEDLNVKGMLRNHKLARSISDVSWSSFVAKLQYKADWYGREIIKVDTWFPSSQICSECGHKDGKKSLDIREWTCPICHTHHDRDINASINILTEGLRIQTLA

SEQ ID NO: 629 - protein, 200 aa, Enterococcus sp.
  misc_feature (159)..(192): Xaa can be any naturally occurring amino acid
MTFPTPAKYKKEFPFLKEVDSLALANAQLNLDKAYKNFFRDKSVGFPRFKSKKNPVQSYTTNNQNGTVALIDNKFIKVPKLKSLVRIKLHRQPKGMIKSATISRHASGKYYISLLCKEEISELPKTNSAIGIDLGITDFAILSDGQKIDNHKFTSKMEXXXXXXXXXXXXXXXXXXXXXXXXXXXXXXXXXXLRETTTQN

SEQ ID NO: 630 - protein, 313 aa, Enterococcus sp.
MKNLKGYRFRIYPNEAQKRFFIETFGCVRFIYNYFLKLDTAERTSEEIITPASLKRDYPFLKKTDSLALANAKRNLDRAFQNYYQQRSGYPKLKNKSSVWQSYTTNNQNGTVRIEDGYLKLPKLKEKIQICEHRKITGKIKSVTISAKNNEEFYALILCVETIDKFEKTGKKIRLSFDAHQLVQQAKYRAEVIEPIQHTKGRLAFLQRRLKVKARVARKQNRILVDCKNYQKQKKQYDKLLTHLNNQIKDYLNHLSIFYIKEYDVIEIVEPEDRSCAKDDLFTSNEWHQLVRLLKYKAQWYGKEIQIINCQNI

SEQ ID NO: 631 - protein, 413 aa, Mycobacterium sp.
MRYRYRIEPTQAQQQMLARVLGCCRVVFNDALRVRDDAYRAGEKIPDTEIQRRVITQAKATEERWWLAEVPSVALVQSVNDSRRAFRNFFDSVSRRRKGRRIGRPRFKSRKDHRQSFRLTRNGFGLRPNGRLFLAKVGEVRVRWSRELPGQPSSVTIIREPDGHYYASFVVDVEPSPLQASDREAGVDVGLNRLATVATTDGQRTDVANPKHLGRKLRKLRRLEREKSRRQEGSANRNKTRRKVAAQHGKVARARRDYHHKQALALVRENQVIHVEDLNIVGMVANRRLARAISDAGWGQFVKIIGEKAGRYGRSLHQVSRWLASSKTCSACQHRLDELPLQIREWTCPACRTVHDRDYNAAKVILAAGRAERLNATHQRGRERASGPGGAPVSPPIIREARGDEAGSTPSAA

SEQ ID NO: 632 - protein, 487 aa, Lachnoclostridium sp.
  misc_feature (94)..(196): Xaa can be any naturally occurring amino acid
MLHPNNKQKTKLFQSAGVARFTYNWALGREQENYNEGGKFLSDKELRKELTILKTKEEYQWLNDYSNNITKQAIKDACNAYKRFFKGESKFPKXXXXXXXXXXXXXXXXXXXXXXXXXXXXXXXXXXXXXXXXXXXXXXXXXXXXXXXXXXXXXXXXXXXXXXXXXXXXXXXXXXXXXXXXXXXXXXXXXXXXXXXLKSKKKSKPGFYVDTDKIQFTNNKVKLEKITTSKKQNKQKQNWIRLAEKDRIPVDGRYVNPRITFDGINWWISVGIEYPEQKEAAKNEGIGIDLGIKDLAICSDKNKYQNINKTEKVKKLEKRKRRLQRSISRKYEKNKKGESYCKTSNIIKKEEELLKLNHRLTNIRQNYLHQTTTGIINRKPKFIVLEDLNVKGMMKNRHLSKAIQQQCFGEFRRQIEYKCRCNTIPLIIANRFFPSSKLCSCCGKVNRYLKLSDRIYKCVCGNIIDRDYQAALNLKKYGENVLKQSVV

SEQ ID NO: 633 - protein, 451 aa, unknown
  TnpB Polypeptide
MMAATMATATVHQAYRFALDPSPRQRGGLASHTGAARFAFNWGLALVKERLDRRTSGEDVQVPWSLFELRREWNRAKGAVAPWWAANSKEAYTSGLDGLARALKNWQQAKQGRRAGAKMGFPRRKRKGRSRDACRFTTGVIRLEPDRHHVTLPRLGRIRTHESTRKLARRIEQGTARILSATISRQAGRWYVSFTCQVQRAGCGPRRPAARVGVDVGIRHLAVCSDGRRIPNPAPLQQALRQLRRLNRQLARRHGPRAPDGTPRAPSTGWQQTKRQLGRAHAKVANLRRHSLHQLTSALARTYGTVVVEHLNVAGMLGNRRLARRLADAGFGELGRQLTYKCAWAGGRLVEADTFYPSSKTCSGCGYVKAKLPLSEQTYRCQQCGLVADRDLNAARNLAQLVDALVDRSVAMVAGSGPETLKTPVDGDVRLGLGPAVPGEAGSRRQTTRSG

SEQ ID NO: 634 - protein, 352 aa, Sulfolobus sp.
MDGNHIVRTVMLSLKVNSEVYARLKEVEEEYKQILEDAIDYGLRNNINSFTKLKAGIYRQERAKHHSLPSHYIYTACEDASARLKSYLKRRKQGKAYTDKPEIRNVSVHLDDHLWKFSLSEVRIVTRKGWVSLKPFFTKLFWRYYNDGWALASESSFKLCKGNVVKLYLVFKRPLPKPFEAKGYIPVDLNEDNVSVLLDGKPLLVETSVKKITLGYAYKRKRISEGRSTKDRVVRRALKSLKERFKKLDIRRKLAKLIVTEALREGKGIILEDLPKNTPEKMVQDIKDKQLRDRIYKSAFASLKNAIVEKAKEFGVPVLLVNPAYTSSVCPIHECKIIYPPDGSSAPRVGCV

SEQ ID NO: 635 - protein, 350 aa, unknown
  TnpB Polypeptide
MVYRGREGNSEKKDYVTIRGRLELPDMVAKAKVFYAMRIFREAVERAFILIKKGVDDKEIARRITRYLSNAHYSYSALQRAKMYREQYRLRLKKPQLYSIGKACEKGNRNIHLTSSDEALVKIPHADGKHEWVRCSVRFGKKHIPTIRELINAGFPYSCGIVLNNGKFYIHVTVPLEIMLKHDSHPKASAKSEYIAGFDLNSDRINMVITNENGEIIDIKNKHFPEITQHGYSKNKARDTILKSLNELINYAVHHNVKCFVFEELDNIKARKTRSRNANRKISRLPYRILLTYAKTTVKKRNGTFTTVPPAYASIDAIPLSKKLGLDIHTASAYLLAFRHLESTKIYQYL

SEQ ID NO: 636 - protein, 397 aa, unknown
  TnpB Polypeptide
MSSNNIYKAFKFRLYPTEEQEEFFEKSVGCCRFVYNKLLEASIAEYESSGKFILGYSLTNKLVELKNVYPFLKEINSQSLQQSAMNLAAAFKNRFCKNRKKQAGFPKFKSKRSSSPSFNVPQHFIIRPNQIKLPKIGWVSCKMHRKLEGKVKSLTISKDVDRWYVSILCELPEKEIHYDANNAVGIDLGIKTFAVTSDGECILSPDLSKEYKKLKTLQKRHARKQKGSSNRNKARIKVARQYRKIRRINKNFIETTSSAIAKQYDVVSVEDLNIQGMKKNRKLSGAIQKLSWCGFVQALSRKVSVVHKVSRWYPSSKTCSCCGWIKKDLTLVDRVFSCDNCDSIMDRDANAANNLLNEYKRTVATTGFACGGDVRPKGFVESDRQTSVKQEYEFTGT

SEQ ID NO: 637 - protein, 404 aa, unknown
  TnpB Polypeptide
MGMKILLKAFKTEIAPTKEQRQKIICSIGVARFLYNQYIAYNKKLYKMYQRGLLDCHQKHFVTANDFDKYVNHNLKIALPWINDCASKACKKSLVNAEVAFKRFFYGLSGFPKFKKKSKQDIKLYFPKNNKSDWKIWRHKLMIPSIKQVRLKEFGYLPVNANVINGAISYIAGKFYVSVVVDIDKKSKYNKDLKVSYQLQTKGFGIDLGIKDLAIVSNNQIFKNINKSSKVKRLEKRLRREQRHLSRKYEFKKKKGGKTAMTSANIEKQKLKIQKLHQKIGNIRKDYENKVVHEIVKQKPSFITMEDLNVKGMMKNKHLAKAIAAQRFNYLLTKLKRKTEIIGIELRMVDKFYPSSKTCHACGYINKTLKLKDRIYVCPKCGYTKDRDFNASLNLRDAKEYWVI

SEQ ID NO: 638 - protein, 377 aa, unknown
  TnpB Polypeptide
MEKTFEYRIYPNNAQKVLLQKTFGCCRYVFNKVLTMRQKEYKQGKKSKGINHYITQIPTWKKTDSPWLAEVDSMALQQSLRDLDKAYKNFFRSPGKVGFPRFKSKHNHRQSYRTNVISVLDTKHIKLPKIGVVKARISRPIEGRILSATVKQVPTGKYFVTICCADVPSPSISEGSIEILGIDAGIHDIATCSNGTRLANPKNLTKSEAKLKREQRKLSRKQKGSHNRERQRIKVARVHENIANQRKDTLHKFTTSAIRESQAIAVEDLHVKGMVRNHHLAKAIADASMSEMIRQLEYKCAWYGRNFVKVDRFYPSSKTCRVCGYHYKELTLAQRSWICPECKTYLDRDLNAAINIAREGERILNDTVGHTGIEAVA

SEQ ID NO: 639 - protein, 371 aa, unknown
  TnpB Polypeptide
VDWDYAAHWVDSAIKTAHSILKSWRKNYVKGERKRNKPTARRLFARVKQTLLKLEGEKLRVTVKPGEHVYLDLSARYFKLPSEVSSAGLGEPVITLEKVHLPVHYEDTQSGKPAVAWDFNLLSLDGYSPETGWVRIDTKKLASVHISSFEKEECAEEGFTLEKSKKSSFKVLQQRKKPCEKTPARDYACDPITVWLGGPRRAQKAGDVHASRVWNRRISRSDWRSIARILEERLGEARVEELDPYGSSSYCSRCGWHNQDLNGADIFVCGGCGLRIDRQLNAAINLYMRMSFGYTEKWVGGKKSIQLRMEGASQREWWERVVLPSLLGGCVLTGAELKGTNELVRGLHDAVRPKLYYAYDRCADAYLRIPT

SEQ ID NO: 640 - protein, 416 aa, Moorea sp.
MNYTYRIYPDVAQQQLMLSWLETCRRLYNRCLRDLKDWINSRKCPVDRCSINREYIMSTDIPFPGYIEQKRQLTQWKKTEPDLKEVHSQVTQDVVKRLHNSWEYFRQKGRGFPRFKKSGRYQSLLFPQFSKNPIIGSKIKLPKIGLIDINLHRKIPDGFKVKGVRVLSRCRGTKWFVVITIQANVSVPDTPSFGRAIGVDVGLIDFLATSDGLTIPRPKFFVDLQRELKLLQRRTSRKQKQSKNWEKAQIKVARLHHKIANTRKDFHLKIAHQLCDQADSIFVEDIDYRVMAKGFLGKHSLDAGFGQFRELLKWVCWKRGKFFATVDHKGTSKLCPECGADWDNNLSIRWHTCDECGYSNNRDVASAEVICDRGMNKYPRTIGERKLPANGVLSGVLCLDKCYAGNLNCEVKKPTV

SEQ ID NO: 641 - protein, 485 aa, Moorea sp.
MPRTFGVAKRISTQIVPVVGITKSVEIELLSTMKKLGIVRSESYNKLGSISHWSLDWKKAIPEVKSFRTPDTLGLPAKLMDWTINDVAKAITASQAACTDAVIKKIYKRFPRKDNQKTRKELCKQLKTLAFLDNPLLHRLVRKEFKRGHSWVKNQIVYQQVGYNCKRLSRNTYELELAGLQKRKRNKIIVRSNRKIKGQIRLIHNQILQRFEVHFLVDHGTVVVPGNRRSIGIDKGYTEAFYDSDGQAHGKELGKATTKKSDRICHKNRQRGKLWALHKKLKKIDQAKSARILEKNLTRKTENKRYRQDQSVLKAIIGAASKSLFNGESLKVFSEDLTRQFKNKRQSKAASRKLNSWMKGQMRDSIQKWADWTGSVVTEVQPSYTSQVDSRNRTLLGKRTGDNFTGFDGVVLQADHNAATNVLSRGTDKDITRYMSKAEVQAVLLRRTARFLTGMGLSLLDAVELGWLDCKHSKTQAFKQLLIEM

SEQ ID NO: 642 - protein, 479 aa, Clostridium sp.
LKITIKALLINETNTQISIIDKMMLVFSTATRYSFRRLLEGKKIGDLEKEAAYKFNLNIRQAKDAVESARQTIASQKELIKMNYENYAKKVTTIKNILKDKKNNLSEKKRNTLLKKLDKRQRKANHFKGFIDTSTIPSVVFGTKNMFLKRCKGLISNGEWKACRNNRIYSRGDKTKKGNPNLRIIINNNMSYLQISTLEKTENNRAVKIEVPIYLPQKLSKKTGKVKGTNYRDLFLNHLSTGEVYQVEMIKKKDKYYCHINFELQKSDDRYTVHNRIIGIDTNPDGFALTMIDNKGNYKWHRYLKQHELLYARSNRRLNLCGELVKQIILIAKTYNCGISVEDLKFKNDTDVQSKFARIKHGFIYSKLLTMIEASCYKEGVELIKVKPQYTSKIALYKYCHQYGMAVHNGAAMVIARRSYKFKEKIPKILKDKLVDNNELFNEKNDWSKWNYISKIIKRKVGERPDSWIVNRKQILGIA

SEQ ID NO: 643 - protein, 415 aa, Mycobacterium sp.
MQMRYRYRIEPTCAQQQMLARVFGCCRVVFNDALRIREQAYRAGNKLCDSEIQRRVITAAKTTEERGWLAEVPSVALVQSVNDSRRAWRNFFDSCTKKRKGRRLGRPKMKSKKCHRQSFRLTRNGFNVRANRRLFLAKVGEVRVRWSRELPSEASSVTIVREPDGHYYASFVVEVAATPLPALDREAGVDMGLSRLATVATSDQTRTDIQNPKHLGRKLRKLRRLEREKSRRQKGSHNRDKTRRKVANTHAKVARARRDYHHKQALALVRDNQVIHVEDLNIVGMVKNRRLSRAISDAGWGQFVRIIGEKAERYGRSLHAVSRWLASSKTCSACGYRLDELPLQIRTWTCPACRTVHDRDHNAAKVILAAGRAERLNASHHSGRDRESNPGGAPVSPSTIRKARGDETGSTPTAA

SEQ ID NO: 644 - protein, 273 aa, unknown
  TnpB Polypeptide
LVEKHAFLKEVCHDVHMKITCAFQYELYVDETRRAALTRNAGCRRFVFNKALGIQNERKSKGEKLLTYKELAHELVLWKKQPETAFLREAMSQPLQQALRDLDRAIGDSFRPNSDPAHKGWPKFKAKDIGDGFRIPQFAPEHIDDANGRVKLPKIGWIRYRRTRPIAFECADGMLVPGVVKQIHVRKDCGHWFVIFTVEFEVKVPDMKALDVGIDVGVVHAVATNDGRFYDLDTEKIRSIEKRIAGLKRKLSLNQESRKKLAKLGLAEPFDKK

SEQ ID NO: 645 - protein, 401 aa, unknown
  TnpB Polypeptide
MKINKGYKFRIYPTCNQKIAFKQSFGACRFIYNYLLDVRSKSWKEHKISISCFESIKMLPVLKKSYLWLKDINSQSLQQTVINLEAAFQRFFKKVSGAKYPQFKKKRDNHQSFTVPQSFSLTASKRGNWFLTIPKLKGKIKVKAHREVLGSIKTAIISRNPDGNYYVAFSVEVEHQPQEKTVSKEVGIDLGLKDFLVTSEGVKLKPSKYYRLLERKLKGKQRDLSRRKISSSNWTKIKHKIAVLHQKITNQRNNFLHKISSKLVHENQIIYVEDLNVKGMMKNRKLAKSIADVGWGEFGRQLKYKGLWYNTSIVKIGRFEPSSKLCSGCGYKNMDLKLSDRVWICPICGIQHDRDINAAVNIKKIGQDMPNSKSVEKSTSVFSLKKRQAGSVKQKPIPKLS

SEQ ID NO: 646 - protein, 513 aa, Planomonospora sp.
VGELRSIADPFTVPGPAGVAIRDRLRLSEADAAVLAEVGAFLGALASRDLKTRCAAGREHDTAAWAARKRELTVASSARWAGSITKATNDQWALARRAQLDRLQKLEAGIAVLRHRLSQPLGAPGTNRAPGGYRSKAERHAKQRRLHLLEARCAAVRRDWEAGRVRVCRGGKRLATTRHHLEQADLTEEKWRERWRAARLFLSADGESGKRFGNETIRLSPDGEISIRLPSALAHLANAPHGRYVLSCTVRFAHRGAEWADRITADKAVAYTIGYDAVRGRWYATASWQRPPAPVLPVEAALAGGCLGVDANNDHLAAWRLDAHGNPVGAPRRFAYDLSGSAQHRDAQVRHALSGLLHWARQCGVKAIAIEDLDFTNDKTREKHGRRKRFRNLISRFPTAKLRNRLVAMAAEQDVAVVAVDPAYTSRWGAEHWQRPMSAPRRRVTRHEAASIAIARRALGHAIRRRTTRPPGDRSDHQRLRDVQAGEHAPERGQGTRPPDPDRPRGGPPPGGT

SEQ ID NO: 647 - protein, 410 aa, unknown
  TnpB Polypeptide
MTYKTHKIFVNPRHALFKALDNYAFLAKNLYNSTFYRHRQDYKDGKKKVGWMALNKEFRSTNQPDFRAIPSSMAALIVKAVDGEYESCFGRRKAGLKAKFPQYKHPIEGRYKLIFNEKLISKKALKRGYLKLTTPKSIKEELKFKLPKKIDYTTIKEVTVTKFNDGYMINIISKIEFIEFKVKEYNNVAAIDLGLKNLVACVSNNKMKPFLISGCPINSFNHFWNRKISKLKSKLDTSKDEGEKKALKDKINFSSRRRNFKVNDYLHKASHTLINHLDSNQINSLVIGYNQGWKQDINLGKKVNQKFCNLPFYKFLQMVTYKCEAKGITVKTQEESYTSKCSFLDNEEVCKHDSYLGKRVKRGLFRASNGSEINADINGAYNILVKAIGKFNYRPIQVCGLPSTLRVEFK

SEQ ID NO: 648 - protein, 398 aa, unknown
  TnpB Polypeptide
MPRYRLLPTPDQEAVLRDHCGHARYMWNLAVEQYAHWRPGRKGAPGYLEQCRQLTAARAEHAWLAAGSQMVQQQALRDFAQAMAAFFDPHNPARRPAWRKAGRDEGFRIVGKRREQWDVRRLSRYVGEVRVPKVGWIRFRWSRPVPPEVKSFRVTRDRAGRWHVAFAAIPEPFPAPGNGQAVGVDRGVTVSAALSTGELLCAPGLSTWERARLRRLERKLARAQQGSGRRQRVKAAMARLRAHETDRRKDWVEKTSTRLAREFDMIRVENLNIVGMTRSVRGTAAEPGRNIAQKTGLNRGIMRSGWGLLVRRLADKAPGRVEKINPAYTSQRCSACGHIAAESRKSQALFACVACTFACNADVNAARNIAAGHAVTARGGDGVARPVNREPQLLLQSA

SEQ ID NO: 649 - protein, 366 aa, Proteobacteria sp.
MMRKMMKYRLYPTDAQAEALDGQLAEACRLYNAALQERHDAYKREGLSLNYYTQASQLKEIRAEGASALANFSSSQDVLRRVDKTFKAFFRRVKTGAEKPGYPRFKSRRRFDSYTFPSWGDGCRLSDAGRLYLQGVGHLKVKWHRPLDGTVKTVTVKRQAGTWFVCFSVEYVVEALPGNDARVGIDVGLTDFATLSTGETIANPRHYRKAQKTLRIAQRRVARRQRGGRNRRKAVVLLQKAHAHVQNQRADFHHKTARTLMNTYGVIAVEDLRIKGLASGMLAKAVHDAGWSAFFNKLAAKAEEAGRLLVKVNPRGTSQTCLCGAEVRKTLAQRWHQGPACGLSTARDHVSAQLISGLGLSLLGLT

SEQ ID NO: 650 - protein, 418 aa, Nodularia sp.
MKAVLEFICSQSHKLTNCGIYYARQLYFKTKKLIGKYDLEKEYKSNKHYQVLHSQAAQQILRSVAESFKSFQELDKKYSQGDLHFKPQLPKYRKGSGYALVTYPKQALRLTGDKIRIPLGNTVKRWFKLDSFTIPMPTNLQFKNIKELRILPRNQCFYVELVYEKESAPKYEVYPKNTLAIDPGINNWLSCVTNVGTSFIVDGRKIKSLNQWYNKRVATLKNDKPQGYWDEQLAHITEKRNRQMRDAVNKAARLVVDHCIKHQIGTVVFGWNQGQRQEANLGKTTQSFVQIPTAKLKARIKQLCEESGIKFVETEESYTSKASFLDGDFLPTYGEKPETWKPSGKRVQRGMYRTGTGQLINADLNGAANILRKVETQLGLSLVKVCRQVLTLATRFRIWETKTKKRNGMALASRVATV

SEQ ID NO: 651 - protein, 443 aa, Lactobacillus sp.
MKKMSSLAYHFGVKLRFYPSSKQKKIIKLNYDAQRFVYNSYVGRNRSNYHAKGYLAVRQYQAMPFAFSILNNYETRLAEEVVTNSELLAKPKNIRDTYSFLRVKEIDSLALANAIQNYQKAWNNYRKIGHGIPTFHKKRSDWSYQTNCQYPKQPEAFLDNGTARFIDAKHIKLPKLGVVRIAGFRKLIKERLLNHISTRIGTVTIKKTADEQFYLSMQLGSDIAFVKALPKTQSQLGIDLNLDNFLTDSNGSMVANPRFYRKAKKKLARAQRVLSRRQRRAKKEGRNLRLAKNYQKQRLSVARLHDKIRRQREDFLQVLSTALIKNHDLVVAEELRSKKLLKNHALSQAISDVGWRSFLNMLAYKADLYGKEFLTIDPKYTTQRCHQCGSIMGQNGYKKLTLKDREWTCQICQMHHIRDWNAAVNILEKGLGKWQNPKIKEAA

SEQ ID NO: 652 - protein, 372 aa, unknown
  TnpB Polypeptide
MISYKYNIYNQKNNKWLDRLLAECCFVWNHALALQRRYYKIFGRYIGIGKIRHHFAKRIKRDIVYSQTAQEILDRLDSSYQRFFRKISKRPPKFKSKKNFKSFVFTQRGFKLDSNVLTINKINKRFKFSYSRNYEGKVKQIRIKRSRTNKYSLIVVTDKNPSQTKEKTHNGASVGIDFGLKTYLTLSTGKEYVSPLFFKQSQNKIKAASKKLSRAKKGSSNRKRRRLELARVHEKIFNHRSDFQWKLAQELCQNFDYIFIEDLNIEAMKRLWGKKVSDLSHALFIEKLEHTALKYGVVVHKINKWYPSSKTCTCGFVNKSLSLKDRTWTCPECGSFNERDLLAAQNILRKGISELESLGKTGKLIPAPNVCI

SEQ ID NO: 653 - protein, 198 aa, unknown
  TnpB Polypeptide
MHKDIKYTDNAIGIDLGIKDFVITSECEVFNNIHFTKSKLNKIKRLQRQLSRKVKGSNNRNKIRIKLAKLYKNITDKKQYYLHYISNTLINENQIICMEDLNVKGMLKNHKLALSIQEMNFGEFRRILEYKSRWYNRQLVFVDIFYPSSKTCNHCGYINKSLKLSDRQWICPNCGNIIERDYNAALNILNEGLRILKG

SEQ ID NO: 654 - protein, 282 aa, unknown
  TnpB Polypeptide
MQIISSYGVELRKQNIPIRQTLEIYRSAVSYLIGIYVQVWEKLAEIPDAKRRFNAAEHLVHTTKKNHACFDFDIRFPKMPSYLRRSAIQHALGTVSSYKTRLDLWEKTDGKSGKPKLVYENHAMPVFYRDVMYREGAEGKDEAYLKLYDGHDWKWFCVRLDHTDMEYLRKYWSGKKASAPTLEKRHQKYFLRFSYTEEVTLTKTPVKEQIICSVDLGINTDAVCTIMRADGTVLGRKFIDHPSEKRPDVPRAGTDPQIPEGTWFCADTGKMGIYETSEHRTG

SEQ ID NO: 655 - protein, 562 aa, unknown
  TnpB Polypeptide
MTDRQKTRLNQITGRDSRVIKTYLGVIERYESDLLTGKKRTRIDASKLDELTLTASRGKASRSSVLHDFKARFSNISVNEFQECRDTAIAMWQSYLERGGSKPLRTRGYSTRKIPRFAFTQRFEIVYSPELEIRHWLKIRDSVDSKTKGSRCHDKLMIPLSISSYHLNRMKEGEVKTVRIFKDSRRKWWAIFTVTLTIEDLDSTGKPPAVLSIDLGINKAACSVLLTKRGYKQIRYWKQEDKLHRMKVLDERVASLQQEKEHLIANGKNSDSVTTQLRNLSGKRELVSKEYDKKLVRDISDYINDMTEQYDLYVSIGKLKGIRNAARRGNFKGRRYRGMIHRWAFARVREMLGHKLATLGFDPKKYHAVPEQWTSIMCHKCGHKGIRPKQNLFICTTCGLKTNADLNGALNIGKRLIMLIPSLRDENGLGMWLTSKDKAILKARRKKSSSQGKSALPQRTPVSKGESVADPNDQMTLLEPFARSKDPAMVNAVETPSAITPSGECEVMQRTEARSHQRNNVSVKRGKARDTLEDSGLLETGDGSREKGETQKYLQEFTHTPK

SEQ ID NO: 656 - protein, 415 aa, Blautia sp.
LLASFKKKSKGRDVMKTGYSIKTWRMRLFCPEQDMLAKTEQLYQETVDFYYKILQTRQDIWKDNLLSIQRELELLTVPGRDGRVPLYTPPHGKLPVYFRRSAMNKAGIAVKSAAVVGENQKKEIIFPEKIDASLTFFKGMYRDISDTSVKLKLWDGKKWKWISSQLEGRPFPVNGTVLSPSLSHNGKLLMLHVPVKQENSDARTAKERVQTGSRICSVQFTNTDIFAMCSIQDVQGKQLAAKASRGGNTYRYRAEQALKKLEKSQKFTENDNVPHADQKHYMYLKHLNEHFAHKASREIVDFCKEQNADLIVLPVYGKDFSRMAMYQSGNYSPFHLSTRIRTYLMYKAWAEGILVLELRAEGTGKICSICGAEGTRSGKIFICKNGHQLNRYLNEARNLGLRSRETFRKNGFIKT

SEQ ID NO: 657 - protein, 374 aa, unknown
  TnpB Polypeptide
MFREPKTNIRVLRERVKDKHCAFLNTLAKEVNFVWNFCNELSIKHTERTGSFMSAYTMDKYTAGATKEGLLVPASTVQAISAEYCTRRKQFKKRRLNWRKSGGSKRSLGWIPFKKDAIRYKNGQIFFQKKPISIFKSYDLSDKTIKCGSFSQDARGRWYVNLTVEVQIAQNNTASRAVGIDLGLKTTAATSDGDLMVSRRYRQLESKLAKAQHANKDKLSKTISAKIKNRRNNDQHQFSRLLANEYGAIFVGNVSSSKLIKTRMAKSVHDAGWSQFKTMLEYKCHEAGVVFLEVNEYNTTRMCSSCLEVPDSSPKGMGSLRIREWTCNCCGVIHDRDVNASKNILRIGLDTLAVGASQLSQEGFKEPPCFSYGE

SEQ ID NO: 658 - protein, 212 aa, unknown
  TnpB Polypeptide
MLRNTPASYKKEYPWLKEVDSLALANAQMHLESAFHKFFREPSAGFPRFKSKKSSRKSYTTNVVNGNIFLEGNYLKLPKMTAVRMKLHRPISEKWKLKSVTVSREPSGKYFASLAESFDAVCVEDLNLKGMAGGLHLGKGVHDNGYGLFLSMLEYKLEERGKYLIKVDRYFASSKICSVCGNKKKNCLYLIGFITVNAVTEWTAMQMQQLIS

SEQ ID NO: 659 - protein, 159 aa, unknown
  TnpB Polypeptide
MGELLSISKTIVAKAKATNGAIALEDLTGIRERTNQVSRSTTERRRTNSWAFYQLRTFIAYKALREGVVVVLVHPRYTSQTCHKCLHIHPDPAQSYRSGKQFKCGHCGWEGDADFNSANVIALLGAVVNQPRGMAYATYGTGLFCSFAEHNRLRATESP

SEQ ID NO: 660 - protein, 437 aa, Streptomyces sp.
VPRSGHQDASAPPFLPVGEQGTRRSPGGYRSAHEWFHKTRRLRLLEDRLAQVRADREAGRVRVARGGRRLLGTRHHLDAAQLSEAQWRQRWETARWFLSADGESGKRYGNETIRVTPDGELSIKLPVPLSGLANAKHGRYVLAGAMRFGHRGTEWADRVEANRAVAYRIHYDTGRGRWYVDASWTIPVTPTIPIQTALAHGVIGVDTNADHLAAWRLDPHGNPIGRPRRFLYDLSGSRDHRDAQVRHALSRLLNWAKTCCVKAIAVEDLDFQAEKTREKHGRKKRFRQLVSGMPTGRLRARLTSMADATGIAVIAVDPAYTSKWGAQHWQRPLDSKTHKTTRHDAASIAIGRRAQGHPIRRRTAPPRAHQSDVHGHRTVQAGPETLGREGPRPRVPGPRTRSVPPDGESTRATRTPKTVRGVRSAQVWVQHSLLLTD

SEQ ID NO: 661 - protein, 202 aa, Streptomyces sp.
MRDLAPTAGAAEFVAFRLRDGRLTLAKTAEPLEIVWSRPLPEGASPSTVTVSQDSAGRWYVSLLCEDTSLQPLPATHAAVGVDVGLDHLLTLSPGEKVSDPRHERRDRARLATAQRRLARKAKGDGANLAKARRKVARIYARIADRRRDHLHKSPLDRDVNAAKIILAVGLTVSGCGAGVRPQRRTPGGQSAVKQITPRREP

SEQ ID NO: 662 - protein, 452 aa, unknown
  TnpB Polypeptide
MVSSYSIKLSGDLKTLENSITIYREALSFVIPIVNDHWDEMKDLEFSNQRNNYVEKLIHSTKDNQAIYNFDGKFHKFPSYLRRAIVASTIGIVSFYRSNLENWEGKKLELERTGGKIPKPPRLSTRHYDYPAYYKNNLFRNFNPENKTIELKVFKNNDWVYETYGLKMSDCNYYKKNLVNKKQNVPTIKKKGRRFYAEFSYNENIPLIDQDDIKKICAIDLGIGTDATCSIMSADGTIYARKFIHFSEEHDRLDTQIGRIKRNQRRGNKKNTKLWKRVSGISQDIADKTARAIFEFGYEHGVDVFVLEFLEFKGKHAVKRAHFWRYKRIYSVLGMTAHRHGLRISRVSARNTSKLAFDGSGTVKRGEKISKDTPYSIVQFTSGKFYNADLNASYNIGARYWIRHILKPVSETKRLVLEAKVPQVAKRSTCTLSHLISLRSELIALNVKRTQA

SEQ ID NO: 663 - protein, 391 aa, unknown
  TnpB Polypeptide
MIKSIKVRLRPNNKQLTRVFQYAGCARFAYNWAIAREQENYSQGNKFLLDGKLRREFTQLKKRPEYKWLNRVSSDVTKQAIKEACNAYINFFKKRAKYPKFKSKKRSKQSFFQDGFKIRFTDTHVKVEGFPMSQKRNKQRLNWIKLCEKGRIPTNCKYMNPRFTYDGLYWYVSVSIEVDDKLNISSNEGVGIDLGLKDLAICSDGNTYQNINKTQRVKKLEKQKRRLQRSVSRKYNMNKKGDRYKKTSNIIKREKELLTLTKRLTNIRRNHLHQTTSEIIKRKPSFICIEDLNVSGMMKNRHLSKAVQQQSFYEFRRQIEYKSAWNHIPVIIADRFFPSSKLCSCCGMIKKDLKLSDRIYKCECGNTINRDFQASLNLKACGENVLRQSMV

SEQ ID NO: 664 - protein, 374 aa, unknown
  TnpB Polypeptide
MDQFRWYYNLCVDLYENCRKEMGRVSYIGLRGFLGHVRLVKEKGGVPYYRISKRRTLWPRSSEWESTPHNRIVRGAIKQFVGAYRSSRAQHAENKFELGYREKKNFQLLFFDDKNYPKWIDRLPGFYREGRKKTPWRELPEAGARGLTIDKKWGRYYLHLPMTVPPITQPKPTERVIALDPGVRNFLVGYSPNGLATKIGAGFAQRYLASLEEEDYLRARLTHLENLEKKEGQQPLRRRIRNMQKRHYFLLRNFHYQVARYLVGTARVILLPTFPTSKLVRHKSTGRKTHRALSRMAHYRFQQRLLFSAQQRGVQVHLVSEAFTSKTCSRCGFLHRKLGSADTFACPACSHTIDRDLNASRNILIRFLVSTREE

SEQ ID NO: 665 - protein, 437 aa, Bacillus sp.
  misc_feature (105)..(138): Xaa can be any naturally occurring amino acid
MINKAYKFRIYPNQAQATLINKTIGCSRFVFNHFLSLWDNAYKETGKGLTYGTCSAKLPAMKKEFVWLKEVDSIAIQSSVRNLADAYTRFFKKQNSAPCFKSKKXXXXXXXXXXXXXXXXXXXXXXXXXXXXXXXXXXIAIQSSVRNLADAYTRFFKKQNSAPCFKSKKNNVQSYNTKQTNENIAVVGKKIKLPKLGLVRFAKSREVKGRIVNATVRRNPSGRYFVSLLVETEVQELPKTHSYIGMDVGLKDFAILSDGTTYKNPKFFRSLEEKLAKAQRVLSRRTKGSSRWNKQRVKVARIHEYMTNARKDYLDKISTEIIKNHDVIGIEDLQVSNMLKNHKLAKAISEVSWSQFRTMLEYKAKWYGKQVIVVSKTFASSQLCSCCGYQNKDVKNLNLRKWDCPSCRTHHDRDINASINLKNEAIRLLTARTAEIA

SEQ ID NO: 666 - protein, 404 aa, unknown
  TnpB Polypeptide
MIKRVLRLKLRTPNRAKERQLLALQAEYTACAQFHLNAIQDLGTHSATKLHRAVYQQARESFSLKAAMLQRARDKAIETWKSHVAWVRRGKRSSVPEFNGNMPIGLAERTFSVTANGVLRVSTYDGFLWLPLFVQASVRPYLSAKRRVSELVRRGKDWYLMLTVEDEDVPIQPGERPVFGLDLGLANTAVLAGSNVVKFWDGKPLRYTRGRYARYRQALQQKRKIGMVKRSKGKESRWVRDLNHKISRQIVDIVAAHNGVLCVEKLLGIRDRTKFSKKLNRMVHGWPFAQLLSMIHYKAALAGVPVIEVDPRKTSQRCSHCGHQDRSNRPSQAVFCCKACEYEVHADVNAARNIALKPLPEGYMSSGVGLLTRPLRGEVPTAILDRGSYGNLNLVSSESEARPL

SEQ ID NO: 667 - protein, 389 aa, Chloroflexaceae sp.
VDEGESQCCQAEAQSEGETLQGAGHATALRQPHRHVSGGERLRVQAGAAREYPDLNGRIVVPYEGYQKHLDMIAAGAELGTATLWYDPRRRTYYLLVSLTMARSEPKPQRVVGLDVGMRQVATTCDTTGQVVFVNGGAIQQRCDHYARVRHGLQRKGTRSATRRLRALSRRENSFKRTTNHQIAARILNHHPQSLIGMEDLTHIRDRTERRHSTHASSKQRRANRRRSSWSFAELQASVAYKAHLEGSEVVKVDPSYTSQHCPRCGHTDKANRPNGRVVFQCVNCAYCAHSDYVAARNLMLRTLLFRQARSGTGCLSATPEGAPDEPKARAEVRGRVAPSHLLKQVVVDSSLCASISAAFLVAAATCVIIAETCQHGKLPGAHTAARYG

SEQ ID NO: 668 - protein, 765 aa, unknown
  TnpB Polypeptide
VSPGGTAEAADGLADVAPDRQQGQDRGRHPGLHVLLEPLPAGLRGAVDDQVVDHLVGDGGQRGPAVAGRPGVPHRGQALAPAQPLVEGPVHGHVEVGGQGPPADPTGLVEVGGGGHEDAGRDLPARAGRVHVRGDGGEVAGGEPVEDRAVALAAGQPQHPRAQGGDQQPRRRVGDQAQPEAVDGEGLVALGHPGPGQGGAQEPGRVPDPLQRPVECGSVPVFDDHVGGGADPDRHPAGGGRGQAGRALGQGGRAAGEHGRDGRAEPQRRRPRTGQDQRREGVGAVDLRGPHVGVAEVGQLGEQVALVGQGDAVEGDGDAVALHANVSSRGDCQIRSAGESGAAVKLSAPGYMLTRVVPALGQQPGTVTHTDYRNPVQVKRAYKLRAYPTRAQEGRAVRLLRDHCDLYNAALQERREAWRMQQVSVSYGDQSAQLREIRAADPDGQGRHSFTAQQQTLRRLHATFGAFFRSVRARQKAGYPRFKPYQRFDQVLFVAGDGARWKPVEGARWGHATFQAVGRLKVKQHRQVVGRVKTLQLKREYRRWYVIVVVETEAEPLPPTGRAVGVDVGVVRFLTTSDGEVVANPRFLDTAQATLTDLQRRKERAKPGSGNRKRLRRVLTKEWRKVRNRRRDFHHKTARALVDAYDALALEDLRVANMTASASGTIEAPGRTVAQKAGLNRAILDAGWGQFTAILTAKAESAGRRVILVNPAYTSIDCHACGTRCARSRQDTVVCPDCGPIDADVNGARNIATRAGLGSGQASAA

SEQ ID NO: 669 - protein, 379 aa, unknown
  TnpB Polypeptide
VINIIKSIKIRLKPTKEQELLMFKSCGVMRFTYNYGLAKWEEMYKQGLKSSKAIIKKEFNNTIKKQDEYKWLYEVSGQVTAQAFEDLNIAYQNFFNGISKKPKFKTKKKSRKSFYVRYDAIKFKDNKVNLEKIGKVEYKSNYNIPQLNKYINPRCHFDGKYWYLSLGFEQGENKAELNQNLSVGIDLGVKYLAIVNCLDKPIKNINKSKKVRKIKKKLKRLQKQVSRKYRMNKDGNKFIKTKNIIKLEKQIKLIYRRLTNIRNNHIHQSTNKIIKMKPYRVVMEDLNVKGMMKNKHLSKAIQEQKLYEFIRQMRYKCKFNGIEFILADRFYPSSKLCSDCGFKKIDLKLSDRIYVCDNCGLIIDRDKNASINLGNYKLA

SEQ ID NO: 670 - protein, 397 aa, Scytonema sp.
MIVYEFKVKGKDKQYRAIDDAIRTSQFIQNKCLRYWMDNKGVSLNRYDLNKHCAVLAAEFPFADELNSMARQSAAERAWSAIARFYDNCKKKVKGKKGFPRYKRNCRCVEYKTSGWKLSTTRKAITFSDKKGIGTLKLKGTYNLNYYDIKQIKRVRLVRRADGYYAQFAIDVDVKVETHPTKEMVGIDLGLKYFIADDKGNVEQSPQFYRKSERALNRANRKKSKKYSTKKKKDHLPQSANYHKARNRYARKHLRVSRQRKEYCKRLAYSVIQSNDLVAYEDLNVKGLVRNRHLAKSISDAGWSTFRAWLEYLGHKYGRCTVAVPPHNTSQNCSNCGEKVKKSLSTRTHVCPYCGFVEDRDTNAAINILQRGLSTVGHTGTYAWGELAGACCLTASR

SEQ ID NO: 671 - protein, 219 aa, Streptomyces sp.
VSIWTVAGRMRGIPFACSPDQLKTLVAHRKGESDLVCRGGKWFLIATCDLPDPEVYEPVDWIGVDRGIVNLATTSDGTNYQGRRLSRYRRWQARKRAELQRKGSRSARRRLARRKRKEQRHATHVNHRVSKEIVSAIAYARRGCLSPHPHPPPDSCWGWVYATRDRPVVGGSRERDEVCTTERNKRPCTTEKVTHTGYGTLRALVHSPRSASTASTVSA

SEQ ID NO: 672 - protein, 367 aa, Dictyoglomus sp.
MLKAYKYCICPNKDQIEFFEKTFGCCRFVWNMMLEEKLEALRRDRKIPRITPAKYKRQYPFLKEVDSLALANVQLQQEKAFKDHFNNPKHFSPPKFKRKKDEQSYTTNNQKTKSGSETIRVDFEKGLLYLPKIKSAIKAEFHRRFEGRIKSATVVKTKAGRYYVSILVDVQDPRNKIKEPQNFICGIDLGLKSFATVVNDSECLKIEYPRYLIKAEKKLKRLQRQLARKKEGSKNWKKARERLAKEHEYVKNTREDFMHKISKAIIDENQVVVVESLNVNGLSRTKLSKYVLDSSFARFIDFLRYKAEWYGRELIEADRTFPSSKMCSKCGYIYKELKLRDRVWKCPECGEVHDRDENAGKNLRDYG

SEQ ID NO: 673 - protein, 416 aa, Dictyoglomus sp.
MDKTYIVPVTEEYQNLAKQLSQQSGKIYSKAVSFLKRMNKKAIKISRKTFDRYMEWWIHKKGFILHSQSKQAAYQQAWTAYTATLKKVKKTEKKNKDVSKIRVPYKSKKYNKVCFKSSAIKQEGSNLIFSNMKGAERIVIKVEDFEARPKYAELIYHKDKNKYYMHVVVEFPKKQVNSEKAQTIAIDLGIIHPMTCFDGKRVTIYNGGILNSLIRYRNKKLGEIQNKLSKCKKGSKRWKRLQRAKRKILKKIRNQIRDVLEKYTSHLIGYCVKNNIGTIVIGDLKGIRNEAKYGKVANQKIHQWMFRKVARRIGEKAGFVGIDIVYVKENGTSQVCPVCGSKNKPRNRNYECGECGFRYHRDGVGAINIYKKYTGIKFLVVGRLACPTGVRFRWHLRCPVEWNTHPWMRNSAGKTA

SEQ ID NO: 674 - protein, 733 aa, Dictyoglomus sp.
MLKAYKYCICPNKDQIEFFEKTFGCCRFVWNMMLEEKLEALRRDRKIPRITPAKYKRQYPFLKEVDSLALANVQLQQEKAFKDHFNNPKHFSPPKFKRKKDEQSYTTNNQKTKSGSETIRVDFEKGLLYLPKIKSAIKAEFHRRFEGRIKSATVVKTKAGRYYVSILVDVQDPRNKIKEPQNFICGIDLGLKSFATVVNDSECLKIEYPRYLIKAEKKLKRLQRQLARKKEGSKNWKKARERLAKEHEYVKNTREDFMHKISKAIIDENQVVVVESLNVNGLSRTKLSKYVLDSSFARFIDFLRYKAEWYGRELIEADRTFPSSKMCSKCGYIYKELKLRDRVWKCPECGEVHDRDENAGKNLRDYGYRCIRSSRVGTTRIYACGDWTSTAMDKTMVASLADESGSLHLFKVDGSSHPYKRVLKEEELINLIKDVDGIIVGIDPITEKVLEKAERLKVISKYGVGVDNIDLETAKKMGIIVTNTPGANSNAVAELTLGLIFCVLRNIHVSDRKAREGFWGRFVGYELYGKTLGIIGTGSIGKRLVSLLKGFNLNILCYDIYPDYSWAERENVKYVSMEELLKGSDIISIHVPLTKDTHHLISKKEISLMKNSAIIINTSRGGIIDENALYEALRDKRILGAGLDVFEKEPPENSPLLSLDNVVVTTHIGAHTKEAIENMASIATENLILALKREKPKFIVLESIEKDGRIEIKKFFEDLAPNHGYIKRKGENS

SEQ ID NO: 675 - protein, 351 aa, Pullulanibacillus sp.
MAKTIGCSRFVFNHFLGKWKDTYKETGIGLTYTTCSAELTQLKKELTWLKEVDSIALQSSLKHLADSYTRFFKKQNKPPRFKSKKNSVQSYTTKEINGNIAIVDHKIKLPKLGLVRFAKSRDVKGRILNATVRRNPSGKYFVSLLVETDVHPLEKTGSSVGVDVGLKALATLSTGEIFSHPKWFRKLEKKLAKAQRILSRRTKGGSNWCKQRMKVAKIHERITCARTDYLQKISTDIIKNHDVIGIEDLQVSNMLKNHHLAKAISEVSWIQFRTMLEYKAKWYGKKVIVVSKTFASSQICSCCGYQNKDVKNLNLREWECPSCGTHHDRDINAGQNLKNEALRLLTVGTTG

SEQ ID NO: 676 - protein, 399 aa, Glycomyces sp.
LQGPANTIGCVKIAVTVKLSPTPEQAASMRATLKVANEAANWVSQVAFDRGVPREYALRTHTYAELKTRGLGAQAAQHVIKKVSDAYTTLRANIKAGNLGEPGSVRRGKAESKPIAFRADSAQPFDDRCLSWQLDAGTVSIWTVAGRIRGIPFTGGADQLKTLRGFRKGESNLVCRDGVFYLMATCEVPESALNEHPMGWLGVDLGIVNVATTSDGKIRSNRARNRQREREQDLRAKLHAKGTKAAKRLLKIRRRKEQRRNNDINHQVSKRIVAEAERTGHGIALETLTGLRDRVRLRKPQRAAIHSWPFHQLAAFIAYKAKIAGVPVVYVDAAYTSQECSYCHHVDKKNRPSQAVFCCRSCGVVAHADWNASRNIAARGDSAWTAGRESRVPPPPEAR

SEQ ID NO: 677 - protein, 389 aa, unknown
  TnpB Polypeptide
MWYNVSGMRTYEYHCRPNKKQEAQLMNVLMASRRLYNDGLQELVEHYKATGKHMNLFEQDKRHGAKQHPDLPAVVVDTTLKRLHRSFANFFRGRKEGKRIGFPRFKSADAWNTIQFRDAANCLDGNYLKTPKISGGKIRVNVYRPLDGNFKFARLVLRPSGWYVQCVTDYDGQRLEPNDKAIGLDFGITYLVADSDGGFVKNPKSFRTSARKLASAQKQLAKCKKGSRRRRKAKRQVARVHERIGNQRKDKLHKVSRSYVNRYGLIAIENLKPANMVKNHSLALSISDASWGLLRFFLAYKAESAERRLVSVPPHYTSQRCRRCKEIVQKSLSVRTHVCPYCGYVADRDTNAAQNILRIGLDETFAEGARGAGFASESPHLLKQEAPGL

SEQ ID NO: 678 - protein, 395 aa, unknown
  TnpB Polypeptide
LRRAYKFRAYPTRSQEGRSVRLLRDHCDLYNAALEERREAWRMSRTSITYGAQSAQLREIRHADPDGQGRHSFTAQQQTLRRLNAVFCAFYKRSKLRGGSKPGYPRFKPHQRFDQVLFVAGDGAKWNDAAGHQWARASFQGVGCIKVKQHRAVRGTVKTLQLKREHRRWYVIVVAEAEPAPLLAAGRAAGIDVGIARFATTSDGEVIANPRFLATSAAAIADLQRRKAQAKRGSGNQRRTRQALAKQWRKVRDRRRDFHHKTARMLVDRYDAIGLEKLNIAGMTRRPAPVPAPGLPGAYLPNQAAAKAGLNKVILDAGWAQFISILTGKAEEAGRTVILVNPAGTSITCHQCGRRCQRPRQDTVICPECGPIDADINGARNIAARAGLGSGQAAA

SEQ ID NO: 679 - protein, 372 aa, Natribacillus sp.
MKLTLTAKIKINPTDEQEQLLAKTVRAYREACNVVSSVIFESKLLVQATLHKMTYRDLRSNLGLKSQMAQSVLKTVIAKYKTNHSNGHEWTKVRFKKPQYDLVFNRDYALKEGWFSVNTLAGRIKVTFETKGLEQYFDGTWTFGTAKLVNKYGKWFLHIPVTKEVEEADLANIHQVVAIDMGINFVATSYDSNSDTTFFKGRPIKHKRAKYKQLRKELQQKQTPSARRKLKQIGQRENRWMQDVNHCISKALVQTYGQDTLFVVEDLTGVRAATEKVRVKDRYQTVSWSFYDLRQKIEYKALKAQAKMIAVDPAYTSQTCPKCGHTEKANRHKKTHTFCCKTCRYISNDDRIGAMNLQRKGIEYIVEETART

SEQ ID NO: 680 - protein, 444 aa, unknown
  TnpB Polypeptide
MKQVFKLYYDFNKTQLRIIEELSYHTTKLYNIVNYDMKPFNYKSYKVNEKNYKSNFHSQYLVSHNYQHCLKLLEQNWKSYFAARDEHKKHPEKFTGKPEQPGFKHTEKNKNEVIFTKCVIQGAQYSKVLKDGNLRLSLSKKMQNKYGIKSLNFNMMNVKIPSEIGLKFNLSNIQQIRFTFDKKLKIWYFIFIYEVEEKIPFPYLNTMAIDLGLNNLATIVFNRSKETYIIDGKVLKCKQSYYNKKISIMTSKEMKRLKNSKYFKDTKRIKRIRKKFNNFCNNYIHVTSKMIVNLALKNNCSKIVIGNFKGIKNENKAKLFVKIPHAKLIELIKYKAKQAGVEVIMVNESYTSGCSCLDGEIVGKNAYNKKRRISRGMFRSNQGILINADVNGAYNILYKFTKTSAKSISEYVVYSQLKANNMYNGTMTSPRMVCTPLRLVPIEY

SEQ ID NO: 681 - protein, 412 aa, Natrialbaceae sp.
MWHVALKRTARVKLAIPDDRRDDLKRTMLTFREVAQRFADRGWERDEDGYVITSRTRLQSLVYKQVREDTGLHSDLCVGAVNLAADSLRSAVERMKAGKNAGKPTFTALTIEYNTNAVSYFMNDDGPGYCTLAAYGGRVRAEFVYPPDEDCPQRQYLGGDEWEPKGATLHYDRDDGEYYLHVTVERDEPETELGEAENGTVLGVDLGVENIAVTSTGTFYSGGLFNHRRDEYERIRGSLQQTGTESAHRTIEQMGNRERRWNNDVLHRISKAIVQEAITHGCSHIAFEDLTDIRDRMPGAKKFHGWAFRQLYEYVEYKAAGFGIRTVQVDPAYTSQRCSKCGTTLRENRTSQAAFCCQKCGYEVHADYNAAKNVATKLLRSGQKSPAGGATDQLALKSGTLNGNGDFTPASS

SEQ ID NO: 682 - protein, 386 aa, Thiobaca sp.
MLIAHRIELRPTPEQARYLNQACGARRHCYNQLLDHFNQPGVTWSKAAAYQHYMTVLRVAFPWYSEVSSRVTRNAIDDLDAAFNGFFRRVKNGSKKPGYPRFKKKDVNDSFALREPAKFDVDGRTLRIERLKTRIAMRQPLRFTGATKQATISKQAGRFFVSILADTQDYNPHAPDQASVGVDFGIKELAVLSTGEVIPANQTVKKNLKQLKRRQRNLSRKLKGSRRRAKAKLRVARLHQRIRNQRQAVLHELSDKLTRTYQVITLEDLNVQGMTKNRRLARAASDAGLGELRRQIEYKAKWRGVTVVIADRWFPSSKTCHACGQLHEMPLSQRTLVCDCGHIMDRDLNAAKNLDRYGLDALKPDLKRTQEPCQTPGLPGAWALTA

SEQ ID NO: 683 - protein, 483 aa, Streptomyces sp.
VSGRFRPRPGRVMQGYKFALDPNAGQEQALHSHCGAARAAYNWAVSWVTASWRQRKAEATYGIGEDELTSWRPWSLPALRKEFNRIKTTDPRFAEWWRENSKEAYNTGLANVAAAFDNYAKSKQGKRKGARVGVPRRKLKRKARLACRFTTGTIRIELDGRHVTLPRLGTIRTHEPTAKLLARVQGGTARILSATVRHERGRWFVSFQVEMVREITRVHQPDAAVGIDLGVTHLAVLADSSGETRYEPNPRHLDGALKLLRFHSRRVSRRQGPDRRTGRKPSKRWEKANDERNKIHHRVANLRTDALHKLTTRVRAEYGSVVVEDLNVAGMLRNKRLARHVADAGFGEIRRQLVYKGQRNACPTIVANRWYPSSKTCSACGTVKAKLPLHVRVFTCDACGLVLDRDENAARNLVALAAACTTGTGVAGDQDTSGVSKPRGADRKTRRQRPGRGGRAGGASLSHQRWEEAGDRCRDAEAQLALW

SEQ ID NO: 684 - protein, 418 aa, unknown
  TnpB Polypeptide
MQYVYKFILNSNIDTRNALLGWCRASKNLYNQALYEIKKSLKDENKFLFYSDLEKMMKSKQNLEGGINYRLVGKAQVAQQCLKTLDKSLKGYFKANTEYKKNPSKFLGRPKLPNYCKEDVRQLIFTNQACSIKQGKIFFNKTTSVKIPQYDKYKDLISNFNQVRVNPKYNGEVLECEIVYTLENNFEELDNTRYASIDLGVDNLVTLVNDYSKPIIYSGKQIKAINQYFNKEISRIKSKTKKSQNKNTSKKLVALNDKRNKQIDDIFHKVSKHIVNQLVKNNVGNLVVGYNKEWKDSINLGCKTNQTFVQIPYLKLINYLKYKCENVGIIFQTNEESYTSKCDSLALEKIGKHEVYLGKRVKRGLFQSSIGKLINADVNGSLNIMRKVVDDSYASKIINSGRLFLPLKFKNLYNLKTL

SEQ ID NO: 685 - protein, 418 aa, unknown
  TnpB Polypeptide
MLLSHKTDIQLNTTESNIVGHMCYAASKLWNVCNYERRNFKELGMVHYPDWYDQKARLKGNMWFKSLPSQTAQEVCKLVDKSWKSFYALIKSKGIQNPKPPRFKQSGMTITYMQNAIVHVSGSKRVRLSLPKQLKEHLKHTYDICDNYLYLENKIFQNTDVIKQIKIYPPDQKNVCQVIVIYDVKDVEKMQDNGHYLSIDLGLHNLMTCYDSAGTSFILGRKYLEISQKYDKEIARLGHQWNSCQSAGGIKYPKPSKHMLKVYKKKRNCIHDYLHKVTRAVVNYCKANDIHTVIIGDITNIRRNKNLGKVTNQKLHAPQVTKEYAKKLVAQMTVEEKMSQMLYESPAIERLNIPAYNWWNEALHGVARAGVWKQNSPAGYAGSLREGTCFRGGDHKSGGAPDGSSYSSGYDEGLSVPV

SEQ ID NO: 686 - protein, 244 aa, unknown
  TnpB Polypeptide
VKEESISKICAVDLGLNTDATCTIMGQDGTVYARTFISFSKEHDRLNTQLGRIKRNQKRGSRHNKRLWRSVAGISQDIADKTVQAILDFGNEYGVDVFVLEYLDFKGKNIVKRAHFWRYKRIYKVLSQRAHQCGLRIARVNARYTSRLAFDGSGWSKRGREIAPETPYALMEFPNGKTYNADLNASYNIGARYFIRHLLKTVTVTQRLALEAKVPQVAKRSTCTLSDLINLRSEFVALASKTQA

SEQ ID NO: 687 - protein, 514 aa, unknown
  TnpB Polypeptide
MRAQTSSYVVSTKVLLPESIAKRLEKSLRITNSAYNEALSFGLRRFEALKRNPYYQELLEARRRAKTGIDKLNKAKKKAKGLVQQVKCYDKVLFELRKAYRLTEFGLSAHLSQQRRKAGSSYKQLAACEIQVIAAQAYQTLEKVLFYQVKPNKVRFRSKYDLDVSYRNRVNTEATRLVPSDKPGIAYRLYIHKASTFVDIPEKAFNTYQQMSLMRSEKIKYVQIIRKTIRGKKVYYLQIVCQGFPHSKVTKGEGVVGIDPGISTVAFASPTEVTLVDLVPTTITRKEKLLKQLDRKIEHSQRVNNPECYEENGTIKKGARFKRPSNRQVRLRNRRRKVYRSLSEERKKLQGQLVNQIVSQASIIRIEELNIKGLQKRSRDIRINPKTNRPYSKKRYGKAILRAAPSAFRTALETRASQLGIDVEVISPKDVKPSQYNHITQTFDKKSLSTRVYDLSDEYTGVQRDLYSAFLIGHIEKGRYQLEQLNQDFPDFYQQMKDFLQHPIETERLAWYLT

SEQ ID NO: 688 - protein, 372 aa, Cyanobacteria sp.
MYAIKRELKLNKKETSLMRGMAGFRRLVYNFGLEMVIASWSFDGINKSDAKRIDAIKQVFTQVVMKMPEYAWMKKYPSTIYQSAFIALKRAFNQWRQGLSGFPKKKTKKRGDSFTVYKTSGIYPEKGKPAIPFTNRVVIYAGKRIQLPGLKEFRLKERIDFTCSSQTFTVSRTADRWFVSFALDAQKIPPIYHPIERAGVDLGVKTLATVSDGTCYTMPVSTKRAKTKLGKVQWRNRHKVLGSKRLGVKPSNNARRYYVKLARHHTRIGNIRRDTIHKMTTDLSRRVYCIRIEDLNVLGMMENQKLAAAVSDNCFYEVRRQLVYKQSHYGTKIELVDRWFPSSKTCCCCGHVQEMKLRDRVFDCLALRPCDG

SEQ ID NO: 689 - protein, 502 aa, unknown
  TnpB Polypeptide
VAYRTARVALRTTPGQRRRLFGLLRSAGDVWAAVLELNGWRRRRGDRPLAGYQELCRELAAAGEGTFGELSSVAARSVLRAYSDAWMSAARRRRAGEGSVRFPRRRRGLVPVRCYAGTFTLDGGDGSGLPRVRLPVARGAAPLWVELTRPLPYPPGQVRSVRLVNEGRRLFVEVTAEVPIASYPPGTGPDPSRVAGVDLGIIHPFAVLAPRAAAGGGDAALLVSGRALRAEHRLHLAEGKARARATARRAPRPGQRGSRRWKHYRARSRRLEGRHRRRLAQARHEAARAVISWAVERRVGTLVVGDPRGLLQRDAGRRQNKAVRDWAIGALLAAVRDKAQLAGITVHLVDERGTSSTCPACRARVPKPRGRVFACPHPGCGFSGHRDLVGAANIATRAPGRTPAGAVGGCVTAGTPSVTTHRRAGRHLPGAGRSRRDPRRTLLTRPPGRPSTAPAAARDDGSIWPAVARPAAPAVGSRSPTPRRRGSGPAPSTGGEGCLTRH

SEQ ID NO: 690 - protein, 497 aa, Microcoleus sp.
MTTLTYCKGLPTPAAELNPAGHTEFECFLVAFSGVFYRATTDTVNHLLSLNNTKFNKSGWNTYLQQTYGISKRHANGAIALSQGKVDSASECKVRHIKQLESQLASAKSWLKKAQKRLHLAQKFYAKRNWQHSKTGCNFPLASDIKTRKTNWYRVKFTAHNKKRYIYKLTQALAHLKLAPLRVKVRRGEVFIVGSKDESCGNQICQWSGNTLKFRVPYCLESKFGKYVTSEIGNFERNINRLPEAGAKTWHFYRQDNRWVVAVQFTPRPVTQVSRPIAYGCIGIDMNPGEIGWAYVNSQGNLTAKGSIRLQMGLPSGKQDAQIVGACLQLAALASTYACPIVCEQLDFATKKAQLRERGRKYARMLSSWAYSRFYELLESILANRGISLLARNPAYTSLIGLVKYARMYGLSSDIAAAIAIARRGMNLSERLPRSVSAYLGVNPRKHVWSALNQLNKFVGRCEVINLRHDYYGVSNWGLLVKADVEQQCRASAKRKR

SEQ ID NO: 691 - protein, 274 aa, Micromonospora sp.
VKRAFKYRFYPTEAQAAELSCTFGCVRKVYNMALQARTEAWALRQERINYNATSAMLTAWKKTEELAFLNEVSSVPLQQALRHLQTAFTNFFANRTRYPSFKSRKKSRKSAEYTTSAFRYHSDGRLTLAKMAEPLDVVWSRPLPEGVSPSTVTVSQDAAGRWFVALLCDDVIAQTAATGQVGIDVGLDSLLTLSTGEKITNPRHERADRARLARAQRRLARKQKGSINRAKARLKVARVHARIIDRRRDHLHKLTTRLVRENCEYGWVLSRAVV

SEQ ID NO: 692 - protein, 419 aa, Micromonospora sp.
MADASLAMIVLSGKICPVRTAYRCRVYPTPEQAAVLNRTFGCVRVVWNRTLAARHARWHTERKSSSYAETDRALTEMKKQPDLAFLSEVSSVPLQQTLRHQHTAMTAFFQKRARYPRYKSRHGRQSASYTRSAFRMRDGVLSLGKTPGTLRFVWSWPNINPALLDPTMVTVARDPDGRWFVTFAVDIDAPAAPEPTWQVVGVDLGLTDFAVLSTGERVPHPKHMERRERRLKRYQRMMARKRKGSANRAKAKQKVARAHSRVRDGRRDFLHKTSTDLVRRFDAIAVEDLAVANMVRNRSLAKAISRTGWAEFRTLLMYKAHRDGRTIAVADRWYPSSKTCSACGHLLAKLSLGTRHWQCPSCGTRHDRDINAAKNIAVAAGLVETINACGADVRHEGPPSVLSAVNQELSGASPGIPRL

SEQ ID NO: 693 - protein, 403 aa, Micromonospora sp.
MSTRVVKRAFKFRFHPIREQADLLNRTFGCVRKVYNLTLEARTTAWYQRQERVNYNATSALLTAWKKTEELAFLNEVSSVPLQQCLRHLQGAFAAFWEKRARYPRFKSKHKSRASAEFTPSAFRWNNGELTLAKMTDPLDIVWSRPLPEGQSPSTVTVSRDSAGRWFVSLLCQDTIEPGLATTAAVGIDAGLEHLITLSTGEKIANPRHERADRLRLARAQRELARKDKGSRNRAKARLKVARVHARIADRRRDHLHKLSTRLVRENQTLVIEDLTVRNMLGNHTLARAISDAAWTTFRELLTYKADWYSRDLVVIDRWYPSSKVCSACGHLTEKMPLNVRSWTCPCGAVHDRDVNAARNILAAGLAVSACGAGVRPQRGNLRSGQQAVKQETRRATAGIPAL

SEQ ID NO: 694 - protein, 437 aa, Micromonospora sp.
VVSTVSAAATLVLVVGDRVGRAGFGYHRAAVCRRSGRVVVAWGADAVRRAYKFLLRPTVKQVQTLGECLEAHRLLYNAALQERREAWQRAGVTIRYGDQSAQLKDIRRADPGQACWSFSSQQATLRRLNLAFDGFFRRVKAGQTPGYPRFKGRGWWDTVVWPKDGDGCRWDPPPDSGLTRVYLQGVGHVRVHAHRRVEGRVKTISVKREGTCWYVILSCGDVPAQTLPPVNSPVGVDMGVAAFLTTNHGVQVPNPRYLAASADRLTQAQQALARCERGSRRRGKARSRVAAVHRRVARQRLDHAHKTARWLVTHHDLICHEKLRITNMTRSAAGTVDAPGVNVAAKSGLNRSILDAGWGVFLRVLASKAESAGRMVIAVNPANTSRTCPHCGHCARENRPTQADFTCVACGYHGHADVVAASNVLRAGLALQTAQPA

SEQ ID NO: 695 - protein, 468 aa, unknown
  TnpB Polypeptide
MNIVKTAKLKITSHTKTLEPTLEIYRKALIFYIDVVKKEWDSLKELDNRRRLLLLETISHKTKQHPEVKYNFDKDFYKFPCYLRRACIMEAIGCVESYYSNYERWQKEKEETLFKGKKFHKKSPTLQLKHNSFPVLYKPEMFKREDNGGIKIKVFHNNDWVWIDITIKDKNLLSSRRYRFTDYTEANPKLVKKGKKFYLHIPYEKKVKLYDRNDVAISVDLGLTNSAVVNAMRSDGTVLGRLFINQPKEKDRLNHTINKLSKAKRNSHIIKAPNYWRVINNLQREITQDTANKIVDFALKFNAGVIVFEYLSRMKLPKDVYGAKRLRFKLQYWAKQTTYKKTLEKAHSLGIRLSRVLARGTSMYAFDGSGEVARNSKKDIAVFTTGKEYHADLSASYNTGARYFIRELLKPLPEMVRLQVQAKVPELVVRTQQTLSSLTRLQEALSLNALDTSASRIQDREASSTATA

SEQ ID NO: 696 - protein, 315 aa, Longimycelium sp.
VAAAGSRPPRVLSATVRFERGRWFVSFQVEVQRADPVPARPGESVGVDLGISHLAVLSTPVPDVTDENGFVANPRHLDAAQKRLRRASRRVSRRCGPDTRTGRKPSNRWRKANHDRNRLLHRVANLRRDGLHKLTTALTSRFGTVVVEDLNVSGMLKNRRLARHLADAGFGEVRRQLDYKTRWRGGRLHVADRWFPSSKMCSGCGAVKAKLPLRVRAFHCEQCDLVLDRDVNAACNLARLVQVGGSGTGVAADPDTQVSNGRRSRRKTPPCGADGVDASTPQRVSASDGDHPLVTVDCGAGVLTHAHSIRNGSVE

SEQ ID NO: 697 - protein, 356 aa, unknown
  TnpB Polypeptide
MELPESVTIVGRIEFPDKKSYLELGKLCYLFKKNLQKAVKMYARGIRRDIIIKVVTKELNLGYADTIYKLARFIVEGCMFNNGEPFKIRIRKVFLASRGFSSNKGNRNIRLISTSEVLVRTPDRKWIKLYVKFGKKYLPLVKELVDLALKKKISYFARIVFRDGKAYLHISIPIQLYLKHFRLGLARGKLIAGFDINSDRINMVVIDENGCIRDVKNKHFPEVVSHGFPSNKARYLRLNAIAELLDYAHHHGVKYICFENLDVIKKKKFTKNKKANRKISKFAKREILTHAVIRALRYGFRILFVNPKGSSKEARKIHKKLGLDIHTASAYIIAIRGLKILKENESVENNEKIKLW

SEQ ID NO: 698 - protein, 268 aa, unknown
  TnpB Polypeptide
VNNSIRVDFENGILILPKLKGGAKVKLHRYFKGKIKSAVVTKTRDGKYYVSILVETEEPRNKVRESRSRACGIDLGLEHFVTITTDYGTRKVRHPGYLRRAEERLKRLQRNLSRKQKDSKNCEKARLRLAKQHTYVSNARKEFLHKLSKAIIDENQVVVVEDLNVKGLLQTRLAKSISDSGWSRFLFYLEYKAQWYGRSFVKMGRCFPSSKLCSCCGYKKEDLTLSDRTWICPVCRVTHDRDINASINLYKVGLGRPEFRPVEGGSGG

SEQ ID NO: 699 - protein, 426 aa, Escherichia sp.
  misc_feature (106)..(251): Xaa can be any naturally occurring amino acid
VKRLQAFKFQLRPGDQQECEMRRFAGACRFVFNRALALQNENHEAGNKYIPYGKMASWLVEWKNATETQWLKDSPSQPLQQSLKDLERAYKNFFRKRAAFPRFKKXXXXXXXXXXXXXXXXXXXXXXXXXXXXXXXXXXXXXXXXXXXXXXXXXXXXXXXXXXXXXXXXXXXXXXXXXXXXXXXXXXXXXXXXXXXXXXXXXXXXXXXXXXXXXXXXXXXXXXXXXXXXXXXXXXXXXXXXXXXXXXXXXXWQKQKRKIQRLHSRIANIRRDYLHKVTTTVSKNHAMIVIEDLKVSNMSKSAAGTVSQPGRNVRAKSGLNRSILDQGWYEMRRQLEYKQLWRGGQVLAVPPAYTSQRCACCGHTAKENRLSQSQFRCQVCGYTANADVNGARNILAAGHAVLACGEMVQSGRSLKQEPTEMIQATA

SEQ ID NO: 700 - protein, 367 aa, Clostridiales sp.
MERIRGYRYRAYPDKKQQEFFSKNFGSCRFVFNHYLAMRKAKWEEWHDTMSYNDTAKDLTHDLKKEYVWLKEADSSALQQSLRHLDNAYQNFFAKRAGYPKFKKKRSEQSYRTMNNNDSIRIEGNAIRLPKVGKVKIVNSRAFEGRIMSATVSRTSSGKYYISLQVEEEYEILPNNGGMVGIDAGLTVLYTDSENNKISNPRTLSKHEKRIRRLQRELTRKQKGSKNREKARIRLAREHEKIADIRNDFQHKMTYRLARENQVVCIEDLNVKGMMKNHKLAKSISDASWSEFFRKLEYKMSDRGGILIRVPRTYPSSQKCSCCGRQNRKIRDLKIRAWTCPACGTKHDRDVNAAVNILAKGLEMLAS

SEQ ID NO: 701 - protein, 289 aa, Salmonella sp.
MMLILKAYKFRLEPTPEQSQRLRQLCGCARFVWNLGLAETKRILGSGEKLPSAFELNRMLTVWKKMPGHIFLQDVYTDNLQQKLKDLHAAWKRCFDKKLAAKAPVWKRKNEGRDSIRFANFEKYCRLENRRVKLPSGLGWVKFRQSQRVNGKIKNATISQLAGQWYISFQVEVETAEPNHTSTTIVGLDAGVTKLATLSDGTVYQPVNSFKASQRKLATLQRQLSRKVKFSSNWQKQKRKVQQLHSHIANIRRDYLHKVTSEISKNHAMIVIEDLKVSNMSKSAKGTAE

SEQ ID NO: 702 - protein, 366 aa, unknown
  TnpB Polypeptide
MQKGYKARIYPTKEQQIIIKQTFGACRYVYNYFLAERIRAYKEEGVCLSCYQTQKQLTALKRDKDHLWLAGIDSMALQESLKNLDRAYKNFFDGNARFARFHSKHGKQAFRTRNQDNGIRIVGNRIKIPRIGFVKFKGVKKFTGRILNATISMTCSGKYYISLCVEQDGALLINGGGMIGLDVGIKEFYTDSNGNIISNPRTYRKHEKKLVREQRNLSRKQKDSNNRKKQRIRLAVQYEKVTNIRKDFLHKLSHTLAIENQVVCVENLNIKGMLKNHHLAKSISDVSWSEFFRQLAYKTKMYGGIVVKIPTFYPSSQICSCCGYQNPIIKSLAIRAWTCPQCGTRHDRDRNAAINILNKGLEILES

SEQ ID NO: 703 - protein, 356 aa, Sphingopyxis sp.
VSFLSFKFRVKSGERRLRKHAIACNQVWNFCVATQREAERRWRGGAKVHWPTAFDLIRLVTGGAAGLGIHSDTASQICRQFVNSRNLHRRCPRFRPSFGAKRALGWIAFIPRAVKVEGPSAIYLKQRYAFWKSRDIEGAIKSGSFVEDAQGRWYVVFQCEVPDDLPTNDGMVGIDLGLKTLATTSDGEKIENLRHYDRYAAKLAVAQRAGNKKRLRAIHAKIANARRHHLHEHSTRIARENKMIVVGDVNSARLKRTKMAKSVSDAGWSSFRHMLRYKAARRQAVYVEADERWTSQTCSACGVIPVSSPKGMGALGMRRWDCSDCGASHDRDVNAARNILRVGLEHQPPAGEIAVL

SEQ ID NO: 704 - protein, 363 aa, Lachnospiraceae sp.
MQKGVKFRAYPNKQQQNLINRTLGCCRLIYNKGLAMRNDAYANGEKIGYNQTSAMLTDLKKQDDFSFLKDADSIALQQSLRDLDRGFKNFFEKRARHPQFKSKHNNHQSYRTINQGDNIRIVGKYIKLPKLGYVKIKQSMEVGHINNVTIERTPTGKYFVVLNVDFEPKPRSNVGCMIGVDVGIKEFYSDSNGKVVDNPKYLEKAQRKLIREQRRLSRKQKGSNNRNKQRIKVARIHEKITNQRNDFLQKQSTMLVSENQTICIEDLNIKGMIRNHKLAKSIANVSWSKFFIMLEYKATWYGNEIIKVPTMYPSSQTCSCCGYKNPLVKNLAIRNWECPKCHTKHDRDVNAAQNILNKGLSVA

SEQ ID NO: 705 - protein, 442 aa, Lachnospiraceae sp.
MKITSSYGIEIKNINKMLITTANIYQDALSFCIATFEKEWSSIEILDTLSRNNYGEHLIHNTKDNVAKYPDFDRRFYKMPSYMRRDIVSTAIGHLSSYHSNYKNWEDNGKKGNAPTLQTHLRKFPTFYKGNMSDSSDIDNDTIRIKLFVSNDWKFVTVRLKHTDMQYIRKNFYGKKISNPTLEKKYKKWFLRFAITEKTKLHTKSIQEQRVLAIDLGINTDATCSVMLSDGTILARKFINFASDKDRIWHCLNKIKKIQKHYGNKGGNARKLWRYCKSLNDELARKIAKTITDYALEMQVDTIVFEHLNTKSKKRGSKKQKLTMWKKNTIQKIVENKAHRQGMRISHICAWGTSKLAFDGSGAVLRGKDANLNTYELCKFSSGKIYNCDLSASYNIGARYFIREILKTYSARKRSDIEAKVPVCQKRTLCTYSTLLEINKAA

SEQ ID NO: 706 - protein, 497 aa, Lachnospiraceae sp.
MKRSKNPSFVLTLKLNTTPSDEHVLADRFFTAFLMKNRLIRYARKKLSAMRQNKEYRSLMAEWKLICDKNDAISKHRKAEIGKDLARIRTYYGLSEYQFHDWISLQQHRYKKHIDSLTAQKLATAVWRAVEACLFRKGKSIHFQRLDSLLTLEGKNNVSGIRFKDGRLHWSGLVIQPQLRKGDHYAKEALTHRVKYCRIKRMAMGTTYHYYLELVLEGTPPRKHSFMDGHVGIDPGTSSEAVFSEHGCILTELASGCKDIQDKASRLSRKLVRSRRANNPNNYNDDGTIKKGRKHWVKSKTYTYTQMKLKALHRRNAAFVKQSEEMLANEILEHHGSDIITEKMDYKALQLKAKDDKVSEKTGKHRSRKRFGKSLSKHAPARFLGILERKLSYEGKTINYVNTWEFKASQYDHVAGDHEKVSLSSRSKLIGTDRVQRDLYSAFLLYCAKDDVSVDRNLCTKAFPLFLKHQEVCVKELLSCNDKHNLSSFGLKDFVAD

SEQ ID NO: 707 - protein, 492 aa, Lachnospiraceae sp.
MSKERFVLELELDLNRDQKQTLDKKLRIAKQIYNTVLNECLKRLHKVHHDRNIQSLFKELKNLKSDDPARKRIREEIYVIEQSYGYTEYDMHSFVADVKHYFHDAIGIDECQKLATRAFKAVQKVHYHQAKCVNFKAKDDDMSIEGKSYKSTIHLNKDGTVSFKELKNIRLIVKKKDFYAMEALGCETKYVRILTRTVRGKVRYYAQLIQVGTPPKKKRKTGRKNRRVGLDEGTTTIAVSSGNYVKLFELAPGCEADEMKLRKINRAMDRSRRAMNPDNYNEDGTVKSRKEREPWDESNKYKKLKAKRKELYRIIAIKRKMAHEILANEIIAVGLDIRVEDMPIKGLQKKSKKTSKKKDGQNRSKKRFGKTIGNRAPAMFVTILTRKAAYYGGTVSKINTRAVKASQYDHEENVCKKKTLSQRYADIGKYRVQRDLYSAFLIENTENTLDMVNRKLCKRKFSNFVKQQNAEIERIKNSNNKTLEWYVTYKTA

SEQ ID NO: 708 - protein, 423 aa, Lachnospiraceae sp.
VATYAVQSNVIRGLSKKQYALLKEMCQYSNSLYNVALYNIRQHYFNTKKFLTYESNYHECKENENYVYLQAGVAQQTMKVVDRSFKSFFNLIKKCKIGDYRYHDVKMPHYRKKSGLFNLVFSTNAIAIKDGMFKVAMSRAFRSMHPDVKEISIPFPERLKDTTIKEVRILPCNGGKFFKIQYVYEVTPEVLNLNKDNILSIDLGIDNLATCVSTIGTPFIMDGRRIKSINHRWNKEMARLRSISMKQGLKTTAKIQKITTKRNNQVNDTIKKTARYIINYCIKNDIGTLIVGYNADFKRNSNIGKVNNQNFVQIPLGDLRQQLEFLCWKYGLDYFEQEESYTSKASFLDKDKIPVYKPEQPYKGTFSGKRVHRGLYKSKKGTTINADVNGSANIMRKCKQNLDYEKLCNGLLTSPRRIRFAYL

SEQ ID NO: 709 - protein, 420 aa, Pseudactinotalea sp.
MKKRYTYRAYPTAGQRQMLARTFGCARVVFNDFLAERDRLHREGLHQSVGFGETAKLVTTLAKQTPERAWLSEVSNTPLQQSARDADRAYRNWFNSLAGKRKGPRMGKPRFKSRHDRTQKARFTRNCGFTVRGTTHGVAHVRIPKVGWVRFALSRDLPSDPSSVTVIKEADNTYRVSFVVDTEPAPTSPANPGRAASLDLGLSDYAAIAYSNGTREKIANPRHLRARERKLTRAQRALSRKTRGSNNRDRARIKVARQHRKVREARTDFHHQLAARLIRENQTVAVEALNVVGLSRAGAKGRRGSGLRKSVADAGWGAFLRILEDKATEHGRTYTPVNPAHTSQTCSVCATLDGPKPLGVRVWTCAVCGTRLDRDYNAAVNILVAAGLAETINACGPDVRRTLACAVGDEAGTPRTRAVA

SEQ ID NO: 710 - protein, 443 aa, unknown
  TnpB Polypeptide
MRTARVELRVTVAQRRRLFGLLGAGGDVWAALIEMNQVRFRRHAKPIFGYHAWCREIAGVEVGELSVAAMRSVVRRYSSACVEVARRKRAGERAHYPRRKRALVPLRWHSGTFAIEGRRVRVSMAAGAPPCWLRLSRPIPYPRGSLRCVTLLVDAGRLVLDVTAGLDVEGHDLDPSRMAGVDLGIIHPIAAHGPDTELLVSGRALRAEERLHLADTKARQRRMAPKAPRRGQRGSRRWRQLRARQRRAEAASRRRVRQAHHEAARTLIDWALAQRVGTLVVGDPQGITRGDFGAVHNRRLHTWRRTHLMGAITDKAALAGLTVARVDERGTSSTCPRCRRRVPKPSGRNFSCPHCGHVGHRDLVAAHNIAVTRGGTITTPQLVVEHRRVGTPTQRRDRRRHQMDARRSCPAPGRPANRDGESLAAHQACEDQPSPRPNSAPLG

SEQ ID NO: 711 - protein, 435 aa, Halobacteriales sp.
MDVRRTAVVKLDVSDEHRDALHRTAGQYLYCANRTADYCWSDTSYTECKTNKRQVRDSLYSDLREETELQAQLVQAAIRRAVEAIKSVVERWKKGQRVSCPTFTAETMDYDTRSATFYRNKVSLATVEGRVEPSFVLPADSPTPYEWYVLSEDYEFRESTLRYDAATDEFYLNISTRRIDGVDETRSVSFAHQNAKRSGDDGAEVSSDTEHPSQTVLGIDLGVNSLAVASTGTFWQGDDYDHWCREFEKRRGEMQQCGTQAAHNALLRLGKREEAWRKQYIHTVANEIVTEAVEHDCDAIVFEGLTDIRERLPQAKWHHVWAFRRLFEYVSYKAPERGVSVEQVEPNHTSQRCSRTDCGFTHDHNRHGKQFECQKCGYEVNADYNAAKNIGLRYARKRIHRLRSSPKSGSGDAPVDVRVNGGTLNGESHRPVAGD

SEQ ID NO: 712 - protein, 336 aa, Symploca sp.
LRSGWQGSAYTLQKWVRASQRPEWVKTLPGHQLQEAAADALDAHKQAKANGSDGAKFKSCRKPSQVVKFKARNYKHGTWYPTKVKGLEYRAPEKFPSECEYGTQLIYERGHWYGIFPEVRPEVDTSATSVIALDPGVRTFLTGYDGHSIIEIGNGDIGRIQRLCFHLDKLMSRIDLSASKRQRRAMRKASHRIRSRIQRLTKDLHNKISRLLVSNYKVIFLPTFDTSEMVVKSHRKLAKKTARNMLTWSHYKFEQHLMQMAQREGVLVVLCNESYTSKTCPTCGHIHSKLGGSKQFKCPQCGYTAHRDWNGARNIMIRALQATAITVRGDAIQVGI

SEQ ID NO: 713 - protein, 433 aa, Alkalihalobacillus sp.
MFGVEAEMITYKTMQIWVKKGHRMHPYFTEMCQNAKNMYNSTNFYIRQIFTGLTQEKELHPLQTEVLNTLQKHLPRMNDNQLLAYQKKIAKEKAKPVQKQKEVKCNLFEKPSKEKPYVDYHLLDALFKSISLNDYRSLPTQSSQGIMKTVFQNWKSFYASLKEYKMNPTKFKARPRIPGYSRSKEKEVLFSNQDCVIKENKFLKFPKTKEIDNVATIVTNTGRIPVLMKGKNIKSVNQRYNQLRAHFMGILRQGKNTNEGPFTSKRLEQINRKRFNQIKDLFHKASHQIEKIALEEDVDTIIIGQNKEWKQQSNMGKRNNQSFTAIPHSLLIQMIKYKAARHGIKVIVNEESYTSKASFLDHDEIPVYGEVDLKKSFSGKRMKRGLYCSKNGTIINADVNGAANIMRKVFPKAFNETFACVQALLQPISLLLK

SEQ ID NO: 714 - protein, 390 aa, unknown
  TnpB Polypeptide
MTQKSFKYRFYPTPEQETLLRRTMGCTRLVYNRALAARTEAWYGEKKRIGYIESSAMLTTWKKEETLQFLNEVSCVPLQQGLRHLQTAFSNFFAGRAQYPNFKKKRNGGSAEFTKSAFKFKEGQVFLAKSAEPLAIRWSRTMPEGAIPSTVTVKLSPSGRWTVALLVDTLIEPWPESPNEIGIDLGVTSLVALSTGEHIANPKGFKVKRAKLRKAQKALSRKQKGSTNHHKARLKVAKVHQEISDARQDFLHKLTTQLVRENQTIAVEDLAVKNMVKNRRLALSISDASWGELVRQLEYKCDWYGRSFVKIDRWFPSSKRCAECGHIVEKLPLNIREWDCPKCGTHHDRDVNAAKNVLAAGLAVKVCGANVRPDRHKSDGSCYEAERSRK

SEQ ID NO: 715 - protein, 307 aa, unknown
  TnpB Polypeptide
LKYIIIYIIIYISTQIYHRKEKDAMSEIVKTMKLHIHVNETEAKSLEELTACYAQACTFISKYIFDHGFILNFMKLQETLYQTIRAEFGLKAQFTISAFKTVTARYKTVKEQLFQNPYRYENEKEETHFISRTLEWLQKPIVFRRPQADLVRGRDYSFLTADDGKKLISLNTLKKRIKVTFDLPKKFKEYFDGTWSFGSGKIVSMNGNWYFHIPMTKNVSEEFSMDHVKHVVGIDRGIRFMVTSYDEKGKVTFVSGKEIQKKREHFQKVRSELQSKGTKSAKRALKRISGRENRWMSDVNHQISNVM

SEQ ID NO: 716 - protein, 469 aa, unknown
  TnpB Polypeptide
MKQRKKRTKKGVPQRITKAVTHIRLVETNPGKLAALDALAQVFLALTQHYTTLFCTDELPNAFHAPCFPTTLSERWQRVAIQQAAGIAKSWRTNRANAYQSYLDELAEYREQQADGTLEAGAGEPAWREWDVPTLHEICIQANCNVMQLEPSTDSTFDYWLKVSTLDKGYPLLVPVKLASYHVEALTDPKTKKRRPINSSVTLNKRDGAWWLTLSYDEEVAVQTPPDAPVVGIDVGIANFITTSDGRHYGTFNGKLRERQKRDREKRRRKAKLRKCLEKRGVPKDKLPSTSSATGQRLMRHVRQAINRAVNLCFEEHPAAQFAYEQLSVASMRHKARAMNAYMRASNLGHIPEQIAWNATKRGVLATRVKSAYSSQECHRCHYVDRKNRPNQGTFHCQVCHHTVHADINASQNLAARLHDEELRACQNRAEVKALLMKRHEQWKQNDGLVVVQPAVQLGLWDSHGLQRT

SEQ ID NO: 717 - protein, 300 aa, Halobiforma sp.
VDDDHPVRLTNQAAEFDHSPERDYEFTWWVPQPGRGTNFWIPLRINPAQEELWHDLVDGKASAGQLRLQRHRTSWTLHVTVEFSVEEPNYEPTDDDVTPVGFEIGEAHLLAGCAFEQGTPIDPLLINGGRARHLRKEMHTTLKRLQERDAAEWRIDERFDHYQNVLTDIIEKASRQAIEYACRFEKPVVVLEDLSDIREDLDYGEWMNRRLHAWAFARLQERIEDKAREAGIPVEYIRPEYTSQTCHECGHIGYRDGDEFRCQNDECWVSEYHADINAVARLRLAGSQKSSISGHGGQHR

SEQ ID NO: 718 - protein, 431 aa, Paralcaligenes sp.
MFLAQRYALRLKPAQEALLRRWSGGARWLWNQALACQHERYAQGLPYANYIEMAKWLTEWRHAPATAWLSENPVHVQQSVLKRLDEAYRRFFARCKEAKAPASSGATRKRRNKVGPPRFKRRGQEPGLRFPDKAQIHYDAANGRLKLSKIGFVRLRHSKVVPGAIANAALTREGNKWFVSVQYSVPDVTPLGLPPEAGADAGVKVLCTMSNGVMHAALNALKKQAGRIKHQQRAVSRKTKGSKNRRKAVNRLGALHRQAARQRKDWLHKLSTLLANTYSTIAIEDLHVASMSASARGTVEAPGKNVKAKAGLNRSILDQSWAMFWGFLDYKLRAKGGELIRVNPAFTSQRCYVCDHTEKANRPTQSQFRCVACGHTDHADVNAAKNILAAGHAVWLTRKGQSLPVEGMSDVAELLGPQFSMKQELSQTRPC

SEQ ID NO: 719 - protein, 415 aa, unknown
  TnpB Polypeptide
MQMRYRYRIEPTPAQQRMLARVFGCCRVVFNDAPRVRDEAYRGGVKLPDSQIQRRVITQAKKTVERGWLAEVPNVALVQSVNDSRRAWRNFFDSHTGKRKGGRLGRPRMKSRKDHRQSFRLTRNGFGVRPNGRLFVAKVGEVAVRWSRELPSEPSSVTIIRERDGHFYASFVIDAAAIPLPVVDREAGIDLGVARLATVVTSDEARTDVENPKHLGRKLRKLRRLEREKSRRQKGSNNRDKTRRKVAITHNEVARSRRDYHHKQALALVRENQVIHVEDLNIVGMVRNRRLAQAISDAGWGQFVRIIIEKAGRYGRTVQTVSRWLASSKTCSTCGHQIDELPLQIRSWTCPACRAVHDRDHNAAKVILAAGRAERENASHEGGQDRASGPGGAPVSPSTTWKAQGDEAGSSPTAA

SEQ ID NO: 720 - protein, 199 aa, unknown
  TnpB Polypeptide
VPEPIKLPKSEINIGIDLGIKDFAITSECEIIDNPKYYRKYEDKLVKLQRKLSKKKKGSKNRNKARIKVARLHEKITNTRKDFLQKLSTRLINENQVICLEDLNIEGMKKNHKLAKSISDASWYSFTTMLNYKAIWYGREISVVDRYFASSKLCHVCGWKYVDLDLSVREWKCPECGSSHNRDINAAINIRNEGLKLIA

SEQ ID NO: 721 - protein, 390 aa, unknown
  TnpB Polypeptide
LRYNYSNRCRQNVGSVLPPTTNRTPKTSYTEDTLMLRGHKIALRPTARQRRWFAMQCGYARVAYNDALHDWNHGAELGDLRKRFNAIKYGKYHWCKDMDQRAAMYGIMSLEDAILRYRKGQNERPKRKRHNARQSYSMEGAKVKITDNAIKLPKIGWVSMHERLRFKGKIKRVTISRTAHCWFASVLVETDAIIEAAAPASPVIGIDVGINTLATLDDGTKYDNPRPLKRYERKLAREQRKLSRKEYESNNWHKQKLKVERIHYRISCIRKDAHHQATTAIVRNASKIGIETLRVTNMVKNRKLAKALSDSALGGFLAMLKSKADALGIAIVEAPQFFASSKTCSSCGDKKEDLTLADRMYHCESCGYTVDRDINAAINLRTIAVGETEM

SEQ ID NO: 722 - protein, 314 aa, Nocardia sp.
LVVTGVVGGAGAGLPGRAGGVPKLARLAVRETEGPETRQTPVAVPEGQSPSDPAHPQRFQCACESEAVRGQGRDLKVAWSRELPSEPSSVTVVKDSAGRYFASFVVTVEERALPKAGPEVGIDLGLATFAVLSNGRKIDSPRFLRQAERRLKKAQQCLSRKEKGSRNRLKARVRVAKAHAKVADTRRDFAHKHSTRIIRDNQAIFVEDLYVKGLARTKLAKSVHDAGWGMFTRMLEEKARRYGRTFARVDRWFPSTRMCSACGMVGEKKPLQVREWTCTCGAVHDRDLNAARNILAAGLAESRNACGGAVSPAA

SEQ ID NO: 723 - protein, 396 aa, unknown
  TnpB Polypeptide
MYLTKKIRLLPTAEQEKIFWKSAGVARWSYNFFLSYNQEKYNEWLEDNAKEKFVGECNIRKYINNTLKTTTHTWLKDVGSNVMKQAVKDANNALMRFFKKTSNYPKYKSRKKSKPSFYVNYETLKRTPNGFRGERIGIVKTRESLPKIPKNQKYVNPRITYDGKFWFLSVGYEVEQKQIKLTEEKIGIDLGLKDLVIKSDTNNSSSKIYRNINKGYRIKLLKKQLKRAERKLSRKILDNIESYDENRVPTYIRPLKDCKNIQKQIHVIQDLYRKLTNIRNNYIHQVTTEIVKTKPSRIVLEDLNISGMMKNKYRAKAIAEAKWYEFRRQILYKSEIYGIEVVLANRFFPSSQLCSSCGFKNKAVKNTKIREWDCPECGKHHNRDINAAINLANYQI

SEQ ID NO: 724 - protein, 424 aa, unknown
  TnpB Polypeptide
MRKVIHGVVYFEDKNRVLQLMKNFCSCKRSAYQATHKHKLSGNNIKKYCKRNYMSLLNQRYVSDATVEASKIVKEHALFGNKKLWKEFQDGKVSKKKWQHTRNSQLYSRGDKTKNGNPNIRISGNSLLVNDPLKRGLWLTGKLWLQEPIISDCYDVRVEARDNKFKVTVSYNDAVIPIITNKKLGVIGIDCNPDGVAVSELNYDGNLIEHFYLKNDKIRFARHGKRQYVIRELAKQVVAYAYDRQKPIVLEQLQFSKQYKSKKFNRMSHNFIWKQLLDSIKSRACRYGVEIIEVPAAYTSIVGKLKFMQMYSIPTHNAAAMVIGRMGLGIVDKVMVSISEVQDLVTLEARTESVTLKRKSFLWFKSKFRICQKPPALTAPNLEPTSNRHKVHVPSQDGKVIESNNWSDSCQETYFPDSGVERTP

SEQ ID NO: 725 - protein, 393 aa, Trebonia sp.
VLSRYSSAWFAAAKRRKAGDLTARYPRRRRSLVPVSWYHGTFTLSGRELTVPVARGCPGLVLRLDRDVPSPVEQIRSVRLGFADGRLYADVTAEVPVAVYPPGEGPDPARVAGVDLGVIHPYAVAGPGGEGLLVSGRAVRAEHRQHLRDRKGRSHAAAARAPKPGQKGSRRWRKHRRRQRAADARHARRVVQVRHEAAREVVTWAVQNQIGTLVVGDPAGVLKLDAGPRHNKRVRDWAPGQLAQALADKAAAAGITVHRVDERGTSSTCPACARRIPKPTGRVFTCPHCGQSGHRDLVGAANIAARVPGGGIIPPVPRGTGVTHRRAGRNLPGAGPNARRDPRRRPPSWPAPRRHLAGTGPPPRPRHPAGEALGESLAETARSTQARDTPSRT

SEQ ID NO: 726 - protein, 484 aa, Trebonia sp.
VAKFEVPEGWTAQAYRFALDPSPTQVRAFRSHAGAARKAYNTMLALVKAVMDQRRAERSYGIAEAGLTPALNWSLAGLRKEWNRRKDKAAPWWAENSKEAYNTGLDALARGLDAWSKSRKGERAGAAGFPVFKSARSRRSVRFATGSIRVEADRHHVTLPRLGRIRTHESTRKLARRIEAGTARVLSATLSEDPAGRWHVAFQAIVRRSAGVPGHIGAGAPAVGVDVGVKADSLLVIATPDGREIGRVPAPKSLTAAQARLRGLQRKAARQQGPWDPGAKTSKPPSKRWARTNRRIGRTHAHAAAVRRDVLHKATTSLAQRHQVITVETLNASGMRSAGGAYKRGLNRALADAALAEVRRMLTYKCSWYGSTLVEASRYFPSSKLCSGCGRRKPSLTLADRTYVCDHCGLRIDRDLNAAVNLARLGEPRLGEQSPAGSGPVAGRGATRETEPARAGDAGGRETSTPHRQPPGKTGTASPQGEAA

SEQ ID NO: 727 - protein, 340 aa, unknown
  TnpB Polypeptide
MLTFRYRIKDATSGTHLLRMAWDVNTCWNYCNEVSQYALNRDHRWLTAFDLIKLCAGASAELSISSETIAEVCREYGTRRRQVKKRRLKWRSRNKSLGWVPLKMRFLKVAGDSISYQKRRFRFWNSRPMEGTPKTGSFSQDARGRWYLNIQCEVEDPGVPLGTSEIGIDLGLTNQVTCSDQPEPNQRLNLTRQYAERLATAQRARHLKRTRAIHAKMANTRKDWSHKLSTAIVKRAQFIAVGNVSSAKLVKTRFAKSVYDASWSDFKASLVYKAMRLGVRYVEVNEAFSSVTCSTCLHRTGPSGLSDLGVRVWCCSNCGDIHDRDHNASLNILRQGHLTP

SEQ ID NO: 728 - protein, 367 aa, unknown
  TnpB Polypeptide
MLAASSSPLVCWRWVCLSSARYETTKCAPEQAFADLGHAFTNYWRMKEKGTQPRLKHPRKDGEEAGFPHFKSKKRDRLSFYLANDKCSVDGQTLHVPKLGEVNMTEEVRFAGKIMSATVFYRAGWWFVSIAVEVEHETPAHDGGSVGIDLGIKTLATTSCGEKFENQKHYRRNVGRIKGLSKGLSRKVEGSQNWWKNTKKLARAHYRIACQRQDTLHKMTTQVTRTYALIGLEDLNTKGMLANHHVAQAVSDASFFEVKRQPFYKAEQYGGSVQLVDRWFPSSKTCHVCRWVKQDLTLADRVWRCEQCAIMHDRDVNAAIMIETEALRLRTDVPVVASSERKFACGAGSSDSCEGETSCDEAGTTVL

SEQ ID NO: 729 - protein, 551 aa, unknown
  TnpB Polypeptide
MIMGRSKGVTITVKVPVAWDEMTKHKKQRLRQIVGQDTRVIRSFLGIIEQHESELLSGRYKTRIDDAALDHLTITAIHVTSKYPQRLEVLHDMKERYPHCSSGELIECRRTAISMYESYLALRKRKRSGVSRPCESINSGRIPRWIYSPKFKLTKSTSSTIHWWLDLQDSFDTTPMKKSVHGRLRIPLKMCQFHINQIERGKIKALQIINDRKGKWWIHFAVRLDQESVSIENNLPPAVLGIDLGIKKAACTALITPEKVRETRYFFQQSKAKSIEKYDDLVAELQREMESRRKRHQPCDSIIVKLKQLKSKRENISKEYDLILLRELIDYIIKLSEKYTLFVALGRLKYIRNKAGRESKSPLQFRKMINSWSFARITNSLKHQLSQLGWAVDGKKARFKIVSEAWTSSLCWKCGLKGKRPKQNHFICSSCGHQTNADRNGAINIAARLIMLTDSLHSVRGRGKWVDSVNTGKNPQLMSLLLKRSHVSDPKESVADHFVQLDLLSFGDESEKSDNDPAVERTVERPSVCGSDTPLEAQKKETRTLGGTVSR

SEQ ID NO: 730 - protein, 293 aa, unknown
  TnpB Polypeptide
MLGIREIREGSRRNGKRLVLRPSGLGAFKVIAHRDFPLEKVKRITVKITRSGKVYVSFIVENHEFPKLPNTGKAVGIDVGVEKLLVTSDGEFLPNLRPYERALKKVKRLHKALSRKKFLSKNWFKAKMELARAYEHLANLRKDLYMKLGKYFAEHYDAVVMEDISVKQLIGKSGRKMRQRLHDVAFHELRSIVKYQLGKYGKEVVLVDPRNSSKTCAKCGYVKMDLALSDGVFECPRCGWRSDRDYNSLNHLKNAGWEPPVVPVELRPLPATMQAGRGSGKPLKDGVAHNSLW

SEQ ID NO: 731 - protein, 329 aa, unknown
  TnpB Polypeptide
MTISAMRRVSGAYASAVRQHRPIKAPFTFRRRAALFLIGKRGRDADFRADGMLSIWTVEGRRRIAYTVPARLLPLWQRATEIDSVTVIERGGRLVGRVVITIAAPDPTGIYPVGIDLNETNALVAVDADGRELFVSGKAVKIKNVRTSKTRRRLQRKLASHKAEGKDTRSVRRLLKRQGRKRRHRTHTFAQQTAVMLMRWAGPDTVLVFEDLASIPQPTRSQVGSKALRRRLSLWQRREIRTAVERKAQAAGLLVAEVDPRYTSQTCSRCGLRGTRKRHRFACPSCGFEAHADVNAAVNVRLRYTVLRDGGPSSCGPEARSSDAGKLPA

SEQ ID NO: 732 - protein, 602 aa, unknown
  TnpB Polypeptide
MGKKKKTEETAQPKKTTRSDVKERKEANKGTEFTCVKTSFNSLVENNYLNGGIQEIVLNINKICFLSYQLLNYHFTRIIEENKPLPEINQSLFYQACATVSVMKERKEKIDKNDELYISFSQYKEYLGELPFRDRMGNLINNLNRQQFTMTNNHLALNFYKRFHKYLEIKTGETRKGVIYHWLKDIYANEYTGKNIFIQFIRQWLKYPPTEVNIKMHSSHFVKIYHKILKTFEKYPYSKHIRTFNLLPTKNSFTLSTIEICSSCLKDIIGYFTKQPVPDDFKENKSVYWYEFFKIEKYETKNRQFANTIYTDGKVAVIRLRKPKFEALKPKDIKKAQYEQYVGIDPGVRSLQTSCNNEDRVLETTTPSYRNDCKMKYACRKREMWYKRWEHYEMWRSIPSFKTTNLQKMRQYFEHVYPNLNTIFNFHLYKNFRGLSFRSYCRGKATMHKLCKTIVENKNTLVGFGDFSQQHGLVKKHPTAPILKFKHEWRRYCDVIDIDEWGTSKTCNKCFQPIELYKNRIIRKKRDGTYTKARMSPINSIIRCKLNECKLCCMDRDINASKNILFLLQLQKEGKKRPDCFNPKKIMNDCDTPLWDDKHIVA

SEQ ID NO: 733 - protein, 401 aa, Deferribacter sp.
MQLAHKIRLDPNNKQITYFKKACGVARFVWNWALENWEKQYKTGKKPNALELKKQFNSIKRKEYPFVLEVTKYASQQPFLQLQEAFGRYFKGLARKPRFKKKKSNKDSFYIGGDQIKVHDNKVRIPKLGWVRMRENLRFNGKILNATVSCKAGKWFISFTIDVVQNPYQPCENQAEVGVDLGIEKLAVLSDGTFFENIKTLNRYEKRLKRLQRQLSRKQKGSNRYKKQVVRIEKLYYRIRNIRSDYLHKITTYLTKNYKTIVIEDLNVKGLLKNHHLAKAISDVGFHELKRQLEYKTQLRGNNLIIVNRWFPSSKICSKCGYVNYNLKLSDRTFKCPNCGLVINRDLNAAINLLNYGRVSSTRTYTPVERGSVDDRSLVLPKKHPLAEAGTQQNLTMVRFE

SEQ ID NO: 734 - protein, 548 aa, unknown
  TnpB Polypeptide
VSGRLREIAAPFVVAAPAGARVRTRLRVTPEDAAVLRAAGRHLGSLASADLAARCAEGRLGPKEKAISRRERKRAITAQSSSRWAGAITRSSEDQQSLAERNLRAGAATLRARVRKIEARLAVRAGSRRGRVRGYATRAERHGGQRRLQVLRARLAEAERRLEAGRVSVCRGGRDLLRKRNNLVGVGLTEAGWRERWDAARMFITADGEAGKPLGNETIRWNPDEGWLPAPLSHLANGPHGRYRLSCPVEFAYRGDEVAAQAATGAVRYDIALDPGRDRWYLDASWQLPPQPAPCLEDLRGHRVLAVDLNHDHLAAWTVTADGNPAGPPVTIPLQLAGLPASQRDGRLRAAVSGLLRTAREHGCAAIAVEDLSFTQAREQGREWHGNRPARGKRGRAYRRMLSGIPTGKFRSRLSQMAANAGLAVIAVDPAYTSRWGAEHWLAPLRDQDTVTTGHHAAAVVIGRRAHGHMARRREGVTSGGQRTARRRAAPTAPAATSADRNGRPRKAQRQPPRWRKTATADRARPPDQATHDRSGPPAEQHSLPLSV

SEQ ID NO: 735 - protein, 413 aa, Ferrithrix sp.
MRLEPDRRHITISVIGTLRSKENTRRVERHVAKGNAHILSMTLSERWGRLFVSIHYAVRIQVAFPSRTKPSKPDAKAGVDLGLRSLATIADSEDEMVAIANPAPLPATLDERRRVSQQLYRRIPGSRGHRAAKAKLARLDRRAVCLRHEIYHYFTRNLVDTYGEVHIEDLNLAGMKKSMGRRAFRRPVSDAALGMFRPMLSYKAEVVGTKVVVLDRFYPSSQIHHGCGGLLQGDTKLAKVLTCHTCHVEVDRDENAAKNIRDWPEHANPGSVGASALSVPGPPEGGTDGRSDGRVTDHRARQRKTNLAAVGEARTEAQRDRGTLRGVHLMMLTKAHLDAMVRATLSRPLPMNPFKKPKDLVKRHFVSRKPNGLWCVDITNLCQDEGRMGLRSLYQRCFLEDDRRLEGFSLSKE

SEQ ID NO: 736 - protein, 442 aa, unknown
  TnpB Polypeptide
MRTRKFTVVAQLHENQNHDLIEYINSCFATYGKAKRETFHVLKRSAGFNKSDFNTYLQIKYGILKRTANSIISDAQGNLNALKELKQYEKSQLERKISLLETIIEKLEMKVADNKALLRLNDKSVSLVAHRNLKLKLVSKKNQLNHKKQKLYNLSYQIEHDVYKLCFGTKYLLKRDYNEFIARRDSQLSFVGTKTEKAGNQLLQLSYNHQNNQFDIQLRKDIGGFKNQRGLYVNGKIHFDHHKQELISILMNHNSPLSYKIIRKNGRYYLYCTFEIQRDESFFVTRSSNGVIGLDFNKGFVTLTETNQYGHMIETDLIRYRFKKGNATQTDLELIANKVKERALATGKDIVIENLNFKDTKAKAVSKKDKKYNDMLHSLAYRKFVAIIENVCYRNYIWLRKVNPAWTSWIAKQKYCPQMKLNIHTGASFVIARRGQGYTDKV

SEQ ID NO: 737 - protein, 449 aa, Thermoanaerobacter sp.
MRYSYKRLLEGYDRKTLKRDLQGTFDLNSRYVDDAIMKARGVLKSSRQLDNNPKKVIFGGRDLFGKLQKRHINGKEYQKLKTKWQEKRKGNLYSRGDKSKKGNLNTRIEIKENGTFLRINVGERKYVYARIEAGYKKNKSRGELLQEIAQSNIPYSVELKLKNGSIYAYFAIEEEYPEIKITKGKGVIGIDINAYPYNISWAETDEKGNLINYDKMPMTELASGSKDKREYFRWQYAHEIVNIAKEKGKAIVIEGLDIKNKGKKGDFSGRKSRRIRHNFSYKSLLSKIKTLAKREGIEVIEVNPSYTSIIGMLKYSPQYMITKDVAAAYVIARRGLKLQEKIPDNYIKFLNALTVEELEELKEYVKKTVRNKHIKKKHIREINKAIEFLQSLESEPGRVLEPLDGTSFSAYNFWRVLKVAVVTPLSPEKVSRDFSALKELLIQGKWRDL

SEQ ID NO: 738 - protein, 417 aa, Ktedonobacteraceae sp.
MLISKKIRLEVSEHDAATLEYMQGKCRGLYNWWVMRLRAGEKWPGWAAAKKTLQASKDYDPELRWVYSKLLHEVYFRLDGAMQAFFRRVKNGEKPGFPRVRPRHCFFTLIYPAMYITVEGRTVTLPTGGKSKHKHFPEVVARLTEDAPTGYKDVAVSRDGQGRYYVSFVHEEQEETRESEGVLAIDLGIKTLATGVNEQGRVYHVGGFKGGRWYNKQLDKIRSKRDRCKKKSRRYLHLSKVYQRVSQQKRNKQRDSLHKASHLIAHTLVERTVVIGDLSQRQMVMKEHQERNRHLNRAVFNDWGLYTFVQMLRYKSILYGKDLVILDERDTSKTCSSCGHKQPMPLWKRTYRCPNTECRLVMDRDENSAVNILKRYLARLGPHTDDSVQCAEVFTAIENQCAEVSTATDDVNPREHI

SEQ ID NO: 739 - protein, 395 aa, Frankia sp.
MSRYRLDPAPGQVAGLEEHCGHARFVWNLAVEQQSWWTPYRGKAPDHLERCRQLTAARAEFDWLRAGSQTVQQQALRDFDQAMCNFFNGSHRRPVYRKRGRSEGFRVVGKNARVEKLNRRWSRCWVPKVGWVRFRVSRPVPDFRSYRVTCDRAGRWHVAFAVAPAPVDAPGTGGVVGVDRGVKVSAALSTGQLLRCPGLRPKETERLRRLARRLSRARRGSTRRTRLAGQIARVKAREADRRKDWVEKTSTDLARRYDLIRVEDLNIPGMTRSARGTVAEPGRNVAQKAGLNRSILAAGWGLFVQRLEDKAPGRVEKVPAAFTSQRCSACGHTAPGNRESQAVFRCAACGHTANADINAARNIAAGRAVNARGGAALAVPVNREPQHRAPPLVGV

SEQ ID NO: 740 - protein, 651 aa, unknown
  TnpB Polypeptide
MSTKEKPPEFFKSVKTSLKPILKHADINTSKIQNAVIKANKIVIHTLQFLKLYFLHQYETTNTLPVMSKELVKSTMKILCNEKAQGRPAKPEIQALKYQLKEFYQTYYLPTTQNDPLDYTYMNTILDYLTEDILTMYENNIQLHYVEYVERYVNVVWKRKMITEKIRKLAKTKAERESRIRNLNSELRKIKNDLLNVENETFQSKSFYHSWILETKKKILPNKTKFLKNSIYYDIKCSPFSYLPCMITMMKQVETEEQTIYNVFPMRTDIIPKYIRLDTTTLVHLLMRKEQGNKSDYTTEGNLKRNEDKIWRFFFRTERKLFSKNGYSFHHMISTDGFTVSILFLRKDLVGKKLPNMRMKENKELYIDELEDTIELQNKKIIGIDAGKCDLIYCVDGSCKESNTFRYSQDQRRKETRNKHYRNIRLGMKYNKIQEKTIIEYETELSNYNRKTLNVSKFQEYLTAKNRINHILFEFYSKRIFRKLKFGSYINTKKSEQKMIQNFKNKFGNPEDVVICIGDWEQRRQMKYKEPTIGIGMRTLFRNNGYKVYLVDEFRSSCRCSNCNGGVCEKFRVRKHPNKDELRLIHGLLRCQSGCGLWNRDRNGASNIYKIAYQAIQKLERPTYLCRETSNQALKPSCHKKKSTRSATTKP

SEQ ID NO: 741 - protein, 405 aa, Actinomadura sp.
MRTAFKCRAYPDAEQAAIFNRTFGCVRLVWNKTLAERQAAYRQRGENTSYKQTDAALTAWKKTGELAFLGEVSSVPLQQTLRHQHAAFAGFFAGRARYPRFKSRNGRQAAHYTRSAFRMTGGRLRLAKTGAPLAFAWSFDDIDLATLDPTMVVVSRDPDGRWYVTFAVDTDDPTPMPTAGHAIGVDLGIKDFAVTSDGEKIPNPRHLERKARNLARYQRRMARKQPGSNNRRKAKAKVAAAHRKVRNARADFLHRTSTRLVRHADTLAIEDLAVTNMVKNRRLARAISDCGWGEFRRQLQYKCQRAGRVLVVVDRWYPSSKTCSACGHLLAELSLATRAWTCPDCRTRHDRDHNAAQNILAAGPAVARQKPGEVCGADVRRQGPSLPQSATKQKTRSARSGTPSR

SEQ ID NO: 742 - protein, 429 aa, Thiomonas sp.
MQRRKVTFKLYPNAAQSARLEAWTRLHCELYNAALEERIDAWRKAKKSISYYEQQNALPAIKADRPEFVELGSHALQQTLRRLDLAFAAFFRRVKAGQTPGFPRFKSAKRFSGFAYPDPAGWKLMGHGGRGATLRIGSGQGAMSLRARGQHRFGSESKPNDLTLTRRNGQWFVSVTLRVPEEGCARQRTGDARRGVDFGVTDWATFDDGQIIANPRWLREELPKLADLQRQRARKRKGSVRHKRLGANIARLHDRIANMRRDFLHQETSRMVQQCAVLATEELAPKNMSRSARGTEQEPGRLVRQKAGLNREILSAAFGMAHQMLAYKAEEAGTRLHLSDTRPLRPSQRCAACWEIVPKTLADRLHVCPHCGHVMPRDQNSALVVLIDAYNTQDTPGTGVAARPKPLPRQRSKSKSATRETHAITAQAV

SEQ ID NO: 743 - protein, 412 aa, Coprothermobacter sp.
MTKVERITNTLQETRQRRETQKPTVYELKLQNLSKGKAEVLRKAFLEAKWLYNWLVSDTERLGIPANKVSAVEVKAGDSYEQRELTVLGSQIKQVIADRLKDNLLALGKLKKSGRKVGALKCKRFVNSIPLKQYGVTYNLDFAGNRVRIQKLGKFRVLGLHQIPADAEIANAVLLRKPSGYYLHVTCYLPKDSRTSPNPIDKDIGIDFGVSSKLTLSNGIRIDFEVHETPRLKQLQRKLAGTQKGSRNRERIQFLLRKEYEKVNNRRKDAQNKVLAFLKIYRKVVFQDDCVKGWSGLFGRQVHSSGIGGLKSRLRTSLETPVAVERTETTTRECFACGKRRDLSLWDRVIECECGWKCDRDVNAALVILRKGLGLGVEQAVGLDRPELKPLERDAAARILGSNPYIRVSFPQ

SEQ ID NO: 744 - protein, 395 aa, unknown
  TnpB Polypeptide
MRFRLYPSAAQKVFLLEQCGHARYVWNLGLEQRLMWRRWKGPTPGFNAQAAQLTEARRVEPWLAYGSQTVQQQALRDLDQAWQRFFAGTHRRPTWRKAGEDEGLRIVGPQAVRVRQDNRARSSVLVPKIGWVSFKRSRALVDWKSYRITRDRAGRWHIAFAAIPDPIPAPGTGGVVGVDRGVTVAVALSTGEMTSPAGLSMKEAERLLRLQRRLARARRGSNRRRKVRTLIGQLKSRDGDRRKDWVEKTTTGLARRFDVIRVENLNVKGMTRSARGTMANPGRNVAQKAGLNRGILKSGWGLLAGRLEQKAPGRVEKVKAAYTSQTCHACKHIASESRKSQATFVCVACGHRANADVNAARNIAAGHAVTARGDLRVLARSVKREPQHARPPKVA

SEQ ID NO: 745 - protein, 252 aa, Escherichia sp.
  misc_feature (248)..(251): Xaa can be any naturally occurring amino acid
VKRLQAFKFQLRPGGQQEREMRRFAGACRFVFNRALALQNENHEAGNKYIPYGKMASWLVEWKNATETQWLKDSPSQPLQQSLKDLERAYKNFFQKRAAFPRFKKRGQNDAFRYPQGVKLDQENSRIFLPKLGWMRYRNSRQVTGVVKNVTVSQSSGKWYISIQTESEVSTPVHPSASMVGLDAGVAKLATLSDGTVFEPVNSFQKNQKKLARLQRQLSRKVKFSNNWQKQKRKIQRLHSCTANIRRXXXXE

SEQ ID NO: 746 - protein, 421 aa, unknown
  TnpB Polypeptide
MLLARKTSVILTNKQSNIIGHMCYAAYKLWNVCNYEKLNYKELNLPCDYPNWYFQKKYHKDDLWYKQLPSQTAQEVCKQLDKSWKSFYSLLKSKSPNVVNPKPPKYKSDNIAITYMQNAISHKVDENIIRLSLSKRLKEYMYLNYGIEDNYLYLENKFFKDFDVIKQIKIYPPINGKSNIIVIYEIKDIDYRVDNNSYLSIDLGLHNLFSCFNSNTHESFIIGRKYLAICHKYNKEISRVQSQYSSIQNAKGIKNPKSSKHISSLFLKKNNCINDYLHKTTRAIVNYCVVNNINTVIIGDIKGIRKDNNIGHVNNQKLHSLPYNKIYQMLEYKLRLEGIRLVKQKESYSSQTSPVAPFVSKEYAKKSNRIKRGLYRDGDNIWNADIVGAYNILRLYLQEEKRVINLNPYEIKSPYLLKVAV

SEQ ID NO: 747 - protein, 402 aa, unknown
  TnpB Polypeptide
MKQQVSFKFRLRPDGQQEREMRRFAGACRFVFNRALALQNENHEAGKKYIPYTKMASWLVEWKKDTETEWLKDSPSQPLQQSLKDLERAYKNFFQNRAAFPRFKKRGQNDAFRYPQGVKLDQENSRIFLPKLGWMRYRNSRQVTGVVKNVTVSQSCGKWYISIQTEREVSTPVHPSVSMVGLDAGVAKLATLSDGTVFEPVNSFQKNQKKLARLQRQLSRKVRFSNNWQKQKRKIQQLHSRIANIRRDYLHKVTTIISKNHAMIVIEDLKVKHMSKSAAGTISQPGRNVRAKSGLNRSILDQGWYEMRRQLEYKQLWHGGQVLAVPPAYTSQRCACCGHTAKENRLSQSKFRCQVCGYTANADVNGARNILAAGHAVLACGGMVQSDRPLKQEPSEMIQATA

SEQ ID NO: 748 - protein, 489 aa, Salmonella sp.
  misc_feature (354)..(444): Xaa can be any naturally occurring amino acid
MMLILKAYKFRLEPTPEQSQRLRQLCGCARFVWNLGLAETKRILGSGEKLPSAFELNRMLTVWKKMPGHIFLQDAYTDNLQQKLKDLHTAWKRCFDKKLAAKAPVWKRKNEGRDSIRFVNFEKYCRLENRRVKLPSGLGWVKFRQSQRVNGKIKNATISQLAGQWYISFQVEVETAEPNHTSTTIVGLDAGVTKLATLSDGTVYQPVNSFKASQRKLATLQRQLSRKVRFSSNWQKQKRKVQHLHSHIANIRRDYLHKVTSEISKNHAMIVIEDLKVSNMSKSAKGTAEQHGRNVKAKSGLNRSILDQGWYEMRRQLEYKQLWRGGQVLAVPPAYTSQRCACCGHTAKENRLSXXXXXXXXXXXXXXXXXXXXXXXXXXXXXXXXXXXXXXXXXXXXXXXXXXXXXXXXXXXXXXXXXXXXXXXXXXXXXXXXXXXXXXXXXXXVTNIFARHGRALFNKNRLSRNAFFQNVLTGYRRVGNRCASAVAAG

SEQ ID NO: 749 - protein, 388 aa, Rhizobiales sp.
MILGHRIELKPTARQVTYLAKSAGTARFAYNWALSRMGDHWKVQKERPREEREYLSEGDLRKELNRIKREQFPWMMDVSKYVVQEAVKQLGVAYRNFYAKRANHPKKRRKFVNDRFSIGNDQVHVSAKRVRLPIIGWVRMREAVRFPGKIKSIAVSRQADRWYISFNIDVEDHTLHFKQTENQGEVVGIDAGHRELAVLSNGERYEGPKALKRNLKKMRRLQRSLSRRKKGSGRRRLMKRRVAKLHQRIANIRKDYTHKLTTKIAQTFNVVCVETLNVKGMMKNSSHARGMADAGAFEMKRQLRYKLPLRGGRLIEADPWFPSSKLCSCCGWKNDQLQLKDREWSCQECGTIHDRDENAALNLKAYAVSYTVKAPGQKSSGSFAAQAA

SEQ ID NO: 750 - protein, 306 aa, Vibrio sp.
LLSLSKKSRKYSWLSQFDSISLQQSIINLDKAFSNFFSPKLKAKFPKFKRKHGYQSSYHCTGLKILENAIKIPKCKPIKAKIHREINGTLKSITISKSSTGKFYASILVDCGNEAPAKPKHITNLSGFDLGLTDFLISDKGEKIANPRFLINAYKNLRRKQKALSRCKKGSKNRAKARLLLAKAHERVANARNDFQHQLSKRIIDENQAIIVETLKSSNMLKNKRLSKHIADAAWGAFVSKLTYKADMYGKWLIKCDQWLPSSKTCSCCGYKMDKMPLQIRVWTCPSCNEVHCRDTNSGKNCVMQG

SEQ ID NO: 751 - protein, 368 aa, Moraxella sp.
MKTLKLRIRDKHTDKLNRLSGLVNFVWNYVNALSYEHLKRTGKFFSAYDLNDYTKGSGELLGLHSQTIQAINETHAKARKQFKKAKLNWRTNNPNSKRKSLGWLPFKQSAIKHIATHQTSKKGLKSTLQLSLAKGQKLVIDLWDSYNLSLYQINTLEVVQDSRNRWYACITVKDYPKQACGTGSVGIDLGLKDSATASNGDKLQIKQTLKYAKDLATAQRAKNKQRVKAIHAKIKHTRQDLIHKFTTQLVKDNALIVVGDIQSNQFNSKKGKLAKSVYDAGWFELKRQLTYKCENAGCRFEIVNERYTTQRCSCCGEITANSPKGRKSLGIREWICASCGTWHDRDINASRNILAVGLHRLAEGIPLL

SEQ ID NO: 752 - protein, 422 aa, unknown
  TnpB Polypeptide
MRRTNVFILVPTSEQHQILQERATNCAKLWNEVNYLHRQQYSNYSKLDWNPQAYKRYVPLVGSATAQQIVRKNNEAWRGFFVTKQMEKAGTLPPTMKGMNPPGYWKRNGQYVLKVLFRCDSYHIRKSRMDLPHHLSIPFKGKPKWIGKQGRLEVAWDSLSKRWRVFQPVEVKSLITPLGSKTCYIDMGVRNLATVWLSEWRQPIAYQSGNLLADWWYWTNRIARYQQRLADVNGRRKSKQLSKLYGIRKKRFRHAVATFARQLVKDLYAKGVSTIIVGELTGIGNSGDHNSRHVNAMVHNYWSHKYVTDRLKWTAEEYGMKVRTVCEAYTSQTCPRCGSRNTERILRRFRCLGCGLEAHRDAVGVSNIATRCGEYAVRPMVWPMLLRWDGCGWNRNNGMPTQQMIRVEARIPTTSVAERINL

SEQ ID NO: 753 - protein, 427 aa, Escherichia sp.
MHQENTMLPRRISVSLFIDQSIIWPVKRLQAFKFQLRPGGQQEREMRRFAGACRFVFNRALALQNENHEAGNKYIPYGKMASWLVEWKNATETQWLKDSPSQPLQQSLKGLERAYKNFFQKRAAFPRFKKWGQNDAFRYPQGVKLDQENSRIFLPKLGWMRYRNSRQVTGVVKNVTVSQSCGKWYISIQTESEVSTPVHPSASMIGLDAGVAKLATLSDGTVFEPVNSFQKNQKTLARLQRQLSRKVKFSNNWQKQKRKIQRLHSCIANIRRDYLHKVTTTVSKNHAMIVIEDLKVSNMSKSAAGTVSLPGRNVRAKSGLNRSILDQGWYEIRRQLAYKQLWRGGQVLAVPPAYTSQRCVCCGHTAKENRLSQSKFRCQVCGYTANADVNGARNILAAGHAVLACGEMVQSGRPLKQEPTEMIQATA

SEQ ID NO: 754 - protein, 216 aa, unknown
  TnpB Polypeptide
MRSDGTVLDRKFINFPSEKDRLSHVLGRIRRFQKEHGSRQIGSRWAYAKRLNTELARKTGRSIAEYAHENHADVIVFEYLEMKGKISGKKRQKLHLWKKREIQTMCEHKAHRYGIRVSRVCAWNTSRLAYDGSGPVSRDPKNHSLCVFQSGKQYNCDLSASYNIGARYWIREIIKTLPETERSSLEAKVPAVKRRTSCVYADLLILQNEHGCLKAA

SEQ ID NO: 755 - protein, 388 aa, Lactobacillus sp.
MTKLIKGVKLRLYPNKQQQAQLWQMFGNDRRVWNLMLDMTKQRYQNNPSSHFVNEYGMNYLLKQLKQEYPYLKDSDATSFLVVNHNLVQAFKMLFKHRGGYPRFKSRHAAKQSYTGRSVCTVIAKRRMKLPKLGSIRTSKTSQAVNGKIKRYTVSYGPTGRYYLSLQVETVAPEALPKTGKTVGLDVGIADLAISSDGEKFGTFNAKWLEKQATKWQSKYSRRKYQATVAVCQWNHNKNHLTDMEVDDYQNWQRAQKQKARYQQRIANQRQDYLHKLTTALVKKYDVIVIEDLKAKNLQKNHHLAKAIANASWYQFRTMLEYKCDWYGKQLITVNPNYTSQICSTCGYHSGKKPLEIREWTCPKCGTHHDRDINAAVNILHRGLKAVG

SEQ ID NO: 756 - protein, 182 aa, Lachnospiraceae sp.
VGIKDFYADSNGNVVRNPKYLEKSMRKLAREQRKLSRKQKGSNNRNKQRIKVALVHEKIANQRNDFLQKQSTMLVRENQTICIEDLNVRGMIRNHKLAKSIASASWSKFFTMLEYKATWYGNNVIKVPTMYPSSQTCSCCGYKNPLVKNLSVRSWECPECHTKHNRDTNASINILNKGLQVA

SEQ ID NO: 757 - protein, 391 aa, unknown
  TnpB Polypeptide
MPNGERLRNLRQFAGSCRFVYNKALALNLERYEKKEQRLGYAKLCALLPNWKLEHPFLSDVPAQALQQALKNLDRAYANYFQMRADFPKFKKKGQPQSFRIPQGFEVDNQNGRIKLPKLGWMRYRKSRDVLGEPSNVTVSESCGKWYASVQTEREVETPQHPSMSVVGLDWGIVNLATLSNGEVVNQCQPLKSFLPKLAKLQRRLAKRKKFSKNWRKAKAGITKLHTKVANVRKHLMHKASHNISKNHVVVVIEDLQVKSMSKSATKKVAQKSGLNRSILDASPFELRRQLEYKTQWRGGLLVAVAPQNTSRKCPDCGHVTAENRKSQAKFVCVECGFSAPADLVGAINIREAGLALLACSSSSGDVSPSCQEPTEGIPALAGEPVGIPSL

SEQ ID NO: 758 - protein, 391 aa, unknown; identical to SEQ ID NO: 757
  TnpB Polypeptide

SEQ ID NO: 759 - protein, 419 aa, unknown
  TnpB Polypeptide
VFNETIEYIRSCVNFSPSITEIKNDLLRHLPKWCDDVPFKIKARAVKEAHQAFKLVEDEPITRAKTIKLKPTQQQRQIFKKWNDSSRYVYNQTIAYIRSCVNFSPSWMEIKKDLLKQLPSWCDEVPFLIKGNAVKEAHQAYWKAKGHPKFRSRKNPTQSCYIPKSAIKNSGIYPRVSGNKLHYSEALPEEPLDGRLVYQYHSWFLSVPQKVKTHVAENQGRVVALDPGVRTFQTFYSEFLAGQIGYDDFGRIQRLCFYLDDLISRTSKAKSQAKRRLKIAQARMRKKIKNLVKELHFKTSRFLVDNFDVVLLPTFETSQMASKSGRKLRSKTVRAMLTWAHYQFKVRLKNKALEFGKKVIDVCEAYTSKTVSWTGELKKVGGSRVIEAGGIKMDRDLNGARGIFLRSLVDSPALMAMLP

SEQ ID NO: 760 - protein, 221 aa, Okeania sp.
VPQGQALRDLERAFKNLLTISKRGFPVFKKKGRKDSFYLEGSIKIFQGNYIQLPRIGIVKTYEILPNCRVKNVRISKRADSWYISFKYNFESAPTEKVGETIGVDIGINTLATCSDGSKFANVKAYRQAKKQLVRQQRAVSKKVIGSKNRRKAVKKLAKVHKKADATPRRRQSQGNAHQAVADIRADALHKLTTWLAKNHSTIVIEDLNVSGMLKNHNPPL

SEQ ID NO: 761 - protein, 456 aa, unknown
  TnpB Polypeptide
MKETPAGTGVSNRNGTEPSMPAKRKSTRKPQPEVLYKAHRIALDPTDRQETLFRQHCGFARVAGNWALDTFRDAWFTETGTDGEWLSDMELRKGFNAVKRDVYSWSADLCQNVGKNAIRNMADGLQHWGRYCQARKAGRKVRRVGFPKHRKKGRHMSFTFTNGRNTARVDGQHVYIPAVGWVRMREALRFTGDILSATVSLTAGRWFVSFQVETADRKPALRPGPVIGIDMGVKTLATIWDGDEVTEIANPKPLQAALAELRRVNQAIARSRKVHGKNKPSHRRDALYAERQRLYAKVSNIRNDHHHHVTTALAQRGGTVKVETLNLSGMAKNSRLARAVHDAGMGEFLRMLAYKCDWHGTAFVQIDRWYPSSKTCSQCGAVKQALLLSERTYRCVACGFECDRDANAARNIQAFNTAARSAVADAETRKTDRPAGTHGRRSVNQTDDPLPVFTGS

SEQ ID NO: 762 - protein, 445 aa, unknown
  TnpB Polypeptide
MPDFLVSGKSGRSRKEMLVQHRVVTEFRSWQERNKAANGESVKYVSQGWKRTVGKSAPAYGDDYVNLGAVDKQYAAIENNPFADGEIILKMVIQGSWYRLIFDFDNKRFTEGRVTLPVIKVEDGAPVFIFTVVTDNPVVQFSGDYTIGVDVGVNDYATVVVRDVKTGRIVHETTLSQRVHSLWNSVRASEQQVRDLKKKSDRLLSQRQARMAALDEAQLHREAASRKKRELAILAAQEIAYLSHVWENAVVAVEDLSWVANTMQNGRWNRGELMRWLTHYVTQNGGWVVCVSSFNTSQQCHTCGQRVTHPTHKESVCPEHGLMDRDVNAAANIAARAVPRVVKARATRAKNRKLRPQAPLRTPAARSSLKYPGRDRTKNKPTLKRKNRRRAAREVILPVCPARVQAHCLVTRVLADQGTCNNLGTNTAAVKQGNMAYKCRLCSLI

SEQ ID NO: 763 - protein, 285 aa, Streptomyces sp.
MPARRLRCGRLCARSTRRPVSVLAVRHRDGVHLDDRGETEEPSVRLLGGRAHDAARVPQGRVRSGRTRRGVLPDRDVRRSRGRDLRAGRVGVDLGIVNIATTSTGYRAAGRGLNRYRKRQLDLRRKLQSQGTTSAKRLLKRRNRRERRHATNVNHIIAKKIVTTAERTGRGIALEDLTGIRDRVRLRKDQRAPLHTWGFRQLGRFIAYKSRRAGVPLVYVDPAYTSRQCSPCGHLDRRNRVDQATFVCRACGVCLHADDNASRNVGRKGEDMWTSGRESRVPAAP

SEQ ID NO: 764 - protein, 527 aa, Deinococcus sp.
MMNSCGSSATRTRSNVTLNHCMWRASTALRLGRRRAGTWRAWARGAARSPASWPRWAGWGRGNESLAGDARLPRPAGGYDPVSDASGMGSVGCPALCRALLLAAVRIRSRLPRFPVAFRYGSITAAAKRKGAELREAATTIKTFRYRLYPTRPQEAAMFETLRLTRTLYNAGLEQRREAYRKAGKTLSAYDQQRELTALKEACPEYGGVYSHVLQDVFDRLDRAYKSFFSRVKKGAKRAGFPRFKGRDRWDSFKFKQCWDNKKDDWTACGKPIDEGRRINVPKIGAVKIKLHRPLEGKPRSLQIVLDVDQWYAVYTCEVPRAALPETGSSVGVEVGTTWFAVTSDGGFAKNPRYLKFSLKKLRVQQRTVSRRKKGGNRRRKAIQIVAKTHRKIRRQRLDFHHITARRLVNKHDLIAHEDLNVSNMVRSNLARSISDAGWTSFFLILSSKAAEAGRKVIAVDPMYTNQQCSKCGHTCRENRISQARFVCVECGWAENADVNAAKNILQRARIIWPSGLNGSGVSHVVA

SEQ ID NO: 765 - protein, 434 aa, unknown
  TnpB Polypeptide
VTGLTKTLELKLVDPNSHKRQKLRETREAYQQALQEAFAAGCDTQSAANDVVVEYDLSGYAKNALKQYVPQLCGNSYDANELHDDHPVRFTNEGLQLDHQPQNAIEWYVKIPHHEDYHLWIPARANPEQRDWLEALYADDAEMGESRLFERDGTWYLHITVTRDVEDKSESSADERTPPDDSGEPCLAGLDRTPIGVDIGEASLVTVCHRDESGSPVRPELWADDGKTVRRLGKTYFTAKRRLQQRGSERIAESYGDSLWDQIDDVFHRVTREVVEYAESVENPVLVLEDLTYIRENMDYGEYMNRRLHGWGFAKLHAQIRYKAAEKGIPVETVNPRNTSKACHACGEHGYRPRQATFKCSNDGCWVGEYQADINGAINIIYRYLSGESQSREDMTGDVEKNRRFFDHWKSKISKNSAEDGASLTGPQDSQAEC

SEQ ID NO: 766 - protein, 399 aa, unknown
  TnpB Polypeptide
VIRSTRHHLLDANPKKVNQYLLFLNEYDRVAKIVLAQVWAKLPSDLKIPKYLNYKEYLVDTKLSARVMSSICTQVSGIVRAATEKQRRRLWVQENKNANISSVKFSQPKPQHIYPELSSKCCNIQPTLHKKAKFFGFLKLYSLGEEFGSFKLPIIKHPRRGNVPKAGVKLFPSTIQLVWDVATDPIKKGDKVIGADQGIETVLTLSDGQVTPESCRDKHTLSTILDKLARKRKGSDAFRKAVDHRKNFINWSIRQLNFKGVKEVRLEKIVNIRFGKSSSEKMSHWSNPEIRDSLKRRCEELEVPIIEQSCAYRSQRCSQCGSVRKANRKGKTYTCNACGYSADADFNASVNHSVDLPDASKFFGLKLNLGKGFYWKPTGFYTINGAELRVPLAARINRS

SEQ ID NO: 767 - protein, 399 aa, unknown; identical to SEQ ID NO: 766
  TnpB Polypeptide

SEQ ID NO: 768 - protein, 247 aa, unknown
  TnpB Polypeptide
MFLAHRIRLDPNNVQATYLARAAGTARFAYNWALVEWKRQYEASKVDPAVDKPNEAALRRQLNAIKREQFPWMLEVTRNAPQMAIMQLGRAFENFFKGRARYPTFRREGRDDRFTLTNDQYRVEQKRIHIPILGWVRMHECLRFSGRIVAATISRIADHWYASITVDIEDQLQSPAETQGAVGVDFGVSALATLSTGEVFPGPKALGTLLARLQRLSCEVSRKVKGSRNRTKAKARLARLYTPGLPI

SEQ ID NO: 769 - protein, 416 aa, unknown
  TnpB Polypeptide
MSITRRITFRLYPSPSQAKTLGYWRRLHKDLYNAAIANRKNQYKHFKKSVDYYEQQNCLPDFKEVWYEYKQLGSHALQATLKRVDMAFQRFFKSLGGYPKFKSIRHYSGWTYPCIAGWKALTNGKNGHLELSNLGKIQMRGSARTWGKPTTCTVVNRQGIWYASITVQCNPIRETGTEAVGLDFGCLTAVAMSNGNIVENPRYLSVTQAKIKLVSKSKRRKIKPDFKQRIKGSNRWKKVSRKVRKLQCKVSNQRSNWVHQVAAEIVSCNSLVATEKLNIKAMTRHSLKGSKRKSQKTGLNRSILDVGMGMLRSSIKYKLSEAGGIFVEVPTQKVKPSQTCPNCGNQKKKELSERIHNCPCGFTCDRDVAAAMVMLNWATGTGTVLDKRGSDGSTSTHCGGFKQLAEMKRQKPRPSS

SEQ ID NO: 770 - protein, 372 aa, unknown
  TnpB Polypeptide
VLLSLKTQLKLNLQQRVFMSKHAGIARFTYNWGLATWQSLYQDGYQPNHRLLRTFFNNHVKTNLALSWLKEQGICQKITEFAFENLGDAYKRFFKGLGGYPNFKKKSRGTDSFTINSGGKPISVGGTRIKLPTIGWVRTYVRVASRREALPHITTTKFTISQRAGNWYISFTFEQELALPSTTMTIVGVDLGIKVLATLSTGVVFDNPKARDKMKKKLAKQSRQLSNKTRDSKRYSKQKLRVAKIHKRISDIRLDATHKATTAISKNHAKIVIESLNVKGMMSNHKLAGAVSDANFYEFRRQLEYKSQKFGSEIVYAPMFYPSTKTCSNCGHVQPMPLSVRVFDCQICKISLDRDQNAAKNPEKLLVLSRSL

SEQ ID NO: 771 - protein, 601 aa, Rhodococcus sp.
MADTGFTALRQFSFTTRPYLAVDDATGAPIGLDDLDTRVGWMLDLISGAETELISRLWHPATFDVLATGRDSHGRTLPRHGHVTAARLGWTPHYPDDVYVPSRVTRVVTAQAVGTLRTLAYRDTAIAALSARFDPATGRIAAPITAAEYVPSGYARGVVRQLAAHSHRTAGTADARLRITDVQAPPRTSAMARLSAADRQLAHLTVADAVMTLTVTLPTTPAPEGRAQWRRVRVSAAIPEYLHRRPISEWHLPTLVLDRKGLLLRCAATETVPAADLMAATVAVGVDWSPSTLGAAAITADSPEGLVSDYRGFTYDDRGLGIKLARLQTEGQLLHRKAARLTQLAAAAPPEVRAQLEEKIAVLDGHRTAVGVKRGKINRELAFHFGRQVTDYAAAAGATVIAVEDLTTLETRGHGRVNNNRAAQSARRKAVDALTHTAAGVGVTVVSVPARGSSALCPGCNEQLARPGGYHRAWCVQCKVGGNRDHVAGVNLAKRALLGRGQVVRKRGENPRIRVVEHAPVRRCRDKKSPTPSRPRHRRVRRSAPAATPQVGVNQTKTVPAPQASVWDTVKPATPQGVTGSREVHTSPTPATSVVGSMRSM

SEQ ID NO: 772 - protein, 535 aa, Rhodococcus sp.
MRAAWFTPECRSCGDRCGGSVVTPTAVLADPGDHVTAPGAALDQVADSSRTVIRAYVFVLEPTPEQASVLRSHCGAQRFAYNWALSQVKANLDQRTAERSYEIPDAELTPPVSWSAYGLRKYWNTVKDDVAVNTDTGQVWWPENSKEAYSSGLANCAAALSNWSDARSGKRKGPMGFPRFKGKRAVLSCRFTTGSFGLVTDSGDRRHIQLPRIGVVRSAESTRKLARKTIAGTARIRSATLSFRRGRWQVSFSVEIALPARALPSATTGTSAAVGDCGVVVGVDVGVKHLAVLSNGEMIENPTHARRHAKQLRSLGRRASRRVGPDRRTGQQPSRRWLRTQEQIRAVRIRIANSRRDHLHKLTTRLVRDFDTVVVEDLNVAGMTRSGGAYKRGLNRALQDAAFAEIRRQLTYKCEWAGTGLQVADRWYPSSKTCSNCQVVKAKLPLKVRVFTCDACGFRADRDHNAALNLAALAAVDGGASSASCGRDVKDARQKPTIRPAARWADGIAAGTPLSGERDRGNPDTHAECTKQHSA

SEQ ID NO: 773 - protein, 599 aa, Rhodococcus sp.
MSGPGSTAARQFSVTTRAHVAVDDATGEPIGLDDVDVRVGWLLDLVAAAGAELVSRLWQPATFDVLAAGLDRQDRRLPAQGHVAAARLGWTPFYPDGVYVPSRVSRVVTAQVVATLRTLAYRDTAIAALSARFDPATGRLTAPTEPGDSVPAGFARGVRRQLAARGGGGAPAGRLRITEIQGPPQTSAMARLSAADRQLAQITVTGRELVLTVKLPTSPTPAGRAQWRSVRLTAAIPEHLHGRAVTDWHLPTLVLDGRGLLWRCAATELVPADDLDSAAVAVGVDWSPTSLGAAALVAEGADGLSSDYRGWTYDDRGLGIKLARLQTEGQLLHGKAARLTRLAAAAPPEVRARLEAKIAVLDAHRTAVGVKRGMINRELAFHFARQVTDYATAAGAQVIAVEDLTTLETRGHGRVNNNRAAQSARRHAVTALAHTAAGVGVTVVSVPARGSSAWCPGCDEPLSRPGGYHTAWCPACQVGGNRDHMAGVNLAKRALLGRSKVTRRRGRMPVVRVAEHAPVRRCRDKNGPTPSRPRHRRVRRSLPPTTRRVGVNPKQHVPAPQASVWDTVKPTPPHGDTGSRDTRTSQASAPPVADGMRST

SEQ ID NO: 774 - protein, 458 aa, unknown
  TnpB Polypeptide
MQATLVAKGRPCLRCERKWYNPIVILTYCYKIKPSPEQIAIMERWLELLRRHWNYALGQRLDWLNRTRSPIDRCSLISEPIGVIPEAVNYYTQQAALKETKKLFPEYKKIYAETQQVNLQRLNKAWDRWRKPDASGKRGGRPRFKKPGELRSFVFPRVNTSKAGAHLVDGVLKLSRIGSMPVIMHRPLPVSEACPKVVGFILKQCTIVKKADGWYCCLSLKDDTVPELLPIDSVKSAVGIDVGLEKFLTTSDGEAVPIPQFYRKAQEKLAQAQGVMSRRVKGSNNWKKAKHKVALLHLHLTRCRKEFHYQVAHWLCSKYDLIAHENLNIKGLAKTKLAKSIHDAAWGAFLEILQVVAVKRGLLVQEVNPRGTSIECFNCGSRVKKSLSDSAKPTLRERFHCCSSCNVLIDRDWNSGINILNRGLLAVGLPLNGCGKSIQDIEEQQVSFVNLRSPHHNL

SEQ ID NO: 775 - protein, 375 aa, Lachnospira sp.
MVNRAIKYRAYPTTEQEVIFAKTFGCCRKVWNLMLSDKITYYRTTGESLQTTPAMYKKDYVFLKEVDSLALANVQMNLQKAYKNCFDKKRKKRNGFPKFKSRKHTRKSYTTNNQKGTVAIVDNKYIKLPKIGLVKAVIHRQPEADWIIKSATVSQESDGTFYISILFEYEKNIVKISKSNNVIGLDYKSDGLYMDSNGNIGSNHKYYKESHKKLAREQRKLSRKVGSKKNQIKSNNYLKQLKKVNKIHRHIANQRLDNLHKLSTEIANQYDVVCVESLDMKAMSNKGFGNGKATLDNGYGLFLNMLEYKLFDKGKYFIKVDKWYPSSQLCSCCGNRKKLTLTDRVYKCDCGFKLDRDYNAAINIKNEGLRLLEVA

SEQ ID NO: 776 - protein, 328 aa, Methanoculleus sp.
  misc_feature (254)..(312): Xaa can be any naturally occurring amino acid
MLRGYRYRLYPTKDQMILIAKHLGCCRYVYNWALNLKNQIYHNEGISLSGYALMNQLPMLKEELPWLKEVNAQSLQQSMHHLSRAFTNFFEGRAEEPTFKKKHDPEQSFMVPQSYTVDFKQGTVKLPKIGAIKTVFHRTFVGTMKSATVIRRSTGRYFISIVVEDGRKSPKPADPIPDQTIGIDMGLSHYAVLSTGDAVANPKYLRNAQTRLAVLQRRLDRKKKGSRNRNKARFKVARCHQKIADQRRDFQHQXXXXXXXXXXXXXXXXXXXXXXXXXXXXXXXXXXXXXXXXXXXXXXXXXXXXXXXXXXXSLLDWFAKIKHWLWSP

SEQ ID NO: 777 - protein, 429 aa, Trichococcus sp.
  misc_feature (306)..(310): Xaa can be any naturally occurring amino acid
MIIHKAYKFRLYPSEDQQILIGKTIGCSRFVFNHFLSEWNQTYEDTGAGLSYGTCSASLTALKKEADTLWLQEVDSIALQSSLRNLSDSFDRFFKKQNSAPRFKSKRNPVQSYTTKQTNGNIAIVGNKLKLPKLGLVPFAKSKEVGGRILSATIRRNPSGKYYISILVETEVQELPKTGSICGIDVGLKNFAVLSDETVYKNLRPFRKLERKLAKEQKVLSRRREQAKKDGRKLSESKNYQKQRVKVARIHEQISNARTDYLQKISTEIVKNHDIIGIEDLQVSNLVKNHKLAKAISDSSWSQFRXXXXXYGLSANWNGNSPRNKKYFPDGVSKPKRTGANCPNRKTTRSNASKSPESMNKSVMPEPITCRKYRPRSLKTTTSSASRIYRFPTWSKTTSLQKPSATPVGPNSGPCWNTKRAGTASRLLQ

SEQ ID NO: 778 - protein, 349 aa, unknown
  TnpB Polypeptide
MKKCIRSYKLKLYGNSVKTDTARYTIKRFNDYVNMFMGRAYYRQPISTKGMGAIANQAAYRAMDIVRKQFKSAKITGNKTNIPYIVNVGCRAKMQESKDSKFDYWVSIMNQWGGDRVLLPARSHKALNKALRQGWQFTSLCECKIINGNLYAIIFVKKDAPKVKHHKNIIGCDVGMKHSVVTSDGYLGHGLSKVIRVQKNRLAERRRQGHKVSNKTKTCIRRILDREAKFVIRRSLASKAGLAVESPKRIAGLGRGKLQGWAVSYFANRLTILGQESGVMVIEVSPYQTSITCPKCGNVDKRNRATRDIFKCVSCNHIDHADRNAALNVAMKGILNIKKDKSCKRKKAI

SEQ ID NO: 779 - protein, 422 aa, unknown
  TnpB Polypeptide
MLVHQSYRYELKPNNKQMTLLAKHAGCARFAYNWGLSLRIEEYKLTKKSSNAIAQHKQLNLLKKTQFPWMYEVSKCAPQEALRDLDKAFNNFYRGLKSKRKVGHPKFRKKNKNDSFRLTGSMHVHTDSVILPRIGIIRTKELTDLKGDILSATVSKDIDRWFVSFSVERQRKECNVIKNQTIGIDVGLNSFCSLSDGTKIESPKPLEHALKLLKKRQRQHSKKKKGSQNRKRSTLSLGRLHRRIRNERKDFLNKLSTHLAKTKSVIIVEDLNIKGMLKNHNLSRQIADSGWSQFLNQLSYKSTWYGSELIKAPRFYPSSKTCSVCGAVRVDMDLSERKFICGMCGTIIDRDQNAARNLAYLSPYQNIWSEGSFQINNPTPSFGGSYACGDTSGGGTQSNLRSTSHVSVKQEADTRYSDGISG

SEQ ID NO: 780 - protein, 254 aa, unknown
  TnpB Polypeptide
VDVNEDCIALAAMSRSGSVEDSVVFEYPSVKEQRHEFFTKRKRMQKAKQTAFETVVQTEERDYVHDCLHKVSREVVEWVSQFNDLVIVFEDLKDMRESIDYGTRMNRRLHSLPFAALQDMVSYKAAWLGIPSDDVDPEYTSQRCPRTECQHTERANRHKKRFKCKRCELQDHADRKAAVCVVQNWFDEQYGNVPSLDRLPGRVRVMRRAASGAGGGPDFHGHDLCSGVHRHGTSAQPEMEAREELKSVASAVQD

SEQ ID NO: 781 - protein, 345 aa, unknown
  TnpB Polypeptide
MSKLTYKVKHNADLSVALFKARQIAQYAIEHRTLSSKDVSNFGLKSIISNQVLRKYGRNWKCKQIRRVKLTVPNQGLSIKDNIVWIPSLKLSIPFDKKIEKIHQVELDTEYAYICCSVKDEPKYKESKYVGVDLNATGHIAVASVDNKILKLGKEAPHIHRKYKQIRASAQSKKAYKFVKKLKNKESRKVRDINHKISRKLVNIAKEKGYGIKLEKLEGIRKKKQGKKLNGIKSNWSFYQLQQFVEYKSKLLGVPVFYVAPQYTSQECSKCGQIGNRDKKVFECPHCKHVDHADANASFNIGRRSIMYGKLNTDRDVFKSTSDNAQAEIMQTTLTAEPTTLQRVE

SEQ ID NO: 782 - protein, 382 aa, unknown
  TnpB Polypeptide
MITYTTQLQGDCQELKQLLEQHCVAFNIASKEQFTEKKNNLTILHSKVYKNVRKQYPNIPSQVVIKAEQECISSYRSVKSNKHKIKKPIEKKNLSMRLDKRLYSIPNKFSIKITGTNGRKEYKFVVYPKLKELLDKYQYQDPLIYVNNDKIYISFSFENKPKEKIKQRLALGVDIGIRRNAACSDGRIVIDRKFNGDKRKLRHLKDSLKSKGTKSARRHLCKLRYKEHNKNKNQTHLIANEVLRTEADTIVLENLKSIKAKKHKYQNKRSISQVPIYELRRVITYKAENAGKTVILVCPSYTSQTDCITNRREGERRGCRFYSKNGLVYDADINAAINIAKLSKHPISQTNRLTYGQAVVNQPNVCKSLEQSGVLQAPIPLG

SEQ ID NO: 783 - protein, 372 aa, Clostridioides sp.
VIAVKKAYKFRLYPNKKQQELINKTFGCCRFVYNKYLAKRIEVYKNDKETFTYKQCSSDLTNLKKELKWLKEPDKFSLQNALKDLDNAYKKFFKEKAGFPKFKSKKINRFSYKTNFTNGNIMYCGQHIKLPKLGMVKIRDKQVPQGRILNATISKEPSGRYYVSLCCTDVDIEAFENTNNHIGLDLGIKEFCISSCGEFIENPKYLKKSLNKLAKLQRELSRKTIGSLNRNKARLKVAKFQEHIANQRNDFLQKLSTKLIKENDIICIEDLQVKNMIRNRKLSRLISDVSWSEFIRQLEYKANWYGRQIVKVGKFFASSQICNKCGYKNEEVKDLNIREWICPSCNETHDRDINASINILKEGLRLITIQNK

SEQ ID NO: 784 - protein, 324 aa, Lachnospiraceae sp.
VDWLYPVMDREWEDLSRIRLEKQRFNAAEKLIHTTARNRAKYAFDDAFPKMPSYLRRAVLQHVLGAVSSAQTRCDKSSPGRNHYMPVFYKDNMYRKEEDRVFLKLYNGKDWVWQEIRLKKTDLDYIRKYWSGVKAKSPVLIRKHRKYFLQFAFEQEAELTDKPAAMQRICAVDLGINTDAVCSIMKADGTVAARRFISFAAEKDHLYHVLNRVRKHQRQHGAQSVRGFWAYAGRLNEELARKTAGAIIEFAKENRADVIVFEHLDMRGKKIRGKSRQKLHMWKKQSVQESLEDKRPGVRWIRKSNKKPEEPFPCRISEREAVQL

SEQ ID NO: 785 - protein, 380 aa, Staphylococcus sp.
MYKGIKCKIYPNKKQKELIDMTFGHTRFVWNEMLNMMNTRYKNNQSLKPLKRTQLSVLLTQLKREYTWLKDVDSVAIQCSVLTLFETFDRFFKKQCKYPKFKSKKHVSQSYTSTIRGNNIRFNENQRYIKLPKLNWVKCRSSIQHIENERIKSVTVKRKSSGQYEISLLVESENQTLHKTGKSVGIDLGLTDLAILSDGQRFKSQKLHLKYQNQLHYWEKRMARRRLQAKKQGVSLIDAKNYQKAKQQVARIHEKITNTRNDYIHKITTYLVENYDTIALEDLKVINMIKNHKLARSIANQSWQKFKMLIQYKCDRYDKRAIIVNPYKTSQMCSNCGYDSGKKTLDIRKWSCPKCRIEHDRDINAAKNILKIGLGQALVK

SEQ ID NO: 786 - protein, 369 aa, Staphylococcus sp.
MLKAYKTEIQPNETQLKIIHQTIGTCRWIYNKFIEINQIRYENKLKYMNGYNFSKWLNNEFIPNNPDKLWIKESASKAVKQSIMNAHRAYQDAFKKQKGFPKFKKKQSTGSYYLIGNIHCERHRIKLPKLGWIRLKEKGYIPNCNIKSTTVSKEFDRYYVSVLVDERPKSIFKSLQTEGIGLDLGLKDTLFTPNGVCIKDLRKNKRLIILNKSLKRQQRKLSRKKKKSNNWFKQLLKVQRLYRKIKHIKQDIKRKSILSIVQKNPQYITIENLNIKGLTKNRNLSNAFQQVGLGYIVEWLKQKCYEYGIELRQVNRFYPSSQLCSQCNHRQKMPLHKRIYKCEQCGFEIDRDINASINLKQALDYTVIV

SEQ ID NO: 787 - protein, 509 aa, unknown
  TnpB Polypeptide
VSSVARAYPRRPYACFDKVTGEALDTGEVLRWVLGDAVRCAQWAFTHITPENMAVVSEYAGLKPAEAGRRMGIRLPAGARTTGRSRFEKMVQEYAVTQLRSWYERVQAYSAEGGKRLTAGFRRTLTPNAPVSLKPRLALSATDKQYHAIRVKGSITELDMVVASKWVTFRFKTPSRFLEEGVRPVAPTISVDERDRVMFTWYADIPVERTEFSSKYVVGVDVGCNNLATAVVRDITNGEVVEASFMNQRIRSLENKIRRTKTQIKALQKKGKYEEAAHHRKALANRRREAAILVGQEIADLSYRHSNALVAVEDLSHIRDTMRYGRWVRGLVVKHITDMVESNGGRVLKVNAAYTSRVCHQCGTELDSSNYRTPRCVPCSTTWDRDENAAANIAMRAPHKKATATRKKHATQKKRRNSRGATRPLKHPLKKTEPTPKAPQNRTKQHNTHTTHHQKDKEVKSSTCAAGWSPKTKTVQEFLPWPQQRVNRQQAARLFQQQPTTTGWGYSKE

SEQ ID NO: 788 - protein, 423 aa, unknown
  TnpB Polypeptide
MQLVERHLIKPNHELYETLDDLTFKAKNLYNHGLYLYRQSYFERKKNPENPVLSWVEIDKNLRKQGHEDIRALPAKVANAVLKNMGETITSYWRLVRLKNKGGLAQNPKLPSYLHKADGRYPLSFNYQTFGSKRGTNNELILCPKSINLPIPTKVNNPKQVRIVPKHNNFVIEVIYDAKKRAPRRTSRYAGIDLGVDNFATVTFSTQNKPLIVKGLELKSINQGYNRLISKAQSLLPDPQKTSRSIHRLWSRRSWILRTRIHQITAFLATLFDEMQIETVFIGKNINWKQNLPFGKAVKQRFAYLPYETFIEQLRYKCQLHGITVVVQEESYTSKASFLDNDDIPVHGEIENPKFSGRRIMRGLYRSGNGQLINADVNGSYNILRKGLMNNHLSFNADNPLIHPLVVKGIGKEPNKKLVQLYM

SEQ ID NO: 789 - protein, 537 aa, unknown
  TnpB Polypeptide
VLAKNQTYKAFTAYPSHVLDLNGVLLDSAPVLAKLATEVRGISAYATYTVRNDTKLAADLSQVAVSQPAVAGRRAGVSIPIELVVKGRLRKNKAGKETEEKVFGRSRKEWLFRHRVVTEYRSWMERINAANGTSSKYVSQGWKRTVSASAPSYGEAYINLGAVDRSYAVIENEPAADGEIVLKMVIQGKWYRLIFSFDNTRFPEGKVTLPLVKVENDQPVFIFTVATDNPVVQFSGDYVIGVDAGINNYATVVVRSTKTGQIVYQSTLSQRTHSLWNSVKASERQVRTLWKKAGKLLYQRQARMSTLYEAQFHREASSRKKRELAIIAAQEIADLSHQWGNAVVAVEDLSWVADTMRNGRWNRGELINWVTHYVSQNGGWIVSVNSANTSQVCHACSTRVTHPTHKLSVCPVHGVMDRDVNAAANIAARAVPRVEKARKTRAKNRKLQKTQPPRKTPPARNTLQYPNRDRSKGHPTPKRKNRISKEVTLPSCPARVQATCLVTTVLADRGAHGTPETRKAAHKQGNTAYKRRLCSLI

SEQ ID NO: 790 - protein, 423 aa, unknown
  TnpB Polypeptide
MQLVERHLIKPGHELYGVLDDLTFKAKNLYNHGLYLYRQSYFERKKNPDNPVLSWVEIDKNLRKQGHEHLRALPAKVANAVLKNMGESIASYWKLVRLRREGGLSQKPGLPRYLHKTNGRYPVSFNYQTFGSKRGSNRELILCPKGLCLRIPTKVEHPKQVRIVPKHNNFVIEVMYEVEECASKRTSKYAGIDLGVDNFATVTFSTKNSPLIIKGLELKSINQGYNRLISKAQSLLPGAQKTSRSIHRLWSRRSWTLQTRIHQITAFLTALFDEMQIETVFIGKNKNWKQRLPFGKAVNQRFTYLPYETFIKQLRYKCQLRGISVIVQEESYTSKASFLDNDDIPVYGETENPRFSGRRITRGLYRTSTGRPINADVNGSYNILRKGLMANHQPLHMVDPLTQPLVVKGIGQEPNDKLIRLYM

SEQ ID NO: 791 - protein, 516 aa, unknown
  TnpB Polypeptide
MSSVTRTIPLRPFACREIKTNIGIDLHAILAEVRADAELCAAEASKHITSENLEKVSEYDKLKSTEVGRRIGIKLSSTGRGTGRSRFERMVCEYAVIQLRSWRERRKTINGQNNEYVSSGFKRTANPNKPDFLKPRLALSATDKQYHAVRVKGSVVELDMVVNKRWVTFTFASPQRFCEPDVKIIAPTISIDDKNRVMFNWHLEIPVERAPFSDQYVVGVDVGIVNHTTAVVRNIVTGEVVEASFMNQRVRSLENKIKRAKNQIKALRQKGKYEEAAYHRRALNNRRKELAILIGQEVADLSYRYGNALVAIEDLSFITNTMKNGRWVRGMIVDRIKNMVESNGGRVMTVNSAYTSRKCHRCRENLDMTDYHTPTCSVCRVGWDRDENASANIAGKLKDKDRHKKACQTRKKHASKKRRKNSKGSLRTLKHPLKKTSPTPKAPQNRAKNRDNHMVHHAQCVVRTREEVYPILCAAGWPPRCGVSVPAVVHASESDKQPHDYPYDEAILMGCAYTKE

SEQ ID NO: 792 - protein, 441 aa, unknown
  TnpB Polypeptide
MNKSELIKSSLKETKERRKTQTPTVYQLKLQNLNQRDVELLDRLFLEAKWLTNYVVSDIQNRLTPDTWKLKEVEVKVKDNFEKREITHLGSQIKQSIVERIKDNLEGLSESKKKGYKVGKLHFKSEVNSLVLKQYGNTYTIDFKTNKVHIQGIKKEFRVLGLHQIPDNAEVTKGELIKKPSGYYLYVTTFLNAEPDKIKTRKGKVKERYVERFDKPIGIDFGIKDQLTLSNSMKINYEVKESKRLKRLQKQLARKKGYRKGEVKSKNFFKSLNKSKREYGKLSNIKKDIENRVFAFIKSYEKVYMQDENIKGWKSGLFGRNIQHTSIGGITSRLKNNLETLLLLDRFLPTTQTCSNCGHKQKISLSDRVFKCELCGFEIDRDWNSARDMVLFGEKTPLKNLPEDFWEATPVEREATARILESNPYIRVSYISVKQEALSLN

SEQ ID NO: 793 - protein, 413 aa, unknown
  TnpB Polypeptide
MHRAETVVLKLRSPGKAKQAWLEETAGLFRRGTQLGLDFALSKQTSNRGKIHAATYPKIRALGLPSDYCRMAVNQAVQLARSHFGLRKRKRRTGKPTVVRSQGIGLGVNAYQVVGTTLRLSTGVKGVYIWLPLCVPARWRDRLQHVKGDARLFKRGEAWYVMLPLRVPHTPAVRDGDEAAVIGVDLGIVRLLTAQHPHGCLVVNGKPIRHAREHQASLRRRYQRHRRTDRVRAMRSKERRWMTDLNHKVSRQLVDLAAQYPNPVLAFERLDGIRDRIRGSKRFNRMVAGWAFRQLADFVQYKAEKTGVRVVFIDPRKTSQTCPKCGHAARSNRATQADFRCVACGYCANADVVASLNIAGVAAGLLRQGPPDTARLGAAPRRGAGQAAPARERLDGVKVWASAHTDSNLESSV

SEQ ID NO: 794 - protein, 337 aa, unknown
  TnpB Polypeptide
MEKEKIPSRLELQAQVPKMKAERPELNKAHSKVLQMVLYQLYSNLKALSQLKRNGKKVGRLRFKGRGWYKTFVYNQSGFKLIKTEKRLDMLCLSKIGEIPIRIHREVEGTIKQVVIKRHSSGKWFACLCVERDIHIAERKPEKAIGIDVGIRRFLTDNDGRQIENPRFYERPLEKIRVTQHWLSRKKKGSRNRERQRVKLAKLYEKLVNQRNDFLHKLSMFYVNNYNVICVEDLNIKGMVRNRNLAQKILDASWGKFLQILSYKAEGAGGMVVKVNPRGTSREYKHGELNRDYNASLNILERGLAGLGRPFEPVGLKPLLVAVPASVIVEAGSPHHL

SEQ ID NO: 795 - protein, 401 aa, unknown
  TnpB Polypeptide
MLRSFRYRLYPNQMQRERIRKTNDACRFVYNWALETKKKSYEMDGTNLSWFDLNNRLVELKENHPFLKDVYSQSLQQAAKRLHIAFQHFFRRITNGKEQPGYPKFKRRKAHRQSFDVPQFFTVDFVKGRVNLPKIGAVMTIIHRRFTGTPKTCTIVSTVTGKFFISIIVDDGKVPPPKPQATDQTSVGVDVGLTNYVTMCTGEKVGNPRFLRNALKRLQSLHHRLSKKVQGSRNWEKARQRLARCYERVVNQRADFQQKLSTRLIRENQAIMVESLNVYGLLRNRQLAKSVAGAAWSQFLRMLRYKAEWYGKTLIEVGLFAPTSKRCHNCGHINMALSLEDRVWICPACGKLLDRDINAAKNIKMIGLVSIITPREPRVGPVELSVVTEASKQETPPISVE

SEQ ID NO: 796 - protein, 402 aa, unknown
  TnpB Polypeptide
VKRLQAFKFQLRPGGQQEREMRRFAGACRFVFNRALALQNENHEAGNKYIPYGKMASWLVEWKNATETQWLKDSPSQPLQQSLKDLERAYKNFFRKRAAFPRFKKRGQNDAFRYPQGVKLDQENSRIFLPKLGWMRYRNSRQVTGVVKNVTVSQSCGKWYISIQTESEVSTPVHPSASMVGLDAGVAKLATLSDGTVFEPVNSFQKNQKTLARLQRQLSRKVKFSNNWQKQERKIQRLHSRIANIRRDYLHKVTTTVSKNHAMIVIEDLKVSNMSKSAAGTVSQPGRNVRAKSGLNRSILDQGWYEMRRQLEYKQLWRGGQVLAVPPAYTSQRCACCGHTAKENRLSQSKFRCQVCGYTANADVNGARNILAAGHAVLACGEMVQSGRPLKQEPTEMIQATA

SEQ ID NO: 797 - protein, 560 aa, unknown
  TnpB Polypeptide
MLSDRNVLSDSSLKGRRRRMRTRACIIRKDSKAGRYFSDICCKSKALRNTTNFYIRNTYTGIMKSPEERTDNENEVLHNVITGIKMYNEHKLLLFKKDIRKARLTGGLEGHTAVRKALKRSEPVRYPSRENRMLTYEVLDAVFKFTKNPVYYSLPAQVNQNAMRKTFKAWKGYFSALKDWKKHPGKYKAKPRIPGYIRAGEATAWFTNQTAKLTEKENGEGHVLSFIDTEVTVGCGRIPGKYIKTEVKPYHGEYRLLVTYDDKAGSPEVPKHPRRIMGIDPGVNNFLAIANNYGETPYLIKGGAIKSWNQWYNRKRSALMKQLTKGKDSRHSVKDSHRLDALSRKRDERMRDFFYKCAHFICRGAEKDKVEVIVCGHNDGIKDGVNFKKKDNQNFVCIPERVFLKILEHVGAQYGIPVVIREESYTSKASMIDFDGIPTYGEEDGKTYDFSGKRIRRGLYRTKDGTILNADINGAANTIRKEYPEAFRDVTDFSYLFRTTEVIGYRDIYKVRPVTEKKDTGRRSRPGRKSRKRHFARAVRRRELKEAFPKKKAEIKKKAS

SEQ ID NO: 798 - protein, 391 aa, Cysteiniphilum sp.
MKIRKAYKFRLKTNDVIDQKFWLFAGHCRFVWNYFWQINQNRLSQGQKIMRYQEMDYWSKLLKDSDKYHFLAEAQAHIIQQKLKDLDKAYMDAFDKKQPNKRMPKKRKKQLHSSFRFPQAQHFEIDNHRVKLPKIGWVGFHKSQEIVGNPKNITISHKSGYWYMSVQVEVEVTQRDIANDTAVGIDVGIAKFATCATVNSDCIYEPKNSFRSIEAKLAKEQWKLKHKKKFSNNWAKQTKKIQKLHSKAANIRNDYLHKVSTEICKNHAMIFIEDLKVSNMSKSAKGTQEQHGKNVKAKSGLNKSILDQGWYKFRNQLEYKSHWQGGVVVAVEPRYTSQTCSNCGNKAKESRLTQSSFVCISCGFEANADVNAARNVLAAGLSRVGLCSELH

SEQ ID NO: 799 - protein, 387 aa, Lactobacillus sp.
MAQIIKGIKLRLYPNAQQREQLWQMFGNNRFVWNQMLAMAKERYQNNPSSHFVNEYGMNYLLKVLKQEYPFLRESDATSLQVVDHNLAQAFKMLFRHQGGYPRFKSRRSTRQAYTGRSICRVLAKRRVRLPKLGSIRTSKTALLANGKIKCYTVCLEPTGRYYLSLQVAVAAPKHLSKTGKTVGIDVGITDLAISSDGIKYGTFNARWAEKQATKWQSKYAKRKYQAMVAIRQWNHNHKTVKKELSDYRNWQRARQQKARYQAKIANQRKDYLHKLTTSLVKQYDVIVIEDLKTKNLRENHCLAKAIANASWYQFRTMLAYKCAWYGKRLVVVKPNYTSQICSHCGYHSGPKPLQIREWTCPSCGTHHDRDINAAVNILHQGLKAVG

SEQ ID NO: 800 - protein, 399 aa, Microcoleaceae sp.
  misc_feature (399)..(399): Xaa can be any naturally occurring amino acid
MITLEFKLKGKAQQYRIIDEMIRTAQFVRNKTLKHWIDNQGVKLVDLYKQCAIMAKEFEWAGKLNSMARQAWRKSLNGQANLTRWHVRRSAERAIFAIQGFLSNCKAKKPGKKGYPQFKKHTRSVEYKTSGWKLSSDKRCLIFTDGFAAGTFRLLGSRDLHFYAPDEIKRVRVIRRADGYFAQFCINVERTEESIPTGIAIGIDVGLNHFYTDSTGATVPNPRHLRKSEKTLKRLQKRVSRKKKGSSNRKKAINKLGRKHLKVSRQRKDFTIKTALCVVKSSDFIAYEDLQVKNMVKNHKLAKSISDAAWSQFAQWLQYFGKVYGKTVIAVAPQYTSQDCSSCGNLVKKSLAVRTHICSCGTVLDRDHNAALNILAKGLRQTGINLNTVGRTEINAWGX

SEQ ID NO: 801 - protein, 441 aa, unknown
  TnpB Polypeptide
MADKVYDTHYSLWYNTNINYGFSMLVLEAKLRGQDEQYRALDEAIQTARFVRNKCLRYWIDNQGVNGYDLNKYCAVLGREFEWADKLNSMARQASAERAWSAISRFYDNCKKQIPGKKGFPKFKKYTTHGSVEYKTSGWKLSESRREITFSDGFKAGSFKLWGTRDLHYYQIEQIKRVRVVRRADGYYVQFCLDVDRKEKHEFQNRMLGIDVGLNHFYTDSEGNKVENPRFLRKGEKAIKKAQRRVSRKSKGSSNRAKAKNRLGKKHLKISRQRKDFVVKTARALIQSVDLVAYEDLKVRNMVKNHNLAKSINDVAWSMFREWIEYYAKVFGVAVIAVAPHYTSVDCSKCSRQVKKTLSTRTHKCVCGCVLDRDHNSGINILVKGLSTVGRQPPDPPSEEGETRSCFAFILGINACEENDLYNVRETKQGKPTRRTRKPKK

SEQ ID NO: 802 - protein, 426 aa, Actinobacteria sp.
VKIVRAYKIALDPNDRQRTAFIRHAGAARWAYNWGLSTWKRLYAERKTAIEGTGEKVGKITDAMDLHKRLNALKGLPSEDGGVPWMYEVSKCAPQEALRDLERAYKNTFQRLSEGKKGGFPRYKSKHRNRKSFRLTGSIAVENRRIRLPVIGWVRLAEQGYAPTDTPIKSVTVSEKAGRWFASVLVEVEQVESIAADGPLIGIDLGINALATCSDGTVYENPRALNQEQEKIKRLSKRMTRQVKTSNRRRKTKERLARAHTRAANIRADALHKMTTEIVRTKRPSVIVLEDLNVRGMVKNRRLARSVSDAAFGETRRLFEYKCRWSGSELVVADRFYPSTKRCSCCGVVREEMGLGERVFVCESCGFAAGRDLNASFNLRDYPKLITASSAGRAGAARGGDVRPVRTSPNRQTSLKREVDSKEVAA

SEQ ID NO: 803 - protein, 383 aa, unknown
  TnpB Polypeptide
MAINRLAGACRYVWNWSLARQNAEWQGHLFAGNPKPPSPTFFTLGKAFTELRNSKGQEWLTELPFKEVRHTLKHQADAWQAFLKGQRGKPRFKGRGAASGFTIPEKVRIRNGCIALPRIGEVRLRRRGGSPYPDGVPKQAVFKRECGKWYCTVFYAVDIAARVDDGTAVGIDRNVGQCATSDGKIIRLPDLSRLDARLRRYQRRMARQQKGSNRRRRTKAKLACTGRKIANVRATWSHKVSRNLADRHHTVVVEDLNTAGMTRSAKGTAANPGSNVRQKAGLNRSVLASAWQGLERNLAYKAGRVVRVKPAYTSQTCHSCGMTDATSRINQSTFRCQACGHEANADVNAALNILASGTGASGRGGGGAARPGKRQIAGLWLAA

SEQ ID NO: 804 - protein, 386 aa, Escherichia sp.
  misc_feature (60)..(116): Xaa can be any naturally occurring amino acid
VKRLQAFKFQLRPGGQQECEMRRFAGACRFVFNRALALQNENHEAGNKYIPYGKMASWLXXXXXXXXXXXXXXXXXXXXXXXXXXXXXXXXXXXXXXXXXXXXXXXXXXXXXXXXXGWMRYRNSRQVTGVVKNVTVSQSCGKWYISIQTESEVSTPVHPSASMVGLDAGVAKLATLSDGTVFEPVNSFQKNQKTLARLQRQLSRKVKFSNNWQKQKRKIQRLHSRIANIRRDYLHKVTTTVSKNHAMIVIEDLKVSNMSKSAAGTVSQPGRNVRAKSGLNRSILDQGWYEMRRQLEYKQLWRGGQVLAVSPAYTSQRCTCCGHTAKENRLSQSKFRCQVCGYTANADVNGARNILAAGHAVLACGGMVQSGRPLKQEPTEMIQATA

SEQ ID NO: 805 - protein, 573 aa, Streptomyces sp.
VFLAVAASIIAGSAAVDAPGPITIAQVPSVSTGSGQPAKRASSALWSEGAPSALPHSEARSLSSAWPTLARSPPDSTHEPHSPLPHSQPDVPSERASHERQNCLARALHRPGTRPPSPSLIEAAGQGRTSGKRPAPRHAPTETCPRDRPESLGIRKTAGQSLSAAGSRIATHSTCEVYPNGPQRSALARAFGCARVVYNDALRARETARVAGLPFVTSAELSKQVTVAKQTEERAWLAEVSAVVLQQSLRDLDTAYRNFFDGLKGKRPRMGAPRFKSRKDNQHGIRFTANARWKITPGGDLSLPKIGDVRVKWSRALPSVPSTVTVVKDAAGRYFASFVVESGTDEPLPAVTPEVGIDLGLTHFAILSDGTKIDSSRFLRRAEKKLKKAQRDLSRKAKGSANRAKARLKVARAHARTADARREFHHQLSTKIIRENRAVAVEDLAVRGLARTRLAKSVHDAGWSQFVTMLECKATRYGRTFTRIGRFEPTSQVCSQCGVKDGPKPLNVRTWTCGACGAVLDRDINAAANVAKAAGLAISACGARLRPGLVPAQRTETGTHRDGQPTVVGIPSP

SEQ ID NO: 806 - protein, 445 aa, Halomonas sp.
MKTKMIRTDKWPLQATPHQQQLMRNTREEYRAFCRALSVVVLNNWPTLQQAPSFAAAVERLIHPTQKNPSPRHHYFAQRFYKFPSYLRRAAIEFVKGQVSSYLTRYREWQSGQRKRRDANPPRFNPVAGCYPVMYRGQLVKFDANFTTASLKLWDGKEWLWHNVSIKAVRKRHLLGAVKSPTLVLNRHCHLAVPVEITPERLPDQRRVCAVDVGINTLATASIVSSNGTVAARRFFHPAADIDRRDKRAAIIRGKARKSGKLSKGFGRQWYRKVQRINDNMAQQVSRQLVDFALAAGADVIVLEDLKGWRPKAGKKRSGLRQRFHQWLHRRLATLVEQKMREAGGRVVYVYARGTSSWAFDGSGRVTRDKKQYERATFPNGKHYNADLNASYNIGARYWAWKHKLTRRKDGQVSGGKRSPGSPRTPVITLSTLWRSDEAPNQCAA

SEQ ID NO: 807 - protein, 374 aa, Halomonas sp.
MTKRAYKERFYPTSEQAELLAQSFGCARFVWNNTLAYRTEAYKQRGESVSHSAAEKRLVGLKAEFPWLKDVSSVILQQTLRDQKAAFDNFFNPKLKARYPRFKRKDGRQSIRLTKAAFRYRDGEITIAKTRTPLPIRWSRPLPSAPSTITLSCDRAGRYFISCLCEFTPQALPITPKTVGIDLGLTDLFITSDGVKSGNPRHLKRYEAKLAFLQRRLAKKQKGSKNRAKAKQKVARLHAKIADCRRDAAHKATRTLINENQVLCIESLNIAGMVKNRHLAKAISDAGWGEFVRQLDYKATWAGRQVVKVSQWFPSSKRCHGCGHKVEKLPLSQRHWHCQGCGEPIDRDINAANNIKTAGLAGFACGATGAGAAA

SEQ ID NO: 808 - protein, 468 aa, Halomonas sp.
MDRQSRRGKALALLVYAAGWIYSFRMPIIRSDILTLQVTSAEQQQALLNTLALYRRLVRDLMTVAYTHWPTVGASQGNEAVKIIEALIHSTAKRPHVRYTYFANRYYKFPSYLRRVAIMDAVGQVRSFVTRFDQWRCGRRKHPHAKPPRLTASTKTFPSLYGGQCAKLNADATYAFIKVRQRNDWLWMGFRLKGTCRFRGKGKAKSPLLTNNGRQWQLSLPEQFEPPKRSTTPPDRVLAVDVGINTAATWAVVDAQGTVHARGFISRTDKDREYRLMARIRQAAKKHTRHGSRLPPGFCRRDHQRLTRLADNQAHQISRQLVNMALNHGCQAIAVENLKGWRPKAGKKRTPMKARFHRWFHRQLVARIHSKAVEIGLRCVAVYARGTSRQAFDGSGPVKRDKGNYSQCTFSSGKRYHADLNAAYNIAARGHVFFQGRGRKATARMRSQMSTHTPRTPVSLSTLWQQRA

SEQ ID NO: 809 - protein, 549 aa, Vibrio sp.
MHSINAMFLGMKKIKHQVLTTQAKLTLNEQQTAALDAYAELFCRSKRRYTALMQRGELVGLKRSQIRNLVCGSDMAYRQFKGVESAVSGMIESRKSNSKNYITNIESKIENRTKRLKKNLNRLLSPRPTDDVNKLAFDFYQQQRGIDVLHGRLSKLKSGDMSFCFGGKTLLRERNELESPTEIAQWKKRWHDARHDEFVLVGSSDESWGNMNCQVIPQDDGSLTAHLTMPPKLEQIFGKHQKFTVPLRYYYDDVLGALAGRKTPLTYRFKRKDGAWYVYISFRLDAPDVITWRSNGALGVDVNADHLAVTLTTGDGNYHGSWTMPLALRGKTTAQRNDIIGNAVKKCTEIALENGVPVVIEDLDFTKKKRALDKTFPEQARMLSALAYGKIKQCFISRCARFGIELIKVNPAYTSQLGEYKYQDRYGLSRHHAAAMVIARRGLGFKESSPSKVFQFNNGSVRLHCAQDLMRIGKDKFGKTIIDAKNRAMKARDGYVLDTDNVVLVLAENTISVKRLSFMLNRHDQGCGRNQYLPLLTKLRIEQELCDQV

SEQ ID NO: 810 - protein, 418 aa, unknown
  TnpB Polypeptide
MLLSKKTSIKVSREYANLIGHMCYAASKLWNVCNYERQHYKETGIEQHPDWYYQKKAHKEDLWYKQLPSQTAQEVCKLLDKAWKSFYALKRSGGIETPRPPRFKQESIPITYMQMGIVHERDMDRVRLSLPKALKKYMEETYQIHENFLYLENKIFRGMDQIKQLRIYPPEKGNCKIIVVYEVPDQEELPQNGHELAIDLGLHNLMTCYDPGNGKTFILGRKYLALERYFHKEIARVQAQWYGQQSGKGVKHPVTSKHIRKLYKRKHDSVTDYLHKVTRYLAEYCREQGITCVVAGDIRNIRREKDLGHRTNQKFHSLPYNRIYIMLEYKLKRYGIRFIKQEESYTSQCSPLSPEVGKRYAEPSKRKERGLYRDGNRTYNADAVGAYNILRKYHSVSGVKRELSVTGLKTPEIIKVAV

SEQ ID NO: 811 - protein, 311 aa, Kouleothrix sp.
MLAETSRQFTAVFNAVCAYGWQQSEKNGIELHRALYYPVKADYPALVSDLHVQARVKATEAVKSALALRRAGRKVSQPRSLACPPRYNVHTYRVDWESQTVRMSLVGGRQTIRFRIPSFSAKYAGYPTDTADLVERDGHWWLHIVVTVPAPQVEPTDQVVGVDLGISRPAVTSSNRFLGKKAWKAIEGRLFHLKRALQKKGTRSAKRHLKLLRHRQRRFRRDCDHILSKQIVQAAPPGGTIVLENLKDIRRRMKAKRRTKTKRRMHSWSFAQLKGFIRYKAEERGCTVVAVDPRHVRREVAARIVLLSALL

SEQ ID NO: 812 - protein, 453 aa, unknown
  TnpB Polypeptide
MVEANRTVMIPLRIPEGSTADFHQTILPYAYCQQETVDHCWPDNPTQPADLQPSKQDAEEALYDRLRADTNEQLHSNLVQKAVTDATAAISSYKSSWENGDRISKPDFHDRERDGYTMTYDKRAATYDRYEATVSTVNGTVTCRYELPAEVEGTPYGEYILDRRWSFSTSKLIFDGERFWLHAVMHRQFGDDPVYAPQTDDSTSDTHEDTHRVLGVDLNVDGATAVSSTGQFYGNADALNSYRSEQEQLRGELQQPGTRSAHLRFQQRRGTEWRYYDQYAHHVANSIKQEVLRVRATHVAFENLTRIRKRISNLPTFQQWLFKNVRKYTEYKLERYGVTVDTTNPDYTSQACSRTDCDCVDEDNRDGKQFACLECGYTIQSDYNAAKNVGFRYLNTELSSPAGHTCSSGQATSQLALMSGTLSPTGDCAEHDWVSTDKPYPQQASDSSSARAQ

SEQ ID NO: 813 - protein, 402 aa, Mycobacterium sp.
MQMRYRYRIEPTPAQQQMLARVFGCCRVAFNDALRVRDEAYRAGVKFSDSEIQRRVIAAAKTTQARAWLAEVPSVALVQSVNDSRRAWRNFFDSVTGKRAGRKVGRPRFKSRKDQRQSFRLTRNGFSLKANGRLFVAKVGEVRVRWSRGLPPTPSSVTVIREPDGHFYASFVVEVPVSPLPVTDREAGVDVGIARLATVATTDGQRVDVPNPKHFGGKLRKLRRLEREKSRRQKGSANRGKIRRKVAIVHNQVARARRDYHHKQALALVRENQVLHVEDLNIAAMVKNRRLARAISDAGWGQFVKIIAEKADHYGRTVHAVSRWLASSKTCAACGYRLDELPLQIRVWQCPSCQVVHDRDHNAANVILAAGRAERLNACGARVRPQPVAAVGVEAGSTPTAA

SEQ ID NO: 814 - protein, 484 aa, Geobacillus sp.
  misc_feature (61)..(61): Xaa can be any naturally occurring amino acid
  misc_feature (242)..(242): Xaa can be any naturally occurring amino acid
MEQEDRRTKTTERMWTLKRKGGESMPTITLRLELHNPTKVKQGMYERMTEVNTAFANWLLXLELHNPTKVKQGMYERMTEVNTAFANWLLNHPELNQATSKIFKEFSSQRFPSAVVNQTIREVKAQKKKQKAKKFRTFWCCFNNQNVKVEKKGVFYTVSFPTLEKRIGVPVVTRSYQEAWLNRLLNGTVKQGAAKLYKKRKKWYLAVAITVEVQQREETKVMGVDLGLRYIAVASVGTKSLXAKLYKKRKKWYLAVAITVEVQQREETKVMGVDLGLRYIAVASVGTKSLFFKGNQCAFVRRRYAALRRRLGKAKKLHMIRKIGRKESRWMKDQNHKISRQIVAKKLHMIRKIGRKESRWMKDQNHKISRQIVRFAVANGVGVIRMEALTGIRKRATSAKEAGRSLHAWAFHQLQTMIAYKAEMAGIRVEWVNPTYTSQTCKCGHREKANRNGIRFRCQRCGYTLHADLNGAINIAKAISGFAS

SEQ ID NO: 815 - protein, 496 aa, unknown
  TnpB Polypeptide
MRAQTSSYVVSVKLKLPKSIEYRLEKSFRVASSAYNEALNFGLRRFEALKQNSRYQELLELRRNNNIQKEYDKELLKMRKIYSLTEFGLSAHLGQQRKKPDSSYKQLNSGELQVIAGQAYKALEKVIFYQIKKSSLRFRSKYDLNVSYRNRINITGTRIIQSNRKGYAYRLYMHKTTTFVDIPIKAFSKHQQMSLLKSEKIKYVQIIRKTIRGKYIYILQIVCQGFPLTKVKRGEGIMGIDPGISTVAYVSKNSLGLVDLIPKNVNKKEKLMSFLDKAIERSRRINNPNCYDSNGTVKKGSKFKRPSNRQVRLKIRRIQAYHSLSEERKKIQGQLVNHLVSQASLIKIEDLNVKGLQRRSKGIRINPKTNRPFSKKRFGKSVFRAAPSSFRQLLQTRANQLGVDIEIIKPKNLKPSQYNHLTQTFEKKALSIRLYDLSDKWTSVQRDLYSAFLIGHIENGYYQQEQLTQDFPDFYKEMNNFLRKQRKTNRLDWYLS

SEQ ID NO: 816 - protein, 417 aa, Halobacteriales sp.
MPTKTLEARLVNPTTNKHQKLHETQTAYRRALDEAFQQGCETQSATNDVVVQYDLSGYAKNALKKYVPQLTGDSYDADELTDQHPVKFTDDGFDIDHKPQSAYEWYLKVPHHEDYNLWFPAGVNPEQRPLVEALYAEDAEPGEFRLIERDDGWYLHITVHFEVTDTVYSESDDITPVGVDIGEAALATVCHRDDCGSPTAPRLWNDEAKKVRALRERYFTAMRRLQRRDADVLTDKYGDEIWRQIDDILHTVSREVVKYVAGVDGGIVVLENLTYIRENMDYGAYMNRRLHGWAFAKLHSQITYKAEERGIDVVTVNPRNTSKECHACKEVGSRRHQATFSCTNDDCWVSEYQADINGALNITDRYPAGESQPQSDRDPGQKVVADDSGGDGASLTGPQDSQADAEPQQETLGTYAS

SEQ ID NO: 817 - protein, 608 aa, Halobacteriales sp.
MTDHLSLSLRLPDTHHAAYRRLDELVQQIATHILHDHWTADELDGIHAANHQAWKYFDEHQPFDDLDDEAVYSALYEETPPADFELYLPSRIRRCILQKIGGTLRSHADRREAFQSIQYVLPTHKIRRIHRRRIKEELWDDGEYLSSGYIDILIDQLNAHYDRHGRYPDSYFDLQDPPEYDDGTLPYSADDGSTSGQAVEYSRDDTADTLSVKVKTPDTVTPQTRGDWSWHEHDLPTYDVFNDLHDIGSISAPEFQPGRRKNGDRIYELAFPVKVDGTDTSDEMERVLALDAGMRKEMTAVVVDETGKQVSRPHFVRFTDRGGMRRLHRERQRLNARLAELRRKGRAHTAEFKQVQAEYERVNTKLSNKREQLVHDVANQVVALALVYDVDAVVHEDLRSLSPPSGEGGLSWELSSWARREIIEKIEYRADYIGVAVERVFPKGTSRVCPRCGGAGHTCKSPDHHEEVWWGGHFRCDNVRCEFQGDRDYVAAVNVARVFFSDGAGLDHGFTSSYTEDAEIVLADRSAGERSDASQSTSELVSDAGTRLAFGRGVVAYEPEQARATAGSGSARVAPAVALSESNADGSDGCGPATRRYTRFQRVTAEHC

SEQ ID NO: 818 - protein, 430 aa, unknown
  TnpB Polypeptide
VKTVQAYRYALDLRPRDERGCRSHAGAARFAWNWGLARCAERYEAERKWYSAAALHKLWNAEKKTDPALAWWSENSKCAYQEAFRDLERALSDFVKSRNGKRKGRRLGFPRFKKRGKCRDSFRFGAGIMRCNGNAVTLPRLGTIRTHESTEKLASKIADGSARILSATVSRTAQRWFASFTVEVERDAPGRHARPGSAVGIDLGVKTLLTGVDDAGRVFEVAGTKPLRSSMRRLRKASRSHSRKVNGSANRRKSAARLARLHARVANVRADALHKATTALARQYETVVAEDLNVTGMVSSRRLARAVSDQGFGEARRLLAYKTGRAGGTLLVADRWYPSSKTCSACGWRKPSLTLAERTFACESCGHAEDRDVNAARNLLHLAVSGTERINACGAAVRPGDAGLAALNQEPGTAHAGKTGTASGKLAAVA

SEQ ID NO: 819 - protein, 488 aa, Streptomyces sp.
LIALTCCSEDRIVGEGFMGEPGKSVEKPGLEAVTGEEAERIKREALGIGDRRKHHQRAATPLKGHVKEPETRHRLYRFRFYPTAEQAEQLGKTFGACRWVYNEGLALRSGAWERHRVNVGFAESCRALTGWKRVEGTGWLGEVSSTVLQQSLRHLDQAFGRFLKGSGKHPQRKRKGRSRDSATYVRTGFRWAEDPERPGTGLITLAKQSGPLDVRWSRALPAGVVPVRLSVTRDRAGRYFVSTLVEERIAPLPAAFVPGSRAPRAVGLDLGLASLVTLDDGTKVDHPRLLRRYAEKLVRLQRELHKKVRGSANRDKVRQKIARLYALISDVRKDMLDQFTTRLVRENQVLVVEDLAIENLMRRARGKGRRRKAKLNEAILDAGWGELLRQLRYKCEWYGRTLVIVDRFFPSTRRCSGCHTKGPKLDVSVREWTCAECGVVHDRDVNAAVNLRDEGLRLYWLVAAGLPPSKGVPALIRASELEDCLLAA

SEQ ID NO: 820 - protein, 385 aa, unknown
  TnpB Polypeptide
MRTYKFKMYPTSQEREKLFVTLNNCRFTYNKLLEFMNKQEKVDRGEVQHHIVDLKIEHTFLKNTYSKTLQYEHYRLFSSMKGLSKSKKNGNKIGRLRFKSRNRYTSFTYNQSGYNIIETDKRYNKLHLSKIGDIRFKQSRDIEGKIKQIQIKLKPSGWYCYIVTDGDYECKNIKNNEIGVDLGIMSFMVTSNKEVFDNPLYMNKSLDKIKILSKQLSRTKKGSNNRRKVIHKLLRLWETIDNQKQDYFHKISTKLVKENKLLVFEDLNIKSMTKKTGKNKYRNMKNILDSSWATFVNMLQIKVSSTESEIIFVNPRNTSKMCSSCGNIKTDLQLWDRTYCCKECNLAIDRDYNASINIFRRGKELTFVENLSIGLMNQESMSFRA

SEQ ID NO: 821 - protein, 345 aa, unknown
  TnpB Polypeptide
MIMLLESWQTQSYFPYTVELELRDGEVYGSVSFEIPTPEVRYTKENGVVAIDTNASLIHLAIVEVSKTGELVSYQTISLHHFLELSQNSKDYQEWILAHQIVDLAIQKGKAIAVENLKKLKKGMRGDGKAKLRKRLHQWNVKKFLQKLKRVAMLKGVEVVEVNPAYTSVIGMLKYAPQLNIDKDIAGAYVIGRRALGFKEDMPENYERLLKDKAYLEFALKRYEEREKELRELLEEETNQYKRNALESELRGVEDARKLLANLLQSLQSESSSCKGTNGRNPEQGRVAKTTLQSAWQVLKVALLFPILGRVLPRDLSPLKPVLVEGVWDKVRSRLVPLEAGGRSR

SEQ ID NO: 822 - protein, 381 aa, Acidianus sp.
MARRVKAIRASVSMKIALSDSLLALVNNYVRALRFTLFWLKENVKNPEEKGVLSKVHEELYEKLREEYNLPSKVAEDCYRDALSIYKGWYNNPKKGRFPRVYKPAVWLTPKASYSMNFERMIVRIASVGELSILGYPRNLKEYLSWKMREARLVVKDGNAFLKVVFEKKGEKVKPKESVAVDINMAEVVVGKDDKHYVRIPTRLEEVHHWKSLAENLQRKYPRRWKENKRILHRIHSFHQKAKRIMEDFARKVGKWVVEIAKGFGSNIINLENLRNLLKNVNNLPKEFRDKLYLMQYRRIQYWIVWQAKKHGILVEFVNPSYSSVLCPRCGRRMEERGYRWFKCSCGYENDRDVIAVVNLNGRGSLSLSTAPQMRDVRANR

SEQ ID NO: 823 - protein, 394 aa, Ruminococcaceae sp.
MVEKAYRFRWYPNDDQKVLTNKTFGCKRHIYNRYLEKRSSAYKNDGYSLKLRECDKDMTKYKEETAWLKEVDSTALQAAIQDLDQAYQNFFSSQKKGDKKFGYPQPKSKHDNRQSYRSKNNGNTIRLEGECIRIPKLGLIRYAKSKEVQGRILNATISRVPNGKYYISLCCTDVEEEMIEKTGSVNRLAWTAHELRSCSSHVGIDLGLKDFATDSNGEKYENHKHYRENESKMKRAQRRLSRKPKGSSNRNKARIRLATIHETIKNRRMDDLHKLSHKTVKENDIICIEDLNVKGMKRNHKLSKSVSDVGWGEFARQLEYKCKWRGKTLVKIDRFYPSTQLCNECGFKNEALKGKEGLNIREWLCPNCGAMHDRDINAARNILKEGLRLYKESI

SEQ ID NO: 824 - protein, 389 aa, unknown
  TnpB Polypeptide
VEYRRTAVIKLDAPEGADSLLRETVEQFKHCANTASEWCWHGDDGYHVTSKAKAERALYDRLRNETDLTANPVQKGIRRVVEAVKSGVERLKRNENTSKPHFSADSAVYDERSATFHRDHVWLSTIDGRIECDYILPDDSETPPTKYVSDEDFEFRMAHLQYRDGDWYLHASMRKVEADEETPKSQSKHRTVLGVDLGVNNLAVASTGRFWSADEFNHWRREYEKRRASLQQCGSRHAHENIENVGQKEYGRFEIHLHTVANELIEEAVKNDCSHIVFEDLTHIRENIPEATWQHVWAFRRLYEYVEYKAKEHGVEAVQVDPRQQSVRRSVQVQAVRVREPRRLQRLEEHRFAVSPSQAKRRRQRRTRRCALESRDAERERGVRTPCRW

SEQ ID NO: 825 - protein, 380 aa, Conchiformibius sp.
MQIRKAFKFELMPNGAQIRKMKQFCGCSRFVFNRALAHQNEQHEADKLFKFSYTKMTALLPEWKKELIWLKDCHSQVLQQSLKDLESAFKNFFAKRADFPKFKKKGEKDRFRFPQGCKLEQGNARIWLPKIGWVRYRNSRQVMGAVKNVTVSQKCGKWFVSVQTEFEQEIPQPKGGEIGIDMGIAKFATLSNGQFFAPINVFKTLKGKLAKLQKQFKHKTKFSNNWQKLKFKVSKLHHKIANVRKNFLHQTTNTISQNHAIVYVEDLQVANMAKSAKGNAEQHGKNVKQKSGLNRVILDQSWYEFRRQLDYKLLWRGGYLLAVPPQNTSRCCPACNHTAKENRITQEKFECVQCGYSNNADVVGAINVLKRGQAILAAQQ

SEQ ID NO: 826 - protein, 324 aa, unknown
  TnpB Polypeptide
MQIISSYGVELRKQNIPIRQTLEIYRSAVSYLIGIYVQVWEELAEIPDAKRRFNAAEHLVHTTKKNHACFDFDIRFPKMPSYLRRSAIQHALGTVSSYKTRLDLWEKTDGKSGKPKLVYENHAMPVFYRDVMYREGAEGKDEAYLKLYDGHDWKWFCVRLEHTDMEYLRKCWSGKKASAPTLEKRHRKYFLRFSYKEEVTLTKTPVKEQIICSVDLGINTDAVCTIMRADGTVLGRRFIDHPSEKVCQISPGLFFPVQSIKLRVVTIAQPLLLREDIPNPMAALTSISDFLQCHRIHAFLRIQKPLQIKLRVRHIPSFFIFTQM

SEQ ID NO: 827 - protein, 383 aa, unknown
  TnpB Polypeptide
MRAYKTEINHTPEQKQIIHQTIGVCRFIYNFYLTRNKEVYSKEKRFVTAYDFFKWLNNEFIPNNPEDNWIKDVSSKAVKQSMVYGEKAFKKFFKGEANFPRFKKKKKNDVKAYFPKNNKTDWVIERHKVKIPTIGFVKLKEKGYIPTNTDVTSGTVSYEAGRYYVSVLVKEETIHNYIFYSEGIGIDLGVKEFVVVSDGNEKKNINKTKRNKKIEKKLKREQRRLSKKYENKKKGVATNSAKNIDKQIHKVQKLHQRLKNIRHNYVNETVSELVKNKPKSITIENLNVKGMIKNRHLSKAIAQQNFYYFRTKLENKCKQNGIELRIVSKWYPSSKMCACFGSIKKDLRLSDRVYICEECGFEIDRDLNAAINLENAKEYTIAC

SEQ ID NO: 828 - protein, 380 aa, unknown
  TnpB Polypeptide
MAIKTYKVKLYQAKKNKDLHRQIDVAGLIYNHCIALHRRYYQLTGKSLNQYALMKHLTKLKRLPKYRHWHQVGSQAIQDIVQRIDKAYKLFFGNRKRKVHTSPPGFKKVKKYSSFTLKQAGWQLLDGNKVYIQGKVYKYFKSRELPSAVKTVTVKRDMLGDLYLYFVVEEEISQAKQTMTGNSAGFDFGLKTFLTTSDGQALASPLYYRQALAALKVAQRALSSKVKGSHNWQKAKANVTRLYQAVVNRRRDWFFKLAHELTDQYDHLFFEDLNMKGMQARWGRKVGDLARSEFMGILGYIASTKNKVVHLVDRFYPSSKTCSACGQVNQALKLSERRWVCAGCGSSHDRDHNAAVNIQREGASSLRLGAVRPAVQASPV

SEQ ID NO: 829 - protein, 380 aa, unknown; identical to SEQ ID NO: 828
  TnpB Polypeptide

SEQ ID NO: 830 - protein, 449 aa, Ktedonobacter sp.
  misc_feature (340)..(440): Xaa can be any naturally occurring amino acid
MHKMFQYRLYPTKKHVTKLNNTLDECRWLYNHLLEKRKDAYEQRGESLTCYGQITTFSILKEEHPSLAIVHSQVLQNVAVRIDLAFKAFFRRCKAGEKPGFPRFRGKDRYDSFTFPQSGFSITHDDRVTLSKIGSVKMVYHRPLKGKIKTCTVQRSSTGKWYVCFSVECEPQRLPEIATQVGIDVGLKTFATLSNAEEIPNPRFFRKEEKALVRVQRTHSKLAKGTPESRKHRKVIARVHERIAFRRDNFTHQESRQIVDRFGVICVEDLQVNRMAHNHCLAKSIHDASWTGFFEKLSSKAEEAGRQFIKVNPTYTSQDCSRCHHRHKMPLRERVYHCPXXXXXXXXXXXXXXXXXXXXXXXXXXXXXXXXXXXXXXXXXXXXXXXXXXXXXXXXXXXXXXXXXXXXXXXXXXXXXXXXXXXXXXXXXXXXXXXXXXXXXFFQKQSPHK

SEQ ID NO: 831 - protein, 344 aa, unknown
  TnpB Polypeptide
LGLPPLKKEKNYNWLNDVNSQTLCQVLKNLETAYGKFFKKQTKFPKFKKKSRHQSFGVPQNVKIQKEIIKVPKFTEGIKINLHRPLEGKIKSATFSKTPTNKYFVSILCEVPKKYKSKTDKKVGLDLGIKDFIILSDGTKIKNPNFNRKSKNKLSKAQKHLSRKTKGSNRYIKQRIKVAKIHEKITNSRKDFQHKLSSKLIKEYDLISLEDLHVAGMIKNRKLSYSISDSGWSSFILMLEYKAKWYDKEVIKIDRFYPSSKTCSGCDYIIDKLPLNIRIWKCPKCSQEHDRDINAAKNILRQGINVSSQELSCTGMERKALATVKSSETGLCEVSKKEKNNFNS

SEQ ID NO: 832 - protein, 217 aa, Salmonella sp.
LPKLGWIRYRNSREVVGEVKNVTVNPSCGKWYVSIQTEYEVPDPAHNAASIVGLDAGVTKLATLSDGTVYQPVNSFKANQRKLAALQRRLSRKVKFSANCQKQKRKIQYLYSHIANIRRDYLHKVTSEISKNHAMIVIEDLKVGNMSKSAKGTAEQHGRNVRAKSGLNRSILDQGWYEMWCQLEYKQLRHDGQVIVVPPAYTSQRCAYRERKPSDAK

SEQ ID NO: 833 - protein, 523 aa, Thermodesulfobacterium sp.
MLTLQAKLKFNSVEDKEKVLDLMRRWSACMRFAYNRLLEGADRNTLKRELQGIFNLNSRYVDSAIRKAQELLSTKARGKSPRKIIFGSRSLFRKLQKKHINGKVYEKLRMEWVEKRKGNLWSIGEEAKKGNLNARIVEKDGVVCLRINLGNRDYVYVPVSAGYKKGQDRAEILRELSEAGILYSVELKLKNENIYVFFSFEENLPELLITKDYGVIGVDLNVYPHNIAWAEVDEKGNLISYGNISMPELSAGSRSKKEYYRWYYAHQIVSTAKEKGKAIVVERLSIANKGKRGDFSGRKSRRIRHEFSYRSMLDKIKILARRNGIQVIEVNPAFTSIIGSLKYAPQYMITKDEVAAFVIARRALGKRERIPKNYLEFLKSLKKEDLEVLKEFIKKRVRNKALKNKHLNEISRILKIYQSPENEPGRLSLPLDGTSKGNRFNLWRVLRVAVVTPLSPEKSFRDFSTLKSLLLQGKWGDPLRTQVPVSWDRGYGRLKYRQLGQSLSERRTTNTPAPELCSFVQFR

SEQ ID NO: 834 - protein, 386 aa, unknown
  TnpB Polypeptide
MTVRHVAQRIPFHPNNTQKALLERCFGDRRFAYNQQVEAFNMYDKETNPNPEYPNVTGMKNANGWLRDSPIPSNALSNAIMDFRKARSAYFSKAQYGKHRPRFASRNDNIQSFRNTMPIRRMDGNRYPLSRKLGSVRIRKRNRLRYPIENLSSWTVKRENRTYYLVLLFNVDIQPMPKAEGRVGIDLGVKDLLTLSTGEKIDYGDRLKKLEENVKREQRKLSRRTRGSSNYRRQRAIVAKAYARLRHYRDDFQHQLSHRLIEENQFIGLETLAVRNMVRKAKKNAEGIRSGQSRKRAMNRSILRDGWSGLVDKLSYKAEWYGRTLVQVDRFYPSSKLCHDCGHKYKGLRLSEREWVCERCGIPHDRDVNAALNIRDEALLLSREEA

SEQ ID NO: 835 - protein, 543 aa, unknown
  TnpB Polypeptide
MGFAVLLAFRAMSLLCAVDPWPDAAHIPCVQTSKPSVESSKTRAVPSHLHGTWNGYAAYKCRCAECAEAGRQYGIARRAGKATPPELLTPKKEASHGTAARFRAGCDCERCMQAGMKRRVPLGVPSTFRRYRYRIEPSPSVVSGLNRLFGAARWSHNEYIARARADYAAGKGHLPGYEGQKLIVTDGRANPDTAWLQEFPSCVLRASVMNAASAYQSFFASISGRRKGRRIGRPRFKKKSARESAEFPRAGFSIRGGWENTRAHGGGQLKLSKIGLVTVNWHRPLPSVPSTVTITREADGTWWATFVVEVPKRVTTPVKNRAAAIDLGLESFAAIVYTDGTREKVENPRFLRQSEQKLARAQRNLSRKAKGSKNREKARLQVARAYADVRNQRLNHARQLAARLIRENQTIVVESLNIAGMAKSRLGKSINDAGWALFLQALMSGAEHKGRDIIVAPTGFPSSRTCALCGVNSGKKALSIREWTCECGARLDRDWNAATNLLKLAARSAESLNACGRDVRRQLASAAGATAEEAGTRRSGSAS

SEQ ID NO: 836 - protein, 397 aa, unknown
  TnpB Polypeptide
LNLVEKHIIKGTIELDEITFKCKNLYNKVLYIIRQDYINEKIIPNKYSLFNDCKTLPEYKELPARVSRGVIRILVTNWKSYFQATKEWYKYPQKFNKKPKLPKYLDKKGKFTSIFTDSAILKKNINKGLIGLSSLKIQIPLQHKDNKIVEVQLVPYINNKYKVNIVYKHENIKTKENNKRYASIDIGLNNLMTITSNTGSNPLIVNGKPLKSLNQFYNKRKSFYTSELELKQKTKRSKRLEKLSYKRTNKMNDYLHKSSRFLINYCIEQDINTIIMGYNVSWKQSIKLGKRNNQNFVSVPFYKLISFIKYKCKLYGINLILNEESYTSICSFLDLEKIKKHVNYKGKRIKRGLFESSDGRKINADVNASYNIMRKVVPNVFTDGIEGISVHPIKINF

SEQ ID NO: 837 - protein, 371 aa, unknown
  TnpB Polypeptide
VRLTAQLKLDPTATQASALARTLAACNAACNAISAVAWDSKTFRQFDLHKLCYRRVREQFGLSAQAAVRCISKVANAYKLDQKAKRTFRATGSAAFDQRILSYNLAASTVSIWSLDGRLSIPFVCGDRQRVLLATRQGETDLGLVRGKWFLMATCQVPEPDVAVAGGFLGVDLGVAEIASTCDGHRYSGREVKGMRHRQRRLRARLQKKQTRAAKRRLRKLAGKEFRFAKHVNHVISKQIVATAKRTGRGIALEELKGIRERTRARRKQRAVLHSWAFAQLGAFLVYKAKLAGVPLVAVDPMNSSRECAQCGHTDKKNRPNQSTFRCLACGHAEHADINAARVIAGRAAGKPAVLSELCEVSHGSVKSRRL

SEQ ID NO: 838 - protein, 404 aa, unknown
  TnpB Polypeptide
MLIYKAFRYRIYPTAEQEARLHRWGDALRFLWNLCNEQRRMGYARLKGERIFPSAFDQSKEVTQLRSECSWLADLPRNTCTQLLSDIEQSWDRCFKKIVHPPRWKRKSEGFVSITEPQSIQFLVSGSTLKFPKLGSIRAVIHRRLSGKPKTCTLRRDGDQWFASIKCEIEIEDPLPRTPVVALDRGITNLVADSDGKITLNPKHLERALQRLARAQRTVSRRKKGSRNREKAKLRVMRLHRKVRRQREAVLHKVSSDYAKNHGVVVIEDLNVSGMMQNPHLSRHIAGAGWSKLAGMLKYKLAWSGGTLVEVPAHYSSQTCAGCGTVDASSRHGERFCCVSCGYLVHADVNAAKVLLQRYETARASRPCLPVDGSLPEGPGRSGKQDYRSQYSSQLLQKRRSGDL

SEQ ID NO: 839 - protein, 392 aa, Microcoleus sp.
MANLALTLKLPFYRLNQVKALEFERLTAINTSVANDLLRVDKSERKKLTSADFRHVEIGSMWINQTIRNCNAKSKVKHFKTMWLEVNNQGYEVLKSRDLYTMSFSLYRGRKGRIPLQIHSASHSEVLDKLIAGEAKLGSLKLCKSKRGIWYALICVSMEVPDAAGVKSWIGVDRGQNNIAVAALPKSFGKFWKGGRVKQLRRQFQRTRKQLQQAKQLKEVKRLEQRERRIMTRINHAISKELVQLAKDFGMGLRFEDLSGCRQSMKQRRSTKCDAANNRDSWAFYQLELFTRYKAIRAGVPIESVPAPYTSKSDHRNGVIGKRNGDWFRGFDGYRCNADWNASQNIGQWIGFSCPLNLQEAVAAMAMADTEDGVYDSPLTSDASNRTDLSSD

SEQ ID NO: 840 - protein, 347 aa, unknown
  TnpB Polypeptide
VDYRALPAKVSQQTQRAVDQAIKSYLKLKKNPDRYKQARLPHYLHKTKGRFPVFYQKGALSFVKQGVIKLSKTSIEVPCKLDKSVVQQVRLVPCTGYYKIEIVYKKKINVRNRLRKPERFASIDLGINNLATVTSNVFSPVIINGRPLKSINQYSNKEIAKAQALLPKDVYTSKRIAFLYGKRYLKIQDYLHKAGKQLVNYLVSQTIDLLIIGKNQGWKQNTNLSKVTNQKFVQIPHNRFTQILEYLCKEQGIDVVYQEESYTSKASFLDNDEIPVYGELEETPLFSGKRIYRGLYQTSDGRLINADVNGSYNIMKKYLETNAAWDDQKWSDCVEVCSTPRVIVVSY

SEQ ID NO: 841 - protein, 518 aa, unknown
  TnpB Polypeptide
LELPLRVDAGPANRLRAHFEAARSLLNALLDEAMKRLRAMRADPAWQEARAFPTEHKQERREAFAHLRQAYGFTEYALHEFAKTANCSWIADHIDSIMAQTLATRAYQAANRVCLGKAKGVRFKSKGRGLDSVENKWNKSGMRFLLQPPEKGNQGWLLWNKDLLPALIDWHDPVVHHGLQHPIKYARLVRRKASSPKAQGADSAGYRYYCQLILEGRSYQKKKHTVGTDIVGLDLGPSTIAIVSQEGEAQLLPFCQELQPDARAKRRLQRKLDRQRRANNPENYDDKGRIKKGGKGKRRLTWKNSKGYLATRRRLAAKERKLAAHRKSLHGRLVHQIIRCGNTIRTEKLSYKAWQKQYGKSVGRNAPGMFLEQFRRTVASTGGTLSEFPTRSTRLSQYCHSCQTYTKKPLSKRWHHCPCGIGPVQRDLYSAWLAAHLDYPNSIPSIAHEEWEGADLRLRAAVEVLAQRAKEGQALPRSVGIPRAGARLPKSPAPNRLELVYRRGRLEALGEATEPPVF

SEQ ID NO: 842 - protein, 302 aa, Firmicutes sp.
MHTISIFVDKNRMPKPASYFECQTHLAKNLRNAANFIIRNLRTGLKKAPDTRTANENEVLETVRIGIEMANEKLLKDVNRLTKQLKNLPANDPARTKIQKRIENKQKNHPSMPTSDHWMLTYETLDAVMKNTKNPDYYAMPSQVNQQVLRKVLKDWKSYFEALTAYRQNPERFKSQPKQPGYIKTPYTTVTFTNQVAKRSDIRGKMYITFPRCLVPVCVGKSEGSYVRTEVKPCYGGYMIYVIFQDAVKTPEAPKNPTRILGLDPGLDNFLTALTNFPSAPFILDGHWLKSINQNFNRKRAV

SEQ ID NO: 843 - protein, 281 aa, unknown
  TnpB Polypeptide
MEETYQIHENFLYLENKIFRGMDQIKQLRIYPPEKGNCKIIVVYEVPDQEELPQNGHELSIDLGLHNLMTCYDSENGKTFILGRKYLELERYFHKEIARVQAQWYGQQSGKGVKHPVTSKHIRKLYKRKQDSVTDYLHKITRYLAEYCREQGITCVVTGDIRNIRREKDLGHRTNQKLHSLPYNRIYIMLEYKLKRYGIRFVKQEESYTSQCSPLSPEVGKRYAEPSNRKERGSYRDGNRVYNADAVGAYNILRKYHSVSGVKKELSVTGLKTPEIIKVAV

SEQ ID NO: 844 - protein, 392 aa, unknown
  TnpB Polypeptide
MILTERHIIKKSNSLYGELDNQCFLSKNIYNSALYAVRQYYFENKKYLNWVNVNNNFVKDKQVDYYAMPCKVSQQTLKMVDNNMKSFFNAIKAKNSKPRLPKYLDKTKGRYVAIYTNQAISKKELEKGFIVLSKTNVRIKTKVTNIKQVRVVPRNNHIVVEVLYEAKFDNKVNTETKYCGIDFGLNNLMTCAFQDERPLIFNGRPLKSINWRYNKRKAHLQGKLPKGKRTSKMIGNITSRRNNRVSDYLHKVTSMFINYAVSKGISNVVVGYNKEWKQGISIGKVNNQNFVGIPYYKLLNMLSYKCEMHGISLSVTEESYTSKCSFLDNEELCKHDTYLGRRVHRGLFRTSSGRTINADVNGALNILKKVIGNYDYDPIKVCSTPLVIEPKN

SEQ ID NO: 845 - protein, 358 aa, Anabaena sp.
MLLAIKTKLKLSKSQKVIMSKHAGIARFTYNWGIATWNSFVKDGLKPNKYLLKKFFNNYVKPEFTWIKQKGICQKITQYAFDNLGAAFDRFFAGKSGYPKFKKKGKDDSFTIDASGKPIPVGGKSIKLPTIGWVKTYEGLPHTACKAITISRIADSWYVSVAYEQETEITEKQHDVVGVDLGVKELATLSTGVVFPNPKHYKYHLRKLQNLSRKLARKVKGSSNSNQAKIKLAKHHAKIANLRKNTLHQITTYLCKNHAKVVIEYLNVSGMLSNHKLAQVIADCGFYEFKRQLEYKAKKFGCEIIIIDTWYPSSKTCSNCGHIQDMPLQQRTYNCENCGFSIDRDLNAAINISRLAKP

SEQ ID NO: 846 - protein, 365 aa, unknown
  TnpB Polypeptide
MANKAYKFRIYPNAGQKILFARTFGCVRFIYNKMLSDKIKYYEETKQKLNNTPAQYKAEFGWLKEVDSLALANAQMNLQKAYNNFFKSPKAGFPKFKSKHKNRNSYTTNNQKGSVSIENGCIKLPKIGFVKLKQHRQIPSGYKLKSVTISQNPSGKYYASILFEYENQVQEQDLHNFLGLDFSMHELYKDSNGNEPAYPGYYRNAEKKLKREQRKLSLMQKGSKNRNKQRIRVAKMHEKAANQRKNFLHKQSRQIANAFDCVCIENLDMKAMAQCLNFGKSVADNGWGTFVTFLQYKLEESGKKLVKVDKFFASSQTCSVCGYKNTATKNFSIRAWDCPKCGTHHDRDINAAINIKNEGMRIVNV

SEQ ID NO: 847 - protein, 252 aa, unknown
  TnpB Polypeptide
MIDSGRFHVYSATLNERAGRWFVSLTGVAAQLHQAERGRSNRHQIPVGVDRGITSLCVAADANGTPFEIFEGVKTLREAHAQLKAANQALARTTPGSKGRQRARARLAKTHRKVANTRRHLVHQVSKTLVQNAQVLVLEDLNVAGMVRNRHLARSISDAVGELARQVLYKAKWQDVEVRVADRFFPSSKTCSGCGDIKRDLSLAERNYACTNCGPVIDRDLNAAINLAHWQPEEAKVRVLPVPTGERLLRAA

SEQ ID NO: 848 - protein, 252 aa, unknown; identical to SEQ ID NO: 847
  TnpB Polypeptide

SEQ ID NO: 849 - protein, 344 aa, unknown
  TnpB Polypeptide
MDLPFEKRRDTYEQTGKGLTCYEQQATYPMLKQERPSLDIVHSQVLQNVAVRIDLAMKAFFRRCKAGENPGYPRFKGRNRYNSLTFPQVPSGCSLKDGKLFVSKVGHVKIVLHRSLKGTPKTCTISKSSTGKWYACFSCEGEPERLPENTESIGIDVGLKTFATLSDGQEIENPRFFRVEEKALAKVQRKHSKLAKGTPERRKHRKAVARVYERIAWRRQNFTHQQSRKVINAFGVICVEDLNVNRMIHNHCLAKSIADASWSAFFSQVSSKAEEAGRRLVKVNPAYTSQTCSQCGHRHKMPLSERIFACPCCHVHLDRDLNAARNIRGLGLQALGLSVEAPRL

SEQ ID NO: 850 - protein, 276 aa, Lactobacillus sp.
LAVCYSARTLQLAVQDLGKAWQNFFNKAQPDWGKPKFRSKKNPRQGFKTDRAKIEDGLLWLEMPRDTPYKDRWAGIELSNKPLSGKIGVVSIFKVNHKYYASIPYKLEKPLPKAKTGKGTGVDINVGHFNYQDGQCLVLPKSLKRLYAKIKFYQKRLAKKRTVNGRIKGTQSNKYLKTKTKLQSCYERVSNIQHDLMHKFTTKLVNDYDQIVIENLDVKGMLMSHVASKGMHRSMFGLFRQLLAYKCDWYDKELILANKLYPSTQRCAVCGMVKKR

SEQ ID NO: 851 - protein, 541 aa, Thermofilum sp.
MSAGPGHLGCTASSALVFRGEWGRMGAAAHTGPPVKRGDGMGEKSNGKGNGKESIDTYRVWRVKTNGEVRQSLQRLYVRLSGAVKEACKSLKEKHGDAFRKEPERFSKELIEEASRLAGLPKGFFWYAVEMWKTVAEARRKSKRRNRFTPPPVPLLVRVVNNGGRLHGASSAVAVLDTSRGELRVPSADITIRLKPSLVRAVLEDVQRFEDVKLTLQLTAKGRLRLVARRAVKQAWWNGNDRLAVITLDVNSNHGLYLLAFTFDGEARLLVQRVLKPPNTTLLRLLAAVMRSYSKVKIWEQAAKRFRERRDVEELQREGRGPAVEEALRLAERLRAKVNMTPERAERITRQASRKVKKLNDDWIRGVLKEMRELIRKLRDQGYTVVVIADVPQAESLNGSQLQRTLLRIARRLENLVLYEGARWFEPENNVSGRQCPRCGTWGVEVRRRYYRCPKCGLEWTRDWAACYNAAKLFLKACRAEKHLEALQSWLSQHPRAPTHGTRERPAGPGPSSRHGPTAARRVPRAARGGYVPAATRAEGR

SEQ ID NO: 852 - protein, 309 aa, Okeania sp.
LKARYKYRIYPNQIQITKLNQLFGCCRYVWNQSLAHCNHLYANRGKKPSYTDLTKQFITSAKKELLWLKDVASTPLQQSLKDLDQAYRNFFDSCSGKRKGIKVKPPKFKSRNSRQAARFVGANYKISQDKIYLPKVGKIKIVWSRELPTKPSSVSIIKDSAGRYFASFVVENSPESLPKTENSIGIDLGISTFATLSNGEKILAPKPLQKNLKKLAKFQRKLARTEVGSKRRHRCRLRVAKLHAKVKDIRTDFLHKLSTDLIRKYDTIVLEDLKVSGMIKNRKLAKAINDLGWRKFRTLTEAKCEKYGK

SEQ ID NO: 853 - protein, 445 aa, Streptomyces sp.
VRRSRTVRASPSGTSRVPTSRWTWLIWSTISLIGVLLRGYPGFSRGRKRSSCGAGQGKRIAVRVIRLHRKSVYNKALEERTRAWYGEQRRISYVQSSAALTEWKKTAELAFLSEVSSVPLQQALRHLQTAFGNFFAKRAKYPRYKSRKNSRASAEYTRSAFTWRDGRLTLAKMAESLDIRWSRPLPEGAEPTTVTVSRDSAGRWFVAMLVEDTITPASATSAAVGLDAGITSLVTLSTGEKIANPRHERRDRARLAKAQRELSRKAKGSANREKARRKVARVHARITDRRRDFLHKLSTRLVRENQTVVIEDLTVRNLLKNGKLARAISDAAWTDLRMMLEYKCAWYGRELVVIDRWFPSSKLCGACGTVREKLPLNVREWTCDCGTVHDRDVNAARNILAAGLAASACGDGVRPQRESSRTGQSSVKQETQRATAAIPRLQAEE

SEQ ID NO: 854 - protein, 370 aa, unknown
  TnpB Polypeptide
MRLTIQLKLQPTPEQADALTRTLERANEACNYISRVAWETKTFRQFAVHKLVYQPVRETFELAAQLTVRCIAKVADAYKLDKKVMRSFSSHGAIAYDDRILSFAMPKAEVSIWTLDGRQAIPFLCGDRQRQLLASQRGETDLALVNGEWYLFAVCEVETPDPLDVEGVLGVDLGVTNIAVDSDGEIHAGTGMKNVRYRHRSLRTKLQRKRTHGSRRRLRKLAGQERRYAAWVNHNLSKRIVAKAERTKRAIALEDLTHMRTRVRARRSQRATLHSWAFFQLRAFIVYKAALSGVPVHFVDPRNTSRTCPACGCIDKANRKTQASFVCTSCGFAGPADVIAAGNIAGRVAVSPPYYPVADSSVVQGKAQEL

SEQ ID NO: 855 - protein, 373 aa, unknown
  TnpB Polypeptide
MPLKKKTDTSDAKEERRTMHTLRIRIRDKHAKFLRALAFDANQVWNFCNALSIKVFERERRFMSGYDLQKYTDGASKEGINLHSQTIQAIASEYATRRKQFKKVRLAWRKSSGARRSLGWIPFKKSGITHAHGQIRYGKVWLSLWDSYGLKDYDLGAGTISEDARGRWYINICATPKQKPMQQQSLFNNSIAIDLGLKAFATTSDGAVIEAKQFYRGMEEKLAVAQRANKKHRVKAIHAKIVNRRKDFHHKLSTTLMRSYGVIFVGNVNASALAKTPQAKSVLDAGWRAFRTMLQYKCDRAGVWFDEVNEAYSTQTCSCCKKRTGPKGLEGLGIREWTCSDCGAAHHRDMNAAKNILAAGHGRLAGGIPVLTA

SEQ ID NO: 856 - protein, 260 aa, unknown
  TnpB Polypeptide
VKLHRSLPTNRLVRIATVTIKHYATGQWTVSLLLKSDEPFHQALPNTNQAVGIDLNTENFLTTSDQKQVANPHYYRALKKHLAKHQRILSRRARRAKKEHRPLWASKNYQQEKLVVAKIHQRIRNRRLNFLHETSTALIKSHDLVVAENLKSKNMLKNHALAMSISDVGWRTFLGMLGYKAPLYGRTFVEVNPAYTTQTCYDCGFVMGSKGTKRLTLHDREWTCPNCHVHHIRDHNAALNILAKGQRLLTRPDQNLEAIY

SEQ ID NO: 857 - protein, 352 aa, unknown
  TnpB Polypeptide
MFVKTFGCCRKVYNLILTDKIACYEETKAFGKQTPAMYKKEYPFLKEVDSLALANVQLNLQSAMKNCFDKTRKKQNGFPKFKSAKHSRKSYTTNNQNGTVAIVENRSIKFPKIGKVKAKIHRMPEESWKLKSVTISQDSDGKFYASVLFEYEATITLVALSDNAIGFDYKSNGLYIDSNGYCPDKKKYYRQNQDKLAHAQRKQKHRTIGSNNYKKQQLRIANIQRHTSNQRFDYLHKESTKIANLYDVVCVESLDMKAISNKGFGNGKATLDNGYGMFLNMLEYKLADRGKYFVKIDKWYPSSQLCSCCGKQKKLTLTDRIYKCDDCGFAINRDLNAAINIKNEGLRIRKST

SEQ ID NO: 858 - protein, 206 aa, unknown
  TnpB Polypeptide
LSANRKKKNEVLARTGNSVGFDFGLKTFLQSSDGLSIEAPLFFKQNRKAIEKANRELSRKKKGSANRDRARMALARLHKKTANQRADFHFKLARNLSGEYATICIEDLNMKAMQKLWGRKISDLGFSAFVNVLEYQCSKTGSTVVKIPRFYPSSKTCSACGHVLDELPLKIRNWVCPECSAVHDRDTNAAVNILRVGASTLLGEAM

SEQ ID NO: 859 - protein, 505 aa, unknown
  TnpB Polypeptide
MNKTDTFIHGLPLKTTPSDGAILDVRLDAARNLYNACLRESLRRLDLMRESKLYKSARELPKGKARNEAFNACRNNHDFLEYSLHSFATKTCKTCWIGDHLDAFTIQKVATRAFGAVEQYAYGVRGRPRFKRKGWFSSVEGKSNASGIRWRDGRVLWNGLNLEPLFDLKDKYGVEAHSLSCRVKYLRLVKRIIKEEDSWFVQLVLDGLPIQKEKNTISMNTCGLDIGPSTVAAVGENDAFLSQFCDEVVQPWKEIRCEQRAQDRSRRVTNPDNYNDNGTVKKDSRKWHRSNRYKKRQKRIAECQRTLAATRKKQHGEMCNRILSIGNIIKTEKLSYKSFQKNHGRSVTVRAPGMLVTQLIRKAANAGGRVEDINTRKTKLSQTCICGTVVKKPLKQRHHGCSCGVKSQRDLFSAYLAKHCTDNTLDIHQAKSAWSAAEPLLRRAMSRITETANCGRLPASFGISRRQSCSPVENGSIFIEVADVVACRGESREEMHGLAVRTPWL

SEQ ID NO: 860 - protein, 261 aa, unknown
  TnpB Polypeptide
MAESLLVPVNRNICRLTLKYGQYHLAVPYDEKLPPQRENQARVVALDPGVRSFLSWYCADSVGKIGEGAFFRIQRLCERLDDLLSRSAKSPARKRWNMRRAAGRMRIRIENLIAELHRQAAWFLVGKFDVILLPTFETSEMVERGRRRIRSKTVRNLLSLAHYRFGMFLRHKAAEFGVTVLSVNEAYTTKTVSWTGEVLADVGGASVIVGRDGERMDRDYNGARGIYLRALGDTPALRAWLSACAASVDNSRLSGNVRAVA

SEQ ID NO: 861 - protein, 457 aa, unknown
  TnpB Polypeptide
MLSSGQLLGDEGREPISPAIPEEGIQEVKHAGRRTNVVRLLPSGSQGRKLRRLASISARLFNEVNYERRQQFFRGEGVDLEGTYRKYYEKYRSVLGVNAQQVLNKNNEAWSSFFSLLKLRKEGKLPPHMKRVGPPRYWKDRGSKERKLILVVRQDRYLVDEQNRRLFLRDFDMEIEFAGRLRWHGKQGRLEVRYDEARGAWYASMPVEVGVETTRNGNRSKHVVRGERKSIRMAGPRGDVAAAVDLGINILASAVTSSGTWLLYRGSRAKEDFFYLTKKIAEVQSEADEARKGGDEAKFQRLNRRRRRLFRKLVGRVAHLYWNLANHLVRGLWELGVSKIYLGYPHDIAQERGNKLTVNLWTYRKLMDAIELKAQEYGMRVYEVLEYNTSNHCAIHGTKVARGPRGVVTCPLGHRLHSDLNGALNILKRGVGAIPTTLKRPLSFLVDHSGVAPVKGA

SEQ ID NO: 862 - protein, 386 aa, unknown
  TnpB Polypeptide
MYKYRLYPSHSQRVRLFDTLNTCKEIYNHLLEISIRTYNSEGKTLRKFDYNRHLTGKYSNVHSQVKQNVSDRVHKAFQSFFRRVKDRSCKEKGYPRFKSGIHSITYPQFGFRFISHRRLHISKIGNIPIVLHRIPPGNVKTLTIKRNMAGQWFAIFACEVSIPRVKHPSSVEKVGIDVGLEQFAILSNGEMIDNPKLLVKSERRLKRLQQNLSRKKKCSVNRRKARYKVAKQHIRIANRRLDFLHKISHRITRSYSFIAVENLNINSMVHSHHLAKHILDASWDRFIQMLSYKAVTCGGQLVKVKPNRTSKTCSSCKAIVEMPLNKRMFNCPNCGLVLHRDHNAAINILQVGLDEPEFTPADRSTSAPPMGKVSGLVETGTIRGNI

SEQ ID NO: 863 - protein, 501 aa, unknown
  TnpB Polypeptide
VQTISIPYSCDRAAARFIAEARRVYSAAVRTAYANGMDAEGRLAPEKDLRNLVKSRFAGGVVDAWILHCATLEGREARKRVPEGAMVFGGRKHLERRNDKLIDNAGWRRIRLLPMASRGDNTKYGNRHFKLSPDGRACTLRMLSGRLPATTAEGKPKLNKKGNPVRTPVWQTHVLHLAHMAGNAGEILRQAAALAAEKRINLMFRIDETHLHVTVDPMDLPDHPERRRPVQALPGRMVGVDLNPGSIGVSAVFNTANPGEIGETRLLEYFLAEPDLPKDASTEQVRETLAAVAGRIVGLARKHRCGTVVLEKGLGKLRSGGKNRSLNRLINYWARTVFLHLLTRKARLAGIRVMEVWGGYSTTIGNLAFEAPDACASAAEIGRRGIALASGSKDVLPAMLPAVRVRQWKDVPVPVTGSPRQAASWGELHRTIKAAKIGYRRPHPALPGPDDRGGASLLGHAVRRLGCRNRPGRIYALLHGPGTTATEPGSRWGNGPTRKSG

SEQ ID NO: 864 - protein, 374 aa, Paenibacillus sp.
MIATVTAKLKIKPSESQMRALQQTMIAYRQGCDFVSALVFEKRELGQPALHRMTYQPLRSTLGLRSQMAQSVMKTVIAKYKALRSNGHVWTLVRFKKPEYDLVWNRDYSLNLGAGLFSVNTLQGRIKVPFEAKGMEAYFDGSWTFGTAKLVYKKRKWFLHIPVSKEIAVPEPAEIAHVVGVDLGVNFVATAYDTDGKTVFFRGREHKQKRANYKRLRSELQRKQTPSSRRRLKQIGERENRWMTDVNHQVSRALVTRYGANTLFVLEDLTGIRGATEKVRRKHRYVTVSWAFRQLREMVTYKSQLAKAMTIAVDPKHTSQACPICSHTAKENRDKRRHRFHCLACGYASNDDRIGAMNLCLKGKEYLLQGAGLA

SEQ ID NO: 865 - protein, 370 aa, Richelia sp.
LFPLLVALNSLLLNNILRIKKMSSYGCQQHLLNPDVELAAILEFLCGESAKLANCGTYYARQLYFKTGRIPSKFDLHKLFKSNLHFQAMYSHVAQQCLTTVAESFKSYIGLLKAIKKGTVEQRPKLPGYRKNGLALITYPKADVKLKDRLLRFSLGSKVKAWFGLDAFYLPMPSNLKFADIKEFRIVPRNQCFYIEYVYKQPEVTVNLDQSKVLGIDHGVNNWLTCVTNVGTSFIIDGKHLKSMNQWFNKQVSTIKEGKPQGFWNEKLAHITEKRNRQVRDAVNKAVRLVIKHCLDNKIGTIIFGWNKGQKDGADMGKKNNQKFVQIPTARLKDRIAQLCKHYGIQFVETEESYTSKASFLDNDVLPKIW

SEQ ID NO: 866 - protein, 374 aa, Escherichia sp.
RFVFNRALARQNENHEAGNKYIPYGKMASWLVEWKNATETQWLKDSPSQPLQQSLKDLERAYKNFFRKRAAFPRFKKRGQNDAFRYPQGVKLDQENSRIFLPKLGWMRYRNSRQVTGVVKNVTVSQSCGKWYISIQTESEVSTPAHPSASMVGLDAGVAKLATLSDGTVFEPVNSFQKNQKTLARLQRQLSRKVKFSNNWQKQKRKIQRLHSCIANIRRDYLHKVTTTVSKNHAMIVIEDLKVSNMSKSAAGTVSQPGRNVRAKSGLNRSILDQGWYEMRRQLEYKQLWRGGQVLAVPPAYTSQRCACCGHTAKENRLSQSKFRCQVCGYTANADVNGARNILAAGHAVLACGEMVQSGRPLKQEPTEMIQATA

SEQ ID NO: 867 - protein, 258 aa, Microcystis sp.
ILFCLDLCKRSTVECTPTRQQTDRGAIGLYFGVLHAIADSNGHGIENPRLLKSAQEKIKKIAKKSRRKRNPKKGVKASRRARKSARAVGKIQSKVARQRQNWHPQVAVEIVRCNSLIATEKLNLKGMTKKSKGSRKRQKSGLNRSILDVGIGNLKSLIKEKVTEAGGFYVEVPTQKIKPSQTCPNCGHQKKKSLAERVHRCEKCGYSCDRDVAAAQVMLNYARGLERASLDAESSSATLCGSMRHLGTKNRQKLQSSA

SEQ ID NO: 868 - protein, 414 aa, Streptomyces sp.
VIVKLVVQVKLEPMPGQAAALEATLRACNEAATWVSEIAFERGEFKNFPLRKHTYDEVKSRWTLGAQAAQHVIKKTCDAYTTLKANLKAGNLGKPGSKRYRKATEKPLAFRPQGAQPYDDRMLSWQIAERTVSVWTTSGRVKNVAFTASVEQLATLALYRKGESDLLERDGMWFLSATCEVPEAELNTAPADFLGIDLGIVNIATTSDGEIMAGRELNRVRVRERGLRTELQKKNTPSTKRRLKKRRRKEARRAKDINHKIAKHVVAEAERTGRGIALEGLTGIRERVRLRKPQRATHSSWAFHQLGEFIAYKARKAGVPVVHVDPAYTSRTCAECGHIDKANRVSQAFFACRNCGFVDHADRNGSRNIRARAWESWRRGAQSTAPAPPRTYRGEAGRKRSITASDARCASPGP

SEQ ID NO: 869 - protein, 540 aa, Streptomyces sp.
VPRELSAPFVVLGPSGVAIRTRLKGLTAGDEEVLRLVGAHLGSLASRDLKRRCAEGLEHSTDMWAQRKRALTEESSSRWAGSITKATHDQWALSRRAQLAHIQALEAGVRTIAHRLSLPVGEKGTKRAPGGYRSRQEWFAKTRRLPVLEDRLAAERADRAAGRVRVARGGKRLARNRHHLDQAQLTEAAWRQHWEASRWFLQADGESGKRFGNETIRLTPDGEVSIKLPAPLAYLANARHGRYVLTGTVAFHHRGEEWADRVAANRAVAYRIHLDTDRNRWYLTASWTIPPVKTVPLAQARAGGMIGVDTNADHLAAWRLDAHGNPVGAPRRFFFDLDGPAGYRDAQVRHALARLLHFAKRHGLSIAIEDLDFAAEKTREKHGRHKQFRKLISGMPVSRLRSRLVSMAAELGITIVAVDPAYTSKWGAQHWQKPLTGDKRATTRHDAAAVAIGRRALGHPIRRRTAPPRTHQSDGCGHRTAQAGPGARGREETRPRIPGPRTRSVRAGCGANAGDQDAQHRSGRPAEHGFWQQHSLPLSL

SEQ ID NO: 870 - protein, 399 aa, Streptomyces sp.
VIDMQLRYNYRAYPDATQRRALTRAFGCARVVWNDCLRDRRGAHAAGLPYVKSADLSKLRITQAKRTEERAWLADVSAVVLQQSLRDLDTAYKNFFDSILGKRQGRKVGPPRYKSKKDTRQSIRLTTNAFSLQDDGTVYVAKVGNLKVRWSRRLPAAPTSLTVTKDSCGRYFLSFVVDTEPDTLPELETDTGIDLGLSAFAVLSDGTKINSPRFLRRAEKKLKRLGRELSRKAKGSKNRAKARIKVARQHARVADRRRDWHHKASTRIIRDNQAVYVEDLAVSGLGRTRLAKSVHDAGWSAFVGMLEYKAALHGRTFARVDHRFPVFSGLLGLRIQGRPQASARAGVDVRRMRHDARPRPQRSPQRPLRRTPDRRRRTGGDAKRLWSAGQTGTRARTAR

SEQ ID NO: 871 - protein, 514 aa, unknown
  TnpB Polypeptide
MPGQFRELLPQPSGRDALEGVHQPGQLHRRGIGDEQVDVLRLPVALHQVATEVSADRLKDVFQPGQVGVGEDRMAVIRHENQVGVQQENTVSTSANVACLSHGPNMLCGMQLRYRYRLDPTPAQRQALACAFGCARVVYNDGLRLREDAYRAGLPFVGGVELSRQVVTLAKQTPERAWLGEVSAVALQQSLADLDRAYRNYFRNLKRVKAARARGDKAKLRVRKPRFKSRRHEQAVRFTLNSRFRVLPDGRLSLPKVGRLKVRWSRSLPSAPSSVTITLDRAGRYHASLVVQAVAAPLAPAETAVGIDLGLTSFATLSDGRKVDNPQWLRQRERALRRSQRNMSRKRKGSRNREKARLRAARLHTRVADARRDFHHQLSTNVIGEHQTVCVETLNVAGLGRSRFAKSIHDAGWGQFTAMLEYKAKLYGRTLVRVDRMFPSSQLCSACGHRDGPKPLKVRTWTCPDCGTVHDRDLNAAKNILAAGLAVTACGPGVRPSASQAVGDEAGTTLAGAA

SEQ ID NO: 872 - protein, 347 aa, unknown
  TnpB Polypeptide
MQLTYHYRVKSYGGFLNELSRKVNFVWNYCNDVQRQAVKAHRKWLGEFDLNHLTAGSSKMLGLRSEAIQAIARRYTQSRTQHKKPWLRWRGRKSLGWIPTNGVSLRYRDGDFVFMGRVFRVFLDRPLPPEAKILFGSNFSQDSQGRWFLNIIVEVPVVSKREGASSVGIDLGLKDFATFSDGTKIANPRILSKYARKLAVAQRANKRKQVRKIHQKIKDVRKDFHHKLSNDVTKKYNHIFVGDVSSSTLSKTKLAKSVLDAGWSSFRNMLRYKSIRNGATYVEVDESFTTQTCHICGLKTGPKGLAGLNKREWVCDCGASLDRDVNSAINILQRGLKHQALNLGAEP

SEQ ID NO: 873 - protein, 401 aa, unknown
  TnpB Polypeptide
MKAQRAICLQIDKPTRAKLLVLRNFQKKAVALADSLLKQRKSKRLMELHNATYLVSKQTTNFNSQVICDIERNVVKINGKSIKKLTVKFNVPRNCKHFRTKSRSFVEFGLQPRQRIAVPIKENRSYQRYSALLASGWTCKTYGVTPGLQVVAYLSKESVPEARDNVVGVDVNSKCFAVTVLSGNGKVLKQLYFGKDIWTRRKNIMERRTRLRSLADKGSSRARRSLLLLKAKEANFVRNRIGEVVRQIVSVAWKYDARIAIEGLRRFSRKGRNFNREVFRLPFYKFRETLAGRCFDNRIELDILDPYHTSKWCSGCGAVGDGHSKSNYALFRCGCGLEVNSDRKASLAVAIKSQLKREGALNRHAQFFSWQAPVNGLLRRNEVGLFNGVVQSNQPTESPYS

SEQ ID NO: 874 - protein, 425 aa, unknown
  TnpB Polypeptide
MTNLNLVAESKLYLKDNLLLYDYFDDYSRLFNFLVRRCVHHLRHKLNGESESRYRTNLMLEFNITNRMANVVMRTAKNQLKLLKESARYQYNNLYTRRRSLYKKIAKLKAILSSNFATLNQRKLAKLRLFWTQMKLNKVNQLIDNGLKLHLTFGTKHLLKTNKQKFLARRDNQVVYIGSKYETCGNQQFQISFNSKYNRFEYKLRLDNQWVSGTDKYIYGSFALKNKEAKEYILKTLLEKKSNPLTYRIIKREGNLYLQIMYRREVTNITRYNQGVVGVDFNKGFISVSEVDFSGKLQSLTRYNYLHQGKATKTKTSMLELVSKLVTQAVSVGKDIVIEDLVSLDSNKKQEKTTSKNYNRMLNSLKFGLFKRCLLSKATKDGVSVHIVNPYNTSKIAKERYTDRMKLNVHDAASYVIARRFYQYD

SEQ ID NO: 875 - protein, 482 aa, unknown
  TnpB Polypeptide
MEKGKQIFIYTRKLNANKSHKEQFAKRFRMAEDIYKKTLITLLKRYSKMKKDPLYKKAYKFPKGKERNAILKELGIKYDLVGKFTASKFANDYRNARNYSNYIPSDAAIQLGHRAWGAFSKVLFAKGAEKVNLRSTLTSFEGKENTGVSIKGDVFIISTRKKKVSCTIRIENDDFEEEVLRNTLKYNRLVRRFEFGDWNYYVQSIFEGTLPIKYTSELEGSVGIDIGTATIAVSSYYQTELEELAKDVNLNQQEVNRLSRKLDRQRRANNPHKYNEDGTIKRGVRKPWVDSKEYLKTKSELSELHRKATEQRKLAHKTLANKIIRMGSTFVVEQMSFKGLQARIKETKVSEKTGKYQSKKRFGKTLLHKAPAMLIEQIRYKSMYQGKTFILANTREVKASQLNHLTEEYNKVSLGTRVKMIGNDLVQRDLYSAFLLQHVELDGVTVDIKGCKSDFDIFLRNQKLTISQLTTDLKSTGKEYFN

SEQ ID NO: 876 - protein, 442 aa, unknown
  TnpB Polypeptide
MQKRKFTVVTQLHLKNNKELIAYLESSRSDYAKAYRETYHTFKNFKKFNKSSHNSYLQNKYGITKRTANSIILDAIGRYNAIKELKKYELQQVKSKLSYLVNTVIPKLEEKRLEYIDKLNKGVSINLVRYRNLKLKLFSKKVKANRLRQCIRNLEWQLSTGKFYICFGSKLLLQKSYSKFIEQRDSQLSYIGSKDEKAGNQMLQLNFNSEINQFYLKLRKDFGGYKRVRGAYVYGKVYFNYHKKEILNILSTGSSPLSYRFIKRNGRWYLYCTFEIAIEDYQFITTDSYGTLGLDFNKGFITLSETNKYGHLVSTGFFPYRFKIKYATKTDLESIVSKVVSYATKTGKDICIEGLDFNKTKSKVESKQGRKYNEMLHSLAYSTFMQLVENIAFSSLVYVKKVNPAWTSWIAKQKYCRPMKLNIHTGAAYVIARRGQGFVDTV

SEQ ID NO: 877 - protein, 221 aa, unknown
  TnpB Polypeptide
MGADGTVYARKFIHFSEEHDRLNTQLGRIKRNQKRGNKKNTRLWKRVSGIFQAIADKTAQAIFEFGSQHGVDVFVLEYLEFKGKQAVKRVHFWRYKRIFSVLGMKAHRYGLRIARVNAYNTSRLAFDGSGTVTRGWKISKEIPYSIIQFASGKFYNADLNAAYNIGARYWIRHLLKTVSETKRLALEAKVPQVTKRNTCTLSHLISLRSELLTLNVKRTQA

SEQ ID NO: 878 - protein, 380 aa, unknown
  TnpB Polypeptide
MFRAIKVRLYPNKVQEQELNKVLGAYRFVYNHMLAKKQSAYETDKTNLKATDLRKWFHSTLRKDEQYPWLKEQNTQVMQQAIIQMDDAYKKFFKQHKGFPKFKSKKDKQSASFSRNAISKRNTFETKHITLITSLKNLRFRCSELYHRRLQKYKDNIRSATLSKTKSGNFFLSILVDIPESEYVRFKKTGKQVGIDLGVKDFVITSDGVVFENKHFFKKEEAKIARLQRQLSRKKKGSNNRDKQRIRLAKAFERLTDKKENYIHSVVNEILKSYDVVFMEDLNVQGLLRNHTLSKAIQEVGFYRFKSILQSKAIANDKQVVLIDRFYPSSKTCSCCGYKKKDLKLSDRFWTCPECGEHHDRDINAAKNILLEGQRMLREV

SEQ ID NO: 879 - protein, 528 aa, unknown
  TnpB Polypeptide
MKIKELSSKSGCQRDENVSLKTARSLKREKSVHRTPLSSATTECQGEHSSVKKKSSKTLVQVSTTSGSAFSQFYDDTCKAISSHLLSPTEIESAVSDLSCLNISSRGAEVKSWFVVNQRIAKSVNSRKTCSQYFKPSRAECTGLDGIQIKHRKIRIYPTKEQRTILRKWFGVQRLVYNQAIQHYNDKEFDVRNWMKLYPIVSSELDVEHVKEAPYQLKKIAVKDAYTSWSTNCKKAKKSGKPFSLKFKSKKDKIQSCYISKKSVSTLGLYPTKLGRMKFSDTDWFANSEISDSRLICDHGRWFVSIPKKISTQQTYETQGGAVAVDPGVRNFGTYFSTDGRFGWFGQRAFERTLKLNIRIDKMRSIIATTEDKMYKFRLRRAIDRLYHKIRDLVDELHWKFMNFLTKEFSVVIFPPFNVSEMNKVSNRKIRKVVVRSMMALRFYEFKERLKNKCKERHVLFIEQNEAWTSKTNSFNGEVMTNLGSRVSFNYQGLRINRDVNGSRNILLRAMRDSSANGWNTIGCFVTC

SEQ ID NO: 880 - protein, 402 aa, unknown
  TnpB Polypeptide
MRKINRTYKFRLYPTKAQTELLAKHFGCARFVYNYFLNQRQEQYRMTGKSDNFYTECKTLTELKKQEETAWLKEVNAQSLQFALRCLEASYNNFFKKRAKFPKFKSKRTKNSFTAPQFASIEGGKLFIPKFKEGISCRVHREVKGKIGKVTITKTPSGKYFVSVYTEEEYETPLVKTNKSVGLDLGLKDFLTTSEGETFKNNHYTKKYESRLATAQRHLSRKKKGSRGFEKQRLKVARLYEKISNSREDYLHKCAIGLVRRYDTICIEDLNVQGMVKNHHLAKHVADASWGAFVFMLTYKAEWNDKKVVKIDRFYPSSQTCSVCGNINKDVKDLSVREWECPSCHAHHDRDVNAAINILHVGLKQYTSAGTADYTGGEEVRAVLSESHSSVKPEAHKPLACG

SEQ ID NO: 881 - protein, 380 aa, unknown
  TnpB Polypeptide
MLRAIKVRLYPNKEQEQELNKVLGAYRFVYNYMLAKKQSAYETDKTNLSAAYLSKWFHGVLLKDEQYAWLREQNTKVMNQAIRQMDDAYQRFFKQHNGFPKFKSKKDNQSALFPRGAVSKRNTFETQCITLTTSIQNLKFSCSDIYHSLLRKYKDNIRSATLLKTKGGGFFLSILIDIPESELVKFNKTDKQVGIDLGVKDFVITSDGVMFENKHFFKSEERKISKLQRQLSRKVKGSNNRDKQRIRLARAIERLTDKKESYIHSVVNEILKSYDVVFMEDLNVQGMMKNHHIAKAIQEVGFARFKEILQSKALANGKQVVLIDRFYPSSKTCSCCGYKMQDLKLSDRFWTCPECGEHHDRDINAARNILLEGQRKLQVV

SEQ ID NO: 882 - protein, 503 aa, Caldilineaceae sp.
MSNSHSTPPIPTAIRSERYRVRFDSRRQAELCAQTAGANRFVWNLFLANNDWRYRVCRKARGYGRWTDFPEAQRPLLVDPSRTWQSMYKRFAMIRSGKYDREFQAFLASPEGAVYAEQDLSWLRDLPSAPVRHVLKYLDAAYRRFHKAHAEAKAEGRSLPRRKSDGKPQYFPRRKGRQGRKPDGFTIPDHVRMDGHRLHLPRMGWVRLERGRNFPYRGCAPKTVRLLKEGTDRHPKWYATVAYAVPTARLKPAANDGELGVDRNVRQATDSEGAVYEQPDTTNLDANIKRKQRKAAKARERSRQSGQPMSNRGRRICGQLRKLHRKKRRRRENAAHRHSRQMADTAHAVVVEDLNVQAMTQSAQGTVEKPGTNVKAKSGLNREILASGWGRLERHLDYKAGLVVKVDPAYTSQTCAVCGHVDKENRKTRATFKCMACGYTANADRNAAINILDRGRPLIRQARGEGASARRGAFGTRPTPMIREPDMPTSPPGPSVPAWYTGI

SEQ ID NO: 883 - protein, 399 aa, unknown
  TnpB Polypeptide
MIRLSYKYRLKPSTEQVAVLEKQLRLCRWAYNALLEHSFNERRAGHGTPTHNALTYLLPEMKAMEPELNNVFSQVLQNVAKRVRSGFESYWNRKKARLKAHLPRFRGEDRYNSLTYPQFGFRVEDGCLRLSKIGDVRVVQHRPVEGQVKTLTVTRSRTGKWFAVFSSEVEEKPIPGRLPSVGVDFGLNSLVALSDGATIEAPRSYRGAEERLGRAQRRLSRKKRGSRNREKARRRVASVCERVANRRRDYAYKTARSIVNRYERVYVEDLKVQDMMGNRRLSKSLGDAGWGMLRNALTYMAERSEGVTAFVNPRGTSQTCSGCGAYVGKDLSVRVHRCPGCGLTIDRDVNAALNVLKRGLEIGLERAEYTPVGEVTATQLGGAGQVASVSQEAHLFRGG

SEQ ID NO: 884 - protein, 360 aa, Bacillales sp.
MEKGLKIRLYPNKNQISLLNIIFGHARFVYNYFLDYSKRTKDYKYTNWSKILTDLKNSDSTSFLKNADKFALQNSLRNLATAYANFFSKRTNEPVFKKKHNEQSYRTNFTNNNIVLYENSIKLPKLGNVKCKYGKDIQKNKIISVTIKLLKSGIYEASIIYECEEMMLPKTGNSVGIDLGVRKLITTSDGNTYISDLDIDRINNKIRKEQRRLSRCELHSKNYNKQRKKLAKVYQYKDNYMLDTIHKATKAIVEKYDVIYMEDLDIKDLIKKQKLKIHKRKMLLSSLGQITTLLKYKCECYGKELKKIERYYPSSQTCSNCGKTYKVGKSETYRCPHCKLIIDRDYNAAINILNYGLAHN

SEQ ID NO: 885 - protein, 418 aa, Halobacteriales sp.
MEVRRTVPVKLDVDSDDAALLEDTVDTFLWCAQYVTDHAFKGEYVTTSKTTLDDETYDDVRDATDGFNAGLVQAARNKAAEACKSVVARWKNGKKASKPTFTSPHVVYDHRTATFHDEYVSLATVDGRIEADYVLPDKDNDTPHADYFFSDKYGTTGAELHYTNGNWMLHIHCKRDVESDTPKQAPSENGTVLGVDLGVNQLAVTSTGTFWTGDEFDHWRREYEKRRGDLQEHGTRWTHENIQSVGRKEKGRFKLMLHRISNELVAEARENGCSVIAFEDLTDIRERTGASWGHKWAFNRLYEYVAYKAKEHGITVEQVDPENTSRRCSTCGFTHPDNRDGEDFECLKCGYQNHADYNAAKNIGLRYLRRNQTGDGGGAPLGVRLNSGTVNVNGDYESPADISARTGVHAESHPFTGR

SEQ ID NO: 886 - protein, 466 aa, Halobacteriales sp.
MKRTNTFTVRPLTDDDEQVLRDLLDACAALWNEINYQRLMRYNDEDGFKGDIWDADTGALEGKYKDVLDASTAQTVRRANTEAWRSFFQNKNAYHDESNTSVTEHPEPPGFRGNKDDGRVLKGVVRKDAYTVEWGERSRLEIVVGETLRDKHNSPNSRLRLEIVGDPNWPDYEDQGRLELWYDETDSTFRASQPVTVSDDARETPLADETAALDIGANNLVACTTTTGEQYLYEGRELSQRFRETTREIARLQSELREGRYSSKRIRRLYRKRTRRRDHAQAALCRDLLDRLYAEGVDTVYIGGLTDVLETHWSVETNAKTHNFWAFKQFTERLACTAEEYGISVEVRSEAWTSQECPQCGGTDRTTRHQDMLTCPCGFKGHADLTASETFLRRHTEQAVRPMARPVRFQWDDHDWSGIPYPHESPNEQRTDPSTVRRDGNVASGVVRKSEIPVITEISDSRIKSA

SEQ ID NO: 887 - protein, 487 aa, unknown
  TnpB Polypeptide
MELANLASDPPQHGGEPASAARLQRSTKPVGERMSRYQGFRFALDPTAAQKRALASHCGAARFAFNWGLDLVKERLEARRREGAQEVPWNLPALRREWNRIKEEKAPWWRENSKEAYSSGLDSLARALGNFTASKKGTRMGRFCFPVYHRRGRRDSCRFTTGVLRVDDRQHVSLPRLPRLRTHEKTDTLLRRLQEGRARILTASISREADRWFCSFTCEVNRTHSACNGHDDVIGVDLGLLRLATMSNGEIVEGPRALQRSRHRLRRLARTVSRRLKGSARRRRAISKVARAHRRVANLRRDHLHKLTTELAKNHGQVVIEDLNVRGMMSSAKGTIREPGRNVQAKAGLNRAIADAAFGEFRRILDYKCGWYGSRLAIAPRFFASSRRCSDCGEMRDNLRLDERIFVCTGCGMSLDRDLNAARNLVWWAETSGKQVAASAAETENARGGDVRPGNGQADLDETRTETVSEPAGSTGSPSLGVIYVPC

SEQ ID NO: 888 - protein, 374 aa, unknown
  TnpB Polypeptide
MLKVMQELCSYSRYCYNLALETWNDQYDASLVLKDKSLIPNMQSIRNELVRNKEDWQYEYPITVLQQAVINLAQAWKNFFSPNMPDSKKPKFKSAKRDKQSFATNTARITDGKLILPKPIGVSKGNWYGIRISEPIRFTGTIKLTTIVKDIYGYSASLMIDTEDNEVPVTKGVVGIDANIKRFNYGNKETVMIYPKKLDKLYDRIGHYQKMLAKKRIANPTNFRSKNYATVRAKLQRDYSRVNRIQSDILHKFTYYLTHTYKEIHIEDLDVKHMQMSRRIGKNLHRSLFRKFREQLTYKCAWYGNKLVVLPRTYPSTQLCSKCGFRKTKDGYGGKQTLSGDSIHHEHQTYYCYNCGAVLDRDENAVENIKNYVG

SEQ ID NO: 889 - protein, 206 aa, Chlorogloeopsis sp.
LTHFYTDSDGNKVDNPRFLRKSEKALKRLQKRVSKKFRKGQPQSNNYKKAKDKLARIHLKVSRQRKDFAVKLARCVIQSADLIAYEDLQVRNMVKNHKLAKSISDAAWYQFRCWLEYFGNIYGKVTVAVAPQYTSINCSSCSRQVKKTLSTRTHKCICGAELCRDENAALNILAKGLSTVGHTGTQAWGQNDLCLDLETSVNKSAG

SEQ ID NO: 890 - protein, 656 aa, unknown
  TnpB Polypeptide
MDKKKRRREEDEAEDVCSKFVEELDLPDEEKAPLKAQCDARLRKASPKMLYDLESSCSRLVDDPDSIAACIGFGLAHPEVKLAAFNKEMAQKVQFCLTQMDKARKHGDAREYGEFCLDQVPEVKNPKDLIKSSKGYGPPAFDHGTFSSAIPDGVNDLGSAGASPGNSRQPISPTQIKTVRFRLFPTERQIPALNEIFTIYNRVKRSGYQMRFNGESDIQQKLMRICRNNPYVNTILIENTAKLQAQETWLKKMRKYIEGKIEVIQDKINDIKGKDKRDRRLRGLFAKLSSLQNKLRTLKLKPVTFGTKGLFKNRSKGKLTREEFRIRRDASFVCIGKAQGGVKNLNLKILPGNELRIATFKKEKGNRARKIIIPFSANTTKQKAWLQEIDQADKYTVCVKRQITRGDIRYYMYVSYEIPAPTPKHGFGNGAIGLDFNYDFVSLTNVDARGRLLSYQTIKFRNLHSYRKNRRADYASYKMDKVVNYCIHKRKGLVIEDLSFNQSFSYNKKLNRKLSNFKTSMLEILERKCTRKGVAIRRVHPAYTSIIGRLKYSRSYNLSVHHLASYVIARRGLGFQELLPPLHKWLLSQVGGVLKPRLKQGSPYRDWAKLHDLFKHCGITSFRPPEIMKKVSVKYGLNPATGARPDNLRTGLPFPG

SEQ ID NO: 891 - protein, 430 aa, Streptomyces sp.
MLSVVSQDTLVKRQFGHRARLSLSPAGVRTADDQAHAARTMWNLLHAWWRMMPKHMRTHPNADAAIRQARQDIDFLAVLPAQAAQAVLKTYFQAWKNCWEGRADAPNFKGRFRTVMSVDIPQGRDLNITRVHRRWGMVNIPKVGRVRFRWTKDLPVGKRAGAENRITGARLIKDSLGWHIAFRVQSLEPAPQPHTGPEVGIDVGVTVPIALSDGETYEHGEWLTGKEKARLWHLEQRAAQRKQHRKPGERTSRRLHRTYDQIAGLRAKAKRRALDWQHKTTTDIACTYSVVVVEALTITNMVKSARGTIEEPGKNVAQKSGLNRSISGEAWGRTVTMLTYKTAQLGGALHKVPAPGTSRRCSACGFTTPGNRESQAVFVCKNPDCGWSGNADHNAARNVLHLYRMGPALIPAAGRAVVRRAKRVKPAAAR

SEQ ID NO: 892 - protein, 404 aa, unknown
  TnpB Polypeptide
MFQSRKVRLKPNKAQAGFFRQNFGASRFIYNWGLEQLNKYWEENKDKEKKDRAKRPSAYDLRKELNHLKNTTEEYAWLKDIDSQSMTYAFACLEDAFKRFFTGQAKYPKFKSKRDSKQSYSTKAGKALPRLKDSNHILLPKIGSVKFYNRNYLPEVEYKRATISTDGDYFYCSVLFEASPKELPEPIHESVGIDLGVKTLITTSHGTTFHFKRNRRLEHRLKRAQRIVSRRKKGSNRRNRARKCLRNLHHKISNQRNDFIHKTTSTLVSENQVIRMEDLNTKGMMKNHCLAASISHASFGEIKRQLTYKCEWYGRSLQLVSRFYPSSQLCSHCGARNKEMKNLNRRTFVCHTCGFSLDRDLNAAINIDNFCTHPERETGRSSADDRGDSSSTKKRYSLSSVANR

SEQ ID NO: 893 - protein, 444 aa, unknown
  TnpB Polypeptide
LKKLSKTLKRTVVVESVYPGRPKLAVLRKLEEAYREMVTEAVEYAVENNARSLAKLHKALYKQFREKHPEMPTRLVKGAIADAARRVKSFLKLKKQGKACTNKPAVKKVTITYPDSQDWRLQGETILLKTHRGWLEIPLRIHKHYIRYRYGEWRLGRELRFKIVGRKVIFYLTFEKELGVNYNPANVVAVDVNEDNVTLAVYEDAKLVYLERIETGLGRIVIAYAEKRRRIMKGRHWSDRIVRKRFKRLARRERNRKLDILRKTAKRITELAREYNAVVIIGDIPRHKEKIVERQKRSALRHRLHQWSVSTLVRLLHDSPVYIELVDERRTSSIDPFSGKRVRRWLPSVTRAAARGGHRYVRAKVYKLRLRLGLVDGYMVERDFIGAINIGAKWLRAHGFHPDVRGMAFPANGAHEAPVMRVNGGRGTNPAHRALIIIKSYSKL

SEQ ID NO: 894 - protein, 412 aa, Anabaena sp.
MQLVERHIIQRNHPHYQEIDQLCFAAKNLYNSANFHIRQSFIFAQKYLDYNCLAKQLKSTEPYLALPAKVAQQVLLGIHRNWLSFFAAIKAYAEDQSKFLGRPKLPKYKHKEKGRQLLVYTAQAVSKPKMKAGLIHLSQTQIHIPTKVEYINLNQVRIVPKIDHYVVEVVYEKEEIDNGLDPNDIAAIDLGIDNIATLTSNQPGFLPVLVSGRVIKSINRYYNHRKANLQSLLPAHQKTSKRLQSLTKKRNFRVDNYLHKASRLIIDHLLKCGIGTLVIGQNLFWKQNASLGSRNNQNFVCIPHSRFIQQLSYKAKLVGIKVLVSEESYTSVASFLDQDPIPTYGEVASKEVKFSGRRIRTKLYQAGNGLLIYADVNGSLNILRKVVPTAFSLGIGGVVVRPVGVIPGKRKA

SEQ ID NO: 895 - protein, 366 aa, unknown
  TnpB Polypeptide
MLKTHKIALNPNNVQATQFAQHCGYARVAYNHALADFKAGLTKGDWRSHIDLQHRFNAVKYNQYPWAKDMSQTVSKCAIYNNLKDAISRWKSGQNRFPKFEGRFHGQSYQAVAGKGETQVEGQRIKLPKIGWVRLCEPLRFLGTICKVVISKHGHRWFAAIVVDTFEADSIPDIRQHPVVGVDVGIKHLAVTSEGVYYENPKALKRYERKLKRLQRQLSRRQKRGRNWHKTQVKLAKLHYRITCIRQDAQHKATTAIVNGASRIGIESLNVAGMLKNHRLAKALSDASLSSFLAMLKYKAERIGVKIVEADTFYPSSKTCSACSAVDNDLSLSDRTYHCSVCGHTQNRDLNAAINLRNVAMGHTET

SEQ ID NO: 896 - protein, 495 aa, unknown
  TnpB Polypeptide
VPYAAFNKSGEPLNLGEVLEGIRRDAELVARYAVREMTEQNLALVTYFDGLKPAEAGRMMGLFLPSEVKKRFRSGSSRLERMFREQVVTNLRSWVTRSGAVSGDYTGYVSAGWKRTARDSKPKTLQPRLALSATDKGYHKNFNVTPERISLDMVVQGQWATLHFPTPPQLLEAGCEPGVPDIWVDSNNHVMFGFHGKTDPGRPKFSERYMVGVDVGVTNPAAYVVWDTEKKEVVERSLLGQRARSLTNKIKRTQTQVSALQRKDRSEEVAPHRAHLSNRRRELSILVAQEVVDAAWRYGNALVVFEDLSHIKNTMMFGRWFRGEVYRRTRDMVEADGGRVLKVNAAYTSRRCHVCQSDLDMSDYSQPRCTACGTAHHRDLNAAANIAQRVNVKKACQTRRRHATKTKRVRRSKCRVKPLKHPGTKNRPTPKAPQNRPKSLAHSSLPKKEVSVRMCPADTRVSVVDHDAWFQTTSGTTNPKENLSTITMDWVYPKE

SEQ ID NO: 897 - protein, 476 aa, unknown
  TnpB Polypeptide
MIISYDYKLNPSNNQSALMSDWLNMLRGLYNFGLRERIEAYEQVKYPMLGNYCRLDNRAECCPLTCSLSKSALHGEPWKLDKDGKGKKRSAFEMQCVTLPQLKIARPWYKQINAQVIQQTLRQLDTAFQNFFKHGRGYPKPKRRSHFRSFSYPPGAGVKIKGNRIYLPGTGWMRFFLSRQIPDGFSIRTVTVRRKSDGWYISVRLEDKNVPLPPTKTSPDVATALGADVGIRKLVALSSGETIQNPRFSKRVEKRRRRLHRAASRQKKGSKNRQKSYQQIGRLEQRVENQRNDYQWKVANRLVRQADCIVFEDLNIRGMTARCKPKVDPETGRYLHNGQAAKAGLNRAILDASWYGLKQKVKAVAAKSGAIVLDVPPRHSSQECRECGYISPTNRDKEKFLCESCGHYEDADIQASRVLLARGLKELGIEQLCGVPAKVTPKPEVTGCKEISPALVGEPGNPRQLTLFDLTEWRGA

SEQ ID NO: 898 - protein, 370 aa, Gracilibacillus sp.
MAKQNKAYKFRVYPTDEQALMIRKTFGCVRFVYNKMLAERKETYEKLKDDKEALKNLKHPTPAKYKKEFAWLKEVDSLALANAQLNVDKAYKAFFKGNAKFPKFKSKRHRQSYTTNVVNGNIQLLDGHIKLPKLKMVKIKKHREIPSEYKIKSCTLSMTSSGKYYISILTEYEKEIESKEIEKVVGLDFAMDGLFVDSKGEKANYPKFYRQMLEKLAKEQRKLSRKKKGSANWNKQRIRVAKTQEKVANQRNNFLHHKSKELVSNFDAVVIEDLDMKGMSQALKFGKSVADNGWGMFTSFLQYKLKEQGKQLVKIDKWFPSTKTCSNCGSVKEIELSERTYQCACGLNIDRDYNSALNIKKEGIRLLATA

SEQ ID NO: 899 - protein, 154 aa, unknown
  TnpB Polypeptide
MNTYKAYKLRIYPNKEQKIMIDKTFGCTRFVFNKFLSERKEKYEENKIKLSAYEQLKELTNLKKEKKWIKEVDSCALQKCVFNLDDAFKNFFRGNGYPKFKAKGEHESYTTNNTLNEYKNVKYESIRIDFKNKVITLPKLKKVKSKIWRNHYLI

SEQ ID NO: 900 - protein, 525 aa, Streptomyces sp.
VAVRTRLKQLTPDDEKVLRQVGGHLGSLASKDLKARCRDGLEHSGAAWAVRKRELTPLSSSRWAGSITKATHDQWALARRCQSAHIQNLEAGIRTIEDRLSQPIGQKGTKKAPGGYRSRREWHAKSRRLRVLQDRLAAARADREAGLVHVVRGGKRLAHARHHLEAAGLTEGAWRRCWEAERWFLAADGESGKRYGNETIRVSPDGEASIKLPAPLTYLANAPHGRYVLACRVTFAHRATEWADRVAADRAVAYRMHYDAGRDRWYLTASWQLPPTPALPIEAALAHGVIGVDMNADHLAAWRLDVHGNPSGSPRRFFYDLTGSASHRDAQVRHALTRLLHWARTCGVQAIAVEDLDFAAEKTREKHGRRKRFRQLISGMPTGKLRARLTSMAHQTGIAVIAVDPAYTSKWGAQHWQKPLTTENRKTTRHDAAAVAIGRRAQGHPIRRRMAPPPAHRSDEQGHRTVQARPGVPGREGPRPRIPGPRTRSVPPGCEANAGNQNAQHRSGRSAEHETWLQDSLPLSP

SEQ ID NO: 901 - protein, 365 aa, unknown
  TnpB Polypeptide
MMKTIQTLVEETPEQRAIFDDNMALMSEAQNFAVSSCYKHKETNTFRMHHINYPILRERFGLPAQLAVVANKCACASVKTALRKKRSRQPKFSGTSIHYDKRSSTINLTKGTASLLTKEGRIKFTFSIPKYFQKYTDWNVKESNLVRCRDGRFRLMISVEKPTITSSKKGKVLGVDRGINNLIATSDGWLYDGSHVFSVKNRYIGLRSRLQSKDTRSADRHLAKIKQKEQRFMRDVNHVVSRRLIDSVGKDGVIVLEKLNGIREARHRRKQNWLFSNWAFYQLEQFLLYKGEETGVAVEFVRAKDTSRTCSVCGNIDKRQRQGSTFVCKACGVVLHADLNAASNILHKYTLTGCPVNQPIAPQMS

SEQ ID NO: 902 - protein, 410 aa, unknown
  TnpB Polypeptide
MIRNAKFWGLEYSAEFSEMLTLTNSLLNEISECVRDEISNGSIVNINSVGLGQYVELSDGKEVTQAGYRDRIRYILDKYPIVERRKGIERQLVGYVLERFAGYFKRNGEKIPRITFKNKSLYNKDRNVEIDKENKRLIFHTVFGDYNVPYKGSIKSDYIDSGKFGGNLIVKQKCFVVAVDIPFVQQYTPEKVLGFDINKSLHNWIVFNTGDVIPAPDVVSDLIDKIRKLNKTINNSKKEGLRTSQRGAVRRQVINKHKQLHAEIKKVCEKIVDVVKDNKSLLCIDMVKTGQSMGTFGQDKIIPELQTLCENQGVPFIAVPCKNTSRRCSSCGYVHKDNRKTVDEFRCLKCGHEELSHLNAAKNIAFLGNKMFEAGVPCGNHGRISVEKLIERHGSHQHPTQHVMTFMAAS

SEQ ID NO: 903 - protein, 416 aa, unknown
  TnpB Polypeptide
MYLTVKQQVKHLTKEDYKSLKELCHIAKNLTNQAIYNIRQHYFNEGGYLNYENNYALLKTADNYRMLNSNMAQQILKEVDGSFKSFFGLLKLAKKGRYAFKDCKLPGYLPKDGHTTLVIGFVRLNGNKLILPFSNTFKKTHKSVEITIPPILLDKKVKEIRIIPKANARFFEIQYIYEAECVQRNLNKNNALALDLGIDNLVTAVSSNGRSFIIDGRRLKSINQWYNKRNAYLQSIKDKQHFGKKPTGRQKANIRDRNNKVNDYMNKTARTIINYCINNNIGTLVVGYNEAFQENSDMGKSNNQTFVNIPYGQLCSKLEYLCQLNGIVFVKQEESYTSKSSFWDRDEIPVYSNDNFEEYTFSGKRIHRGMYRCASGKCLNADVNGALNIMRKSNVVSLEGLYTRGEVDTPIRIRIA

SEQ ID NO: 904 - protein, 226 aa, unknown
  TnpB Polypeptide
LRRKRAPNRKKKIKASRRWKKTRKLISSFQGKVADQRKDWQHKVTSDIASRHDIGVTEQLNTKGMTRKAKIGSKRKKQKAGLNKSILSVGFGILNKMIAYKIEQKGGLMLVLPTKKIKPSQRCPKCGKVHKVWAELSNRYHICDGCGFETPRDRGSVMVMYNVATNQQPGLGMSLVDCGCSSSTELTKKRKHTGSMKQLGQMKRQKPNSVVDDGKLETPSSRSRVG

SEQ ID NO: 905 - protein, 381 aa, unknown
  TnpB Polypeptide
MLKACKFRLYPTKSQKALMEQTLDLCRWTYNQTLAYRKDSWEKEGKSISKYETHNLLPTWKSDKPELNKVFSQTLQNVQERVDLGLKAFFRRVKAGENPGYPRFRGSGWYDSFTYPQKGFKLDSGKLHLSKIGNISIMLHREIKGRIKRLTVRRSPTGKWFACFSVEVEDAPLPPWKDGSVVGIDVGLESFATLSNGEKIVNPRFFRDEEKELARVQRKLSKAQKGTPDRKAVLKVVERVHERIANKRYEFAHQISRNLINRFGLIAFEDLNIKGMLENHCLAKSISDVAWNMLVTVTSYKAANAGSMVVLVDPRNTSKMCSRCGLLVEKSLSDRVHNCSECGLSIDRDFNAAINILRLGLQSVGIKTVEAPSLRAGSSHI

SEQ ID NO: 906 - protein, 381 aa, unknown; identical to SEQ ID NO: 905
  TnpB Polypeptide

SEQ ID NO: 907 - protein, 404 aa, Cyanobacteria sp.
MLVLEYKVKGKPSQYRAIEEAIKTVQFVRNKCIRYWMDAPKETKIDGFILNKYSTKLRSEFLFVKNLNSMAVQSSAERAWVAISRFYNNCKSKKPGEKGYPRFQKHNRSVEYKTSGWKLHPTKRRITFTDKKGIGELKLLGKWDIHTCGGATSHIKRVRLLRRADGYYCQFVVNVAQSEIVEATQSAIGLDVGLESFYTDSNGHQEANPRFLRKAESSLKHAQRRIYKKQKGKNGRLKARKRFAKKHLKVTRQRNEHAKRLARNVCRSNDLVAYEDLSVSNLVKNHCLAKSINDASWYLFRQWIEYFAGKYGRKVVAVKPHYTSQKCSQCGRIVKKSLSVRTHICQCGCRLNRDENAAINILNLALQATGGHPGRNAVGVGVTTLVGATLPEQILTLSTESPVF

SEQ ID NO: 908 - protein, 411 aa, unknown
  TnpB Polypeptide
VGYKVVGWSGVSAVKAVRQNYSGSIELSRLMDVFRRMTNDCIRTGLVNNVSSLGKLSSLSYNKLSNYDSPSYYKLCAISRAAGILAARKKSVRRGFPVREPYSVRPQLISCYGFKIRNGLLEIPVARGIRFGIQLTKHTLGAISQPGVEVRSFTLTPHSLSICISREVAPIECVSTIGVDRNLRNLTVGNDQETRQYDLSESVRIARVAVDIVGSFRRNDNRIRQVVSSKHGGRRARRTMHILHNVTKRVVSVAVQQRTAIVLENIEGIRSLYRKGNGQGSRYRARMNGWSFGEAQRQIEYKARWVGLPIIRLSRRETRGSSVTCPRCGERLQSDKRLRRKLWCNNCRMVMDRDVVAAVNLSRRGRLRFDRSQPTTKAQGPPREAMVSEREPERATLIRTVDGGKIDSQRA

SEQ ID NO: 909 - protein, 406 aa, Rhodothermaceae sp.
MPTLRYRYRFHPNAEQRQMLARQFGCVRYVYNWALAMKRDAFRERGEKIGYAETDRRLTQLKRQPDHAWLREVSSVPLQQVLRHLDKAYTAFFRGTARFPRFKAKKHRQSATYTRRGFSLRDSGVPGQPVVKLARMSTPLKIRWSRPLPSDPSSLTVVQEPDGTYYISFVVEVDYQPLPRTKRSVGIDLGLKDVVVTSDGWRSGNKGRVTRPKHLKRAQDRLALEQKRLARKQKGSANWHKQRRKVAKLHAKVRNQRQDFLHQLSTRLVRRYDTIYTESLCVRGMVKNHSLARAISDAGWSAFVGMLEYKAALYCKQLVRIDRWYPSSKTCSGCNYTMETLPLDVRKWVCPRCGEEHDRDINAAQNVLAVGQTVAEPDALRVLSFGKACGDGVRPALASVSEGDCR

SEQ ID NO: 910 - protein, 384 aa, Rhodothermaceae sp.
MQTLTIKCKPILSDEERGAIDATMEAFAAACNDAIRVGREMGTTSNVRIHHACYKDLRANHGLTANLAVRAIARAAGILKVRKRRRSTVRPTSIDYDARIFSFREADWTVSLSTISGRIRVPIRVGDYQKQLLSGRKPKSAVVWKTRQNEYYIGIHVDVEAPPPGFEEKHGTHDASRWIGVDLGIVNIATLDDGTAFSSDTLEETRTRYHRTRRSLQRKGTRGARCVLRRLSGKERRFQQAVNHEISRRIVDKAAAEGKGVRLEDLSGIRDRMRVRKSQRRRHHGWAFYDLRSKIEYKCALAGVPFEMVDPRYTSRRCPVCGHTEKANRKSQSEFRCRSCGLEAHADMIGAINISLGGAVNRPEVALRTFGRLDDWTRHASRRV

SEQ ID NO: 911 - protein, 350 aa, unknown
  TnpB Polypeptide
MLLSKKTSIKVSREYANLIGHMCYAASKLWNVCNYERQHYKETGMEQYPDWYYQKKAHKEDLWYKQLPSQTAQEVCRLLDKAWKSFYALKRSGGIETPRPPRFKQESIPITYMQMGIVHERDTDRVRLSLPKTLKKYMEETYQIHENFLYLENKIFRGMDQIKQLRIYPPEKGSCKIIVVYEVPDQEELPQNGHELSIDLGLHNLMTCYDSGNGKTFILGRKYLALERYFHKEIARVQAQWYGQQSGKGVKYLATSKHIRKLYKRKHDSVTDYLHKVTRYLAEYCREQGITCVVAGDIRNIRREKDLGHRTNQKFHSLPYNRIYIMLEYKLKRYGIRFIKQPANKKSRLN

SEQ ID NO: 912 - protein, 368 aa, unknown
  TnpB Polypeptide
MEKAYKFRIYPNRTQEILIQKTFGCVRFVYNYFLDKRIKAYEADKTTLTYNKCSGELTKLKQELVWLKEPDKCSLQNALKQLDAAYQNFFQRIEAGYPKFKSKKNRHKSYKTNRTNKNIAFTDGKIKLPKIGKVKVRDKQIPQGRIINATISQTPSGKYFVSLCCTDIEQPAFARTDKYVGIDLGIKDFAITSDGYKYSNHKYLKQSLTKLAHLQRELSRKTKGGSNWEKTRIKVARWQEKIANQRKDKLNKLSSAIVKSYDVICLEDLQVKNMVKNHTLAQSISDASWSAFTRQLIYKAKWHGKEVVKIDKFFPSSQTCHVCGHRNKGTKHLGVRTWICPNCHTEHDRDINAAVNILHEGLRILKIA

SEQ ID NO: 913 - protein, 269 aa, unknown
  TnpB Polypeptide
MQGGNYYGSFLYEAPESNHQTAGIVAFDLGIKTLATGYTDKGRVYHIHGFKGGRWYNRQLDKIRSKRDKCKKKSRRYLRLSKVYQRVAERKRRKQQDCLHKASHLIADQLAERAVVIGDLSQRQMVMKKQEEETPKEKRKRQIRNRMVYNDWGLYRFVQMLIYKCLRAGKALHTISERETSKTCSRCGWKQAMPLWKRTYRCPNCGLVKDRDENSAINIFQRFVAGPPPHTSLGECGVLHEEGNSSEVMEASCHLQVQQLELWADGASV

SEQ ID NO: 914 - protein, 382 aa, Erysipelotrichaceae sp.
MKITKGYVFRMYPNENQINLIEKSFGCSRFIYNHFLSVSHNYIDKYDCIKQLPLLERENVWLKEVDSCLFRTSIFDLEIGFKRYNNKLGSKPKFKSKNKPRQSYRTNNIRGTYKGKEYNSIEIDLNSRTIKLPKLKEVSIRGYRNLISINGRIINATIYKEAGKYYVSICVEENSFIKDVVPTKIVGIDLGLKDLVITSNGEYFGNKKYIKKYEKKLKGLNKALSRSKPGSKNRYKIKRKLQTVYKKMKNARKFLLHNISKYLTDDNDIIVCENLKVKNMVQNGHLSKAIYDASWSELVRQINYKCIWKNKRFYQVDTYYPSSQICSRCGYKESRVKDLSVRAWECPNCVNMNNRDLNASINIMFEGVKMYMERELTELQLN

SEQ ID NO: 915 - protein, 508 aa, unknown
  TnpB Polypeptide
MKRAGTPTFVLTLPLVVKPGEDRILIGHMEAGRRLYNATLDEALRRHGLLKQSKAWQNTRTITDKKLRSREFKRLSKDAGFTPAAIITFARTCKNEAGWKDRLGSNVTQRIAEQVFAAMQQYAFGKRGRPRFKGMNRPLHSLEATTNAANIIWKLETGCVEFGDITLPALLPSQAQDPYLHQALTGRTKYCRVLWRNVNGLRRWFVQLMQEGVAPVKHAQASGEIVGLDIGPSTIAVVGDHAASLVKFCESVVQPWKDTRRLQRAMDRSKRATNPHCFNPHGTWKKGQLFTPSKRYAVLRTEYAEVERKLAAERKRAHGELANQILGLGNVIQSETLSYIAFQKNYGKSVKVRAPGMFVEQLRRKAESAGGKMIDLHTWSLKMSQYDHITEVCTKKPLSQRWHVLGDGSGVVQRDIYSAFLARCVMSNEHHPSHIETMWAAQKPVLLQTGWLRSEPAKIEPSGKITVLAPSERVVCNRGLAIGHGLDAVVARREPGDPDGFALRTPCL

SEQ ID NO: 916 - protein, 426 aa, unknown
  TnpB Polypeptide
MQLVEQHRIDQHDPRWKAIDEGAFASKNLYNVVLYYKRQAFIHQKLILSLAEVYQAVKETPEYRALPAKVSNWVLQQVFAAWSSYFSACQAYKENPTKFLGHPKLPKYLAKDGRNLLSYEDKAFSRNKKNAGLILPSGLDIVVQTKQSRDRIAMVRIVPKATHYVVEVIYEPELQPSSVQPNLVASIDIGVNNLAAITSNKPGFQPLLVNGRPLKSLNQRYNKMRATRQKYLPGKQENSRFLDQMTDKRTRSVDYYLHLASREIIDMLLHQEIGTLIIGKNDFWKQAANMGKKNNQQFIFIPHARFIAMLQYKAELVGIQVILVQESHTSKCSFLDEEAIYHHDHYAGRRIKRGLFKSATGRLLNADVNGSYNIMRRALPSVFTNREPDSFLITPTFLKLPDRKQDTSKQLPKSVGSSGCCSQPAV

SEQ ID NO: 917 - protein, 449 aa, Cyanobacteria sp.
MLTLTYRYRIYPDLQQELQMLDWLETCRKVYNYALRERKDWINSRKCSVNACSLQSEYIIPADTPYPDYYRQKKALTEAKKTNPGLKAVHSQVLQEVIGRVDAAFAAMKQRGHGFPRFKKFGHLKSFLFPQIDNTAIQGNETAVATTGGTPTPVPYGGKPFCRTGSATRCLIKLPKLGKVAINLHRPIPNGFNLKTARIIRKASGWYVALAVQIDVSVPDSIPQGHALGIDVGLEYFLSTSAGEQVKRPRFFNPLHRKLELLQRRLKNKQKGSSNRRKLNQKIARVHEQIAECRRDFHFQLAHHLCDHAEMIFVEDLDFRLMAKGMLGKHTLDAGLGQFVNQILPWVCWKRDVYYGKVDPNGTSQECPDCGAVGKKDLSVRVHHCSECGSIKPRDIASGQVIRNRGLSAVGLAVDEIACGRDLSGALPRQDRVKQESLRSDLEKPALYA

SEQ ID NO: 918 - protein, 394 aa, unknown
  TnpB Polypeptide
MRLTERIQLKKSTALSQLCHRAKNLYNLANYTIRQRFFKDRHWYRYYYLNGLLNQATAYRALPIQTSQQILRLLDKNWKSFFRAMNDWKINPEKYQGGPRLPRYKPKNGESIVIFTNQQCRIKNGYLHFPKQVVPPMKTRFAGRFQQVRLLPKGTYYIVEIIYDCASIYLDLPKDRILMIDLGLNNLVTGANNVGLPPFVIKGGVVKSINQFYNKEQSRLSSIKDKQMIRGQTIRLQRLTLKRNNKIQDFFHKASKKIIDYCIVNEFGTIIIGYNAGWKQNINIGKRNNQNFVYIPLQKLIHKIQYKARLVGIEVILEDEGYTSRCSFLDNEPIKRHKVYLGKRISRGLFQAGDGTIINADVNSGYNIGRKAIPNAFSADGIEGLGLHPYSMPI

SEQ ID NO: 919 - protein, 389 aa, unknown
  TnpB Polypeptide
MLKTYQYRIYPTKEQRNKLELNLELARFAYNNQLALIISTYKEKGKNLTTFELNNSLIFLKKEYPVFKNMHSQVIQEINKRIVNSFRQFFNRIKRREKPGFPRFKNKNRYRSITYPQSGFSLNNNLYISKIGNISIIKHRNIEGKIKTMTIKKSSTNKWHVYFSVEHEIKKMPIQNNKSIGLDLGLHHFYADSEGNTIDNPRWFRRSEIKLASLQRNYSRKKKGSMNRKKLRLKIARLHEKISNQRKDFLHKQSRKLASSYSFIAVEKLLIKNMQQNRYLSKSINDAGWYTFQQMLAYKVEETGGKLFEIDAKGTSQSCICGNKVEKSLNIRIHKCNRCGVKIDRDVMSAMVIKQIALKSATAGSAGSNAWGDERMLSSMSQELLLPII

SEQ ID NO: 920 - protein, 150 aa, Lactobacillus sp.
MARLDCREALKKRSKSYQKARIKLQKLYERAHRMQDDAMHKYTTHLVKEYDAICIEDLDVKGMLMSHVASKGVHRALFGRFRSYLEYKCKSAGVKLVIANRFYPSTQRCAVCGNIKKDDEKITLSGNKKHGTKHNEYVCYNKNARTMARL

SEQ ID NO: 921 - protein, 327 aa, Limnothrix sp.
MAVAPIILGALPEWAKPVPYQIKKIAVKDACTAVREAKKSFKKDGQIRKCRFRSRKDRQQTIYIPKSAISENGVYHTILGKAALKESIPGGFSDGRLTLAYGEYYLITSTEVQPIQSENQGRVVALDPGVRTFMTFFAESFYGWIGNDSNLLIQKLCFKLDRLISKITKAKSAQKRRFKKAADRLRSKVQHLVKELHHKTARFLTENFDVILLPSFESSQMVSKSRRKIKSKTVRQMLTLSHYQFKKHLEWKAWELGKVALTDINEAYTSKTVSWTGEIVKIGGSRIIKSKIDGRSMNRDLNGARGIFLRALVDTPWLRDHLNLCIC

SEQ ID NO: 922 - protein, 418 aa, unknown
  TnpB Polypeptide
MGSYEAVRVQLDPMPRQERRMVSHAGAARFAYNAGLAHVKEALESGESADWSHYGLRRWWNANKDELAVNRDTGVVWWDQNSKEAYSMGLRDLAQGFSNWSKSRKGQRKGKRVGFPKFKSKNTAMRFAYSTAFTAPSSGDPYGLKLPRIGRVHCMENVHERISGARLIRISVSRRAGCWYASLTVEREPTAKPAPKGGAVGVDLGVKNLATLSDGTVIPNPRALGTRLKALRKAQQALSRKVKGSARREKAKGRVARLHARVADVRADAIHKVTTMIAGNYSVVCIEDLNVAGMVKNRSLARSVSDAALGEFRRQLEYKTARTGAVLRVVDRWYPSSKTCSNCGVVKAKLSLSERTFNCDACGLSIDRDLNAAINIQVAGSAPETLNARGEGVRRGSPSGYVVLVPVKREPSRRIKAS

SEQ ID NO: 923 - protein, 292 aa, Streptomyces sp.
VAFAHRGTEWADRIQSNRAVAYRIHLDTAWGRWYLTASWQRPLVQSVPWESARAGGVIGVDTNADHFAAYRLDQHGNPVGEPHRFPYNLTGTTQHRDAQIRHALTRLLHWGRQTGVTGIAIEDLDFTAEKTREKHGRRKRFRQLISGIPTGKLKARLVSMAAEQGLAIIAVDPAYTSKWGGQHWQKPLTTPRRKMSRHDAAGIAIGRRALGHPIRRRTAPPPHDRRDRAGHRPAQAAPDAREREGTRPPATDHAPRGVPPSGTRKRQPSAPKTVRDAPRTHQWIQHPLMHTG

SEQ ID NO: 924 - protein, 335 aa, unknown
  TnpB Polypeptide
MQRNHLKSSLRPRKDFPKFKSRKRIDKESYFFAKEPITYITHNIIKIPILGKIHITQNYDLPNIEDVTSGRVIREYNKYYIMLVYEYNNKYLNVTENLLGIDLGLKNYCTIANSSYDIGTCIIKHFKNNPKYKKISDKIIKLQQIISHKVEVNYYRLLNKWLDNNPTKELSETYKNIMKGESYNSSQIRKLFKKIRVLKSKLNNIRYDFINKTVHMLTAITKPRCITVEDLNVMDMIKHNGTKDTKLHKAIQESSFFTFKTRLMMKCLEYGIKFRMVSQWYPSTKKCFICNHKFKDITLKDRVLYCPNCGLEIDRDINAAYNMLDVKDRYCEIVS

SEQ ID NO: 925 - protein, 441 aa, unknown
  TnpB Polypeptide
LAISGFINFPKPRLLRRGSRGYKYVCERIVGVRVRAYKFRAYSSKTTARVLETQLRVACKLYNTLLHTEEEEYKKNKHSMSRNELRQLALDLRKLNPEFQSLHSQVAQQVAERLYQARQRFFEGLANKPRVKKPHRYLSLVYPQSGWRLSNIRVVGQGGNKKKRARLYLSKIGFFTLVMHRDFPLERVCQVCIKLNPSGRIYVVFLVEEEASNQERAPVGGPRRAVAVDLGITRLATLSDGRFLNNPKPLERSLERIRLLQKGLSRRKKFSRNWFRAKRRLAKEHEYVKHFRRDLFFKLGALLATEYDILVLEDLNVLGLIQKGETRKRRLRLHDSAFSELRRALEWEFEKRGKAVLAVPAYNSSRECFQCGGINRDLTLGDRVFRCPHCGFTLDRDLNACLVLLNRAGWVPPAVPVCGASPNTSPPIPRVGAEGWAWWGC

SEQ ID NO: 926 - protein, 454 aa, unknown
  TnpB Polypeptide
VASEGSGELSKMRSGSRSTSAIPSLLEVKLGNRRTNVVRLLPNGFQGRRLLRLADASAKLFNELNYERRQQFFKAQKIDFKGTWAKYYEKYKEVLGVNAQGVTQKNNEAWSSFFSLLKLKREGRLPPHITHVSPPSYWKEHGERKRILVIRQDRYVVDDENRRLILKDFSMEVEFAGRFRWFGKQGRLEIVYDETTNKWYAHIPVEVGVETTKKGGVSKHIVHGERKSIQIASPKGNKAASIDLGINLLASVVVGDGTWLLYKGVRAKEDYFYFEKRIVEVQSLADKTKKLGEYDAYEELARERRRLSKKLRRRFLHVYRTLASALTERLHSLGVSTIYLGYPYRIGQDTGNKFTVNVWSYRKLMDAVELKAQEYGIKVYEVVEYNTSKYCAYHGVEVKRQPRGVSTCPAGHKLHSDLNGALNIAGKVTGGVVQAVGRPLSFVVDHNRPSSTRT

SEQ ID NO: 927 - protein, 153 aa, unknown
  TnpB Polypeptide
MISRSDWGSISRILIGKMGEAKVKELDPYGSSSYCSRCGWENKDLNGAVFECSRCGLRIDRQLNAAINLYMRLKFGYTTNWDGKKKRVELKMEGASQKEWWDNVVLPSLLGGCVLTGAERKTPDELARELHEVMKPKLYAYDRYADAYLRTLT

SEQ ID NO: 928 - protein, 417 aa, unknown
  TnpB Polypeptide
MQLCTKIKLEVSEQDAATLEFMQSKCRGLYNWWVMKLRDGEKWRFKDCKKTLAESRIHDPELDDVYGKLLAEVYYRLDAAMGAFFRRWKTGETPGFPRVRPRHTFFTLCYPAMYLEIEGNRLTLPTGGRGKNKRFPTMVVKLTDTPPADFGEVAISRDARGNYYASFTYKEKEKVAEHEEGQADYVAFDLGIKTLATGVNEQGRVYTVGGFKGHQWYNKQLDKIRSKRDRCKKKSRRYIHLSRVYKRVSEKKRNKRKDSLHKASHLIAHTLVERTVIVGDLSSRQMVTKQHVDRNKSLNRAVYNEWGVYTFTQMLEYKSDLYGKELVFLDERYTSKTCSGCGNRQDMPLWKRTYCCVECGLVMDRDINSAHNILTRFLAGQPPYTQAIECDVLQGARVDVGVTEMPQPCEVQQLGLW

SEQ ID NO: 929 - protein, 542 aa, unknown
  TnpB Polypeptide
MTAKLLSVKKESDRNFTTVERLLAFDKDEDKEKVLNLMRKFSSMVRFAYKRLLEKMERKELKNLLARKYGINTRYSDDAIFLAQQTLDSCLQRGQNPKKLVFGSRELFEKLKKKHLTGKRREKLRQKWEEKRYGFLYSRGDKSKGGNLNLRPVNLNNQWYLRINLGNGEYVWVKVVRSAKRKRDRWIDFVWDLTQAERTGNWFAYTVRLKLKNGKIYAQISKEEKFPEITITKENGVIGIDINAYPFHLALSWTSRDGNLEKYERISLNGLLDGNTDKREYLSWQIAHQVVEIAKREGKAIVVENLEKIPKGRRGDGMPKLRQKLQKWIYKGLLEKIEVVGKREGVQVIKVNPAYTSVIGKLKYAPIYRIDKDVAGAYVIARRGLGFEERLPKNYRELLKDKEFLAYAIAKVDERINELKSELKKEKSEYKRNALKGRVKRLKRYLKLLLFYTRDSGKSEPATQEPVNREMERVRGRAKSLQKSWRVLSVALAFSCLESFRDFSPLKRVLLLGDWVGVAGRVSPSLPGQGTTASNCSSIQFG

SEQ ID NO: 930 - protein, 251 aa, Verrucomicrobium sp.
MGAIGIDVNEDHLALAETDRSGNLVGIRRIGLNLYGKSEEQAKAAIGDACQEIAKTCVEAGKPLVIERLNLRKRRAELEAVDPVRARARSSFVYAKAIAMLKAASFRAGVEGIVVDPAYTSMIGAVNHARRHGIGSHQGAAYAVARRGLGLSERPSVREAVVPTRNGRLTLTFALPARNRTKQVWSFWAGVRKRLKAAHAAHARSGGNRLPPAPRLPKPRALGATWALPAKPRHANRRQRCSAGVVDNLPW

SEQ ID NO: 931 - protein, 522 aa, Bifidobacterium sp.
MKRAYPHTLNAVHDTKRGSLLALFPAFRTALKTVLAHEVRHLQQGGTLPRYVQLPKGARVAGLSARQMKTVGNMTRNALLSWQALLERAVRAIINGSTLTDRKRMVLHRVNTRHAWWANDLSLPWVENGDGGLRPCTMRTRNMLLLPVPAYLLKLSRRIVKHAITRTPIPDLSHVRTLVLDAIIAKPERPHAHTDTRFGWWIRVATLTKGKPVLIPVDRNEYFEQQYAHAIKHGGGLCGVIQLTRHDNGTLSCALVLDRPDAPMRMDGKPLGIDYGMADALMADSDGNLMGRAMLATLKRYDLRLTQLGAWLQRRHIKPSTNHEYRRLQHRIRAYVANEIGRILNRVAARHGAAKVRELIVERLDFRYGGMSPRMNRLITRIGRAVFKQRLAALTEKHGIAVCAVPAPYTSQECSGCGYVSPRNRPARARFTCRFCNKKQHADVNAARVIMSRRSWQQPDDTGPASRRNTLRMLDERFRQRWDTPAQGAVMDVAGAPCDIRTATTNGENAGSSSRCHELTHN

SEQ ID NO: 932 - protein, 461 aa, Micromonospora sp.
MALNAGKYAAVEQARRLGQVRNEVWQRYGSVGGVGSGLTDRQVRDRWLADGTHVRFGVLANAWKETVRDAMADIAANLAAAKVEVRRAITRRTNDPAERKRMFNALAVDRWAEDPFLARQMRKHWKRGRNRTHDQIVVRADQHNTATGGRGRLWLAVPGLQRRQMVRIPLSTTVAPAGTLRLILHGGRVEVHYQIDASQMRSSQRPCGGRTVGVDKGYTEALTDSDGARHGCGLGELLSSESDRLKERNRRRAKLRSIANSAAGRGDHAKAHRITANNLGTVKRERQAARHRARVRTEIFTAVHRVVDKAATVVAEDLTKTFAGRTTLGKNVNRRLAAWTKGVTAEALTNVSERRGSALVHVNAAYTSQACHRCGRLGPRNGDRLHCTPCGVVWQADVNAAINILQRAGDPDIALHTPHHVVRQILQDRTDRHRTRLPVQDSSPATAERRANYPNRSAMSK

SEQ ID NO: 933 - protein, 316 aa, unknown
  TnpB Polypeptide
MCSKDLTSLKKELIWLKEPDKYALQNCLKNLDAAYKKFFTEHTGYPKFKTKKNRYQSYRTNYCNNNICFINNKIKLPKLGYIKTRDKQIPQGRILNATISQEPNGHYYCSLCCTDIEFTSLPKTNSNVGIDLGIVDFAIMSDGNKISNPKFYEVSEKRLVKLQKELSRKTIGSSNWNKTRIKIAKLYKHIVNQRTDFLQKITTQLVKQYDIICIENLNVKAMKETDNKIRNKRVEDVSWFEFRRMLIYKCQWYDKTLSVINRYYPSSQICHCCGKSSGKKTENIRIWICPNCGAKLDRDINASINILNEGLRILNI

SEQ ID NO: 934 - protein, 409 aa, unknown
  TnpB Polypeptide
MVKKSYKMRIYPNNEQISMIDNNFIAAHRGWNYLLGFCKDIYGTIVVHGSSILVKQDLSKFSLGKIYTQLKKNTQSGYDTPIIPPSDSRIKSSISTSLSNSFKRFFQGTGGYPKFKSKKNIKYTYTTDYSSGSKKIIDKIKGNKIFIPKLKYVKFKNSYKVLIGDITSLTITKEGRKYLLSINCKNVPVNDLLKTGKEIGIDPNSKKLSFNNGVEKDNPKPDLTLQKRKKFLNKSLSRKNSKSRAFKKVKYTLQKFYRKIKHVREDYNNKLSTDIIKEYDIVAFEDTQNANVNKFLSGHWNDNGYYNLRKKLSYKAEWYGKEYHEVDPYNTTQRCSKCGHIGKIKVKIGKTYIIKDKVDKTVKMWVCPKCNSKHHRDINAAQNILDKALNRWTVGNSSLNLNSKRSLLA

SEQ ID NO: 935 - protein, 424 aa, Calothrix sp.
VLTLTYEYKANPTNEQIKLIEDTLDVCRQVWNFALRERKDWLNSRKSPINACSITSEYIIPADAPYPNYNTQAKSLTQAKKQYPKLKTVNAQVLQQVLRKLETAFIDMKRKGMGFPRFKNRYRMRSYVYPQLGEGQILKSNQIKLPQIGWVEYVKSREIPDGFVVKQVRVVRKASGYFLMFTLECNVDVPSPVAFGNPRGIDLGLDKFAATSDGELIERPRFLQMLHRKLKLLQRRLKKKHKGSNNRHKLNRKIARLHQRMDDTRKDWHFKLAHKLCDDAGMIFVEDIDFRVWAKGMFCKHTRDAGFGQFVSILQWVCWKRGVYFAKVDKDYTSQVCPQCDTHTGKKELKDRVHSCPECGYTTHRDVAAAQVIRNRGVNALGRSVDQIACGDGLTGTGNSLVKSPRNRKKGGEARQQSLPRNIL

SEQ ID NO: 936 - protein, 410 aa, Calothrix sp.
VLHKAVQVRLYPSKEQQILLAQTFGSARWWWNYALNKSIEVYKETGKGLGRSALNALLPELKKAENTAWLADCYSQVLQATTLNLTTAYKNFFDKRALFPKFKSKHGKQSIQYPQNVKIVDGNVKLPGNIGTVKAKIHRLVEGKIKTVTVSKTPSGKYFASILTELEGEAPVGAEGKIYGIDLGLKHFAVVTDGERVSKYDNPRHIAKHEKNLKRKQKKLARKQKGSNSRNRYRKVVAKVYERVSNSRQDFLHKLSYKLVSDSQAVIVENLHVLGMVRNHKLAKAISDCGWGTFTNFLAYKLERNGGKLVEIDRWFPSSKLCSNCFYQVNEMPLDVREWTCLHCGTHHDRDGNAAINIRAEGIRMLKAEGSSVSAVGGEVRPKLGRKSKLRHSPVSTEANTVLGTPSQCG

SEQ ID NO: 937 - protein, 411 aa, Calothrix sp.
MLVFEAKLEGTNEQYQSLDNAIRTARFVRNACLRYWMNNRDIGRYELSAYCAVLAADENFPWVDKLNSMARQASAERAWSAIARFFDNCKKNKPGKKGYPRFKKEQAHGSVEYKTSGWRLSNDRRYITFRDGFKAGAFKLWGTRDLHFYQLKQFKRVRVVRRADGYYCQFLIDQERIEKREPTGKTIGLDVGLKHFLTDSDGNTVENPRHLRKSEKSLKRLQRRFSKAKKGSKNRAKFRNKLARKHLKVSRQRKDFAVKLARCVVQSSDLVAYEDLKVRNMVRNKHLAKSISDAAWTQFRQWVEYFGKVFGVATVAVPPHHTSQNCSNCGEVVKKSLSTRTHVCPHCGHTQDRDWNAARNILELGLRTVGHTGTLALSVAEGLIASGDIDLCLGEVTPPSKPSRRKRKSKE

SEQ ID NO: 938 - protein, 389 aa, Calothrix sp.
VSYVQKAFKVTLIPTHNQEVLINKTIGCARFVYNRFLALRKNLYSTEKKALNYNACSQHLTLLKKEIEWLKEVDKFALQNSLKNLETAYKNFFADLKKVEGKKSVGFPKFKKKYGCKQSYKTNFTNGNIQVIENRLKLPKLGWVKFYKSQSITGKLINVTVTRTTSGKYIASILCETEIEKHPRVTQNIGLDLGIKSYLVTSDGEVVDNPKYYRTQKRKLRKAHKKLSRSVKGSSNRVKAKIKLARTYERITNLRDDFLHKLSTRLIKENSIICIEDLRVANMVKNHKLALSISDASWSKFVAMLEYKALWHDRMVQKVGTFYPSSQTCNHCGFINPLLKDLKLREWSCPNCSSDNLRDNNAALNILGEGLRLMSQCGGRVPQNKAPIA

SEQ ID NO: 939 - protein, 384 aa, Calothrix sp.
VYNRFTQYQKFNRSVSYFEQQNSLPAFKEVWTEYKEINSQALQATLKRVDFAFERWFKGLGKRPRFKSIRHYSGWTYPAKSGYSVESNGENGYLNLSKIGRIQMRGKAKYWGITTTCTIVYHNGKWYASITVDVLDQVLQTEILPTGAIGIDLGCKSALSITDGENHQQIQAPKFLRNAEQLIKKASKNKRRKQAPNRKKKIKASRRYKKAQSKVSKITRKVANQRQNWVHQVAADIVSGNSFVATENLQVIKMTSKAKKGKRKKQKAGLNKSILDVGFGMLRSTIKYKVEQIGGVFVEVPTKKVKPSQTCPKCGHQHKKTLDIRVHNCAVCGYSQDRDIAAAQVMLYWAKGTLPESGTGFAVAESPSSTTSTSKCKQADRCGN

SEQ ID NO: 940 - protein, 407 aa, Calothrix sp.
MQLVEKHIINKQHKFWQECDYLALQSKHLYNAANYVQRQYFFETKKYYNSIDIYNRTKNLAAYRYLPTKVSKQIVRRISETWKGWLAALTDWSKHPDKYLGQPKMPRYKHKELGRNVVIYPLDAISKPALIKGVVKLSQSHIQIPTQAKNIDQVRIVPKLNHYVIEVVYTVDERVKSTGKYSAGVDLGLNNLMAITSNHPGIKPLLINGSPLKSINQFFNKRVAKAQSINAMAQVKELWDKRDRRIDNYLHTSTRRVIDWCQLNDIGQLIIGKNSGWKQYINIGKKNNQEFTKIPHAKLISLLTYKAKLTGMTIVLTEESYTSKASALDGDELPVYNRKTNNKPVFSGQRIQRGLYKTSTGKFINADTNGSLNIARKVIPNFMDGIEGLPFIPVVLGLWTRITNVNV

SEQ ID NO: 941 - protein, 377 aa, Calothrix sp.
MACHSSLKFVLLTAIKTKLKLTSSQKMLMSKHAGISRFTYNWGLATWKALYQSGYQPNHLMLKKFFNNEVKPVLTWIKEQGICQKITEFAFENLGKAFKNFFENRADYPKLKIKGRNDSFTINASGRPINLGGKRIKLPTIGWVSTYESLPHTTTTKLTISRTAGDWYISIAYEIEPEITKKEHDYVGVDLGIKTLATLSTGVIFVNPKALKKATKKLTRLQRQLARKVRGSNRYKKQKLRISKLHRRITNIRKDATHKATTFICKNHAVVALEDLNTSGMLKNHKLALSLSDANFYEFRRQVEYKVVRYGGTVVFVDRFYPSSKTCSNCGAIQEISLSERVYVCQKCQHTADRDLNASQNLEKYARQALPCLDVEG

SEQ ID NO: 942 - protein, 480 aa, Calothrix sp.
LLLNYQYRIYPNTNQKLELNYWLRVCKYWYNKQLGDRFNWWENNRNSINACRLICSLPELRDHPNFYSQKKQLPILKEDLIKVVSSGELLDFTRVPSQTLQDVSKRVDLAFSRFIQGSQSRARVPRVEGTGVDSNGVRAGKPRFKNAARYRTMRIEGQAITIERIEKDWLFLSFSKLKGWIKVRLHRRLPDGFVLKNALLTNKADGWYITICLEDPSVPNFSPDNIIPTWDNTLGLDAVLHEDDYLATSYNNKLPSLKSFRKSEKRLARISNRKSAKKKGSKSRRKLAKKEARVHQRIARARIDHAFKTAHALIRTNKKVFLYEDLKLISLSKRNKAKQDENGKYLPNGQSAKSGLNKSWNDAAFGQFFTILEYIAGKAGARTIAVKPAYTSQLLAYRDEFIFTDRDIREYWDEFESLKVDRDVNAAINIKRVGLGLFPTIKRRKGNLVVTESTTNSTSKEVLETLKCTRSLQRSSSRCR

SEQ ID NO: 943 - protein, 419 aa, Calothrix sp.
MLLTYQFKLNPTPEQVIILETWGELLRRHWNYALGERLDWLMRTRSRIDRCSLVSEPIGEIPEKADYYTQASDLKRTKELFPDYKNIYADCQQQNLMRLDKAWKRWLTPDKKGKKGGKPRFKKRGDISSFTFPRVNSPKAGAHLVSNILKLSKIGEVEVILHRPIPDGFEIKQATILSKADGWYVSFSLEDKTVPDSLSVDEIKSATGIDVGLEKFLTTADGESIEVPQYYRKAQSKLARIQRQLARKVKGSKNYQKQSNKVARLHLHVARQRKEFHYHVAHWLVNSYDLIVFENLNIRGLARTRLAKSILDVAWSAFLQIMQAVAVKRGKLTLGVDPRGTSINCSSCGERVEKTLFIRVHSCSCGLVIDRDWNSALNLLKRGSVGLPISGCGGLDNSQPVKQQVSFVNLRCSRYIACN

SEQ ID NO: 944 - protein, 410 aa, Calothrix sp.
MIVYEFKVKGKEKQYRAIDEAIRASQFIQNKCLRYWMDSKDSKVDKYALNKYCAVLANLFPFADELNSMARQSAAERSWSAIARFYDNCKKKVKGKKGFPKFKKNCRSVEYKSTGWKLSLTRKAITFSDKKGIGTLKLKGTYDLNYYDIKLFKRVRLVRRADGYYAQFAIDVDVKVESQPTNQVVGIDLGLKYFIADNKGNVEPSPQFYRKSEKHLIRANRKKSKKFRSQKKKALLRQSNNYHKARNRYQRKHLKVSRQRKEYCKRLAYSVIQSNDLVAYEDLNVKGLVRNRHLAKSISDAGWYTFRQWLEYFGHKYGKVTVAVPPYNTSQNCSKCGQKVKKSLSTRTHVCPHCGYVEDRDINAAINILRLGLSTVGHTETYATGDLPSWAVGASLLSNGFSMNVESPHL

SEQ ID NO: 945 - protein, 406 aa, Calothrix sp.
MLKAVKVRLYPTTEQRESLARSFGCARWYWNYALNACIQNYEPTGKSLKMSVYKGLLPRLKLEYPWLKQDCYSSVLQCVAINLNKAYKNFFDGRAKFPQFKSKFDKQSIQYPQNVTVVDNNLKIPKIGEVKAVFHRVFKGIIKTVTISKTATDKYFASILVEVECSNDKLSRDKILGIDLGLKDFAIVHDGEGFTKYSHPKHLKCHQRNLSRKQKKFARKVKGSKSRHKHKKLVAKVHERVSNSRQDFLHKLSRKLVNESQIIVVENLHIKGMVRNRKLSKSISDVGWGMFINFLDYKLKDSFGQLVEIDRFFPSSKTCSCCGHVVDKLSLDIREWDCPKCKSHHDRDSNASQNIRTEGIRILSLDGGNPVLAELRRSKTKKPQGGKAFVDETGSPHPICTQMGVG

SEQ ID NO: 946 - protein, 162 aa, unknown
  TnpB Polypeptide
VKNDCDKYLSHRARLQRNGSCNAKSQAEKGDTSNTSTKMPARQSWKKPYKAAKDFTHFCERIKAGHKVRARLHQWPFRELQQMIVDKASRLGMRLMFVDPRYTSKTCSASGAIGKRKKHRFECHCGYRAHSDLNAGRNLHGLGYLLMTQGPDVNRPNAALRM

SEQ ID NO: 947 - protein, 526 aa, unknown
  TnpB Polypeptide
MKVFSMSQRIYYKDLEPEAESIIKKDLELYNCMLHKAFKICFDRAYKDVTYSETDQRMIKSFYGTSDYFPLSAIYEAKALVKSLKCLEKENQDMIKTRLKKINKKIKKNEKQLKKALKEKEKLINKSKKKKYTKEDYLYEVQELDPNIKRLKSIIRNLKFRRNRNEFKLKRKMPSVCFGGKKNLKNGDLETFRFRRQRRMLIPGRRQGKYSNNLFKLNVDTDMLTYRSTQKDIVFKVQFHKYKDELYARVNEKHNSPDKAVAYELMDYGEYFIVKAIFEKHMNLPKTDTLYGAIGIDINVDHIALCETNKDGNIVLIKKYPIHKENTKNKRNEELYQLAIEIMGYCKSKKKSLVVEDLNFKQLKTRMLYRPKKQNKTLSSFAYKKIIEKVERKCLMNEVDVIKVDPRNTSKIGKEKYTKIKGLSVHYCAAYVIAKRYGVDVTGFNLEYIAQRNECGKKDPQELRDFLNDVRQASYSIRNHIERNFGAKEQEYVTDEFAIGDPVKTPETKDEKASGKEKKAKNQPER

SEQ ID NO: 948 - protein, 329 aa, unknown
  TnpB Polypeptide
MAATTTSTMVLTYKYRLLPNRKQHQALRAIAEAQRQLYNAALQERIDCYRRTGKGRSYFDQSKALTELRQDQEFAALPRKIQHWTLRRLDDAYTGFFRRVRGRGKAGLPRYRSRTRWKSFGFSQFSGIRFDGKRLRFKGLPGGLRVHMHRTLPEGSQIKSCMFRRDPKGWYVCFNCALPPAANNGKPGDIGIHAGLNNFAVLSTGEIIPDPDIIRRHERALRRRQRALARCRKTSRRRDKVSASVARAHQKVKNTRRTFLHQLSARLTSSYGTILVDDLKTWSLVKSRIAKSTNHDDAWGTFITMLEYKAARAGAHVIKIDPENTSRTF

SEQ ID NO: 949 - protein, 394 aa, Microbispora sp.
VRRSYKFLLRPTSKQSAALVAFLEDHRQLYNAALEHRRTASRKAGVTVRYGDQSGELKHIRADDPEGQGRWSFSSQQATLRRLDKAFAAFFKRVREGRTPGYPRFKARGWFDTVEWPKDGDGCRWDCQPEHPAATYVRLQGIGHVRVHQHRPVRGRAKTISVKREGDRWYLILSCDDVPAQPQPATGPVVGLDMGVASLVTTSHGEHLANPRHLEASADRLAAAQQGLARKKRGSKRRRNAVARVAALHAKVRRQRLDSAHKAALAVVRGYDVIVHEDLRIANMTRSASGTIERPGRNVAQKSGLNRSILDAGWGVFLRVLAHKAESAGRELIAVNPANTSRTCARCGHCAAENRLTQAEFACTACGHTAHADVNAAKNILRAGLALRDAAEAA

SEQ ID NO: 950 - protein, 413 aa, Lentzea sp.
MDRDGSNTLRIVRTAYKCRAYPNPEQAAVLSRTFGCVRVVWNKTLNERHRRYREDGAQTSYRATDAALTQWKRTEELMFLSEVSCVPLQQALRHQHAAFQNFFAGRARRPRFKPRTGRQSAHYTRSAFRMREGALKLAKTNAPLRFAWSFGDVDVAGLDPTMVVISREPHGRWYVTFAVETTAPVPAEATVSAVGVDLGLTTFLVMSDGQRIANPRHLSRKGRNLARYQRRLARCRPGSNNRYKAKRKVARAHRKVRNARKDFLHRTTTALVRSAELVAIEDLSIKNMVRNRRLSRAISDAGWGEFRRQLEYKCERAGRTLIVVNRWYPSSKTCSTCGHLLAELKLSTRHWTCPGCRARHDRDLNAAKNILAAGQAVARANAGDACGADVRRQGTPLPQSAMKQETRVVRRNA

SEQ ID NO: 951 - protein, 254 aa, Crocosphaera sp.
VRRADGYYVQFCIRVDIRDYAKPLEPTKHCTGIDVGLKVFFADSDGKTIEIPQYYRKAEKHLNRLNRRKSKKFIRGKKQSNNYQKARKRYALKHLRVSRQRKGFVEREALRVIQSNDLVAYEDLNVKGMVKNQRLAKSINDAAWATFRQWLEYFGFKYGKVTIAVPPHNTSQNCSNCGEKVQKTLSTRTHICSHCGYIEDRDINAAINILKKGLSTLGHSGSKAWGDLPSSLVGEILPGYGESVNQESPVTASA

SEQ ID NO: 952 - protein, 378 aa, unknown
  TnpB Polypeptide
MNRAFKYRLYPTTEQRELFIKTFGCCRKVYNLMLAEKIESYEQTGKFVTVTPAKYKKAYPYLKEVDSLALANKQLDLQKAFKNHFDKNRKKKTGFPKFKSAKHSRKSYTTNNQGTTIRLFDNGIRLPKAGIVKAKIHRQPEPDWIIKSATVSQDSDGKFYVSILFEYEAPACTYVPDTVNAIGLDYASNGLYVDDNGNVGTEYKYYRESHEKLAKAQRKLSRMVGSHKGETKSKNYMKQLQKVNKIQRHIANQRLDNLHKISTEIANQYDVVCVETLNMRAMSNKGFGNGKATMDNGNGMFLTMLEYKLSERGKIFVKVSKWYPSSQLCHRCGTIHPEMKDIHNRTMRCSCGLVMDRDHNAAINIKREGLRLLMSSAA

SEQ ID NO: 953 - protein, 368 aa, Chloroflexia sp.
MKVIAQLKLIPTSEQVTALQQTLEQANAACNEISRVAWEQQTFGTFALQALVYARIRAEYGLGAQLAIRCLAKVGDSYKVARQRQRTYAKHGAIAFDDRILSFKLTKQTVSLWTVQGRFNDITFVCGARQQHLLQARQGQSDLVYRKGCFYLLVTCNVDAPPPEEVDDALGVDLGIVNLATDSDGESYSGAQVEKSRQRYAKRRSALQSVGTKSAKRRLKARSGRQRRFQSNINHIISKRLVAKAKGSARGIALEDLTHIRERITVRQTQRARQHNWAFGQLRSFVQYKAALAGVRVVVVDPRDTSRTCHMCGYCDTRNRQSQALFRCVSCGHTASADVNAALNIRDRAGVMLPMVSDLRVQGQAALL

SEQ ID NO: 954 - protein, 416 aa, unknown
  TnpB Polypeptide
MALQNKTYQYRIYPNSEQQQLFSKMFGCSRFVWNFFLNKEKEHFLKNKEKIEEERTKNYLSYYDNAKALTLLKQEPETKFLKVANSQSLQTALKNLEIAYKRFFKKQSGFPNFKKKFGKQSICIPQSLSIENGMLNIPKFKTGIKIKQHRPIKGRITTSTITKTPTNKYFVSISVEENIHNLPKINNAVGVDLGIKSFAFLSNGEEISNPKYLVKHSNQLKKHQQHLSRKLKGSNRRNKQKLKVAKIHERITNLRKDFQHKLSSKLVHENQVICIEDLSVKNMLKNHKLAKAIQDSSWSSFVNLLEYKCKWYGRTLIKVDRFFPSSKTCSDCGYINQNLKLKDRDWICKGCGVVNQRDWNASKNILKQGLNLVDRSFGTNDYEHGGNVKPSANLEISDEVLKFLETNSLEAHRLVL

SEQ ID NO: 955 - protein, 427 aa, Escherichia sp.
MHQENTMLPRRISVSLFIDQSIIWPVKRLQAFKFQLRPGGQQEREMRRFAGACRFVFNHALALQNENHEAGNKYIPYGKMASWLVEWKNATETQWLKDSPSQPLQQSLKDLERAYKNFFRKRAAFPRFKKRGQNDAFRYPQGVKLDQENSRIFLPKLGWMRYRNSRQVTGVVKNVTVSQSCGKWYISIQTESEVSTPVHPSASMVGLDAGVAKLATLSDGTVFEPVNSFQKNQKTLARLQRQLSRKVKFSNNWQKQKRKIQRLHSRIAYIRRDYLHKVTTTVSKNHAMIVIEDLKVSNMSKSAAGTVSQPGRNVRAKSGLNRSILDQGWYEMRRQLAYKQLWRGGQVLAVPPAYTSQRCACCGHTAKENRLSQSKFRCQVCGYTANADVNGARNILAAGHAVLACGGMVQSGRPLKQEPTEMIQATA

SEQ ID NO: 956 - protein, 417 aa, Halobacteriales sp.
MANQVTRTYVASIRNYQQVRVGLDSLGFAASKLWNVARWTCDRIWDETGTIPDHGTLKAYLKSHERYADLNAQSSQAILEELAEAFDSWYAHRENGNENANPPGYRKHGDDHPRSTVTFKEDGFKHDPKHNRIRLSKGRNLKDGRSDFILCEYAANPDVDVQNVQQVRAVRNGKKWELHIVCRVEIENAAAPGDRVAGIDLGICNFAAVAVGDEALLYPGGALKEDDYYFQKKRAKCDDSDSQKARRLDRKRDERRTHFLHAVSTDIVAECAARNVGMIAVGDLSGIREDTDWGDHGNLDLHGWAFDRFTEMLEYKAAERGITVERVDERDTSKSCACCETTDDSQRVERGLYVCDDCGLAANADVNGAENIRQKVLPSLACDGGDRDNGWMAQPAVRLFDKSTGQVRPQEQVCREP

SEQ ID NO: 957 - protein, 461 aa, unknown
  TnpB Polypeptide
LITIKLKYKTDEESSTRIKEYRRQYSSVFKVYFNRLQEKMPSKEILHLELNNTELVSSPFKNSALIEARNLLKILESKNLDKNHLIFGGRKSFLDRIKGKISKEELQKRRFQRLCCVGQCAARGNAMFSIQEDFNILFKPTRKEHIILEVLDSQKKRYSRELKAIYIKSFLEKKYPITYHLDNEFVYLSFDETILKNEKKELECIPNRVMSLDLNPNYIGWSIVDWKSSSEFKVVKSGIYNFKSLNDKEKELKDLKLDSSHSKRKHLSNKRRTEIFEVSKNLINKALYYKCQIFSIEDLNIKTKNSGLGKSLNKLINNQWIRTDLVSNLEKRCNIFGIKFLKVKPEYSSFIGNFLYRSLNLPDMVLSSIEIGRRAFEFYNQYITKKIEIRKNIVRPSLVDFRGLYLKSLEEFELQPVYKDLIELYYFFKKSKMLYRLSLDKFCLEFSRCFSTKSQLSSILL

SEQ ID NO: 958 - protein, 419 aa, unknown
  TnpB Polypeptide
MNLVESHIIKPSHKDYQELDHLLFLSKNLYNIGLYEVRQHFFKAKDDPNIKYKYLNYYGLNALLKGKEDENYRALPANTSQEVLKLINQNFCSFFKSLSMKRERLMTNKISIPKYLDSIKGRQILIYNQMTIGKVLLKKGIIQLPKTNIQIKTKHPESLRQVRVIPKNGFIVIEVVYRVQEKELLKDNSRYLSIDLGINNLATCSSNIIEPFIIDGRRIKSINQFYNKHKAKLQSFLEKNKFTSKRIQHLTNKRNFKIQHYLHKTSKYIVNQAVSNQLNTIVIGYNKGWKQETKLSKKVKQNFVQIPFEKLISLISYKARLQGIQVFLQEESYTSQVSFLEGDYIPTFSKDDIKKRPSGKRIKRGLYSSPKGLLNADVNGSLNILRKFLSSNNEDFNSPVDKSHVDRPVRIKNPQRIKL

SEQ ID NO: 959 - protein, 421 aa, unknown
  TnpB Polypeptide
LNVVESHIIKPSHKDYKELDNLLFLSKNLYNLGLYEVRQHFFKAKEDPSIKYKYLNYFALNALLKGREDENYRALPANVAQEVLKLINQNFCCFFKTLSLKRQKITTYPNRVSIPKYLDKEKGRQVLTYNGITISANWLKKGIIQLPKTKIQIKTKHPESLRQVRVVPKNNYIVIEVIYEIQEKELLKDNSRYLSIDLGINNLSTCSSNVISPFIIDGRRIKSINQFYNKHKAELQSSLKKNKRTSKRIQHLTNKRNFKILNYLHKASKFIVNQAVLHSLNTIVIGYNKGWKQETNLGKKTNQNFVQIPFEKLVQLISYKAKLQGIQVFLQEESYTSQVSFIEGDYIPTFGKDDLKKNPSGKRIKRGLYSSPKGLLNADVNGSLNILRKFLASNNEDFNSPVGKSHVDWPVRIKNPQRIKL

SEQ ID NO: 960 - protein, 424 aa, unknown
  TnpB Polypeptide
LRLVQQHIIKPSHKDYQELDHLLFLAKNLYNKALYEVRQYYFQTKDEPSIKYKYLNYYALDKLLKEKNDVDYRALPTNNSQEVLKLVNQNFCAFFKLLSMKRERISSYPNRVQIPKYLDSIKGRQVLVYNKTQLSQIFLKQGIFKIPKTNIKIKLNCSDKLSQIRIVPKNSYISIEVIYEVQEKEILKDNSKYLSIDLGINNLATCSSNVIEPFIIDGKRVKSINQFYNKHKAQLQSSLEKNKFTSKRIQHLTNKRNFKILNYLHKASKYIVNQAVLHSLNTIVIGYNKGWKQETKLSKKVKQNFVQIPFEKLVQLISYKARLQGIQVFLQEESYTSQASFLEGDYIPTFGKSKEIKSFSGKRINRGLYSSYKNLINADVNGSLNILRKFLASNSEDYLNINSPANKSHVDWPVRIYNPQKIKL

SEQ ID NO: 961 - protein, 419 aa, unknown
  TnpB Polypeptide
MNVVESHIIKPRHKDYKELDHLLFLSKNLYNTGLYEVRQHFFKAKEDSSVKYKYLNYYALNALLKGREDENYRALPANTSQEILKLINQNFCSFFKALSMKRERLMTNKVSIPKYLDSIKGRQVLIYNQMTIGKVLLKKGIIQLPKTKIQIKTKHPESLRQVRIVPKNGFIIIEVIYEVQERELLKDNSRYLSIDLGINNLATCSSNVIEPFIIDGRRIKSINQFYNKHKAELQSSLEKNKKFSKRIQHLTNKRNFKILNYLHKASKFIVNQAVLHSLNTIVIGYNKGWKQETKLSKKVKQNFVQIPFEKLVQLISYKAKLQGIQVFLQEESYTSQVSFLEGDYIPIFGKDDSKKNPSGKRIKRGLYSSPKGLLNADVNGSLNILRKFLASNNKDFNSPVGKSHVDWPVRIKNPQRIKL

SEQ ID NO: 962 - protein, 313 aa, Halostagnicola sp.
LNPEQEDWWHSLIDEDDDSVWAGEIRLQRDGSHWVLHVTANYEVEPDHSCSYESDDGTSVGFDVGESKLLVGCALRDNTPVDPLVVDGGRVRHLRQKQASAEDRLKPRYASNLLDDLVWGRWQDAIEDEIEKTSTRAVEYTTQFENPVIVLEYLDGITDEDIGKYWNRRLGKWLFSRLQSRIEDKAAERGIPVEYVYPHHTSKTCHACQYIGYRPHQGTFKCTNEACWMSRYQADLNAAANIANRLNPWGESLPWKPAGDDSPQSGGQWQAHEDTSPSEELLSEKQASDDKVPSNSPAVGAGAEPETSDAHTS

SEQ ID NO: 963 - protein, 422 aa, Methanofollis sp.
MKAEPPFWYDPNYYDKLYFIIIHNTARMLQAYKYRMYPSPEQITLLMKHIHACRFVYNHSLEQKIRAYEQEGRKLSCFDLNTRLPALKEEHPWLKEVNAQSLQSSHKNLDNAFTRFFREKKGFPRFKSKKNPVQSFQVPQHYRVDFDLGKIRFPKIGEVKTVFHRVFTGKMKYATVSVTSTWKWFVSILVDDGKPEPEPAPFSLDTTIGIDVGLKDFATLSMGEKIENPRYLKNSLARLKVLQRRVSRKVKGSKNRAKAIQNLARCHERIANQRNDFLHKLSFRVVSENQAIAVESLNVGGMMKNHHLAQGIGDVSWSSFFAMLEYKCQKYGKTLLKIGRFDPSSKICNNCGYLKRDLALSEREWVCPDCGTYHDRDINAANNIKTFALQEQNLFGVSGAERAAEPVDSPQKRENEAGSPAL

SEQ ID NO: 964 - protein, 388 aa, Methanofollis sp.
VLTTKTIILKMDCSDPDPLDQTVQTYTDGMNYVSAVVYNLGKPKGSAALQKIVYSALREEIGLKSQMSCNVVRQVTGTYRTLQEQVRAKKTVWQQIMYAPTSMTFSFGRDFSLDGDEIGLTTLEGRRRYRFFRYPHMEQYLDGTWKFGASKLVKHHDGTYYFHLCCERETETREVTKSSTFMGVDIGQNFLAVASTTDRKCRFFCGGKAKDLRNIYSTMRKRLQSKGTRSAKRMLKHLSGRERRLMTDMNHRVSKEIVSFAVQNNVDVIGLEDLSGIRDRTQTSKKQRYTHHSWAFFELQTFIEYKAREKGISTIYLDPAYTSQTCPRCNHISKNNRNGRSFVCECCGHSLHADLIGAQNIESRARTYRYTLEVQGCGQPPIRELSIR

SEQ ID NO: 965 - protein, 364 aa, Methanofollis sp.
VPKAYRYRLSPAKSQVTLLEQTLETCRWVYNETLAMRKNAWEQEQRSISYYESKRQIPLWKKERPELSTVYSQVLQDVSMRVDLAFKAFFRRVKAGEKEPGFPRFKGRGRYDSFTYPQYGFKIDGNTLTLSKIGDLRVVLHRPIEGTIKTLTIRRSATRKWYACFAVEYEPSPVPQKETTVGIDVGLESFATFSNGEKIENPRFFRTDEKALAKAQRKLSKAEKGTPERKKARKIVAHIHERIANRRLNFAHQTSRQLVDRFGTIVFEDLNVKNMQKNHYLARSIADVAWNMFITITGSKAEEAGSRVILVNPRNTSQMCSRCGMIVAKTLSDRVHSCPHCGLVMDRDQNAAINIMRLGLQSQG

SEQ ID NO: 966 - protein, 366 aa, Methanofollis sp.
MLRAYRYRIYPTKSQVTLLEQTLEICRWVYNDTLALRKDAWEQEQRSIPLFETNKILTQWKRERPELKQVYAQTLQNVQVRVDLAFKAFFRRAKAGENPGYPRFKGKGRYDSFTYPQGQKGGFKLNGDHLHLSKIGDVKIVLHRPVEGTIKTLTVRRSSTGKWYACFSVEYDPTPAPQKETVVGIDVGLESFATLSNGEKIENPRFFRTDEKALAKAQRKLSKLEKGTPERKKARKIVAHVHERIANRRLNFAHQTSRQLVDRFGTIVFEDLNITHMQKNHHLAKSIADVAWNLFITITESKAEDAGSRVILVNPRNTSQICSRCGMIVAKTLSDRVHSCPHCGLVMDRDQNAAINIMRLGLQSQG

SEQ ID NO: 967 - protein, 247 aa, Methanofollis sp.
MRVDLAFKAYFRRVKAGESPGYPRFKGKGRYDSITYPQYGFKLDGDRLHLSKIGDVRIVLHRPVEGTIKTLTIRRSATGKWYACFSVEYDPTPAPQKETTVGIDVGLESFATLSSGEKIQNPRFFRTDEKALAKAQRKLSKAEKGTPERKKARKIVAHVHERIANRRLNFAHQISRQLVDRFGTIVFEDLNVKNMQKNHYLAKSIADVAWNMFITITESKAEDAGSRVILVNPRNTSQMCSRCGMIG

SEQ ID NO: 968 - protein, 382 aa, unknown
  TnpB Polypeptide
MEKLMKGYIFRLYTNKKQKELIEKSFGCSRYIYNYFLEKNKYYINAYESIKELPKLVKENSWLNEVDSCLLRYAIFNLEDSFKRYSKNLSNYPKFKSKTKTRASYKTNNISNTYKGKIYNSISIDLESKLIKLPKLKEVKIRGYRNLKEINGRIINATIYKEANKYYVSICIEQFITIPKIVPTKIIGIDLGIKDLLITSDGYTIENKHKIEKYEKKIKGLNRWLSRSKVGSKNRYKIIKKLQTVYKKLKNARKYFLHSISNKIIKENDIIVTEKLKINEMVQNKHLSKKIYDASWYEIIRQLEYKSKWNNKQFYQIDTYYPSSQICSRCGYREKDIKDLSIRKWECRSCTNINERDINASINIMFEGIKKYMKGINELKVI

SEQ ID NO: 969 - protein, 532 aa, unknown
  TnpB Polypeptide
MIVALRTTAQAARVAELTGGTLLYDDQGKPTSKVALDDFDAHLKAVESVSVLFRCFDDDGTEVPSGWVLTGATFEVEWPREPERRSLIWSHFGARRFAKNWALAQVKADLDARKKDPSHASVPWTLEGLRKRWNEMKGEVAPWWAENSKECYSAGIADAVAALHNWSKSKRGKRKGRRVGLPHFESRRRAQNRVRFTTGAMRLEPDRRHLTLPVIGILRSKENTRRVQRHVAKSDARILSMTLSERWGRLFVSIQYALRTKVVSPTAAAPARPDARAGVDLGLRVLATVADTDGNILVVPNPAPLRAALAERRKVGRQLSRRIPGSRGHRRAKAKLARLDRRCVHLRREATHQLTRRLVGTYGEIVIEDLDIAAMKRSMGRRAFRRSVSDAGLGAIRSALVYKAKWRRTCLIVADRFFASSKFHHGCGGALMGPKLAKHLTCEVCHTVVDRDVNAAKNIRDWPDHANPGSVGASAPFDPGPLSGGTDGGPDGRLTDHRARRHKTNVVLAAVGEARTDARASEQRNPAMGESV

SEQ ID NO: 970 - protein, 319 aa, unknown
  TnpB Polypeptide
MITRTYKYRLYLTKTQETLFNSQLSSCRWLYNHFLEERRNAYKKDKKRISCFDQIKEIPKLKKERPELNKIYSQVLQDVARRVDKSFQNFFRRVKENKRGRKQKPGYPRFKGKYRYSSFVYPQSGFELRTNQKKPKNSKLYLSKIGTIKLRYHRPIEKLAMIKTCTIIRKIDKWYACFTVKINKEVKEKKKIEDIMIKNMVGIDAGLNNFLATSKKEIIDNPRYLRKSEEKLSRSQRKHSRKKLKSKNRSRSRLKVARIHEKIANQRLDLFHKLSNKLVNNFQFIAFENLNIKGMVKNKYLAKSISDVSYKKIPFNACL

SEQ ID NO: 971 - protein, 408 aa, Streptomyces sp.
VQLRYSYRAYPGASRRAALARAFGCVRVVWNDCLRDRREAHAAGLPYVSSAELSRRRITQAKRTEARAWLADVSAVVLQQSPRDLDAAYRNFFDSRKGKRRGPEVSPPRFKSKKDSAQSIRLTTNAFSLRENGTVYVAKVGDIRVKWSRRLPVAPTSLTVTKDASGRYFMSFVVDTDPDMLPELDAEVGIDLGLATFAVLSDGTRISSPKFLRRAEKKLKRLQKDLSRKAKGSKNRAKARIRVAQQHARVADRRRDWHHKASTRIIRANQAVYVEDLAVSGLARTKLAKSVHDAGWSAFVAMLEYKAQRHGRYFGRIGRFEPTSQVCSTCGIKDGPKPLSVREWTCKGCGTVHDRDDNASKNTLAAGRADRLNASQSAGKTRARVPAPRVEAGSHRDGQSAVAGIPGL

SEQ ID NO: 972 - protein, 386 aa, Mastigocladus sp.
MRAMLVFEAKLSGQSEQYRKLDEAIRTARFVRNSCVRYWMDNKDIGRYELSAYCAVLAQQFEFAKNLNSMARQASAERAWSSIARFYDNCKKNKPGKKGYPKFKRRQTHGCVEYKTSGWKLSDDRRYITFSDGFDAGTFKMWGTRDLHFYQMKQIKRVRVVRRADGYYVQFCIDTERREKREPTFKTVGIDVGLNHFYTDSDGKTVPNPRHLRKSEKSLKRLSRRMSKTQKGSKNRAKFRNKLARKHLKVSRQRKDFAVKTARCVVKSNDLVAYEDLKVRNMVQNRHLAKSISDAAWTQFRQWVEYYGKVFGVVTVAVPPQYTSQNCSNCGKVVKKTLSTRTHTCSKCGHVQDRDHNAARNILEKGLSTVGHIGTNASGDIDLCKE

SEQ ID NO: 973 - protein, 379 aa, Bacillus sp.
MIVNKAYKFRIYPTEEQAVLMNKTIGCSRFVFNHFLSLWNDSYKQTGKGLSYNKCSKQLTQLKKDITWLKEPDSVALQSSLEHLSDAFERFFKKQNDVPRFKSKKNKVQSYKTKHTNGNIAIVEHTIKLPKLGLVKFAKIREVEGRILSATIRRNPSGKYFVSILTETEVKELPKTNSSVGIDVGLKDFAVLSTGEVFSNPRFFRTLEQRLVKAQRIMSRRKKGGSNWNKARIRVARLHEKITHARKDYLDKLSTCIVKNHDIIGIEDLQVSNMLKKRSLSKAISEASWSEFRHMLEYKAEWYGKQVVVVSKTFASSQLCSACGHQHKEVKSLALRQWNCPSCGTHHDRDINAAINLKKEALRMLKLDALSEASAACTT

SEQ ID NO: 974 - protein, 439 aa, unknown
  TnpB Polypeptide
METSLAAQGHKPLVADPGEGTGRAQGEVIELQAFRYELRPNAGQRVLLAKHAGTARFAWNWALAERIRRCRENEGQARFTNAVEQHRELNARKASEFPWMYEVSKCAPQEALRDLDRAFRNFVRARKAGRYCGFPRLKRKGIDDAFRLTGSIRVIGGGVELPRLGVIRSKEGTEKFRGRILSATVRRDADRWYVSLTVELERTAPEPVVGPVVGVDLGLNSFALISDGEWEEAIEGPKPLGRQLRLLRRRSKRHSRKVRGSRNRARAAVGLARRHRRIRNVRTDFLHKLSTTLARTKSVVVIEDLNVRGMIRNHRMARHIADAGWSSFRRMLEYKAHWYGAKLVVAPRFLPSSKMCSDCGHVLDALALSVRMWTCPACGVEHDRDANAARSLVAWYRLTTGSSPGSHACGEPSGGAEAYAVASHGSTKQESAGGHLSIG

SEQ ID NO: 975 - protein, 398 aa, Desulfuromonadales sp.
MCRYASKRDTITAGERLLTSWVKKVIVDMRKTFQYRIYPTRKQNIKLLHVLGVCRRLYNDSLHDRQAAYGDCHCGLSYYDQQNWLKYTDYQGVYGHILQNVLRRVDISFQNFFRRVKNGEKPGYPRFQGRHRYDSFTYPDPYRKGYRIEDGKLHLSKIGAIRIFLHREIEGDIKTCTIKRDGDHWYATFSAEVPDPPPKASRTSVGVDVGITKLATLSDGTEIENPKILDKYDSKLRKAQKDLSRKKKGSNNRNKQRLNVVRIHRKIRNARKDYMHKTSRILADTYDIIVFEDLRIKNMVKNHHLARSIHDASWNMLINFTTYKAEEAGGSVELVNPRNTSKQCSVCGNIQPMPLSQRTYRCPDCGNVMDRDHNAAINIKNRHVPTDCGELTPAEMVA

SEQ ID NO: 976 - protein, 204 aa, Salmonella sp.
IPAIEAQLHREITGTLKSITITRSATGKYYAALLCDDGIEAPAKPTLVSTITGLDMGLSHYAIKSDGDKVANPRYLINASRNLRRKQKALSRKKKGSANLRKARIHLAGVHERVANARADFQHKLSRTIVDENQAVIVETLKSANMMKNHHLARAIGDAGWSGFISKLEYKAAEKGVHVVKLDQWFASSRKPVTAVVTKCRKCR

SEQ ID NO: 977 - protein, 425 aa, unknown
  TnpB Polypeptide
MIRVFNVRIYPNTTQRTQIHKTIGCSRFIYNRMLSERKEVYERFRNNKDALKKHSYKTEKQYKLEFPFLKEADSIALQASREHLYEAYQNFFKGLRKGRKIGFPKFKSKKGKESYTTKQTNKNIKIDFERKNLKLPKLGWLRFNDNRVFSEEIKHATIKKTKSNKYFVSLTLRAQEDVKELQKIHEKNITAFDMSANNFLVNDLAKMENPHFYRLEQKKTKKLNKELSRKKKGSKNREKARLKLARHYEKIYNRKKDWTHKLTRKLADKFDAIILENLNLKGIQKFKSGLSKSVSLDFSWHQFTTYLKYKLKWSGKYLIFVDRFFASSKLCSCCGWKNNNLTLRERVWTCLNCGNTHDRDENASVNLRNEGVRILKEEKSITIIHDDTSTVGTTGSQAFGDDVSPKEILQDLFRQFSRKKESITL

SEQ ID NO: 978 - protein, 372 aa, Methylobacter sp.
VKSIAYKYRFYPSDEQARLLAQTFGCVRKVYNEILRWRTDAYYQAEEKIGYAKASAKLTEIKKLPELSYLNGVSCVPLQQCLRHQQTAFKNFFDGRARYPVFKKKNRRQSAEFTKSGFKYVDGKIYIAKSKEPLDIRWSRNFQGEPSSITVSKDCAGRYFISCLCEFENQILPETDKTVGIDVGIKHLFVTDNGTKIDNPRHTVKYASKLAKAQRKLSKKKLGSANRAKAKMKVARIHAKISDCRLDNLHKLSRELINDNQVVCVESLRVKNMVKNPKLSKHIADASWGTFVLQIEYKADWAGRTLVKIDQFFPSSKRCSCCGYILPRLDLSVREWVCPECKTEHDRDINAAKNIRTAGLAGLAFGENVIPA

SEQ ID NO: 979 - protein, 551 aa, Streptomyces sp.
MTDTTDQPVRVTGEDAKRIKRDALGIADRKKHHGRASTAMSSRAKQPGTQQRVYRYRFYPTPAQAGHLEKTFGACRWVYNEGLALRVGAWERHRVSVGFAESCRALTGWRQASETGWLREVSSTVLQQSLRHLDAAFTRFFKQSAKYPQRKRKHRSRDSATYVRTGFRWVEDPELPGTGRLTLAKQSEPLDVRWSRPLPRGVDPVKLSVTRDRAGRYFVSVLVEERIEPLPPVFVPGGREPRAVGIDLGLASLVTLDDGTKVDHPRLLRKYEKKLARSQRGLHRKKKGSANRAKARESIARLYALISDVRRDMLDQLTTRLVRENQVLVVEDLALTNLVRPVRGKGRRRKAGLSRSIMDAAWGELLRQLRYKCAWYGRTLVIVDRFFPSTRRCSDCHTKGPSLDLSVREWTCAECGTVHDRDVNAARNLRDEGMRLYRLVTSALPPGRVPPPCDQGVGAVRRAAGCVTKSGTDRRAVGRDACGAHVGPGGCAPQGCARSAAGAEAGSAATGTEPKSRGSAQEQHTVKSALLWRRRRIFHDLRTTDIFENAR

SEQ ID NO: 980 - protein, 348 aa, unknown
  TnpB Polypeptide
MALTNLAYRGFEVWVPDLPLTIQHQLYSSFKNFKGSLVFGNKPKGWFARVWVPLKTFRVYPDGSRKGDSDAPVVLDFRSSVIRLRQVCRNEPRYVVIIPMPKWVIERVREGGDIKFARIGLKDNEPYLALIAEHEVEPYTPSGYILAVDVNSWRYGIAWGLVRGGRLVTWRTEGLNTFLINTLYHQAVDRERVVGKLRRVGYEDSLKASRVREQVKSRRSRIYRITRDKAYFLANKLVRKALKYKALLVIDDMTEESRKELLEEKLPSDVIKLLMSNLKRFVHQLETLAQWYGVPYEFRRLPSTVCPVCGSKLVQEDDRVMVCGNCGFKAPRDMVPMYWAIKLNSLEK

SEQ ID NO: 981 - protein, 548 aa, Xylanimicrobium sp.
LLIEARTHAQAAAIARVSGGVRLTRVTGDGEVKETRQVRVPDFEAVSAQVEAVTLMFRLYDETPDGLVQVGNGWSFRGYKFEVAWPQEAERRDLIRGHFGACRKAYNVALGWVKDDLDARAKDPKHESTPWRMDALRLRWNTQKNQVAPWWAEYSKEAYAAGIADLATALKNWSASKHGTRKGRRVGFPRFKSKRTARKSVRFTTGVMRLGEDRRTIVLPRIGALRSKENTRALQRRLAKGDARILSMTLSEHAGRLFVSVQAAVRATPVVAPAYPDATAGVDVGMRTLATASDSLGHTVEFENPRAYKAALVELRREQRKLARRLPGSRGYERSKAKTARLHERVSNIRRAHHHQVATWLVGTYGHVVIEDLAVSAMMQSLNRRFRRCVADAGMGGLLALIALKADKTGTQVTRADRWFPSSQIHHGCGCILTDPHPSFRGARPVKMSKALVCIRTGELVDRDVNAAHNLRDWPEGNPSVLAQLEPAPRPVAVTAPAATVGGPEKVTNPDLVSARKSVTKKPAPSAGRAAVRRDEARTDPNLAAPAA

SEQ ID NO: 982 - protein, 352 aa, Streptomyces sp.
MPDHGSETDSGTGLAGRGVSRRPPAVSAGRRGRLQELLRLPQGTRKGPKLGPPRFKSRKDARQSIRFTANAGWSITDAGRLNLPKIGAVKVKWSRTLPAAPTSVTVIKDAAGRHFASFVIDTYPAADQARMPETDRTIGIDLGLTHFAVLSDGTKIDSPRFLRRAEKKLKKAQRELSRKQKGSKNRAKARLKAARAHAKVADARREFHHQLSTKLISENQGIAVEDLSVKGLARTKLAKSVHDAGWASFLSMLAYKAERYGRTLVKTGRFEPTSQTCSTCGIVDGPKPLSVREWTCTACGTVHDRDTNAALNVKTAAGLAVSACRAPVRPGAIPAQREETGSHGLPTGNRAA

SEQ ID NO: 983 - protein, 260 aa, Streptomyces sp.
VRRRSGSDGRKLNCPQLTTKERAQIRKHQRRAARAPKAGEAKTAEYAKVAKLKAREADRRKDWCEKTGTMLARTYRLVRFEKLNIKNMTASAKGTVEQPGKKVRQKAGLNRAIRAQGWGFLRQRTEHKAPGRVEDVPAPSTSLRCSACGWIEKESRKSQADFVCVSCGITCNADHNAATDVAAGQGGFPRLWRSAGAGGTTAAAGRSNVREPQLTWVGIPLFWRGRMSSHHQGPPALVWAATAASMSAPSTTGWSGCREP

SEQ ID NO: 984 - protein, 339 aa, Synechococcales sp.
LNQEGVKANFLTNKKEIYHALPDYASECPAHIRQYAIKDAHEGMKAQKVKSLKTGQPFSMKFRSRKNPKQVIKFSVSDFKNGLYKTKLGHLKMAELLPNNICDGQLTMHNGQYHLVVPFKTNVNVAENQGGVVALDPGIRTFQTFFSPDYCGEIGKSDIGRIYRLCSWLDKLMSRKQWNAAARMRIRIKNLIHELHHKAAFFLCSNFKTILLPTFETSQMVKKAGRKIRAKTARAMMSWCHFEFKLFLKNKAKEFGCKVVDVCEAYTSKTCSWTGELINVGSSKIIKSKVDGRSMDRDINGARGIFIRALVDSPCDKQLSLQGLHLVLYSTKCKPKTIR

SEQ ID NO: 985 - protein, 482 aa, Salinibacter sp.
MYLTRKKKLGQSEKLDEIARACGDVWTDTVTWFWRTVSRQGVWLNKSQMMRWMCTRRISTDTKKTAFEHPDMEAFAGKRENPAATLESRYNIAQNTAQNVVKEFYHALDSWRERDNPDANPPFKRKRYYKANWNYTQITLRDDGVLRLSTGRGNEPVLIEWPHPEPKRVEIGWDGEQYEARVQYQVEPDREPKGEKVAGIDLGEVYLATATTGEETWLFNGRHLRSLRRYQNKTKATLQSKIDTKEKGSRRWQRLVISKRKQLSSLRNQIRDVLHKLSRRLVETLYQEGVSTLVVGDVRDIRDGLDYGAKGNQRLHQWAHGAFRHMLTCKAELAGMEVKLEPERDTTKTCPSCGTKNPTRGRKYRCSTCQAAFHRDEVGALNIREKYLDGDGWQDGYLSSPVVAGQGFTAAPSETSNETKAYSSPRGDKTDQPTPFASGEAAAPSTTREAPHERVTTHPTGVRFRPHMDCGDGGSPAISSQG

SEQ ID NO: 986 - protein, 413 aa, unknown
  TnpB Polypeptide
MLIAHKITLDLNHCQATYMARAAGTARFAYNWALAEWTRQYEAWKLDNTLPKPSQAALRRQLNAAKREQFPWMLEVTKNAPQMAIMQLGDAFKNFFAGRAKYPKFRKKGQHDRFSLSNDQFSIDGSRIRIPHLGWVRMREALRFTGKVMSATISRVADRWLVSITVEIPDNSHLPPAKNQGAVGVDLGVAALATLSTGESIPGPKPHQALLGRLQRLSRSLSRKLQGSANRKKAKEKLARLHAKISNIRKDALHQLTTALTRRFHTIGIEDLNVKGMVKNRCLSRSISDMGFFEFRRQLHYKAAMRGGQVVVADRWFASSKTCSACGHKLDVLLLSARQWTCPECGAHHDRDVNAAMNLKQVAESSAGDCQRIQPMAVCSVTACGEEGAGLGRKTRVKPASVKQEASGRFNQK

SEQ ID NO: 987 - protein, 407 aa, unknown
  TnpB Polypeptide
VYLVEKHIVGQSHKYYDECDKLSYLSKNLYNASLYKIRQHYKETKKHLSYPEVYHKVKTSVDYKALPAKVSCQTIKKLAENYNSFFKLVKAFNDKKIENFPSIPKYKKEKYGQLERFLVVYPKQALTLRTFKKEGKIQLSKTNIKLTTKVSNWNDIKEVRIVPRKKYYIVEVVYFKLEKELKPDNGNYASIDVGINNLMTVAFNNKSIKPLIVNGRPLKSYNQYFNKKLASFKSELEVKNKVKTSKRISLLNLKRTNKINDYLHKVTTELANQIELQGVCRVIYGRNKEWKQDVNIGKKNNQNFVSIPMDKMRSMLEYKLKLRGIEMVEQEEAYTSKCSFLDLEPIKKHEKYAGYRKSRGMFKSREKGLINADLNGAYNIMRKAIPNVYSDGTEGYGVSPVVLKIKR

SEQ ID NO: 988 - protein, 402 aa, unknown
  TnpB Polypeptide
LKLTEKHIIKANHSFFKECDELCFKSKNVYNSSLYYFRQNFIHNNDYKNYYETYYELRTSEAYQALPDKVSKQTLRMLEGNKSAFIRAIKDFTKNPSKYKGRPKLPKYKHKTEGRFVCAYERGSISKKVWIKEGKIGLSQTNIKINPYKATFDNICQVRIIPKKGYFIIELVYEVLLKDRVSDNRKYAAIDLGLSNLCTITFNEKGCQPIIINGNGLKSINQFYNKRKAELQSKLKKEKTSKQLRKIALKRNNKINNQIHKISSYIVNQIVSRGVSKLVIGYNPEWKQGINIGKKNNQNFVNIPFKKLTDQLQYKLDIKGVELILREESYTSKCSFLDLEDIKKKEKYCGYRKSRGIYKSYEYGVINADVNGSYNIMRKAFPDIFMEGIEGIAVCPVRVNVA

SEQ ID NO: 989 - protein, 220 aa, Lactobacillus sp.
LPDKTGKATAVDVNVGHFDYTGGRMNVLPKKLDKIYGKIKHYQRQLAKKQVKNGEAACESENYLKTKAKLQACYRKASNIQNDLMQKFTTELVNNYDKIVIENLSVKGMLMSHAASKGVHRSMFGKFKQILTYKCDWYGKDLILANKLFPSTQRCAACGNVKKGDDKITLYGNKKHGTKHNEYVCYNQKCPNYNKVVDRDKNAMLSLLALTEHPELNHAL

SEQ ID NO: 990 - protein, 473 aa, Trebonia sp.
MLVCVKIVVQVRLLPDAAQAPALESALRAVNEAANLVSAVAFDRHVFREYALRKQVYGSLKDRGLGAQAAQQVIKKTCNAYKTLRATIQAGNLGAPGSKRRVKAESKPIAFRPDAAQPYDDRCLSWQLDTRTVSIWTTSGRLRGVRFACSADALRTLALYRHGESDLVSRDGRWFLMATCDVPEAGQYEPDGFLGIDLGIANIATTSDGEIMSGRMVNRYRRRQLSLRRKLQAKGTKSAKRLLKKRARKEARFARDINHCIAKKIVTEAERTSRGIALEDLTGIRDRVRLRKPQRVTLSSWAFAQLGSFIAYKALRAGVPAVYVDPAWTSRTCADCGHADKRNRVSQARFTCRGCGVVAHADRNASRNIAARGQVAWDAGRESRAPAPARNGQGLDAAASITASDALAASSALRAELVDSKQNTCPPPRIWRISTKTKTRCSCRAASKRSPGCGRVKRGRARRGPGRYSRLSG

SEQ ID NO: 991 - protein, 381 aa, Meiothermus sp.
VRRLHLAPTPQLDDLARAAGELYSRVVVSFWRTVRKKNVWLKPSSMMRWHTSNQLHAHSADAVVQGFYDALKSWRKRRKTDPQAKPPYRRRRYCWVQWKSSAIRVQKGELILSNGRGNASLVVPWPWEAPVRVELGWTGTEYELRAVYSRPAAEPVAEGGVAGADLGEVHLAVVHDGERTTIYNGRELRAKRQYQNKIKAALAAKQSRLKKGSRRWRRLGRSKQKQLRKLENQIRDILHKQTTALVSTLHDRGVQTVVIGDVRNLRKRVDYGPAANQRIHQMVSGRVRQRLGMQAVLQNEAYTSQECPRCGSRHKPRGREYACSACGFRFHRDGVGAVNIRRKYLGRGPVVGAMASPTGVRWQPHRRVRVARDERERIPAL

SEQ ID NO: 992 - protein, 393 aa, unknown
  TnpB Polypeptide
MLYTEKIRIYPNKSQRILIDKILWHCKCTYNKLLEIHNEIWLTKKKTLSRYDYHCLSKNFEKSVDCQIYSQVIQNVGSRLADAFSRFFNKKLRSRRPKFKSIKKFRSFTYPQSSGFSLDLKNGRIRLGKFGKVKAVFTREIKGALKSCTIKKFPCGHYYAFVVVEEPENSRIIPVRQRTRVGIDLGVSRFFTTHDGKYFESPRFLRHNLEKLRRAQRKLSQKKTGSKNREKARLRVAKLHEKVKNSRRDHYFKVAHYLVTNYDQVVCEDLEPSKMFRKKYESKQRRALQDVALSEFLEILDWMGRKYSCEVTKVPPEYTSQMCSGCGTIVKKDLSVRVHSCPHCGLVVDRDINAAINILNRGNKLPGGTTGGGMATVTTPTLVELVTIAGLSY

SEQ ID NO: 993 - protein, 410 aa, Moorea sp.
MIVYEFKVRGKLNQYQRIDQAIRTGQFVRNSCLRYWMDNRGLGRKELYRYNTELRAMYPFVKDLNSHACQASVERCWSAIARFFDNCQKNIPGKKGFPRFKKHSRSVEYKTSGWKLLDPKHIEFTDNKGIGRLKLIGTWDLAFYPLEKIKRVRLVRRADGYYCQFCIQVDFKVDVEPTLRVVGLDVGLKDFYTDSDGNTKLNPRFYRKSETRMKFYQRRVSRKNKGSANRKKARNKLGRVHLKISRQRVGVACAKRIEHAKRLARCVIQSNDVVAYEDLRIKNLVKNHCLAKSINDAGWYQFRKWLEYFGTKFGRVTVAVNPAYTSQNCSSCGTTVKKSLSTRTHVCRCGCVLNRDHNAAINILNSALSTMGHIGTWINNPNASGDLGTTEVGEILPQQPGSLNEESPGF

SEQ ID NO: 994 - protein, 398 aa, Ruminococcus sp.
MERMTKLLKSFKTEINPTEEQKNKINKTIGTCRFIYNFYLAHNKEIYEQENRFVSGYEFSIWLNNDYLPDNPEFSWIKEVSSKAVKKSIMNAQKAFKNFFDKKADFPKWKKKNNSDVKMYFVRTDSKTMIFCERHRIKIPTLGWIRLKEKGYIPTSKDGYIIKSGTVSCKAGRYYVSVLIEIPENKKSVLNDFGIGIDLGVKDFAVCSDSKVYKNINKSFRIRKLEKKLKREQRRLSRKYESLKKSKNNSKGEATRQNIRKQTLKVQRLHQKLDCIRTDYINKVISELVKTKPMWITLENLNIRGMMKNRHLSKAIAQQKFFEFRTKFTVKCKEYDIALRLVDRFYPSSKLCHQCGCIKSDLKLSDRIYICSECGYTADRDFNASLNLRDCRVYQIAR

SEQ ID NO: 995 - protein, 393 aa, Actinomadura sp.
VRRSFRFLLRPTARQAGALAACLEDHRQLYNAALEHRRTVYRAAGVTVRYGDQSADLKEIRRADPGGQGRWSAGSQQQTLRRVERAFAAFFRRVKDGRCPGYPRFKGRGRFATVEWPARKNGARWDSRPHEPAARVYLLGIGHVRVHQHRAIAGTVKTISVKREGARWFVILSCDDVPAQPLPATGAAIGVDLGVASLVTTSRGEHLTNPRHLRSAADRLAAAQRDLARCERGSNRRRGAVRRVGALHARVRRQRLDTAHKTALRLVRDHDVIVHEDLRIANMIRSASGTIDEPGRCVAAKSGLNRSILDAGWGVFLTVLAHKAESAGRELIAVNPANTSRTCAACGHCASGNRVTQAEFRCRGCGHTAHADVNAAINILRAGLALREAAEAA

SEQ ID NO: 996 - protein, 222 aa, unknown
  TnpB Polypeptide
VDLGRTDIAHTSEGDNWNGQQLSRVRERYSRLRAVLQHKASKGTRSARRRCRALLQRLSGKERRFQTWVNHRISKAIVSRAKATNSAIALEDLTGIRERINQQPRSKAERRRANSWAFYQLRQFLEYKALRAGVALILVPPAYTSQTCHRCLHIHPDPAQSYRSGKQFKCGHCGWEGDADLNGANVIALLGAVVNQPRGSGLFCSLVEQSRLRATESPLRTA

SEQ ID NO: 997 - protein, 363 aa, unknown
  TnpB Polypeptide
MIKRYKRKNSGCMRRTSRVYLNSLNKSKTEQLRSFCHLYADAVRYFVVVFWSKSDLSSKLAGKDITDKAVKRFGITARVAQLAAKQAKEMVVSQHKKSNRKQRMPRFKNITVTLDSRFFHLSEFDGSFDWALKLQSGFPKIVVPFNNTKHTLKFIDDSWILGNSIRLGIRGDRLFVDLIFEKPRPEIKKDGTVLGVDLGYRVPIATSRKELIGQELKQKIEKSGKRRKTYHHYIETETNRIVKQLSLDDVRVLVLENLKNVKKGKRGKFSRRVNRLLSFWLYAKVTNRLEQICEEQGVCIELKSPWKTSQRCPVCGNIDKRNRKSEKFKCVSCGFEEHADIVGAMNLKHLGLAEVYSLRSLQS

SEQ ID NO: 998 - protein, 426 aa, Micromonospora sp.
VLEANAWRRRRQDPPLSGYQELCRELSASGPGTFGELDATGARSVLRRFSDAWFATAKRRKTGDASARFPRRRRGLVPVRWYHGTFTLAGRHVRVPTARGALPLSVRLVRDVPYPVEQVRSVTLVCEGGRLFLDVTAEVPVTAYPPGEAPNPARVAGVDVGVIHPFAVAGPGGEALLVSGRAIRAEHRMHLADTKARRRAVARRAPKPGQRGSRRWRKYRARARAVEGRHRRRVRQAQHEAAGTVITWAVDQRVGVLTVGDPRGVLDLPAGRRHNLRLRQWQIGRLLKVLTDKATLAGITVHLVDERGTSSTCPACARRVSKPRGRTLSCPHCQFSGHRDVVAAASIATRKPGGGPTTTGTRIVLPGVVTHRRAGRHLPGAGRSRRDPRRPPGGARASMARCGPPHQMVGSRSPNQRGSTTPPETR

SEQ ID NO: 999 - protein, 394 aa, Mastigocladopsis sp.
VLVLEYKVKGKRQQYQAIDEAIRATQFIRNKAIRYWMDAPRESKIDKIALNNYSTALRKEFGFVKELNSMACQAATERAWLSIARFYDNCKSKKPGKKGFPRFQKDNRSVEYKTSGWSLHPTKRRITFTDKKGIGSLGLLGKWDIHTYPQKVIKRVRLVRKADGYYCQFAIDIEVKSEQRTGNSEIGLDVGLEFFYSDSNGHHEENPRFLRKAEKSIKHAQRQIYKKEKGKNQRRRARQRYAKKHLKVSRQRSEHAKRLARCVCKANALVAYENLNVKGMVKNHCLAKSINDVAWTLFRRWLEYFARKVNTTVVAVNPRMTSQKCSDCGAIVKKSLSTRTHKCNCGCELQRDVNAAINILNLARQARDGQSRSNAVGVATATLLGATLVEQVTT

SEQ ID NO: 1000 - protein, 363 aa, Exiguobacterium sp.
VLKGYKYRLHPTAAQAEFLIRTIGCARFVYNKLLEDRITIYEEAKLGDGPKRKPPTPASYKPLFPFLCEADSLALANAKLHLDAAFTSFFAGTAGFPVFKSRRKARASYTTNNQHGTIRIEAGKVRLPKVGFVRFTQHRGFQGEIRSATVSMTKTGKFFVSLLVEQDDEPWVPAEHKIGIDLGLGHFAVMTNDELVTEKVPNPRNLREAETRLKRAQRALSRKKSGSRNREKARLLLAKKHEKVANRRNDFLHKLSRRIVDENQVVVIETLKPMEMMKDCRLSKSIGDAAWGEFARQLAYKCRFYGRTLILVDQWFASTQVCSACGENGGKKELDIREWTCAACFAHHDRDVNASLNLLHLAD

SEQ ID NO: 1001 - protein, 413 aa, Candidate division WPS-2 bacterium
MLHDMKRIERVRLYPTARQDEALRLMLDVTRQLYNALLQERRDAYRYNRVTVTTRMQYGELTALRSEDARLKAVYRECEDAVLHRLDLAMQAFFQRLRRGEVPGYPRFKSWQRWEQLEFPHGDRALRLDEYQRRVRVPGVGAVLLRKGRRVPASYGRVWLVRKLGRWYACFECERAMQPLPSTGHTVGIDRGVHVLAALSDGRLIGNAAVGERRRAATKRLQRELEAMTVRDSAGHAINRKDPRRQRAQLRLARSKAREANARRDYAHKVSRQIVDGADVIALEKLALRAMTRSAKGSVEHPGRNVAAKAGLNRRLLDSGFGLLRQMIVAKAEEAARTVVEVDARFSSQTCSRCGHVARESRRRRRFGCVSCGFANHADVNAALVIRWRAQLALQSELDPAEDAGPCSQDAAA

SEQ ID NO: 1002 - protein, 543 aa, unknown
  TnpB Polypeptide
MAKSARHNIQRQKHNQSTHKSLGKKFPRVGKKCQVYLTAEQKHRFANDAGKCRFVYNNILSRHNDYYNQLIDEENRLEFLAECEWQFKRIAKPDEIKVDERLEEISAVNEHAFKLIFNDLKKEFDWLAEANQKVLWGAAKNLIKAFTNFFEHPESFGYPKRKKKKVALLKCTFNSQCFTGIYGNRVNLTKDYQDMKFDCSKSDMRYLNEYQDYIQFTTISKTKSGKYFISFNVGDFLPNLKYQQNRIPDGIACYTGLMKDENDFVEVVSDDDDKIGTYLMVTDKETGEITWRRATGYDRGLKDKLISSDGEKVLNNHYLKKHEKKLAHLQRMFSKKQPKSAAYNGKCDFEIPKNSPCAGRNREKCRVKMAKEYEKVSNIREDDNRQMSVQMLLKNDVIFLEDLNIKGMMKNHCLAAAIADAGWGQSDEFVEQGAKRYGRTVIRVGRFYPSSRLCPVCGHKHEGLELKDRAWVCPHCGHVVDDRDVNAAENILKEGIKLYRGMLSDRYAVAVVRIKRQVGLSLPDQKPVGEAPVGESANQEAVL

SEQ ID NO: 1003 - protein, 377 aa, Youngiibacter sp.
LKNNTYKVINIIKYLNNSVAFPNVIRTWGILMSKIHYVHGYVKDLLNLIADNNALYILDVETHNDYVHLQIKSTEEQIRRYIQRKERNKTVQAFIVVEVSALLQHKAYEYRIYPDKIQETLIVRTIGSSRFVYNHFLELWNKEYEETGKGLTYSACSKLLTRMKRDPETVWLCEVDKFSLQNSLRNLSDAFSRFFKGQNEHPKFKSKKSPKQSYTTQFTNNNIAVSGNCLKLPKLGLVKFADSREMKGRILNATVRRKPSGKFFVSILCEEDICELPKTDSAVGIDLGITDFAVLSDGSRNDNNHFTRQMEERLRREQRKLARRALAAEKRGVPLSEARNYQKQRRKVARLHERVANQRNEFLNKLSTEIVKNHDII

SEQ ID NO: 1004 - protein, 421 aa, unknown
  TnpB Polypeptide
MIKTWSMIVKNDDRLLKMMSDSLSIYDQALYYQRRAYFETKEQGKIKTHSYVDLWKLVKDTPVYRDSKLDVVSKTLSIKQVSNSWTAFIKATMSYRKSPSKFLGRPKMPNYLYKTKEYNLVQVDKARFRKINKDENSFNLPCSDYRIKIPKQIKLEDIRQITIQKYFGKIKINIIYEDSKVIRNDYDKNSAIGIDLGVNNLCAITSNDKSFSYIVKGGPLKSINQFYNKRLAELKSQLEMKNKKKTSKQIQRLTLKRNNKIDHYLHCCSKQLIELCVDNKIEKIIIGHNDGWKQEVDFKSRDIETKKRNTQNFVQIPFNKLIEQIKYKSLKYTDLEVEIIEESYTSKVDHLALEEMKHHEKYLGKRVERGKFKSSTGKILNADINGAIGILRKGKAISDEQLMFLRNRGDVVSPRVFKLNL

SEQ ID NO: 1005 - protein, 428 aa, Glycomyces sp.
LLSVTSRVHDGGRVEDRRAGQAHAVARAGGGVDLDPARAQHPRHLGGEGGPRPGCDAQLRAAQARLPTVARGRGGLAGGPTCDQEGVRRLPHPPLQPGQRQLRAQGVGPPEADRVHTPRLSPGVGAPLRRAQPVVCDGRPHDLVVDLPGPVEGRALRRLPDQIKTLAEHRRGEADLICQDGVWFLVVSVEVPDAPETVPDSFLGVDLGIVDIATTSDGQVMAGREPNRYRRRQQRLRAKLQSKSTRSTKRLLRKRRRREAGHARDVNHRISKRIVAEAERTGRGISLEDLRGIRAGTATQAPTGHAALLVLPPTGRLHRLQGPTRGSASGVRGPGALLTRVRRMLLHPQSQPDLAGLVRLPVMRRRCARGPQCFPCPGPRGPGGVERGAEVTRPTRPPLAEWSGQMRWAPSHPAGWLNRTLSPSGLRS

SEQ ID NO: 1006 - protein, 382 aa, Hapalosiphonaceae sp.
MDGGRKMLSLTYSYRIYPDAAQEARMLAWMEACRKVYNYALRERKDWIASRKCAINACSIRSEYIIPAETPYPDYYKQQNALTPVKKENPGLKDVQSQVLQDALKRLDKAFKFMMERGFGFPRFQKTGQYRSFVFPQFKSNPLTGLQIKLPKIGAMPINLHRPVPDGFVIKQVRVVSKASGWYAQLVLQSDVFVPDIMPNGDSIGIDVGLEKFLAVSNGRLVERPRFFNSLQRELRWLQRKLKNKTAYSANYRKAQQKIRRLHERIYDIRKQFHINTAHALCDGVGMVFAEDLNLKATSRGMLAKHCLDAAWGSFLEILSWVCWKRGVYFAKVNPNGTSQTCPQCGTHTGKKKLSERTHVCHECGYTTDRDVAGCKKIPIPL

SEQ ID NO: 1007 - protein, 398 aa, unknown
  TnpB Polypeptide
MKAAPAPNWQKTFKLTNMKIGSENMRMYRFRLYPSKAQEKQMNTNFWLAKNLWNDLLEHSKTIYQNFDKFPTKSTIAAMTKDSGLYSQVAQEIGSRVENGIWRYVKLRKSGNGKAGFPRFKSIDRVKSLHYPQFGFSIGKKLKVTPFGEISIVQHREIKGKIKTLTLKKEASGKWFACFAVEKTPTTRASNGKPTVGIDFGLKTPATLSDGNVIKNPRHMKKHADRLARLQQFLSRKKKDSKNRRDAKREVAIVYEKIANTRADFLHKATISLVNSYSLIAMEKLASQEMSEQNFGKSINDAGWRMFANMLRYKAESAGCQVVFVNPENTTKMCSKCGGLQGMPLEVRVYECPCGNVMNRDLNAAHNILTRATQGHWGSNASGDVQQGTSLKEEAHAL

SEQ ID NO: 1008 - protein, 391 aa, unknown
  TnpB Polypeptide
MLNFRYRIKNKDTKRLEELVITSNCVWNYALMIQRKYYEWTGKYLPSSKLQSYIAKKRKKNSYWRKLNSHWVQNIIKTLDESYQRFFAGLQKRPPKFKKRYQDGSILAYWNVSFIDGIKINNDEITLKQFGTYKFIKHRVCGKNICSIRVKRYNNHFYVIICCDCQPKKLARDCDGTAGIDFGLKTFITLDNGEMIESPRFLFKNAKKLRKLNKVVSRRKKGSNRRRKAVEQLSNFHAHVAWQRDDWQWKLAHRLCKQYTIIKIEDLCLLGWVRLWGRKASDLAIGEFIKKLEFVASKYGTQIVKVDRWYASSHICSACGYKLDRKLELNEREWQCPVCGVVHVRDVNAAVNIKRWEPTCISEDRSKTSVQRREQRRTAKNSILEDNYVKQ

SEQ ID NO: 1009 - protein, 266 aa, Rhodococcus sp.
VPSQVTVSRNARGQYHVSILVEDTIPELEPADRVVGLDAGITSLYTLSTGEKITNPRHERRDRARLAKAQRVLARKEKGSRNRAKARLKVAKIFGRIADRRRDHLHKLSTRLVRENQVIAIEDLSVRNMVKNRSLSRAISDAGWSEFRSMLEYKADWYGRRVVVIDRFYPSSKTCSVCGVLASTMPLTVREWACRCGTVHDRDVNAAKNILAVGLTVTACGDGVRPPRTGWCSWRSGSSPERTSRTERYGSARPVASNGVPVRALR

SEQ ID NO: 1010 - protein, 403 aa, Symploca sp.
MLVLEFKAKGKISQYAAIDEAIKTTQFVRNKCIRHWMDNQGVAQKDLYRLSTALRAEFSFVKALNSSACQASVERAYSSIARFYDNCKKAVPGKKGYPRFKKNCRSVEYKTSGWKLSQTRKQVTFKDNKGIGKLKLKGTWDLNYYQLEQIKRVRIVRRADGYYVQFLIKTDKTEILEPTGNAVGLDVGLKEFYTDSNGETQVNPRFYRVGEKRMKFHQRRVSRKKKGSTNRKKAIKKLSRTHLKISRQRQEHAKRMARCVIQSNDLVAYEDLRVKNLVKNHCLAKSINDAGWYQFRRWLEYFGVKFSRITVAVDPRFTSQKCSSCGTMVKKSLSTRTHICKCGTVLDRDHNAAINILKEALSTTGHVGTWVLNPNASGNLASTVLGENLSQQAGLVNEESHLL

SEQ ID NO: 1011 - protein, 416 aa, unknown
  TnpB Polypeptide
MTEIENDNIIKTMKLHIKVAKDDVQKLIDVTTVYAEACTYISEYIFNNGFELGFMNLQEKIYHTVRNKFKLKSQMTISAIKTSAARYKSVKEQLFQKPYKYKDENGEWHYITKTLDWLYRPIAFRRPQADLVFNRDYSFVNNSVTGESKLSLNTLKKRIYVDYDLPDNFKEYFDGTWKFGTGKIVSLNGEWYFHIPMTKAADKAFNVDNTEHLIGIDRGLRFLVTTYDEEGKTGFVSGSDIMKKRDKFQAVRAELQSRGTKSAKRVLKRLAGRENRWMTDVNHQISKTLVRSYGENTLFVIEDLTEVSFSEENLKNRSADGRYGLRSWSFYQLEQFLIYKANEAGAKVIKVPANYTSQRCPACGRIHKENRNHDTHEYVCDVCGYRSNDDRIGAMNLFALGIEYVNGDVNPHFSKK

SEQ ID NO: 1012 - protein, 450 aa, unknown
  TnpB Polypeptide
VFETRTLKGFELYKHDTKNHKKDDLKRVIIERNQTPLTNCLTYLARYGSENIISYIKVNIDKCDDKKRKLYDNILRCCSKFGFERLYNLALSKRKRAVKHYSEHPIEFKSLTFSGRCRKKKIIDYNSRFGSKINSFVSLSGIGRKSLDIPTTFHKWWHGNMRDYRKNNPDYEYTLTFDEKNHQVNIHLCKDGERYITQVHGDTIGIDVNCKHNLFSLSNKTTYDYDRKLVNDFCKLSLEIDKLKVNNSYTLGKRKQRKLDVMKSKMIKSEQQVIANMCKTLQTQGVGHIVMEDLDNSFGKCYVKDKDNEDINYNRKVKFLGLSSLKQEVEHIARKYDIAVSTVQASYTSKMCPICGCIEDENRPNQETFECVECGYKDNADFNAAKNIRNRVLVTVLRETLLKQLDNGAFEPKKLKREKVKELLLSFRRNLQETARSECRESGLTTFDYV

SEQ ID NO: 1013 - protein, 377 aa, unknown
  TnpB Polypeptide
VKHYPEKRGIVHNEILLPANAPRSYADRNTLWNAAEAVEKQWNSQLARRWVLTIPREIPPDQYAVLVREFCEQQFVSKGMIADFAIHDPHPPGHNPHAHVLLTMRAMDEHGKWLPKSRKVYDLDENGERIKLPSGRWKSHKEDTVDWNDQKYCEIWRHEWEVIQNRYLEANDRPERVDLRSYARQGLDIVPTVHEGAAVRQMEKRGIQTNIGNLNREIRAANSLMQSIRQLIHNLKDWITELGEKRKELLAQKAAEEAVFLPNLLMKYMEIRKEERNRYKKPKKKVARIHTHIAHQRKDFLHKESRKIANSYDIVCMEDLIMNERMQADMCFGKRVHDNGWECSRIFWHIKWNAPGRNWSVLTAGIPAPRPAAVVET

SEQ ID NO: 1014 - protein, 84 aa, unknown
  TnpB Polypeptide
MFTDFLAYKMERTGKKLVRIDRWYPSSKTCSCCGNIKEDLQLSDRIYECACGNRMDRDQNAAINICREGIRISGMILDTEKKIS

SEQ ID NO: 1015 - protein, 420 aa, unknown
  TnpB Polypeptide
MFGCQQILISPDRELKAILEFVCSESAKLSNCGTYYSRQIWFKTGKIVGKFDLHREMGKNPHFQALHSQAAQQCLTAVAESFKSYKGLLKAAQNGTVTQRPRLPGYRQGGLALITFPSQAVKLKAEGLRFPLGSKVKAWFGLDAFYLPMPSNLDFKAIREYRILPRNGCFYLELVYKTETVQADVNPVRALGIDHGLNNWLTCISNVGTSFMVDGLHLKSLNQFYNKQVATLKENQPQGFWSKRLAAITEKRNRQVRDAVNKAARKVINHCLENRIGTVVFGWNRGQKDGANMGAKTNQKFVQIPTGRLKERVSQLCEQHGIRFVETEESYTSKASFVDDDFLPKIGEKPEGWKESGRRVKRGLYRTQNNQYINADCNGAANILRKVATTLGLCLEGVSRGALLTPLKVRLWTLQESPRL

SEQ ID NO: 1016 - protein, 284 aa, Holophagaceae sp.
VAIEAPDEAQSQATSGVHATVDLGEIHQAAIATNTGTALVISGRGIRSIKRYRNVALGQILRLRSRCEKGSWRYKRLGWTISRIMHRTLRQVRDLRHKGTRKAIDFCVANAVSSIYVGNPDGVRKRPSGRKHNQRMSQWEYGKDRQYLEEKSRKAGMECFSGTERGTSSHCPACGHRHRPKGRNWACKKCDFRGHRDVVGSVNMHPLAYGEKIEFPSQITYRRAGITQGTKQPLRSARRSRPDSGLGACGPVLSRCATGPTTQIAGSPQGLGQAEGLRLEAHPL

SEQ ID NO: 1017 - protein, 404 aa, Streptomyces sp.
MIRAYKFLIRPTVGQQAALGEMLREHCSLYNGALQERRDAYRHASKTGITYGQQSAQLKEIRAFDPERQGRWSFSSQQATLRRLDKAFAAFFRRVKSGDAPGYPRFRGVNSFDTVGFPKDGDGCRWNSTPHDPVTRVRFQGIGHVKVNQHRPVAGTVKTVSVKREGRHWYVVLTAEQVQPEPLPPTGSAVGIDMGIANFLADSGGEFVPNPRYGRRAAAKLEAAQQALSRFPRVRRDKRTANHRRAVEKVAQLHRKVRLQRLDHAHKTALALVREHDFIAHEDLKIRNMVKAPTPKPDPDRPGGFLPNGAAAKAGLNHSISDAGWGVFLTILHAKAESAGREVIAVDPRNTSRTCPTCGHVSAENRPTQEKFHCVSCGHSAHADTVGALNVLRAGLVRRDAQPA

SEQ ID NO: 1018 - protein, 405 aa, unknown
  TnpB Polypeptide
MYLTEKEIIYSTDGRFDLIKELCHLSKNLYNASLYDVRQYYFETKSYRTWQSQCPFFTKTKNPDYYALQSHVASEVIKQVGRQFIGFYNNKSTKKKRIPKYKGKNGYNVVTFNNRAISRNIEFDEIKKLYTYTLCKKSYNLKVQSTKSNVKMIKFVYDEVNDLIKCFKIYEVEKPKLKKDNSRYFSIDPGLNNIVSIYNNIGIRPLLYNGRPIKSINQYYNKIKAKLQSELPTSVKSSKKLRQLSFKRNNKIDYEMHKISSHIINEEVKNNISKIFIGNNIGWKNEIKIGRRNNQNFVNIPHTKLFHQLSYKGLLNGIEVIFTEESYTSKASFFDKDYLPKYGESDSNNFSGKRIKRGLYRDSKGNIWNADLNGAANIMRKCSDKAYKGIRKTKELMKRPILVTL

SEQ ID NO: 1019 - protein, 289 aa, Clostridiales sp.
MLKAYKYRIYPNKEQQVEIAKTFGCCRFVYNQTLAYRKEKYENGKISVNKIDCNNYCNRELKKAYEWLKEVDKFALTNAIYHMDAAYQKFFQEHAGYPKFKSKHDTHKSYTTNFTNGNIEINFENRKIKLPKLKKVKAKFHRVFYGKIKSATISQVPSGKYYVSILVETEHKEIPHVNCEVGLDLGLKNLCITSDGRKYKNPKTLAKHQRKLAKLQRQLEYKATWNGRKYIKIDTFYASSQLCSVCGYQNADTKNLYVRRWICPKCGTDHDRDVNAAKNILAGGLGQIA

SEQ ID NO: 1020 - protein, 388 aa, unknown
  TnpB Polypeptide
MILRRVYRFKLEPNTEQTQKLYQLAGARRFVCNWALARRNEFYKAEGKTIPASQLSRELTQLKQQEDRLWLQEADSQLLQQALKDVDKAFQNFFSKRGRFPKFKSRNRGHFAFRIPQRVKVENGRVYCPKIGWVRIRQSQKVEGTTKSATFKRDACGDWFVTLTCEFEVSDEPKPEPQNPVGVDLGLKDFVTLSNGESVAAPKFFRKSAGKLKKAQRVLSRRKPGSKRRGKAKQKVARVHRKVANQRGDFVHKVTTRLVQEYDAVCIEDLNVLGMAKNHSLAKSVLDVAFGEFRRQLAYKCLWHRRHLLVVSRWFPSSKLCGACGVLNDALTLSDREWECCCGVVHHRDANAACNILKEGLRTLTVGQTDRLNARGQNVRLATASSSG

SEQ ID NO: 1021 - protein, 293 aa, Domibacillus sp.
MAKHNKAYKFRLYPTEEQAYLMRKTFGCVRFVYNKMLAERKEMYEKYKDNKEELKTQKLPTPAKYKAEFEWLKEVDSLALANAQLNLQTAYKNFFSRQNDFPAFKCKKDRKSYTTNRVNGNIMLLNGHIKLPKLKMVRIKQHREIPQDHIIKSCTISMTPTGKYYVSILTEYEKEIVQKEVETVVGLDFAMVELYVSSEDEKANYPRFYRQMLDQLAKAQRVLARRVKGSQRWNKQRIHVAKWHEKVANLRKNFLHHKSKELATNFDVVAIEDLNMKGMSQALNFGKSVADNG

SEQ ID NO: 1022 - protein, 369 aa, unknown
  TnpB Polypeptide
MKQVRAYRYRIRPTTEQKENLERTFGCARFVFNKLLEEKLEHYKLTKKTLKNTPAHLKKEFPWLKEVDSLALCNAQIHLERAFKNFFRDPGKVGFPRFKSRKWSKRTYTTNCVNRNLRLEGNLLRLPKVGWVKVVLHRQIPENCELKSVTVRRMPSGKYYVSFLCEYERNVVLVEPRQKNVVGLDFSMKSLFVPSEGESPEYPRFFRKSLEKLSRAQRKLSRCQKGSRNREKQRKRVAILHEHIANQRKDFLHKLSAQIANAQDAVCVEDLDMKAMSSALHFGKSVHDNAWGFFLRMLEYKLGDRGKALVRIDRMFPSSKKCSSCGAVRKTLTLSERTYICPECGNVMDRDVNAARNIRTEGLRILFAG

SEQ ID NO: 1023 - protein, 417 aa, Coleofasciculaceae sp.
MLNMTWEFKLKPTAEQVSEIEHILDVCRNVWNFALRERKDWLDSRKSPVNACSIWQEFILSADAPFPSYARQCKSLTAAKADFPRLKTVNAQVLQQVIRKLEASWESWRLKRSGMPRFKKPSRMRSFLFCQMLKDCVSEEGIKLPQLGLVKVRWSREIPKLFEVKQARIVRKASGYFVMLSLQADVDIPAVAPHGHPIGIDVGLEYFLSTSDGEQVKRPRFFNRLHRKLKLLQRRLKNKRKGSANWRALQKKIARVHQCIADTRKDWHFKLAHHLCDGAGMIFVEDLDFRMMAKGMLGKHTLDAGLGQFVNQILSWVCWKRDVYYGKVDAWGTSQECPDCGAEVRKELSTRVHHCHHCGSIKPRDVASGQVICSRGQRQIENACGVGATGNQVTGSSWLAVKQEIFGVTRRISLHTC

SEQ ID NO: 1024 - protein, 451 aa, unknown
  TnpB Polypeptide
VSELIHTQLIKINLAEFETKVLEFICRRSSSLYNQAVYYVKRNHQLTHPGLLPNVPYEQLAADLKEEWNYTMLYSQVAQQTLKSVSEAFSSYRGLMQAWWSKELEQEPKQPKYRKKGGLYPVTYPSQALTFYHDFDGVRIPLGLGLADVDGLKELFIPRPANIKPSQVVEVSIVPRNGVFYAAYVYKVPKLIAELDKSRALGIDPNTKNWLACVSNIGKSFIVDGGRVKFWNQKRNKTIAAIKSGKAQDYWDEECQEVEESRSRRMRDAINKSARFVINWCLQNNVGTIVFGWNQGQKDGANMGKHNNQGFVQIPTGRLKERIQQLALEVGIQLVETEESYTSQASFLDGDHIPVYGEKPIGWQPLGKRGEKKKGEKKNRLGRGTYRTANGTYVNADLNGAANILTKVATQLGLCLAEVGRRALTLVKRYDVFNCLKKSYRKRCEARLQTA

SEQ ID NO: 1025 - protein, 397 aa, unknown
  TnpB Polypeptide
VRRAYKLRAYPTRPQEGRTVRLLRDHCDLYNAALQERREAWRMQRVSISYVDQSAQLKEIRAADPDGQGRHSFTAQQQTLRRLNTAFQAFFKRARDNDKAKQQRAKQKVGHPRFKPYQRFDQVLFVAGDGAKWEPANDGRWAHATFQAVGRLKVRQHRAIVGRVKTLQLKREHRRWYVVVVTQADPQPLPSAGRAVGVDVGVARFLTTSDGQVVANPRFLAAAQARIACLQRRKELARPGSGNRRRLRRRLAREWRKVANQRRDFHHKTARALVDDCDTVALEDLSVGGLTASAKGTIAEPGTNVTQKAGLNRSILDAGWAQFTQILAAKAESAGRRTIYVNPQYTSIDCHACGARCTRPRQDTVICPLHGELDADLNGARNIATRAGLGSGQASAA

SEQ ID NO: 1026 - protein, 408 aa, unknown
  TnpB Polypeptide
LSTHLSQQRRKTSSSYQQFNAGEIQIIAGQAYKTLEKVLFYQVKPHKVRFRSKFNLNISFRNRVNTTGTRLERSDKTGIAYRLYIHKKSTFVDIPAKAFNHYQQLSLLRCEKIKYVQIVRKTIRAKKVYYLQIVCQGFPPAKVTKGESVVGIDPGISTVAFASPNEVALIDLVPKNISPKEKLLKQLDQKIERSLRINNPECYNMNKTIKKGAQFKRPSNRQIRLRNRRLKAYQSLSEERKKLQGQLINRIVSQASVIKMEDLNVKRLQKRSRDIRINPKTNRPFSKKRFGKAIFRAAPSSFRTTLETRAHQLGIDFEAISPKETKPSQYNHITQTFEKKSLSTRVYDLSDEYPDVQRDLYSAFLIGHIEKGSYNQEQLEQDFPVFYKLMKDFHQQTPKTKRLAWYLT

SEQ ID NO: 1027 - protein, 388 aa, unknown
  TnpB Polypeptide
MRAKTPSFVVSVKIKLSASIENHLEKSFNVANSAYNEALSFGLKHFKALKQNSDYQELLEKRQQTLSEIAGLKKVKQKTIELNQQVKLYNKALFELQKAYSLTEFGLSAHLCKQRRKENSSYRHLSSGELQVIAFQAYKTLEKVLFYKIKPHKIRFRSKYDLSANYRNRVNTEATRLVKSDKKGMAYRLYIHKKSTFVDIPVKAFNTYQQLSILRSEKIKYVQIVRKTIRGKKVYYIQIVCQGFPPSKVTKGENVVGIDPGISTVAYASNSEVTLIDLVPKNINQKEKLLKRLDQRIEHSRRVNNPECYKGNGTIKKKARFKHSSKRQVRLRNQRLKAYRSLFEERQKLQGQLVNQIVSQARLIKIEDLSVKGLQKRSRDIRINSTRD

SEQ ID NO: 1028 - protein, 392 aa, unknown
  TnpB Polypeptide
MKSYKTEIYPTKKQIHLIHQTCGNVRYIYNQFIAFNFGRLKQHERIVSGYEYSKMINHDPETPSWLKLVSSKAIKQAIMNADRAFRDYLKGHNGKPRFKNKSQDNSFYLIDPIKVERHRIFLPTLKWVRLKEFGYIPKDISSATVSVKNGRYYVSCLSKTETDERITTSDEGLGIDFGLKDVFITKDQTIPSINKSSKIHKLEKKLRQKQRSLSRRYEANMTHKVYYKTGKKKGQLRSFKWRRPLQDCKNLQKRQLEVNKLYERLTRIRTDYHQKALQSLLNQKPKFITIEDLNVKGLMKNRHLTKAIAHAQWYQSRLFLQHQCGKLGIELRAAARFYPSSKLCSACGYKHVDLKLKDRTWTCPKCQIVHDRDQNAAINLERCEDYTVLTAV

SEQ ID NO: 1029 - protein, 386 aa, unknown
  TnpB Polypeptide
VLRNYSDAWFAAAKRRKAGDARARFPRRRQALVPVRWYAGKFTLDGRVLRLPVAKGCMPLVVRLDRDPPYPAGQVRSVTLLYDAGRLQVDVTAEVPVAAYPAGEGPDLGRVAGVDLGVIHPYACAGPDGQLLLVSGRAIRAECRQHLREARARRRAVSWRAPRPGQQGSRRWRQFRRRQRAVEARHRRRVRQAQHEAATTVIGWAVQHRVGTLAVGDPRGVLGLAAGRRHNQRLRGWRVGHLIRALADKAAVAGITVTLVDERGTSSTCPACARRVPKPAGRVFCCPHCGQAGHRDLVAAANIAARAGGGTIPAEMSGGITHRRAGTHLPGVHPARRDPRRRPHRGPPHGPLAGTGPPRQPSPLPGSRSRHREEPEVHHSIYRQVH

SEQ ID NO: 1030 - protein, 356 aa, unknown
  TnpB Polypeptide
MMNYHFVFCPRYRRKIFLRADVEERFKQLVQEICEELKIVIIALECDKDHTHMLLNTAPTLSPADIMAKIKGVPSKKVREEFPHLRHLPSLWTRSYFASTAGNVSSATSKRYISTINALISEMVAEKKTTKKTTKDVPANLPRAVKNQAIKDAKSVFQKVKKSKYAMIPILKKHVCVWNNQNYSFDFTHIHLPLMIDGKAKKVPVRALLVDKHNRNLNLLKHKLGTLRVTQKANKWMVQISVTIPTSEKTGTKIMGVDVGLKVPAVAVTDDRSTRFFGNGRQNKYVRRRFKSKRKKLGKQKKWNAICNLDNKEQRYYERSRPQGESCYCAICGRSQCFCHSLRTVNEYQTDDKNKS

SEQ ID NO: 1031 - protein, 407 aa, unknown
  TnpB Polypeptide
MKLRYRYRIYPLDSQKIALAKLFGCVRVVWNDALGFCKESHQQGEKYKGGVELQKQFITQAKQLENRQWLGEVSAIALQQSINDLGQAYQNFFNSCNGKRKGKKVKPPNFKRRKSQQSARFTRNGFKVHPDKVYLAKIGKLKIVWSRPLPSVPSSVTVIKDSADRYFLSFVVEISPVKLPDNGKSVGIDLGIIDFATLSNGEKVKAPKPLKKKLKRLRKLNRNLSRKQKGSKRREKARKRLACLHGKIKDTRTDFIQKLSTKIIRENQTIVLEDLNTSGMIKNRKLSRAISDLGWRSFRTMLEAKCEMYGRDFRTIDRWEPTSQRCSCCGFKGGKKELSVREWTCLNCGTQHDRDINAAVNILVAGGQSETLNGRGGKRKTAFKVAASDEASTQPEFRQLSIFDLLK

SEQ ID NO: 1032 - protein, 237 aa, Azotobacter sp.
VSAPTMPPSESTGGVEHLLTIADHEGGSSHEENPRWHRQQADEIARLQQAVSRKKRGSNRRKCAIQKLARARSRQARQRLEHHHQLSARLARENALVVMEELTIKNMTRSAKGTAEEPGKNVRQKAGLNREILDTAPAQLIQLIRYKVTETGGEFVDAPTRKLKPSQTCPACGRTARKVLDDRIHGCPCGHSEPRDLASARVVLNWALFGSPTAPIRSGTGRDRDASGNPVKLHPIA

SEQ ID NO: 1033 - protein, 482 aa, Caldivirga sp.
LDEPVGRYPTLFTNPGTPSHPKPRKGDVRTVRLRLLPSGAQERKLRKLADATAKLWNELNYVRLVQFRASGKVNFKDTEHEFYYRFNSVLGVNAGQVINLNNWAWDSFFKLFRLYRQGKLPKFMGKPSPPGFWKDRLLGRRLLRILVRNDRYYLEPINGGEGYLVLKDWGLRIKYAGRIKWSGKQGTLVIKFEDGRWFAYVPITVGAKPAKSNPKGYVKGIYEKIQIEEPKGSNKAFIDIGLNNLFAVVFNHSDTAILIKGSTIKAEYYYWKREIGTYQSVRDWLRNHGFEAWRRYHAYWLHAKYKQHERLRHYYRTAIRFLAKTLHGMGVDEVFIGYPYMLSQNNSNEYNTNVWWFNKVIRWLGEVLQEYGIRLNVVNEYGTSKQCSICNINHENGRIKRGLYVCELTGIKINADLNAARNIAKRVGYEAPIPKKILSYIVTTNGVKPLTPKEGVTTKTPTVKTPPKKGEEGVIYCLMVNQ

SEQ ID NO: 1034 - protein, 450 aa, Shimazuella sp.
MYNTTNFYIRQVYTAHTQEKKLQPLQREVLETIKHKLDQMNEVRLAAYQKRMDREKTKPVEQRKEGTCNLFQLPSKDNPYMDYPFLDSLFKAMAQNDYRSLPTQTSQWVIKTVFQNWKSYFGSLQTYKQDPSVFRGRPKIPKYSDSPQKEVLFTNQDCVVKENKFLKFPKTKKRLNIGKLGVTKGKLKQVRIIPKYGQFILEIVVEVSLELPKRTETNHLMAIDLGIENLATMVTNTGSAPLLVKGKHVKSINQYYNKRKAYYVSRLRQGKHPSEGSFISKRLERIHQKRQQKLKDIFHKASFHIVNLAISEKVDTIIIGRNKDWKQASRLGKRNNQSFVHVPHHRLIRMIEYKAMEKGIDVVTMEESYTSKASFVDHDPIPTYGENDSKQLFSGKRIKRGLYQTKQGKWLNADVNGAANILKKAYLHQNEDGRFDIQTVNVWNPQSKVV

SEQ ID NO: 1035 - protein, 536 aa, Lactobacillus sp.
MIVLVRIFACKIEQRKEPNYLAFKKFQNSNEIRRLINRQNLIQKRAVAMINRGTDKGNLYQKLNQRVGIKRQMSQATINVMMDIFRNERITSIPDNSFVVFARTTLNVHDGEPQELLLQLNKLDSYTLFLAPKQSSEKIFNTPKRGWLMTLRDDGWILMLPGQNPNQGIQLVLPEASENEATTTTSNNSSSTNSAANSKAPTASHAPHSNNKSAASAAAQSTGNTAPVSHAKRSPKVSSKASPKVKKPAANSAGNHVSSNQATVKSTVTATSHAADSAAPSQVSMPAYSATNHMVSSAAATKPLPGPREADDLIKALVESGHRYRVVGLDYGKINMITATDGMDNSLQIPGSIISKHILDYQHEIRQLQRQTQTLDDDVELTRLSYMLKRYVLKSCRKIVNQLIAHYGSDVIYVTELHPSLDVNKTPNIILSPDYFYKALFTILFELVGQNSAIIQVPNNETSIICPVCGFTSAGNRQKEVHTFKCLNCGFESNDDQAAATNIRQRGLRYISNLTKNMNFAVPTPEVTNVVAPEEV

SEQ ID NO: 1036 - protein, 403 aa, Streptomyces sp.
MAEQVKRAFKYRFYPTDEQAAELSRTFGCVRLVYNKALEERTRAWYGEQRRISYVQSSAALTEWKKTGELAFLTEVSSVPLQQALRHLQTAFAHFFAKRAKYPRYKSRKKSRSSAEYTRSAFTWRDGQLTLAKMAQPLDIRWSRPLPHGSVPTTVTVSRDAAGRWFVSLLCEDTITPAPATTNAVGLDAGITSLVTLSTGEKIANPRHERRDRARLARAQRELSRKAKGSANRAKARRKVAKVYARIADRRRDFLHKLSTRLVRENQTVVIEDLTVRNLLKNGTLARAISDAAWADLRMMLEYKCAWYGRDLVVIDRFFPSSKLCGGCGTVAAKLPLNVRAWTCEHCGVVHDRDVNAARNILAAGLAASACGDGVRPQRESSRTGRSSVKQEPQRATAGIPRL

SEQ ID NO: 1037 - protein, 488 aa, Streptomyces sp.
MRGMRTANSSPRRHIWLPQPPGTSRMANPARSGCCSCSNSRTRSAVISISEPVIGALLRGYPRLRPGEERSPCGAGQEEPVRCQGGPAQVKRAFKYRFYPTDEQAAELSRTFGCVRLVYNKALEARTRAWYGEQRRISYVQSSAALTQWKKTGELAFLAEVSSVPLQQALRHLQTAFAHFFAKRAKYPRYKSRKKSRASAEYTRSAFTWRDGQLTLAKMAQPLDIRWSRPLPEGAVPTTVTVSRDAAGRWFVSLLCEDTITPAPATTNAVGLDAGITSLATLSTGEKITNPRHERRDRARLARAQRELARKAKGSANREKARRRVAKVHARIADRRRDFLHKLSTRLVRENQVVVIEDLTVRNLLKNGTLARAISDAAWTDLRMMLQYKCAWYGRDLVVIDRFFPSSKLCGACGTVAAKLPLHVRAWTCEHCGAVHDRDVNAARNILAAGLAASACGDGVRPQRESSRTGRSSVKQEPQRATAGIPRL

SEQ ID NO: 1038 - protein, 254 aa, unknown
  TnpB Polypeptide
VENAQAQAGFQLNGRLWLSKIGEIKIKLHRPIKGQIKTLTLKREHGAWYACFSCVVEPEPLPANDKAVGLDVGLLSCVTRNDGKGIGNPRWFQEAQKHLRRAQSRVARRQKFSKRWKKAVRIVAKIHRKVFNQRNDFQHKLSRKIVNNYGIIFVEDLNVKGLSRGLFAKSVHDAGWAAFFQKLSYKAESAGRRFSFVDPRGTSQRCPCGAPNPKRFSDRKHVCFHCGLATTRDHASAMEVLRLGLSLQPLTVVQ

SEQ ID NO: 1039 - protein, 409 aa, Okeania sp.
LYRAIKVRIYPSSEQSQKLTQVMGCARWWWNYALNLCNETYQQTGKGLSQVALNQVLPKLKKSEETGWLKECYSQVLQSTTLNLTKAFKNFFEKRAKYPRFKFYHGKQCCQYTQNCQVVENGVKIPQVGVIKASIHRLFDGQLKTVTITKTPTRKYYASLLFDTEQETSEVVLTGKVVGIYLGLKDFCITHDGSKTAKYANPKYHQKHQKNLARKQAKLARKKKGSISRQKARKLVARIHERISNTRQDFLHKLSRKIVNDNQVVVVENLNIKGMVCNHKLAKAISDVGWGRFVNFLDYKLQQKGCLLVEIDRWFPSSKTCCNCLYQMSEMPLDMREWNCPSCGTHHDRDENASKNIRTEGIRQLSVLGTRTAAVRAASRREGGEVRPKGGRKSVLRHSPVSKDAPTSV

SEQ ID NO: 1040 - protein, 364 aa, Okeania sp.
LKARYKYRIYPNHVQIKKFNQLFGCCRYVWNQSLAHCNQLYTNGVKRPSYVEETKQFITQAKRELLWLKEVASTPLQQSLKDLDQAYKNFFNSCKGKRKGIKVKPPRFKSRKSKQTARFVGANYKIGQDKIYLPKVGKIKIVGKRKLPSQPTSMTIVKDSANRYYASFVVEINPESLPKTDNSIGIDLGISTFATLSNGEKILAPKPLKKNLKKLAKFQRKFAKSEPGSKRRERRRLKIARLHAKIKDIRTDFLHKLSTNLVKKYDTIVLEDLKVSGMVKNRKLSKAISDLGWRQFRTLTETKCEKYGREFRVINRWEPTSQKCSYCGLRGGKKELNVREWTCLNCGQFHDRDVNAAINIRMGC

SEQ ID NO: 1041 - protein, 400 aa, Okeania sp.
MKARYKYRVYPTPGQKHQLAKLFGCVRVVWNDSLAFCKEQYKLGTKKPSNSELQKQFITQAKKTEEREWLSDVSVVPLQQSLNDLNQAYQNFFTSTKGKRKGRAIKPPRFKTRKSRQTARFTLRGFKPHQDSVYLAKIGKLKIVWSRGLPAAPSSVTVIKDSANRYFLSFVVEIKPEVLPKTDNSVGIDLGIKTFATLSDGTKIDAPKPLKKRIKKYRKLSKFLSKKTIGSKRYEKARLRIAKFHAKLKDTRTDFLHKLSTQIIRENQTIILEDLNVSGMVKNRKLSRAISDLGWRQFRTLLEGKAEKYSREFRVIDRWLATSQICSNCGFKGGFLDLSIREWECLNCGRRHDRDHNAAINILVAGGQSETLNGRGGKQKTTAKVAAACEASTRRGATAR

SEQ ID NO: 1042 - protein, 357 aa, Okeania sp.
MKSIKTKLKVNNQQKTILAKHAGVARHAYNWGLETCIKEYQETQKRPSAITLHKRLVAEVKSINPWYYEVSKCAPQQALRNLERAFKNFLAIPKRGFPKFKKKGKKDSFYLEGSIKIIQGNYIKLPRIGIVKTYEILPSVPVKNVTISKRVNDWYISFKYDYDDRPNPTAKERDIIGVDVGINALATCSDGTKFANVKAYKQAKKRLTRYQRRVNKKESGSKNRVKAVKKLASSHKKVADIRADTLHKLTTWLAKNHSTIVIEDLNVSGMLTNHKLASAIADCGFYEFKRQLTYKCEWYGSELVIADRFYPSSQLCSHCGQKQKMPLHKRTYECTACGFTADRDFNAAVNLENYVHQ

SEQ ID NO: 1043 - protein, 331 aa, Okeania sp.
LWTSRDLVWYSEQQISRVRVVRRADSYYCQFLVNVERKETHNFQGNVVGIDLGLNAFYTDSNGDVVENPKYLRKSEKRLKKLQRRVSRRYEKGKKPQSNIRRQSDGSPNHKARIQLARAFLKISRQRKDHAVKTARALIQSHDLVVYEDLKIANLVKNHHLAKSISDASWYQFTEWLEYYAKLHGIACIAVPPHFTSQNCSNCGQTVKKSLSVRTHKCPHCGYIADRDHNAARNILAKGLEMLGAIVNSTEGHSESGGNLKATGESDLWISDSNISNLSCLYERRIINDENPALRYSDLMPGVCQKLLFSFFLAIYIELRSAFLRNATQTR

SEQ ID NO: 1044 - protein, 384 aa, Okeania sp.
MVEKAYKFRFYPNPEQENLLRRTLGCVRLIYNKALAARTQAWYDKQERVGYKQTSAMLTNWKKQEDLGFLSEVSCVPLQQSLRHLQTAFTNFFSGRSKYPNFKKKRNGGSAEFTSSAFKWEDGQVYLAKCAEALPIRWSRQLPSGCVPTTITVNLDPSGRWSVSLRFNDTRDLSLKPLKKQVGVDVGISSLIATSDGTKVNNPKYFNKLYKKLRLAQKSLSRKTKGSNNYQKARLKVARIHAKIKDSRLDYSHKLTTQLIRENQLIVVEDLAVKNMIKNHKLAKAISDVNWGELVRQLEYKAQWYGRELIKIDRYFPSSKRCSDCGYVVDKLPLNIREWDCPECGSHHDRDINASINIFCGRSSVSLWSALLDLLGVNPGRRVH

SEQ ID NO: 1045 - protein, 361 aa, Okeania sp.
MYKSIKTKLKLNNKQKTFLAQHAGYSRWVYNWGLSLWNAAYKDGYKPNARKLREVFTNHTKPLYPWMKNLSSKVYQYAFRNLGEAFKRFFQGLGKRPRFKKKGRSDSFTIDNCGKPVELNGWSHKLPFIGWVKTYEPIEATTQKITISRQAGNWYLSLSYEFSATPTPKITDVVGVDLGVKTLATLSTGQAFPSIKPYRTAQDKLAKLQRELSRKVKHSNNWHNSVIKLARQHRRVANIRKDALQKLTTHLAKNHGHVVIEDLNVSGMMANHKLAKSIADQGFYEFRRQLEYKTQWYGSELVVADRFFPSSKTCSNCGHVQDMPLHLRTYDCPECGLSIDRDLNASINLRHAVGLTVNACG

SEQ ID NO: 1046 - protein, 434 aa, Okeania sp.
MLQLCTQTIIIQVWSKREIKMRIAYQYKLRPTKEQADKIEKTLDMLRHQYNYMLAEKFNWWEQNRCPINACPLICHLPALKDRPTRFSQQKSLTQLKIDRPWYKQIHSQVLQEVPKRVELAFDRWLKGDSNGKRLGKPRFKRKGQYKTFTYPQFQQHHFVNNKVKLSKIGDVKVIVHRPIPDGFIIKTVSVTRKSNGYFVNFSLEDKSVPEIKPDIKRGRIVGIDVGLIDFFVTSDNESVPAPKYLRKSERKLKSAQRKVSRRKKGSKRRQKAIKQLAKKHRKVADTRKDFHFKTANQLLSNYDIVAVEKLNIKGMAKSRLAKSVHDAGWGQFNTILANKAEKAGQLIVEVKPHGTSVECSRCGNKVKKTLAQRKHNCPNCNLSIGRDLNAAINIKNRAKVLIKDLLPPVKFEAEQGTQLNLFAHQLKRKGIPC

SEQ ID NO: 1047 - protein, 241 aa, Okeania sp.
VTISRKADGYYVTLSLEDKSVPALTFNVEPTLKNTLGIDMGLKEFLVTSEGESVPIPQYYRKSQQRLKTLQKRLSRKKKGSKRWLKDLISVAKQHKKVADKRKDFHFKTANELLLKAEVIAHENLNIKGLARTSLSKSINDTGWGQFLSILTVKAGNAGQKTIAVNPKNTSQDCSNCGEKVPKKLNIRTHSCPHCGIVIDHDTNAAINIKNRAAGHSVLKARGARRDTGAAKREAHTIASA

SEQ ID NO: 1048 - protein, 545 aa, Streptomyces sp.
VAEPEKLRTIAASFVALGPSGVAVRDRLRRLTVEDEKVLRLVGRYMGTLASRDLKARCADGLEHGSETWAARKRDLTAVSSSRWAGSVTKSTHDQWALARRCLAAYIHSLEAGIKTLRHRLSLPVGEHGSKRAPGGYRSKGEWFRKSRRLAALQVRHAAALADWQAGRVRVVRGGKRLVNTRHNLEKAHLTTREWRDRWEAERMFLSADGESGKRFGNETIRITPDGEIGIKLPAPLAHLANAKHGRYILACTVTFQHRGPEWADCIGANRAVAYRIHHDADRDRWYVTASWQRPPVQTIALDAALSSGCIGVDTNNDHLAAWQLDTHGNPVGEPHRFFYDLSGTADHRDAQIRHALTRLLHWARRVGVQAIAIEDLDFTQDKTREKHGRNKRFRRLISRFPTAKLKARLISMAAEHGLAIVAVDPAYTSRWGGQHWHQPLTTPQRKTTRHDAAGIAIGRRALGHPIRRRTTPPPQHQSDAAGHRTVQARPQTRGRDGNRPPATDRTPGGALPDGTRKRRPSASKTVLDAPSSQQRVQDSLMRTG

SEQ ID NO: 1049 - protein, 368 aa, Bacillus sp.
  misc_feature (263)..(266): Xaa can be any naturally occurring amino acid
  misc_feature (364)..(367): Xaa can be any naturally occurring amino acid
MTKQNKAYKFRLYPTEDQAHLMRKTFGCVRFVYNRMLAERKEAYEKHKDDKDQLKKQKLPTPAKYKAEFEWLKEVDSLALANAQLNLQTAYKNFFRGQNDFPTFKSKKDRKSYTTNVVNGNIMLLNGHIKLPKLKMVRIKQHREIPQDHIIKSCTIFMTPTGKYYVSILTEYEKEIVQKKVETVVGLDFAMDQLYVSSEDERANYPKFYREMLDRLAKAQRVLSRRTKGSGRWNKQCIRVAKLHEKVANQRKNFLHHKSKELXXXXGNIMLLNGHIKLPKLKMVRIKQHREIPQGHIIKSCTISMTPTGKYYVSILTEYEKEIVQKEVETVVGLDFAMDQLYVSSEDERANYPKFYREMLDRLXXXXR

SEQ ID NO: 1050 - protein, 170 aa, Bacillus sp.
  misc_feature (115)..(118): Xaa can be any naturally occurring amino acid
MTKQNKAYKFRLYPTEDQAHLMRKTFGCVRFVYNRMLAERKEAYEKHKDDKDQLKKQKLPTPAKYKAEFEWLKEVDSLALANAQLNLQTAYKNFFRGQNDFPTFKSKKDRKSYTXXXXYQRQNKKENLLATPNRNSSPTYRWATPFTRLRKENSFGKFVKLKQEHLFHPK

SEQ ID NO: 1051 - protein, 377 aa, unknown
  TnpB Polypeptide
MKLTLQIRLLPTDEQAVMLKKTFSVFNEACNTISQIAWERHVFKQFNLHKEVYYPIKETYHLSAQLVVRAISKVADAYKLDKKKQRHFREFGAITYDSRVLSYNTDKSVCSISLIGGREKIAFTCYRPQLMQYAKGEADLVLIKEKFYLHQTIDIPDEEEEAAEEFLGVDMGITDIVSLSDGTNISSDEVKNIRNRYNRVRASVQSKGTRNCHKLLKRLKGRERRFATIVNHRISKQVVAKAKEEHKGIAIEDLKNIRWGMNSKRRNKTFRRRSNSWSFYQLRSFLEYKCKMNGVQITVIPPAYTSQTCHECGHIGIRNGKHFRCVHCGNVADADVNAALNIATWGYVNTHERWELLSCPIHDNYSTSKAHKSLVCG

SEQ ID NO: 1052 - protein, 392 aa, unknown
  TnpB Polypeptide
VSKQIKRAYKYRFYPTEEQRIILAQTFGCVRFVYNWGLNTRSTVYKERGEKLYYNDLAAMLPDLKKQYPWLGDVSSVPVQQSLRHLDRAFKNFFEERAKYPTFKKKQNSQSATYASNAFKWDGATLKLAKMDPPLDIHWHRSLPKDAKPSSITVTKDCANRYFVSILIEEKIESKPVVNTMVGLDLGIKSMVALSTGESVGNPRYFAKDEKKLAKAQRRHVKKKKGSKNRNKARLKVAKIHARIQDRRRDYQHKLSTRIVRENQGICVESLAVKNMVKNRCLAKAISDVGWGEFVRQLEYKSKWYGRTLITIDRFYPSSKTCSACKHVLDSLPLDIREWVCPECGTVHDRDTNAAINILAEGLSVNACGGGVRPIRAKARRATPSEAGSSHS

SEQ ID NO: 1053 - protein, 457 aa, Moorea sp.
MQVTLRDWPLATLRERKWYNRIVILTYCYKIKPSPEQIAIMERWLELLRRHWNYALGQRLDWLNRTRSPIDRCSLISEPIGVIPEAVNYYTQQAALKETKQLFPEYKQIYAETQQVNLQRLKKAWDRWRKPVKHGLRGGRPRFKKPGQLRSFVFPRVNSPRAGAHLKNGMLKLSRIGEIPVVMHRPIPDGFILKQCTIIKKADGWYCCISMKDDTVPDLLPVNSVRSAVGIDVGLEKFLTTSDGEAVPIPQFYRKAQDKLAKAQQVMSRRVKGSKNWEKAKNKVALLHLHLTRCRKEFHYQVAHWLCSNYDLIAHEDLNIKGLARTKLAKSIHDAAWGSFLEILQAVAVKRGLLVQKVNPRGTSIECFKCGSRVEKSLSERVHYCSSCEVKIDRDWNSGINILNRALMAVGLPLNGCGKSVQDIVRASGGRRPRYGNGSAEEQQVSFVRLRSPHHNL

SEQ ID NO: 1054 - protein, 265 aa, Methanoculleus sp.
MPLDQMRALRGDEGGLNHMALSFGALGGVAGRPRSRDRGRALRPFVIFPGGYQKEYIVVRTSNTCMLRAYKYRMYPSQEQVASLMHHIHACRFVYNKAIQKLARCHEKVSNQRNDFLHKLSNRVVGENQAIAVESLNVSGMQKNHCLAQSISDVSWSAFFTMLEYKCQMHGKTLSKIGRFEPSSKICNWCGYIKQDLVLAEREWICPDCGTHHDRDINAAINIKKFALQDQNLVGVSGVERAEGPVDSLPMGRGMKQEAPPLRAG

SEQ ID NO: 1055 - protein, 371 aa, Actinomadura sp.
VQLRYSFRLYPTAGQRQALARAFGCARVVYNDALAARRDAHEAGLPFPTAAALSAAMTAAKKTPERCWLGEVSSVVLQQSLRDLETAYRAFFEGLAGRRPKVGAPRFKSRKDNRQSVRFTANARWSITPGGKLALPKVGEVKVRWSRRLPAIPSTVTVVKDAAGRFFASFVVETGDEPLPEPGTETGIDLGLEHFAVLSDGRKIASPRFLRRAEKKLRKAQQALCRKQKGSSNRDKARTKVARAHARVADARREFHHRLSTALVREYQAVYVEDLCVKGLARTRLAKSVHDAGWSAFTAMLEYKAARYGRTFARVDRAFPSSQLCSHCRHLDGPKPLHVRAWSCSECGTAHDRDVNAARNILNEGRRITTR

SEQ ID NO: 1056 - protein, 303 aa, Raoultella sp.
VAFSNFFNPKLKARFPAFKCKHGRQSSYHCVGVKVLDGAVKIPKIRAIEARLHREITGTLKSITISCSATGKYYASLLCDDGMKAPAKPALISNVTGLDMGLAHFAIKSDGNKIANPRHLINASHNLRRKQKALSRKKKGSANRRKARMQLAAVHERVANARADFQHKLSRAIVDENQAVIVETLKAANMMKNHHLARATGDAGWSGFIAKLEYKAAEKGVHLVKLDQWFASSKTCHCCGHRVPEMPLHKRIWQCPECGAAHDRDINAALNIERKGTLELQAAGLVVSAHGGQRKSVKQTVAA

SEQ ID NO: 1057 - protein, 466 aa, Micromonospora sp.
VVHRTARVALRVTAGQRRRCFGLLRSAGDVWACVLEVNAWRRRRHDAPLAGYQELCRELSASGAGTFAELDSTGARSVLRRFSDAWFAAAKQRRAGDASARFPRRRRGLVPVRWYHGTFTLDGHRVRIPTARGTTALWVRLARQVPYPVEQVRSITLLCEGGRLFLDVTAEVPVAVYPPGEGPDPARVAGVDIGIIHPYAVAGPGGQALLVSGRAIRAEHRMHLADTKARHRAVARRAPKPGQRGSRRWRRYRARARAVEGRHRRRVRQAQHEAARAVVGWAVEQRVGVLHVGDPRGVLDLPAGRRHNLRLRQWQIGRLLQILTDKATLAGITVHLVDERGTSSTCPTCRQRIPKPRGRTLTCPHCQFTGHRDLVAAASIATRIPGGGRTTPTAIVLPGMVTHRRAGRHLPGAGRSRPDPRRPPGGVRVKMARCGPPHRPVGSRSPNKRGSTTPHRRPGERQWTQH

SEQ ID NO: 1058 - protein, 419 aa, Micromonospora sp.
MADAPSTMTVLSGWLGSVRTAYRCRAYPTPEQVVVLSRTFGCVRVVWNRTLAARRARYRAEGRSTSYAETDRALTEMKKQPDLAFLGEVSSVSLQQTLRHQHTAMTAFFQKRARYPRYKSRHGRQSASFTRSALRMRGGNLTLGKTPGVLRFVWSWPGVDVAGLDPTTVTVSRDPDGRWFVTFAVDIGAPVAPEATGQVVGVDLGLTDFAVLSTGERIPHPKHMERRERRLKRYQRMMARRQKGSANRAKAKRKVARAYSRVRDARRDFLHQQSTTLVRRFDAIAVEDLAVANMVRNRSLARSISRTGWAEFRTLLTYKAHRDGRTLAVVDRWYPSSKTCSACGHLLATLSLGMRHWRCPGCGTRHDRDVNAAQNIAVAAGLVETKNACGADVRHEGSPSVRSAVNQEPQPARVGIPRV

SEQ ID NO: 1059 - protein, 312 aa, Micromonospora sp.
VKTIQAYRFALDLTPGQEWAVYAHAGAARVAHNWALARVKAVLDQRAAERTYGVSDDQLTPAVSWSLPALRKAWNAAKPEVAPWWGEVSKEAFNTGLDALARGLKNWADSRKGKRAGRPVGFPRFKSRRRTTPSVRFTTGAIRVEPDRKHIVLPRLGRLKLHESARKLARRLEAGTARIMSAAVRRDGGRWHVSFTVEVERAERTPDRPGSVIGIDVGIKHLAVLSTGELVPNPRHLATAQDRLRRLGRALSRKSGPDRRTGRRPSKRWQRAAYAGRWPRSVNPARHQSVRPGPSHRKAGLPTVCSLERTER

SEQ ID NO: 1060 - protein, 458 aa, Micromonospora sp.
VKTIQSYRFALDLSPGQERAVLAHAGAARVAHNWALARVKAVLDQRAAERTYGVPDEQLTPSVSWSLPALRRAWNAAKAEVAPWWAECSKEAFNTGLDALARALKNWSDSRTGKRAGRPVGFPRFKSRRRTTPSVRFTTGTIRVAPDRMHVVLPRLGRLKLHESARKLARRLEAGTARIMSATVRRDGERWHVCFTVDVERADRVPAEPMSVVGVDVGIAHLAVLSTGELVPNPGHLAAAQRRLRALGRVLSRRTGPDRRTGLRPSNRWQRAVARLGRAHARVANLRRDGLHKLTTRLAAEYGTVVVEDLNVSGMLRNRRLARHIADAGFAELRRQLAYKTGWNGGRLIVADRWYPSSKTCSGCGTVKTKLALSERTYTCTTCGLSLDRDLNAAHNLAAFATETTAGSGPVAGRGADRKTRSGRQVATKRQPGTASAGQTGTVPPQGRTTDHVFTRAH

SEQ ID NO: 1061 - protein, 495 aa, Micromonospora sp.
VRPPRRRVRQHGPGPRRRRAGGPADRRPAGRRAPRRGVVRTPTGRRAGPPRRGVGGSSVSLHRITARMPRPSGRGGTADAPSTMTVLSGWLGSVRTAYRCRAYPTPEQVVVLSRTFGCVRVVWNRTLAARRARYRAEGRSTSYAETDRALTEMKKQPDLAFLGEVSSVPLQQTLRHQHTAMTAFFQKRARYPRYKSRHGRQSASFTRSALRMRGGNLTLGKTPGVLRFVWSWPGVDVAGLDPTTVTVSRDPDGRWFVTFAVDIEAPVAPEATGQVVGVDLGLTDFAVLSTGERIPHPKHMERRERRLKRYQRMMARRQKGSANRAKAKRKVARAYSRVRHARRDFLHQQSTTLVRRFDAIAVEDLAVANMVRNRSLARSISRTGWAEFRTLLTYKAHRDGRTLAVVDRWYPSSKTCSACGHLLATLSLGTRHRRCPGCGTRHDRDVNAAQNIAVAAGLVETKNACGADVRHEGSPSVRSAVNQEPQPARVGIPHV

SEQ ID NO: 1062 - protein, 401 aa, Micromonospora sp.
VIKAVKRAFEYRFYPTGGQAAELVRTFGCVRKVYNLALAARTEAWTLRQERINYNTTSAMLTEWKKTDELAFLNDVSSVPLQQALRHLQTGFTSFFAGRARYPRFKSRKKSRKSAEYTTSAFRYRDGRLTLAKMTAPLDIVWSRPLPDGATPSTVTVSQDSAGRWFVSLLCDDRVNVAPTSGAVGIDVGLDSLLTLSTGEKVVNPRYERADRARLARAQRALARKEKDSHNRAKARLKVARVYARITDRRRDHLHKLTTRLVRDNQTIVIEDLTVRNMVTNHTLARAISDAAWRQFRTMLEYKTNWYGRDLITVDRWFPSSKLCSACGKLAEKLPLNVRSWTCRCGAAHDRDVNAARNILAAGLAVSACGAGVRPRRESSRTGRPAMKQENPRATTGTLAH

SEQ ID NO: 1063 - protein, 249 aa, Micromonospora sp.
VSRDPDGRWFVTFAVDVEAPVAPESTGQVVGVDLGLTDFAVLSTGERIPHPKHMERRERRLKRYQRMMARRQKGSANRAKAKRKVARAYSRVRDARRDFLHQQSTTLVRRFDAIAVEDLAVANMVRNRSLARSISRTGWAEFRTLLTYKAHRDGRTLAVVDRWYPSSKTCSACGHLLATLSLGTRHRRCPGCGTRHDRDVNAAQNIAVAAGLVETKNACGADVRHEGSPSVRSAVNQEPQPARVGIPRV

SEQ ID NO: 1064 - protein, 414 aa, Rhodococcus sp.
  misc_feature (226)..(226): Xaa can be any naturally occurring amino acid
  misc_feature (414)..(414): Xaa can be any naturally occurring amino acid
VQLRYQFRVYPTPGQQDMLARSVGCARVVFNDALRARQDAYAAGVTLSDTDVQKRVVTEAKKAPERVWLSEVASVVLVQACQDARRASRNWFDSMSGKRKGRRVGAPRFRSRKDNRQAIRLTRNGFSIRRNRKLYVAKVGELKVAWSRDLPSVPSSVTIIKASAGRYFASFVVEVDQQPLPEINTEVGIDLGLATFAVLSDGKTITSQKFLRRAERKFRKAQRTLXRCPVGWQNDHVAEVSATRRAQVPQGSADPFPQGEGQQQPGQGAPACRQGARPGGRFASQLRAPAVHGDHPRQPSGVRRGPGGVRVGAHSVGEVGARRGMGHVHPDARGEGRPVWADVREGGSLVPVVAALLGVWSGRRAEAALDSRVDVCSVWCGPRPRPERREEHSRRRTCGEVKRLRRDRKPCRVX

SEQ ID NO: 1065 - protein, 438 aa, Helicobacter sp.
MIIQDKNKGVVLLNAVRFRIYPNAQQKELISKHFGCSRVVYNYFLDYRQKQYAKGIKETYFTMQKVLTQIKRQEKYHYLNECNSQSLQMALRQLVSAYDHFFTKRARYPKFKSKKNAKQSFAIPQNIEIKTETQTIALPKFKEGIKAKLHRDLPKDSVIKQAFISCIADQYFCSLSYETKEPIPKPTIIKKAIGLDMGLRTLIVTSDKIEYPHIRFYQKLEKKLTKAQRRLSKKIKGSNNRKKQAKKVARLHLACKNTREDYLHKISDEITNQYYLIVVETLNVKGLMRTYHSKSLANASWGKFLAMLEYKAQRKGKTLLGIDKFFPSSQLCSYCGVNTGKKHEGITQFTCPHCQITHHRDYNASVNIRNYALGMLDERHKIKIDKSRVGIIRTDYAHYTNERIKACGASSNGVISKYGNILDLASYGAMKQEKAQSL

SEQ ID NO: 1066 - protein, 439 aa, Haloferax sp.
MLEIHRTHRAKILNHSQVAEMLDIHGWSASKLWNVANYHSRQVWNDSGEIPGHEDLKSELKSHTTYKGLHSQSSQRVLEELAESFNSWYGKRKSDDRANPPGYRKKNYYDDDGNRVHEEHPRSTVTWKQNGIRHDTKHNRVRLSKGASHKEHPKAWEYILVEYETRPGVSVENLKQVRAVYNKAKQVWELHLVCKDEIETPTAPGNETAGVDLGICNFAAVAYSTKEADLYPGNRLKQDGYYFPKEIANCDDSGGSEATRLHHKWSERRTHFFHSLAKHIVEKCIERGVGRINIGKLAGVREDENGEPKNWGRHGNLDLHGWAFDRFTKILTYKAKVEGIEVVEVSERNTSKTCCVCGREDYNQRIERGLYACEKCDAAFNADVNGAENIRLDLNQSNSKSAPRLGGDRSTGWLAQPGVYLHDLSHGFSPREQVVDCKP

SEQ ID NO: 1067 - protein, 413 aa, Microcystis sp.
MKARYQYRIYPTDQQKRLLSQLFGCVRVVWNDTLAYCQELYRQGEKKPKYTELSKRLTQVKKTEERRWLTEVSSIPLQQSLRDLETAYSNFFASCKGERKGRKVKPPKFKKRKSKQSARFTDNGFTVNQHCVTLAKIGDLRIVWSRPLPSKPSSVTVIKDAADRYFLSFVVEIQPEILPNNGESVGIDLGIATFATLSTGEKIDAPKPLKKRLKRLRKAQKNLSRKQKGSKRREKARKRVAKIHAKIKDTRTDFLHKLSTRIVRENQTIILEDLNTSGMVKNRKLSRAISDLGWRSFRDMLSAKSDKYGRDFRIISRWEPTSQRCSCCGNIGGKKALNIREWECLFCGTFHDRDVNAAINIKVAGGQSETLNGCGGKCKTSVKEASSREASTQPKIVQLSLFDLPVITVRPRR

SEQ ID NO: 1068 - protein, 447 aa, Haloglycomyces sp.
MRLLSSDAVLRLSRRGCSAFREAGWFAISMSDVPVTLLALHLRYRFRLYPTGPQRRQLARTFGCVRTVYNDCIAVRRAAYAAGEGYPSSVSLAKALIIEAKKTPEREWLSEVSAVVLQQAMRDCDRAYKNFFDSLTGRRQGPRVGPPRFKRRASTQTVRFTKAARFRVLGNGRLRLPKIGDLTVAWSRELPSDPSSVTIIKTPTGKYFASFVVAVDDGADLLDPLPDDAGTGIDLGLKDFAVLRDGTTIDNPRFFKRLERKLKKAQRSLSRKEKGSINRAKARLRVAKVHEKITNSRSDWIHKQVCAIVAENHSIIVEDLNVKGLQRSGMSKSIQDAAFGMFFTRLESEAARAGRTFVTVDRFFPSTRLCSACGALTGPTGLEGLAVRRWECGCGVSHDRDANAEKNIRAEGRRLVAAGRAETVNDSWSAGRTRRVPAQRVEAVTRP

SEQ ID NO: 1069 - protein, 438 aa, unknown
  TnpB Polypeptide
MLEVHRTHRANIHNHSQVAESLDRHGWSASKLWNVANYHSRQVWEDTGEIPDHEELKDELNTHPKYKGLHSQSSQRVLEELAEAFNSWYSSDDDRDNPPGYRKENYYDDQGRRVHEEHPRSTVTWKQNGIRHDTKNNRVRLSKGANHKEHPRAWEYILVEYETRPGVTVENLQQVRAVYDQSKERWELHLVCKDEIATPDAPGTETAGIDLGISNFAAVAYSTEDADLYPGNRLKQDGYYFPKEIAKCDDSGGDRAMHLHKKWSERRTHFFHSLAKHIVQRCVEKGVGRINVGDLEGVRENENGGSKNWGRHGNLDLHGWAFDRFTSILEYKAKVAGIKVVAVSERDTSNTCCVCGREDESQRVERGLYVCEECTAAFNADVNGAENIRLNINEESNSESAPSSGGDRSTGWLAQPGVYLYDLTCGFQPQAEVVDSKP

SEQ ID NO: 1070 - protein, 378 aa, unknown
  TnpB Polypeptide
MQLSETVKLYMTREQKSLVVMAMNKYISTVNSLISVATSGTSISKYTTADVNASLPSALTNQCIRDAKSIVNKYNKDCRKASAKNKKLARQRSNITIKEPIVPVLKRPCCYVNNQNFKIRDNCIEFPVLINGKSKRISIRTSMTDKQKQIFANTKFGTMRIVYKDNKIVAQIVYEVAEPGYTDDGNVMGVDLGIKCPAVSYISDGSVKFYGNGRKNKYMRRHYKYLRKKLGKAKKTDAIKRINNKEQRIMKDIDHKLSREIVNTATAHGVSVIKMEQLANIRSTTRTSRKNNHSLHTWSFYRLAQFIEYKAKLAGIKVEYVNPAYTSQKCPVCGNVHHANDRKYICKCGFHTHRDILGAMNIRNSTEYVGDSNIRHTA

SEQ ID NO: 1071 - protein, 420 aa, unknown
  TnpB Polypeptide
MSEEKNLKIKESGKVTRERHSQMDCRVISAKVQENRLSEAKLEKLRRCFHEAKWLYNAVVATDSLSLDNTKNVQVKVKDHFEEREIRCLSAQMKQSVIESVKTNISNLSKAKKKGLRVGKLQFKKECNEINLKQFGHTYAIKGKNKIRVEKIGVLVVNGLEQINVDEVEFANAKLIKKPSGFYIHLIVYSKRQQEVPTEKEILGLDMGIKDQLIFSNGVKVNFYLEESEQLKGLMRKLSRQVKGSNQYKQTLNRIKRIYEYQNNKKNDVVNKLNSVLSKNYIICFQDELLRQWQQKKSKRKFSFGRKVQHGILGKVKDKLKKNSSNVMLESSVPTTQTCPECGCLTKHSLDKRKYHCNYCGFENPDRDVHSANMMVLLSGYGTYRSLNTDTVSTEKMVGLLDNLSYLGVVITTNSMEACH

SEQ ID NO: 1072 - protein, 496 aa, unknown
  TnpB Polypeptide
VPYAAFDKNGGPLELNEVLDGVKADAELVAHYALEEMTEQNLALVTYFDGIKPAEAGRQMNLKLPAEVKKQFKSGASRLEKMFQEQVVTNLRSWAARVEVMTQTYPKYVSAGWKRTASDSKPSSMQPRLALSAADKQYREMTVAPDRIELMMVVQGQKTVLYFPTPPQLLEVGCEPSVPDIWVDKNNRVVFGFHGKTDPGRPEFSERYVVGVDVGITNPAAYVVWDIEKKEIVEESLLSQRARSLNNKIKRGAKQVSALKRKGKHEEAASHREHLSNRRHELSIIIAQELADASWHYDNAIVSFEDLSHIKNTMKHGRWFRGEVFRRTRDMVEADGGRVFKVNAAYTSRRCHVCQTDLDMGDYSQPRSTTCDTTYHRDINAAANIAQRVNVKKACQTRKRHATEKRTRKSKCHSKPLKHPGTKNKPTPKAPQNQKKRRTSTCTYPPLPSKEVSKEMCPADSRVSVVDHTWFQTTSGTTNPKENLSASTVDWFYPQE

SEQ ID NO: 1073 - protein, 377 aa, Bacillus sp.
VLTHKAYQFRIYPNVEQKIGIAKTMGCSRFVFNYFLEKWNEVYKETGKGLTYGACSSQLPTLKKEFVWLKEVDSIALQSSLHHLADSYTRFFKKQNKAPKFKSKNNKVQSYTTKCTNGNIAIVGNKIKLPKLGLVKFVKSRKVEGRILNATVKRNPSGKYFVSILAEVEVQGLLKTGSAVGIDVGVKNFAILSTGEVFGNPKWFRILEQKLAHAQRILSRRTKGGANWHKQRIKVARIHERIKNARTDYLQKLSTRIIKNHDVIGIEDLQVTNMLKNGKLAKAIQEVSWSQFRAMLLYKAQWYEKQVVVVSKTFASSQLCSHCGNKNKDVKDLNLREWKCPSCGMHHDRDVNAGQNLRKEAVRLLTVGTTEIAYSYN

SEQ ID NO: 1074 - protein, 369 aa, Bacillus sp.
MSKQNKAYKFRLYPTKEQEILFAKTFGCVRFVYNKMLAERKEQYEQFKDDKEALNNLKFPTPAKYKKEFEWLKEVDSLALANAQMNLQKAYKNFFSNNAKFPKFKSRKAKQSYTTNVVNGNIALLDGYIKLPKLKKVKIKQHREIPDAHKIKSCTISKTKTGKYYVSILTEYEKEITKIEIKNVVGLDFAMDGLFVDSEGEKANYPKYYRQTEEKLAKEQRILSRRKKDSKRWNKQRIKVAKLHEKVANQRKNFLHHQSKNLANIYDAVIIEDLNMQNMSHSLKFGKSVADNGWGMFTTFLQYKLKEQGKQLLKIDKWFPSTKMCSNCGTVKEMMLSERTYQCSCGYTGCRDHNSAINIKNEGIRLLAI

SEQ ID NO: 1075 - protein, 502 aa, unknown
  TnpB Polypeptide
MYKSLDIEIHQNNKLYHYFRDMCIKSKNLYNVGNFYIRNTMTALSKEPTARNDNEKEVLSIIMKNLKEFNSTRMKSIEKELFKILVTEKDESKRKEAINKKKEEFKKYYRQENMPTKEKWFLDYNLLEGILKFSHNKDYEALPAQVNQAVLKLLIQNWKSFFKAKKDYSNNPSKYLGKPKLPGYKDNMMITTFTNINCKFQEENNNYYLRFPKTKDKLLVTKEIVDKGKFMQVVVKPFYGVFKVFLVFNTGTEELVVDKDPKRIFGIDLGINNFVAISNNIGTTPIVVKGKFIKSYNQYFNKRKAKLISILDKNDQERDTKQLNNLSRYRFNFFHDVFYKIAHYIIREAKTNNIDTIIIGHNNLWKNKSPMKKKDNQNFVSIPFNNFINILGWLCSINGINYIIKEESYTSKASFIDKDFIPTYGKEKGVAYKFSGTRVKRGLYKTKEGIKFNADINGASNIIKKAINSAFDEINDFSYIVNTIKVLNYKDFYKISIPRKRG

SEQ ID NO: 1076 - protein, 634 aa, unknown
  TnpB Polypeptide
MVKKKKKETFKIFRNFEKSKFKTIKTTLKSVLLKYNEVQPLITHLVFEMNDLVIHTYQFIRLYILYCFHNHLEFPVFDDKFTFIKYCIKTLGTKSNSGRKSKDTQLLNALQEFYKKEYQPLLNHNKTSLLNKSHLINIVAEQIQVCITNNIQEHFIQHFLRFINKTTNGITNDKKELFEFKNQLFMLEETNEIFNQWKATHLTHILPTNIKKSIYYDVKVRQIEYLKGLLYMNYILETQENKLFQPLPLRNNIIPKNIKFDSACIAELFCPESEKKGEVLKKITNYQNMLWSSLLNMKHRLFKNKHYTFYNEITTDGISCSLLFIRKDCKGEENKNKQINSEDFEYISIEELDTQQLENLKPRNIVGLDPGKRSLVYMMDGQGNKLQYTAPQRKKESMVKRNQIILQREKKNNKINEYENVLSLQNSKSVNYNSFKSYLVEKDSLNKQTIEFYKKEVWRKMKFRKYSYGNKSIDTFLNNIEKTFGENILICYGNWSRSSQMKHFMPTMNKGLRKLIHKRYDTITINECNTSKKCCDCFQDLKHYRNKGNKEEFRLLVCSNCVSCENKKIVFRTRDANSSINIMNLGKCWIYKQQRPSEFCISSFTISNKKEEMEKVRPSVDFTEGNTSSHRILE

SEQ ID NO: 1077 - protein, 410 aa, Nocardiopsis sp.
MTSKSVKRAFRYRFYPSDAQAAELSRTFGCVRLVYNRALAERSAAWNQRRERVGYSHTSAMLTAWKRTEELSFLTEVSCVPLQQTLRHLHTAFRNFFDKRARYPRFKSKKTSRASAEYTRSAFRYRDGHLTLAKMAEPLDIVWSRPLPKGARPSTVTVSRDAAGRWFVSLLCEDTITSAPAIRDAVGVDAGITSVVTLSTGEKVANPRHERRDRARLAKAQRALARKAKGSANRDRARRKVARACARITDRRRDFLHKLSTRLVRENQVVVIEDLAVRNLVKNRRLSRAISDAAWRELRTMLEYKCAWYGRDLVVVNRFFPSSKSCSTPGCGYVHTSLPLRVREWTCPSCGVVHDRDVNAALNLEAAGLAVVACGAGVRPQRESSRTGRSATNQEGHGATRDEALASNHR

SEQ ID NO: 1078 - protein, 479 aa, Acidimicrobiaceae sp.
  misc_feature (454)..(454): Xaa can be any naturally occurring amino acid
MENLVSMAKKLRPISSPFVVAAPAGARVRTRLFVNGTDADVLFAVGRHLGSLAGVDLARRCREGTLDAEGHKTSRRGRKRSLTNQSSSRWAGAITRATDDQFQLRRRNLVAEQGSLRQRIRLIDRRLVLPVGSKRGRVRAYPSQSERFEKQRRRQVLAGRLSEVERRLDEGDFSICRGGHLLAKARHSLHAAGLSQSEWRERWDAERMFITADGEADQLLGNLTIRWDPADGSLEIRLPAPLERLANRPHGRYRLGCPATFSHRGDEVAAQALSGALRYDIAYNPIKHRWYCDASWKIKDVAQSPTLESLRKSPVVALDLNHGHLALCVVDPSGNVVGNPRTISLELAGLAATTRDGRIRAAISEVLGVVKVHGCRAVVIEDLDFKDSREQGREALGRRPSRGKKGKNFRRLVSGLPTAKLRDRFVQMASNQGLCVVAVDPAYTSWWGAEHWLXPPRGGPRDRETWARTPGATTQEWEV

SEQ ID NO: 1079 - protein, 379 aa, unknown
  TnpB Polypeptide
MMTYTYKLYRNKRTTKLDAMLREACFVWNHALALQKRFYSLFGKYVPCRKMKAHFAKRITRRLLHSQSAQEILERLDLSYKRFFDHLSRRPPKFRKARDFSSIVYKQGGFKLNGNVLVVNSIKQHFQFSFSRPYEGKIRQIRIRRSRLGEYYLYIVTDAVAGFCAHGKSREGASVGMDFGLKTYLTLSDGTKIDNPLFLKRGLNELRRKSRALSRCEKGSNHRKARRKDLERCHERIHNRREDWQWKECHELCRKYDTICIEDLSLLGMTRLWGRKVNDLAFGAFVRKLEYVASKYGTEVVKVDRFYPSSKTCSVCQYANEHLSLRERRWTCPSCGTSHDRDLNASINILRQGIASSGSIRKTVLARREALATGESPVL

SEQ ID NO: 1080 - protein, 337 aa, Pseudonocardia sp.
VPIVRYRYRVYPTPDQEQALARTFGCARVVYNDCLRIRQEAYTAGEKLPDSEVQRRVITLATHTPERAWLGEVASVALVQACQDARRAYRNWLDSLSGKRKGRRIGRPRFRSRKDHRQSIRLTRNGFTLRANGRVHVAKVGELRVEWSRPLPSVPSSCAVIREADGRYYVSFVVERDPAPLPPTDREVGVALGLGRLAVTSDGQVIANPRHLRAAQRRLARSIHDAGWSTLVRLIEEKATHHGRTVVKIDRWYPSSRLCSTCGHRDGPKPLAVRSWTCPACGSEHDRDLNAARNVLAEGRRIAAGLAEIENACGGDVRPGPGRAAAGEAGTRLGALA

SEQ ID NO: 1081 - protein, 380 aa, Pseudonocardia sp.
MGERVAKRAYRYRFYPTPAQAGQLARTFGCVRYVHNRALAERSRAWTQEQRRVTHAETDKMLTAWKQDPDTAWLAEPSKGPLQATLRHLQTAFVNFWAKRAGYPTFKRKGKTTDSATYFRGCFTYRDGQITLAKQAEPLRIVWSRPLPEGAVPSQVTVSRNARGQYHLSILVETPVAELPKTDSAVGIDAGITSLVTLSTGEKVANPRHERRDRERLARAQKALSRKQNGSANRAKARARVAKVHGRIRDRRRDLLHKLSTRILRENQTVVLEDLAVRTLVRNHSQARAISDASWSELRRQLEYKAAWYGRQVIAIDRFYPSSKTCSACGAIVESLPLDVREWTCRCGTRHDRDVNAARNVLAAGLAVGACGDGVRPPRA

SEQ ID NO: 1082 - protein, 425 aa, Kitasatospora sp.
VKIVTRVKLLPPPEQAMVLERTLRTVNDAANGVSSVAFERGVPREYELRKHTYAELKARGLGAQAAQHTIKKTCDAYTTLKANLRAGNLGKPGSKRRGKVESKPIMFRPEAAQPYDDRCLSWQLDAGTVSIWTIAGRLKGVRFACSPEALKMLRKHRKGESDLIERNGVFYLVATCDVPEAPLNENPAGFVGVDLGIVNIATTSAGYRAASRGLNRYRNRQLDLRQKLQAKGTKSAKRLLKKRSRKEARHSANVNHIVSKTIVTAAERTGSGIALEDLTGIRTRVRLRKTQRTSLHSWSFQQLGQYIAYKAKRAGVPLVYVDPAYTSQQCSECHHIERKNRVDQATFACRSCGTVMHADHNASRNIARRGGVVWTAGRESRVPAPARVLRRRRPRDSQSRPTSKPGLHGRVKVDSQTWSRSRSAE

SEQ ID NO: 1083 - protein, 367 aa, Methanosarcinales sp.
VPKRTFKYRLYPTEDQVQILIYCLTACRHLYNEMLEDRKNAYDRCGIGLNYNQQAGQLKYQNLGIYSQVAQDVLRRLDKAFKAFFGRVKNGETPGYPRFKGYDRYDSFTYPQSGFKIKDGKLYLSKIGAIRIFRHREIKGKIKTCTIIRDGNQWYASFSVELPNTEKKEIKTSVGVDVGINTLATLSDGTEIENPKTLDKYDSKLRKAHRDISRKKKGSSNRNKQKIVLKGVYRKVRAARKDSLHKASRFLADTYDQIIFEDLQIKNMVKNHHLARSILDASWGILINFTTYKAEEAGGIVELVNPRNTSKQCSVCGCIQSMPPSQRTYRCPNCGAVMGRDHNAAINIKNRYVPTDCGELTPVEMVA

SEQ ID NO: 1084 - protein, 433 aa, Spirulina sp.
MVQVNVMLTNYQYKLLPTADQASRMTRWLDMLRHQYNWLLAERFDWWEHHRCPINACPLTCSIAEPRERPEYYGQKRSLVQLKQEREWYKDIHAHVLQDMVKRVDLAFSRFIKGDYNGNRSGKPRFKGKNRYRTFKFPTVKADCIQGNRVTLPKLGAIKFIQHRPIPGGFKVKGAMVTLKADGWYVTLVLEDKTVPVQPETTTEPTPENSIGVDAGLEYFIACSDGSTETPTKFYRQVQEQLSKLQVKREERPKGSKARRKLNQRIARLHQKIARQRRQWHFEVAGRLLDKADVVFVEKLRVKNMSRKNKPKPDGDGGFAPNGQAAKSGLNKSFADAGISGFLNEILPYKAAKAGKRVIQVNPAGTSQHCAICLNRVLKELSDRWHDCPNCGASLPRDVNSGILIKKVGLGIASLKNAKSRQRDGEARALCTA

SEQ ID NO: 1085 - protein, 303 aa, Ktedonobacteraceae sp.
MLLCKKIRLEVSDQDAATLEYMQGKCRGLYNWWVMRLRDGEKWPGWATAKKTLQASKAHDPELTWVYSKLLHEVYFRLDAAMQAFFRRIKNGEKPGSPRVRPRHCFFTLIYPAMYIKVEGLSVTLPTGGKGKHKHFPDVVATLTEDAPTSYKDVAVSRDGQGRYSVSFVHEEPEQTRQDEGVLAIDLGIKTLATGVNTQGRVYHVNGFKGGRWYNRQLDKIRSKRDHCKKKSRRYLHLSKVYQRVSQKKRNKHKDSLHKASHLIAHTLVERTVVIGDLSQRQMVMKQHQERNRHLTRNRTCAA

SEQ ID NO: 1086 - protein, 389 aa, Acidibacillus sp.
MTQKAYKYRFYPTAGQGQLLSRTFGCVRYVYNWGLRLKTDAYYKEGRRLYYKDLSAQLTVLKRQPETVWLNEVSSVTLQQSLAHLDRAFLNFFEGHMNYPKFHKKHNKQSASFMSSAFKWDGKNITLAKMKEPLDIRWSRYFSGTPSSVTVSKDAANRYYISILVDEPTTPLPKIGTQLGLDMGLTHMVILSSGEKIGNPKFFRKDEKKLAKAQRQLAKKQKGSKNRDKARIKVARIHARIADRRQDFTHKLTTRLIHENQVIAAESLQVKNMIRNHKLAKSIADVSWSELIRQLEYKATWHGRTVVKIDKFYPSSKRCYDCGHIMPKMPLNIREWTCPECGKTHDRDINAAQNILAAGLAVIACGEAVRPGRKQSSRHGKLQRSRKAN

SEQ ID NO: 1087 - protein, 435 aa, Chamaesiphon sp.
MGGFMRTRTNSLFFHVKTLLVDITCDIIERMEQILTIVCKLSPTTEHVAQIEATLKAFADACNYANEVVKPQTTSSVTIQNLVYQDLRSMFGLSANLAVRVCARVGANRKTAKAKKKTVESFDATSIDYDARIFDFRQKDNVVSLTLMNGRYRIPLDIGEYQAVNLDGKKPTSAQLCKHQDGSYYIHIQVKTIPPDTTEPERVIGVDLGRSDIAVTSDGDSWSGKDIKATRDRFARTRASLQSKAMKGTRSTRRRCRKILKRLSGRERRYQTNQNHVISKTIVSKAKASKSSIALEDLTGIRERTNQQPRSKTERRRSNSWAFYQLRIFLTYKAIGAGVKVVMVNPRYTSQMCHKCLHIHPVKGQSYRSGKRFKCGHCGFVGDADSNGSMNIAALGVPVNALEGSILSCNLRRTYQGYYKPPLYCEPSGETISGG

SEQ ID NO: 1088 - protein, 283 aa, Hyella sp.
MIGDIKAVFHRSIEGKIKTVTVSKNKSNQYYAAILFDNGIDKPQVNTEGKAIGIDLGLSHFVITSDGSKFDNPRWIKKHERNLKIKQQQLSRKQKGSNNKNKSRLKVARIHNKIANCRSDFQHKLSRRIVNENQVIVVENLAVANMVKNHKLSKAISQVGWGQFCTMLKYKAEQEGKVYQEVDRFFPSSKTCNVCLNQVGSLPLEVRFWNCANCGAKNIDRDLNAAKNIRDEGLRILTSELGEVSSPKARASLTSGTGDQACRQTVRRSNRGRKKSTTTLVSG

SEQ ID NO: 1089 - protein, 296 aa, unknown
  TnpB Polypeptide
LQGATLNLERAFTNFFRKKASFPKFKTKKHPRQSFQIPQHYKVDWENNKVFLPKIGWVKAKLHRKFEGEMRTVTISKTPTGKYFISIIVEDGKPIPNKQPFDEKTTIGIDLGITHFCILSNGEKIDNPKHLKKSLQRLKVLQKRLSRKQKGSKNREKARLKLAKLHEKITNQRNDFQHKLSFKLIGENQAIALEDLNVKGMVKNHNLAQSILDVAWSSFVSKLMYKAEKFGKTIIKIGRFEPSSKICSVCGYYNGNLDLKNRVWKCPVCNTEHDRDVNAAVNIKKFALDRQNLIGL

SEQ ID NO: 1090 - protein, 414 aa, unknown
  TnpB Polypeptide
MKLVLKLKLLTNKHTDGLLRQTAQAYQSACNALSQIAFENQTFSPYALHPLAYYPVKAEFDLPSQLVIRAIAEVCNSYKSLIAQIAEHNRSCQPDQRRELERIHFQPNLAVPYDPRVMLLDVQKHRVSLRTLSCRVWFGFQVGEKRQHLLQYAKGQADLKRYGKEWFLFQTLEVPEADPVATTNHIGVDVGICTVASSTDGKQTLRFPGEQIRRVRSHHHQLRRGLQRHNSRSSRRRVRTLRDKESRTVRTYNHLVSRRIVQQAQRTNSTKSSEGKEDLGCTEGASMIVLEALEGIRAGVKVHRSQRRERFSWAYAQLQQFIVYKAKLAGIPVLFVPPAYTSKTCSKCHHMSVRNRPTQAWFKCVHCGFCGHADDNAALNIRFLGAESTCHKRTVWMQEYLQTDRRKPLRFSQG

SEQ ID NO: 1091 - protein, 153 aa, unknown
  TnpB Polypeptide
LGQAQRGGNRKLTARIHERIQNQRKDRNHKLSLRLAEENEVIVVSKDNIKGMAGMFGKSVASSAHAQLRQMLSYKTNSRTGGAKYVEVASHHSTRTCSSCGRLTGPTGLAGLSVREWACTACGTLHEPDVNAAINTLISGVGTTHEWGCRDAA

SEQ ID NO: 1092 - protein, 153 aa, unknown; identical to SEQ ID NO: 1091
  TnpB Polypeptide

SEQ ID NO: 1093 - protein, 393 aa, unknown
  TnpB Polypeptide
MIIQKGFKYRIYPNQGQQGILAIQFGHSRFVYNHFLQVKQNLYKLTKESLSYYDTTALLVELKKEFEWLKQAGSQVLQQSLKNLNSSYTNFFKKRAGFPKFKSKYNKQSIRYPQGYKINNNKTYLPKVGWVKTKFHRLLEGTIKSVTISKTKSGNYYVSFLCELEILPSPNGLTAVGIDVGIKDFATLSTGEKISNPKYYYKSENKLAKLQRNLSRKKKGSINRNKARLKVARCHEHISNQRKDFLHKISYRLTNDFGIICLENLNVKGMVKNRKLSKAISDVGWSMFKTFLKYKSVWFGSDIKEVDRFFPSSKTCNVCGSINKNLVLSDRTWTCSNCKTILDRDINAAINILNECTAGTAESQACGESVSPKFIYKLKQFSMKQEAPSLRWG

SEQ ID NO: 1094 - protein, 231 aa, unknown
  TnpB Polypeptide
MRQLTPGYRKEYDTRPRSTVTFKDNGFKHDPKHNRVRLSKGANLKDGWGDFVLCEYDTRNDIDLSTVDTVQNVRAVWNGEQWEVHFVVRETIETPDSPGKGVAGVDLGVSNIAAVAYPDEYVLYPGNTIKQDNHYFQRKEYNTEGENGPSQQAQRLRQKRTRRETHFYHTLTKTIIEECVDRDVGTLVVGWPEDVGRKTSVRRRTNGYTHGRSTGYISISPTRAKITVLKY

SEQ ID NO: 1095 - protein, 373 aa, Chengkuizengella sp.
MLVNKAYKFRIYPTKKQEILIHKTMGCSRFVFNRFLGLWNDTYKETGKGLSYGTCSSELPKLKREFMWLKEVDSIALQSSLRHLSDSFERFFKKQNDAPKFKSKKNKVQSYTTKHTNGNIAIINNKLKLPKLGLVKFAKSREVDGRIINATIRRNPSGKYFVSLLVETQVHSLKKTGSFIGIDVGLKQFATLSDGTTYTNPKFFRNLEKKLARAQRILSKRTKGSSNWNKQRMKVACIQEKISNARNDYLQKISTEVVKNHDIIGLEDLQVKNMLKNGNLAKAITEVSWAKFRAMLEYKAKWYGKDVIIVSKTFASSQLCSNCGYKNKDVKNLNLREWECPSCHTHHDRDINAGLNLRNEAIRLLTVGTTGIA

SEQ ID NO: 1096 - protein, 394 aa, Mycobacterium sp.
MSRFRLLPTPAQEVGLVEHCRHARFVWNLAVEQQQMWQPGRHTPGYNDQCAQLTEIRGEYNWLAAGSQTVQQQALRDFAQAMRNFFAHTHRRPSFRKAGVHEGFRQVGVKPGHIATVSRRYGRVWVPKIGWVRFRCTRTVPSGAKSYRVTRDRAGRWHIAFAHIPEPIPGPDDTSVVGIDRGVAVSAALSTGELLHTPSLTPGEQTRLRRLQQRLARAQRGSNHRARTKLAIAKLKARETDRRRDWVEKTTTDLARRFNTIRVEDLDVRAMTRSARGTAEKPGVRVAQKRGLNRAIRNQGWGRLVARLDHKAAGRLERVPAAYTSQRCAACGHIAPENRKSQAVFSCVACKTGPCNADVNAARKIAAGRAVTAQGDLAVGRSANCEPQLSFPAA

SEQ ID NO: 1097 - protein, 366 aa, unknown
  TnpB Polypeptide
MNKGIRFRAYPNKEQKNLINQTLGCCRLIYNKGLAMRKDGFAAGQKVGYVQTSAMLTDLKRQADFVFLRDVDSIALQQSLQDLDRSFKNFFEKRAGYPQFRGKHNRRQAYRTVNQGNNIRIAGKYIKLPKLGYVKIRQSMEVGHINHVTVERTPTGKYFVVLNVDFEPELRQNNGGKVGIDVGIKEFYSDSNGNVVPNPKYLERSMRKIVRGQRRLSRKQKGSNNRNKQRVKVASVHERITNQRNDFLQKQSSMLVRENQTICIEDLNICGMVRNHKLARSIAGASWGKFFRMLEYKAAWYGNDDIIRVPTMYPSSQTCSCCGYKNPLVKNLAVRSWECPECHTKHDRDVNAGINILKKGLLMQSA

SEQ ID NO: 1098 - protein, 327 aa, unknown
  TnpB Polypeptide
VILAHKIALDPNDAQENYFQRAVGTARFVWNWGLEHWNAAYARGEKVSGMELEKRFNAIKYQEYPWLIDIHRDAHKRPFLNLDRAFKSFFKRKAKHPVFHKKGMHDSFYMANHVFWCDGKKIRIPRLGLARMREELRFDGKIMGAVVSREADRWFVSVQVEMGEYHRERVADGVIGIDLGITHAVTTSDGDTYDSPKLLARHEKKLKRAQRVVSRRMKGSANREKARRRLSRIHRRVRNVRSDFLHKVSHRLCSENQAIGMESLNVKGMMANHCVARCLGDAALGELARQIEYKAVIFRDDLRKVDQWFASSKLCSECGAKKDDLSL

SEQ ID NO: 1099 - protein, 431 aa, unknown
  TnpB Polypeptide
MSYGIAEKILLQPTKAQAAYLQRCCEVARVGYNWALGEWGRQYEAHKADETKPKPSAMALGKQFRRVREIDYPFCKEVFANCHVGAIHKNLDRAFKNFFANRAKHPTFKKRGVHDNSVYIANVEGRINGRRFKVPQPRGNKPMLVKLRKSPRIDGKVSGYTVTRTPAGRWYLCISYQVEDAPYTTTGDLGTVGIDVNISSLDLSDGRKITVPKEYKRLQHRLTRLQRRMKLKRGGERKMTKGSLKWQKTKRQIAKLHERLTNIRNNYLHQLTSELAKNAKRIGIEDLNLKGIQQNHNLARSMGNIGGSEFRRQLEYKCQWSGAQLEIINQFEHPSTQTCSECRNVKTGADKLSLKDRTYECAKCGLVIDRDLNAAINLANWAREAPTLEPRESKGGGDTSSGRRSGNGTKQLRIVRKEAATHKPKVKRRAS

SEQ ID NO: 1100 - protein, 460 aa, unknown
  TnpB Polypeptide
MTKKRNDQRSTCPEGWLKAGIKVPVHLTVRQERYATRCVGIARAVYNQMVATHRMARAHGEGRWPSPMELEKAFNGLKHAAEFGMGYATEVSKFVAQGACRDFRHSYENWRNAGLRAAKPSFKKKNRNGTGSFLAASGVDRVQYDGHRRIRLPYLGSVKLKRELPAGIPYEVRIKKQDGQWYASINHWKPPVVAEDKTHVFGAVDVGQNPLAVDSELVHHENPRALGKHLRKLGRWQRALARRTVGSRGWHEAQRRINTVHRRIVGLRENAHHQLSRLLVGKYAVLGIESLNVAGMDKLRHQARSIRDAAIGGLLRKIRYKADWYGTLIVEADRFFPSSKLCSDCGYHNGELMRETHWTCPECGIRQDRNENAALNLLGLAIEAADELPDQLILGPVGPDVTLLDGKALAGGKRVAGEIGPGEGRTAPSTRRMSAVDGGTDGNAISRTEALIPVQLRLVI

SEQ ID NO: 1101 - protein, 457 aa, unknown
  TnpB Polypeptide
MFNAVRVSLDGKLASVREQQKLLLDALQRRIARAERQISDAAERGRHDQVHQKKRRLANLRHRLAALESDIAVGRIRLCFGSKRLWRKQHHLAENGYASHHEWLSDWQEAHSDEFFVLGSRDETAGCQLCVAAVADDGTLTLRLRLPDCLAAQHGKYLTIRGIHFNHGHEQVLAAMDSNAEYRLYRGEHGDKAARATALGQAISYRFKRDAKGWRVFATMDMMDVPVVTDQRRGAVGVDLNADHLAVCETDDSGNYVNAFSVPLVTYGKSQRQAESIIGDAVANVVGYARDAGKPIVIEKLDFRQKKASLEGESHRYSRMLSSFSYSKTRACFISRGYRQGVEVHQVNPAFSSVIGRVKFMERYGLSVHQAAALVLARRLLGCSERIPRRRVAPVGNGVHVAFTVPARKRVKHVWTYWGAISGQLRPALAAQHRLGKRRRGPNPVQAVVRGETRGAA

SEQ ID NO: 1102 - protein, 441 aa, unknown
  TnpB Polypeptide
MITRRATFRLYPTATQEQELYRWRRMHKDLFNAAIANRKTQYKRFGRSVDYFEQQNCLPAFKEVWPEYIALGSHALQATLKRVDLAYQRFFQEIGGLPKFKSIRHYSGWTYPDSSGWKAHTIGDNGYLELSNLGQIQMRGKAKTWGTSTTCTIVHRHGKWYASITINCEPVARVLGTGSIGIDLGTKTAAAISDGEEGYFIENPRWYQQSLPQIRKASSEKRRKRAPNRKKKIKASRRWKRSHRQVSSLYRKAANQRQNWIHHQAIQLVSGNSLIASEKLEVKNMTRKAKPGSKRKRQKAGLNRSILDVGWGMLTSAIKYKLEEGDGVFVEVPTKKVKPSQTCPKCLHQQKKELDERTHNCSNCGYVQDRDLAAASVMILWATNSGAFGTSVLGRGASSSTKSTALRKNCGSMRQLGAKKRQKSLSADGTSETPSSQCRAG

SEQ ID NO: 1103 - protein, 121 aa, unknown
  TnpB Polypeptide
LAVAQRTNKKLEVKNIHAKIKNRHKDELHQFSTMLTQEYGAIFVGNVSSSKLVKTKMVKSTLDAGWSSLKTMLEYKSRQAGVIFEEVNEAYSSQICSSCGEISDNSPKGRADLNKRSWKCH

SEQ ID NO: 1104 - protein, 372 aa, Selenomonadaceae sp.
MIKTFKFKLFHAKRNKKLHRQINAAGMSYNHCIALHKRYWKLYHKSLNIYALQKHLTKLKKLPRFAYLREIGSQALQDVAERIDKGYKLFWKNLERKKKTAPPGFRKIRKYKSYTLKQAGWNLDQEHGIIFIAKQKYRYSKSRDIEGRIKTLTVKRDCLGDIYIYFVCELPDNEVKARTGKSVGFDFGFKGKMLVAENPKEDIKEPSFFRKAMNDIACANRKLSSKRMRSNNRHRARLELARLHRKAANQRNAYHWQLARELCSRYAVICLEDLNMKFMQKGHGKKVMDYGFAEFQNILAYVGQQVGTRIVKIDRFFPSSQICSDCGYQNSEMKDLRIREWNCPACGTHHDRDRNAAHNIHQEGLRILLGSA

SEQ ID NO: 1105 - protein, 468 aa, Halorhabdus sp.
LDVSDRPRRTNTYTADPVTDRYRECLFDWLAAHAPLWNQITYRRRQQYFDDDGDVWDAEYTDLYEKYAPLLGKATCQQLARKNSEAWRSHFELLSLYRDESNQTVTEKPSPPGYWGNRDDGYELHGLVRNDLYTFDWDEDKSTVEFGVGDVLEDRYDFDHNERITLEVRGNPQWRGDDSRLELIYDEHADQLRVQHPVRIQSDDVQEQRQDAFTHTLNDENTTQSAAIDVGANNTLAVVTETGNTAVYHARPEFERFQDHSERIAALQSKLPEEQYTSGRIQRVSDQRSRQRDHSRDAAVKHAAEWLLKQNVDTVYVGDLTDVLETHWSADVNEKTHAFWSHRQLVERITLTLGDVGITVMETGEYDSSSECPMCGSGAVTRSGDSFRCDACDLEAHADVVGAWNILQSEVGPMARPAALSAERGRDAPTDGAYWQWNDHEWIPAKFGEQSWSLDQPSVSEPASSQPG

SEQ ID NO: 1106 - protein, 442 aa, Haloterrigena sp.
LFEWLAAHAPLWNQINYRRRQEYFADNGDVWDAEYTELYDEYAPMLGKAACQQVARKNSEAWRSHFDLLDKYHSDDPAVTETPSPPGYWGNREEGYKLHGLVRNDLYTLDWDEDTSTLDFGVGDVLEEKYDFEYQERVTLEVRGNPQWDGDDSRLELVYDEAADTLRVKHPVRIRPDKLREQRVDVFTHTLDSENTTHSAAIDVGANNTLALVTTTGETAVYHARPEFDRFRALSGLIAKLQSELSDDQYTSKRIQRVYDERGEKRDHSRDAAVKHAADWLLERNVDTVYVGDLTDVLDTHWQAEVNEKTHAFWSHGQLVDRLELTLGDVGITVEQVSEADSSSECPECGSEDVVRDGDSFRCHECELDAHSDIVGAWNLLQSAVGPMARPAALLAERDRDVPTNGAYWEWNGHDWTPASFGKQSSPLDQTSVSEPASSQPG

SEQ ID NO: 1107 - protein, 394 aa, Clostridiales sp.
MKMNDNRRPSAPKRTTQYNTIKIRLYPNQEQEELFQRTFGCCRYIWNRMLADHERFYYETDAHFIPTPAKYKTEAPFLKEVDHQALTQEYNKLSQAFRNFFRNPASFGYPKFKRKKDDRDSFSACNQVMGNSATIYITQDAVRMTKAGLVRAKFPRRPRSGWKLTRITVERTKTGKYYGYLLFACPVHAPEPVKPTADTTIGLKYSLTHFYVRDDGITADPPRWLRQSQDKVSSIQEKLNRMQPGSRNYREMVQKYRLLHEHIANQRRDFLHKESRRIANDWDAVCIRDDSLKAISEELGGSDIHDTGFGMFREMLRYKLDRQGKQLLEVGRFDPTTKVCSVCGAINETLSPKARHWVCPVCGAEHKRGKNAAVNIKAHGLACYQNKQVAEAVS

SEQ ID NO: 1108 - protein, 403 aa, Chlorogloeopsis sp.
MQKAFKVTLIPSRSQEVLINKTIGCARFVYNRFLARRKELYESEQKTLNYSGCSQELTQLKKEIEWLAEVDKFALQNSLRNLETAYKNFFAELKKPKQKRRFGFPKFKKKHGFKQSYKTNFTNGNIQLRDNYLKLPKLGWVKFHHSQEITGIIVNVTVTRTTTGKYIASILCETEVEKHPDVDRNIGLDLGIKSYLVTSNLEEIENPKYYRKALRKLRKANQRLSRSIKGSNNRVKAKTKLAQIHERITNVRDDFLHKLSTRLIRENSIICIEDLRVANMVKNHKLALSIMDASWSKFVAMLEYKALWHDRIVQKISPFFPSSQICSCCGFVNPEVKNLSIREWDCPNCNTHHLRDYTAAVNILHEGLRILNAADGSTEAQNACRDEIRPRDSQALVSEARIA

SEQ ID NO: 1109 - protein, 223 aa, unknown
  TnpB Polypeptide
VNLVFTFEAPPLHRGTSVIGVDLGERIMAATVLLQNSCVKRPRFLGREVRGIRRHHAWLRRRLQERGLKQVAKRIGDREKRRVNAVLHKISKEIVEMADKARSWIAIGDLTGIRESAEKKGKRMRRIVSTMPFWRLTQMIIYKAMMRGIPVVLVNEAYTSVTCHVCGRRGLRPTQARFRCPECGEFNADLNGAINIARKVERHLGYMPLCGATCEPALDCATA

SEQ ID NO: 1110 - protein, 268 aa, Chloroflexales sp.
MTRTIQTTYRYRLNPTVAQEILLNQFAGARRFVWNWALDRKKTHYQQTGGTLGFAALSAELTALKQQPGTAWLREMDSQSLQQVLRDLDSAYQHFFRRITRGEKRKGFPRFKSRKTDTPRFRIPQRVKLHAESVSVPKIGMIRAVVHRPLEGVTKGATFKREPSGHWFVSLVTEQQAAPRTERPVHSHVDVDVGLKSLAVYSNGEMTPNPRWYRTQRRKLRRAQQALSRKVRGSHNRDKARVVVARLHQKIRNQRNDFLHKLSTVTVA

SEQ ID NO: 1111 - protein, 395 aa, unknown
  TnpB Polypeptide
MKTFKYKLMPSKRNRKLHRQISAAGLAWNHCVALTRRYYKMFGKSVSKFDLQKHLAKLKKRKPYGYLSVFGSQALQEVVDRLFKSYERFFEGRKKGEKVGLPGFKKVRKYKSFTLKQAGWKVLEGNTVRINGQNYRYYKSRDIEGTVKTVTIKRDAVGDLWICFACEEKDQHQVIPRLGNAVGYDFGLKNYLTPAQGDPISSPRFFEQNRKELRKLNRALSRKTEGSKNWYKAKADLARLHRRIANQRTAWFWKTAWEIVGQYAFVALETLNIKGMQRLWGRKVSDYGFSEFVRILEYTASKVGTQVVHVDKWYPSSQICSSCGHRNEQIKDLKIRQWTCPCCGAEHDRDRNAATNIRNEALRISNEQTGGTSSVTARHCKTGENRRVLLEPGIL

SEQ ID NO: 1112 - protein, 379 aa, unknown
  TnpB Polypeptide
MLRAIKIRLYPNKTQEQTLQKVLGCYRFVYNHMLARKQEAYKADKTNLSLCDLSKYFHGTLLEDEKYVWLKEQNTKVMKQAIRQMLTAYYKFFKEHKGFPKFKSKRDKQSALFQFDAISKKNTFEARKITLTKNLKNIKFRCSDLYHKRLQRYKDSIRSATLSKTKSGCYTLSILVEMNDNELVKFNKTGCDVGIDLGVKDFVITSNGEVFENKHFYKKDEKRLAKLQRQLSKKRKGSSNFHKQCKRIAKVFETITHKKENYIHSVVNYLLRHYDTIYMEDLNTSGMMKNHKLAKAIQEVGFFKFKTVLTNKALQNDKKVILIGRYYPSSKTCSKCGYIHKDLKLQDRQWQCPNCGSYHDRDLNAAVNILYEGRRISAA

SEQ ID NO: 1113 - protein, 371 aa, Mycobacterium sp.
VQLRYAFRLYPTAGQRQALARAFGCARVVYNDALRARQTALQTGSPFVSAADLSAALTEAKKTPERAWLGEVSSVVLQQSLRDLEAAYRAFFDGLTGKRPRVGAPRFKSRKDRRQAVRFTANARWTITEGGKLALPKIGRITVKWSRELPSVPSTVTVVKDAAGRYFASFVVEAGDVDDPPATTSQVGIDLGLTCFAVLSDGRKIDSPKFLRRAEKKLRKAHQTLSRKQNGSSNRDKARTRVARQYAKVADARREFHHRLSTSLVRDNQAVYVEDLCVKGLARTRLAKSVHDAGWSAFVNMLKYKAARHGRTFAQVGRAFPSSQICSRCGYRDGPKPLHVRRWGCGECGTMHDRDVNAARNILREGRRINT

SEQ ID NO: 1114 - protein, 525 aa, unknown
  TnpB Polypeptide
MKMRSSNNLIRGFKEKFTEKMNAGNAQIKSTANLPKRMKTLDYYLVNHENKPAQTSKTQVKTVKLTERIQVKTSKVLHHLFRCSENLYNRANALLIKGTHQFVLTKGRSTQKAGKLIPYRPLERELKDEPEYRALPAQTSQQILLLLQRNWKAFFEAYADWKKHPEKYEKRPQSPKLKSNGEALLIFTNQQVKVKGNLLWFPRRTQIDPIRVNVARIGKLKQVRILPKGYYAIVEIIYEREVKIPSVINDQKNRMLALDLGVRNTICAVNNCGLRPFIVKGGAIKWINQYYNKLRAKYQTIYANHRIKGNTKRLQQLDRKRNNKIEDLFHKLSKAIIQYCIYNSISMVVIEYNEQWKQRINLGKRNNQNFVGIPFYRLIGKIKYKAELKGIKVVLVGESHTSKCSFLDNESIEHHDTYKGKRGIYRPKARGGNGKIEFGLFKTAQGKIINSDVNGAYNILRKAFPKAISADGIEGLGLVPYSVSFAELERLVNQKSAQDVIPKASKVDGIEAAGSCLLFRIRNNK

SEQ ID NO: 1115 - protein, 376 aa, unknown
  TnpB Polypeptide
MIKAYKFKIKPNDKQQALFSQFFGCTRFIYNWGLERKTSAYKENGSSLTYMQLAKDLTNLKKEEDYKWLNECTNEGLQQSLRNLESAYTAFFRKKSKYPNFKSKHKSRESIKFINSVHFDFKDWKVKLPKLGWVKLCKNRIWNQATCKQGTVTVSKDKCGDYWLSVVIDNQIDCGKKRPIKNNTSVGIDLGIKDYAILSDGTKYSNPKYLQNAQKLLAHWQKNFARTKQGSKRHEKARLRVAKCYRDITNQRTDFLQKLSTDLVKNYDTICLEDLNVKGMEQNHNLAKAITDVAWGEFVRELTYKSEWYGNNIVFIGRFEPSSKLCHNCGYINQDLKLSDREWICPQCGEKLDRDVNAAINIKRIALEKQNLIGIE

SEQ ID NO: 1116 - protein, 460 aa, Okeania sp.
MNGEYIIVISYGILRKRCHNYIQKLIVYPVDISGKFSYNDRYIQGINNTLLVIEAKLKGSQNQYKVLDEMILTSQFIRNSCLRYWIDHKDVKRNDLQKLCSQLAKDVNFPWAKKLNSQARQASADRAWQSIQRFYKNCRQNKPGKKAYPKFKKFTRSVEYKTTGYKLSPDRKKIEFKDGFQAGVFELWTSRDLVWYSEQQISRVRVVRRADGYYCQFLVNVERKETHNFEGNVVGIDLGLNTFYTDSNGKAVDNPKYLRKSEKRLKKLQRRVSRRHKKGQKPQSNNYHKARIQLARQHLKISRQRKDHAVKTARALIQSHDLVVYEDLKIANLVKNHNLAKSISDASWYQFTQWVEYYAKLHGIVCVAVPPHFTSQNCSNCGQTVKKLLSVRTHKCPHCGYIADRDHNAARNILAKGLEMLGAIVNSTEGHSEPGGNPKATGESNLWFGDSNVANLKLSL

SEQ ID NO: 1117 - protein, 577 aa, unknown
  TnpB Polypeptide
MKTPIYRTARIKIRNPKLINVFKAQLLSAKNLYNIGVFIIRNLLSCFLDGVLKTELHENQRQVIELVNNSINIINANRSAKKALDPEYKPKLFDLIDSNSKSPWVILDSSLLDHILRNYTYEDSIPFASLPAKVSEQIRITIINNFKNWLAALKIFKSTPANFTGRPKMPGYLEKSKLHTITYPVASLGANLPTIEKRDLYMDFNQKTPLAKDDISEYDLVEILELSKKLASKLLFGGSKELVELRVVTKGSIGFETIYIEGVFKLELDLAPSVLSDLLPKALELKENKRNAYYLDNLPNTNNIAGADLGLNNIISLAFGNGADGVVVSNSRIENKINIFDTKIDKLKATLTTDRQKQLQALQEKAKKDNSKLSRAEFIELRILQKAIYNNKEYRELLNNRSDWINNVLHDVSKGVVDILVKNNIQVLVVGRNKGWKEDIELGKVFNRRFYQTAHLKLIQMLRYKCEEANILLVETEESYTSKRSFANNTPLSIYGKADPQQIDNGGVRAKNVYKTNIESRWSKIHADINGAYNIIRKVLPSFKVNLILSSKFVLYWVYRGLKIFKLKPGRGSLAST

SEQ ID NO: 1118 - protein, 335 aa, Pseudanabaena sp.
MFGKTLNCAKLQKHIAKLRNRNPYWQLVGSQAVQDICQRIERGYKLFFDHHKKGIRPPSFQKTKKYRSFTLKQAGYKFLGGNRVKIGSKVYQFWNSQPIEGKIKTVTVKRFPTGDLYLVVVTDVLGQAENKFKTGKIAGFDFGLKTFLTASDNEQIASPLFLKANLKALRKLSKSHSRKRKGSNQGNKSRLNLARLHEDISNQRKDFFWKLAHRLTDEYDYLFFEDLNLKGMVRLWGRKVNDLAFSEFLEILQWVALKKDKVVHFINRWYPSSKTCSNCGHVLEKLELETRMWRCPCCQQVNDRDENAAINIKNVGASTFSLGDVSRSVRVAVAA

SEQ ID NO: 1119 - protein, 348 aa, Cyanobacteria sp.
LNLGVALNNFFEKRAQYPRFKSKNGKQSIQYPQNVKVAEKHLTIPKIGEVLAIIHRTIEGKIKTVTLSKNCSNQYFASILFDDGKPQPSSSIEGKAIGIDLGLTHFAVTSDGDKFDNPRILSQHERNLKIKQQQLSRKKKGSNNRHKARKKVARLHRKITNCREDFLHKLSRRIVNENQVIVVENLNVKGMMRNHCLAKSIHQVGWGMFCTMLKYKAEREGKVYQEVERFFPSSKTCHLCRQQVGSLPLDVRSWTCEHCQTHHDRDINAAINLRDQGLRILTRQLPQVEPLPCGGFPHCGKWRGKPAHGAGSSGTGDKACCPDVSRSNRGRKKSTTTLSVGQEAHTDP

SEQ ID NO: 1120 - protein, 279 aa, unknown
  TnpB Polypeptide
LPHHLSVTFRGKLKWIGRQGRLEVAWDSLSKKWRVFQAVHVKPIITPLGSKTCYIDMGVRNLATVWLPEWRQPVAYQSGRLLADWWYWTNRIARHQQRLLTVNEHKKSKQLSKLYRIRKRRFRHAVAAFARQFIKDIYSQGASTVVIGELTGIRNNNSHSRQGNAMVHNYWSHKYVTDRLKWTAEEYGMKIRTVSEAYTSQTCPRCGSRHSLHVLRRFHCLDCGLEAHRDAVGVLNIATRYGEYAVRPMAWPMLLRWDGCRWNRNNGMPTQAKRSRVEA

SEQ ID NO: 1121 - protein, 449 aa, unknown
  TnpB Polypeptide
MLKQKYTTVTQLHEINNKDIIEYFENASVYFCKLQRKAFHIFKNENRKGVKTEYKKFRQDFMKEHNISRRTADSILRDIKGRINTLIELKKYEVSQKEYKIKTLKESIEKLDDKILKLQEKLNNKISINHLKYWNLKKSRAFKKMKLNKFQMKLEQLKWQIETGNYKLCFGTKKLLNSNKTEFLLQRDSQISYIGSQDEKGKNQMFQLRYNNKNNQFEIKIRKDFGFDTETKYVFGKCYFNNYKNELIKALQNKNSTPLTYSIIRKNNRYYLHCTFEYRLENKSSFLTRKTYGTIGLDFNKGFIALSEIDRNSNLIGIDILKYRFGKGNKTQSDLEKCISKILKRALETGKDVCIENLNFKIKKSKTEKAKSEKGRKYNNMLHSLAYSLYDKLITNMAFKNKVDVIKVNPAWTSWIAKNKFCKRMKLNIHTGASFVIARRGIGIEDEVR

SEQ ID NO: 1122 - protein, 390 aa, unknown
  TnpB Polypeptide
MQVTLKLRVHGTDETIGILHRTLAEYTSSFNRVCAKGWQKKRVNGIELHHDTYAAERANTLLPSQLVCSARVKATEALLGTKTRERKGKKVSCPVSRHCSIRYDIRSANIKLGQKAATLASISGRQAVVLSVPPCHETRIGWKVCSSDLCSDRKHRLWLHVVVESELPPFQSNGKVVGIDLGVNRPAVTSTDKFLGSRQWKVIENRAFRLRRSLQAKGSKSAKRHLKRLSGRLGRFRRDCDHVLSKHIVGSVERGTTLALEDLTHIRTRVKVRKAQRRRLHSWSFNRLQSFIEYKARLAGDEVAYGDPRYTSQKCSRCGSTDKRSRKTQSRFVCSHCGFSLDADLNAARNIASNHLAAQATRLPGGLPVNQPIVADSVSCRKLPASAGSR

SEQ ID NO: 1123 - protein, 256 aa, Tolypothrix sp.
MVLTRDNPRLSTSKRGKRTLKIRQRRLSRKNIGSANRNKEAQKVARLHKKHADKRTAYQWLIASKIIRKADAISVENLNIKGMKARCKPKPDDVKQGRFLKNGQSAKRGLNRSISDASWGTLIEKIQYAAAKSGKSFFKVDPKNTSRTCSKCGVIDALSRFGEKFVCTSCGHEAHADKQAALNVKTRAIKNNQLIIKKIKKVRRDSAELKQLTLFETPTVELTSVKRKQHRAHSSKRDVPGNPPTQLSLWDIGDLA

SEQ ID NO: 1124 - protein, 237 aa, unknown
  TnpB Polypeptide
VKINQVEIGEDFAYISVSYTDAPKIPELRTVGVDRNTTHHTIVASCLETGKVLKLGKSLNHIHHKYKNMRRHLQKMGKLRKIKEIRDRESRIVRDINHKTTTALMQFARENDACVVMEDLKDIRKTAKSRRKQRYSLHSWNFYQQQMMIEYKSKKFGVSVHYVAPQYTSQRCSRCGNIEQANRNGNLFQCKKCGIVEDSGANAGFNIAYLYRQGISQFSTDRDMLKGNTDTPKEALL

SEQ ID NO: 1125 - protein, 517 aa, Lactobacillus sp.
LAFKKFQNSNEIRRLINRQNLIQKRAVAMINRGTDKGNLYQKLNQRVGIKRQMSQATINVMMDIFRNEHITAIPDNSFVVFARTTLNVHDGEPQELLLQLNKLDSYTLFLAPKQSSEKIFSTPKRGWLMTLRDDGWILMLPGQNPNQGIQLLLPETNEAESTPAPKKTTSNATRPKSATSARAARSATTTTSATKHNSAKPAASSHARVATSSHAKPSASSHNAPTSSHASANSHVAAPISQTTAIDNSTVANSANSQADSIAVSSTTTYSTPSHVASAAATKPLPGPREADELIKNLVESGRRYRVVGLDYGKINMITATDGADNLLQVPGSVISKHILDYQHEIRQLQRQTQTLDDDVELTRLSYMLKRYVLKSCRKIVNQLIEYYGDDVIYVTELHPSLDVNKTPNIILSPDYFYKALFTILFELVGQNAAIIQVPNNETSIICPNCGFTSAGNRQKELHTFKCLNCGFESNDDQAAATNIRQRGLRYISNLTKNMNFAVPTPEVTHVSAQEEV

SEQ ID NO: 1126 - protein, 376 aa, Streptomyces sp.
VVRGGRKLLNTRHNLAAAGFTEADWRKRWESARWFLSADGESGKRFGNETIRVTPQGEVSVKLPAPLAGLANARNGRYVLAATVSFPHRGAEWADRIEGNRAVAYRIHLDVERGRWYLDASWTRPVARTMPLEAAGAAGIVGVDTNADHFAAWHLDAHGNPVGAPRRFPYDLTGTAGHRDAQIRHAITRLLHWAKRCGVTAIGLENLDFTAETTREKHGRKKRFRQLISGIPTGKLRARLVSMAAELDMVIVAVDPAYTSQWGAQHWQQPLATPTRTTTRHDAASIAIGRRALGHPIRRRTAPPHDDRSDRRGHRTVQAPSGIRGREETRRPVTDRAHDARSRTGTTRTRATSRASTTVRDARSDHTWVQDPLLIT

SEQ ID NO: 1127 - protein, 488 aa, Mycobacterium sp.
VAVARFEVPEGWTAQAYRFALDPTAKQVRALASHAGGARFAHNHMLALVKAVMDQRAAERSYGIDEAQLTPVLGWSLPALRKVWNQRKASCAPWWGVNSKEAYNTGLDGLARGLDAWSKSRTGKRKGRVVGFPRFKSARSPKSVRFTTGAIRVEADRRHVTLPRLGAVRTHESTRKLARRVEAGSARILSAAVCQDSTGRWHCALAVIIEGKTRPAHARRSAHSVVGVDVGVKADSLLVVATPDGIEVGRIAAPKSLSAAQARLRLLQRRAARQHGPYDPAATAKQTPSKRWRRTQARIGRTRAHAAAVRRDVLHKATTALAQQHDVVVVETLNAAGMRAKGGGRKRGLNRSLADAALAEIRRMLGYKSRWYGSQMVEADRFYPSSKTCTACGRRKSNLTLADRIFECDGCGMRIDRDLGAAINLARLGVPTMLGEQSPAGSGPVAGRGATRETEPAPAGDAAGDEAPTPHHHTVGQTGTASPQGEAA

SEQ ID NO: 1128 - protein, 381 aa, Zobellella sp.
MMKRAYKYRFYPTPEQEQLLARTFGCVRFVYNSVLRHRSDAFQQRKEKIGYTAANAFLTDLKKTPGAAFLNEVSSVPLQQCLRHQQTAFKNFFDGHARYPAFKRKRHRQSAEFTRSAFQYRDDRLFLAKCKQPLAIRWSRPLPGKPSTVTISKDSAGRYFVSCLCEFDPETLPITPKMVGIDLGLKDLFVTSDGHRVGNPRHTATYAARLAKAQRRLSKKKLGSKNRAKACQKVARLHAKIADCRMDGLHKLSRRLINENQVICVESLKVKNMLRHSRLAKSISDAGWGELVRQLEYKAAWAGRQLVAIDQWYPSTKRCSCCGQVVDNLSLSIRAWTCPACATEHDRDINAAVNIKAAGLAVLALGENVSGMGPVSVSGSR

SEQ ID NO: 1129 - protein, 426 aa, unknown
  TnpB Polypeptide
MTIQIKTSKHSTKFANSGKNVALSTFLNDYRTAVEFYIDHFWVNKIVWGEKVFDVSTGKYDLPKFISTTDITIETALSARALKCASGQALGILGSVVRKLQKLEFKRKVSIDKGYDTSKIDKKLDEFILTKPKIDRNFYANLNSICVDFVQPKTSFDGFVVLKSLGKSYGKIIVPIKLHRHTNKLKSQNYIQKTSWMISDKELCSIWEREIPEKKTSGVKVGADQGFVDCLTLSDGQVTQTDKHGYNLQSIIKKLTGKQKGSKGYRRTQTHRTNYINWSINQLNFDDIRELGFEDVKNVRLGKNTSADLKGWTYTEIASKIEDKCLNEGVLLVKQGSIYRSQRCSECGFVHKGNRKGKIFMCRKCGHEDDADMNGAKNHSVDIQPIPFSLMRLKLNLTGFFWLSGGCYNLDGEEITVPPDKKTKNL

SEQ ID NO: 1130 - protein, 524 aa, Cupriavidus sp.
MLDRLTGHYGVLRRKLYAIVAAKGGKAKEHKTAFCAAHGITARYFNGLANDLQGSMDSVRELLKDGIKDKTAELKKIKRRLADREKKFAELEAKKIAVTGKVYHRWVVQRRNLQAKLTRLEARIAEFRRRLKSNVPGICFGSRKLFRKQFNLAANGYNSHAEWQRDWRRARDHQCFFLGSGDETGGNQSCTLSVGDDGLLALRIRLPDAVSQGAGKYLVLGGLTFPCDEPALRRALREGKALSWLIHRDSKGYRLMVSFARPAAPLSTLNAKFGAIGIDFNADHLAVTETDAGGNMTKSWRVDLSFEDKSAGQRAALLSDALEGVVEYALMSCKPIAAEDLDFAGKKKDMSTMSPAQARALSGLAYAKYQQLLASKCHRRGVELIKVNAAYTSLAGQIKYAKARGLSVHKAAAGVIARRSQGFSERLPRSGSVPVSIRGVTTLFPLPARNREEGCGTSWKDLHVALGEFRREVIAAQRKVSVARKVGTPRGKPSWASSRSTVSPARDNGSRSPHAGDQICSSCS

SEQ ID NO: 1131 - protein, 248 aa, unknown
  TnpB Polypeptide
LSGGKWFASIQTRREVDHPVPQGGAVGIDMGIVRFATLSDGTYYAPLNSFKRHEAALRKAQQAMSRRTKFSSNWKKAKARVQRIHARIGNARRDYLHKASTAISQNHALVFVEDLQVRNMSRSAAGTTGTPGKNVQAKSGLNKSILDQGWFEFRRQLDYKLAWSGGHIVAVPPRNTSRACPSCGHVSSENRRTQAEFCCQVCGFEKNADLVGAINVLRAGHARLACEVSGAVRLPAAGTHRGESALAG

SEQ ID NO: 1132 - protein, 503 aa, unknown
  TnpB Polypeptide
VARFEVPEGWTAQAYRFALDPSPAQERAFRSHAGGARKAYNTMLALVKAVMDQRAAERSYGIAGADLTPSLSWSLAGLRKEWNRRKDEAAPWWAENSKEAYNSGLDALARGLDAWNRSRKGERAGKAAGFPVFKSARSRRSVRYTTGTIRAQASRRHVTLPRLGRIRTHESTRKLARRTEAGTARILSATLSEDSTGRWFCSFQVIVQRAAGTPAHIAAGEPAVGVDVGVKADSLLVIAAPDSREIGRVPAPKSLTTAQGRLRALQRKAARQQGPWDPGTKSRRPPSKRWGRTNRRIGRVHAHAAAVRRDVLHKATTSLAQQHRVITVETLNASGMRSAGGAHKRGLNRALSDASLAEVRRILAYKCTWYGSTLVEAGRYYPSSKLCSACGRRKPNLTLADRIYQCGHCGLEIDRDLNAAVNLARLGETRPGEQSPAGSGPVAGRGATRETEPARAGDAGGRETSTPRAGGRRARRGPPHRKARLPDESADSRLLTRRQRRRW

SEQ ID NO: 1133 - protein, 372 aa, Desulfovirgula sp.
MLPLFQPAILAANRIWNSCVWYSRETFKHESRWPTETELKAKFKTFTSWKELHSQSAQAVVEEYFEAVSGYRKHRENGHPEMDPPNFKPKGHLRTVTWKRQGFNVGGDTLYLKLSRKKEPIKVALPEGWDAVTLPDGTKMKGTPVEVKVKAVVRRRKVENLVLHVTFDLGVVSVYRAGAVSAYDYNSATFARATSNGTLDLFLCRELLALVQYRNKVLAEFQEKMSRLKEGSRRWRRCFSAKACRLKKLDRRIRQMEHALTKLFAELDGAEGVAFAVVGDLSGLRRSTHTGMKGKKASQKINQMAYDRLHTEQRYKNLMRGVQADTWTERNTSSTCCTCGSRNPTWRQHRGLWICGSAGLTFRPTSTVRPTC

SEQ ID NO: 1134 - protein, 402 aa, unknown
  TnpB Polypeptide
MYLTETTVIKPSQQALYRACDEICFLSKNLYNKTLFIQRQNYRDGKPYIGYFDMLTLMRKEKHPEFYALTSYAADYVVKQLDANHRSFFALCKLKKAGKHQGKVRPPQYKDKIHGRNLTTFYKGSLVKRTYQREGLIHLSRTDIKFKSKIPLELIQEVKVVPKLGCYELHVVYHAHEEEKIENSNYAAIDLGLNNLATVATNVSSPFIINGRPLKSINQRWNKTKAKLQSKLKKGARKSKRIYTITNKRNRRVQNYLHQASRALVNELRRLSISKVIIGSNKEWKQGINLGKRTNQNFVQIPHYRFIQMIIYKAALAGIEVIAKEESYTSKCSFLDDESIEKHDEYAGRRVKRGLFKSMNGKLINADVNAAYNIMKKHLGIGPKDLDSVQVLSAPNILMFGS

SEQ ID NO: 1135 - protein, 377 aa, unknown
  TnpB Polypeptide
MSRKANNLYNQCVYFAKNSENLSEDLKRLDKVMKSFPYEHDNYRSFGHAKSAQQVLRLFQQNLRSYFAAIDDYKKNPSKYTGRPRFPKFRKSGERFQVVFANQSVTLVNHKIAIASKAFNNNLSIKLRTRSAKKICQVVFAPRNNYFLAYVIYEVDDRVVSQYSSKVAAIDVGLSNLATVTFSEEDDPILYRSDLTKINHDFNRITSNYVSILKKTQNKDTSKRRKRYSEKYSGLVEDRLHKISREIINDLSHRGVSTVVVGKNTGQKINNKLKNFVQVPLFRLINMIKYKTELAGITFIQVNESYTSGTSFLDNALPTKEYYDKSRRKYRGLFLSNNSKRINADVNASFQIMKKIYTKFEHNDSIKYANPIVKTIC

SEQ ID NO: 1136 - protein, 482 aa, unknown
  TnpB Polypeptide
MPEELKPIYDFLQNELNFILSHDETRAILDKIDLSKHRGNVWRDLRDNLKFRIQDWPLHNKTWHSYILFENIRRELQSKQESIAIWNELVKNDYNINEELFNSLHKLNLYPTRSRIANIKRSNSMPELARSATFSLDYTISERQFFRMKNANICEIKVNKTDWIEYEIVFPSSIDSRFTGVIAKPRFVKRKKDDKYISVCAYQYEINDYELEDKILGVDIGKIKLFSSVVMDRDGNFSDEFINAKRSQETENKINRLYENKRILYSKIKAYEDLRLTNQPKYEVWKKLYSDIRTKITNTKDYQAKLLSSEIVKLALDKKCKTIHIENLSWLNSQGGKWNHSQIHSKIVEKASMHGIEVKKVSALNTSKEHPITKEVGRVQDRTVEFTTGNIDRDLLAAINISIRSTNITLKKSLPKTVKTKRVTPKSNKKSIKEKVNQIKGNGQIVSFLTNVLDSTIQVELGVRPLSEVLPCNSLIDYYDNS

SEQ ID NO: 1137 - protein, 391 aa, unknown
  TnpB Polypeptide
MIETIKVQLRPNNKQLTKLFQYAGCARFAYNWAIAREQENYSQGNNFLSDCELRREFTQLKRLPEYKWLNRISNNVTKQSIKEACNSYIKFFKKQSKYPKFKSKKQSKQSFFQDGFKIRFTDTHVKVEGFTMSKKRNKQKLNWIKLCEKGRIPTNCKYMNPRFTYDGLYWYVSVSIEVDDNTSILSNEGIGIDLGLKDLAICSDRNTYQNINKTLRVKKLEKRRRRLQRSVSRKYNMNKKGERYCKTSNIIKRQKEFLKVARRLTNIRRNYLHQTTSEIIKRKPSFICIEDLNVRGMMKNRHLSKAVQQQSFYEFRRQIEYKSAWNNIPVIIADRFFPSSKLCSCCGMIKKDLKLSDRIYKCECGNVIDRDFQASLNLKTYGENVLRQSMN

SEQ ID NO: 1138 - protein, 656 aa, unknown
  TnpB Polypeptide
LLAIKSTFNNHALTIRIVQQASIEQLLTIAQPEQANQFYWPIVYKRILAYQIANSFNQKDQDLSLNKQTPMSFWTNQHALKVITFKANRNHVKKIVSGLTAPQYTYTLKRLSQCDKSLYWLCLQRKLATQVAKTAVSKLKMKSVKPTTNAEINLEWLLHSEKELIDLPSQYQQFIQNMKVALNYKISNRRTVVPEIWHLEETDCIPTSFIGGEIGDVYTRLFNKQVYQTLPSQAAQYATTNSINDAYKSYFTRAKLKHQNNKPPGYADKKGFKPVAWKKTTFRFKSRGSGKKRKAVVCLSLGQVKKGKEMLFKALANDEFSLKANVTSGTPTVTTKKYYRTKTAGAERCKYNSLELPISSDIYKKKQLVQLVRIVPKQNGNSFELHITIEKPKVKPKTTVSRIMSIDPGVVNVVAATTNVSSLRPWIVSGKEIVATNERFVSALREAYSQLKISQDKSTSKRISQLYQQRKNILKDIFHQLSRRIVNYAIQHGINKIVIGYNKNWKRRSRLGGSMNRIYNQIPFATLVKYIFHKGEEAGIIVVENEESYTSKCDALALESFDDCKRRTTNRRLVRGLYRSSIGHLVNADVNGALNIMRKHVLKAHPSLNTQIKDHIQSQHSVLLNPFKCSMKYLKSNYETDGLSYNLGFTSSALAA

SEQ ID NO: 1139 - protein, 388 aa, unknown
  TnpB Polypeptide
MLKTYKYRIYPSKAQTTSLEKMLEECRWLYNKVLETRKNAYEQDGKSLGLYDTQNMIPGWKAERATLKLVHSLVLQNVNIRVDLAFKAFFRRVKAGEDPGYPRFKGYGRYDSMTYSQYGNGARLDGNHLILSKLGSIKIKMHRELCGKPKIVTVSRAATGKWFATVSCECESNPLPKSERFAGVDVGLQSFATLSNGEKIANPRFFKKEQDALAKAQRRMSKHAKGTPEMAKRRKVVSRIHERITNKRANFAHQESRKLVNTYGVIVLEKLAVVEMMADHKQVFGNKLNKSIADVAWSQLAQFTSYKAVDAGRTFLQVDPRNTSKKCSRCGSIVTKDLSVRIHDCPHCGLVLDRDHNAAINILALGLQSVSAGLPDEAVEAPAFRHGE

SEQ ID NO: 1140 - protein, 495 aa, unknown
  TnpB Polypeptide
VRSISAYATYTVRNDTQLGVDLAQVTAVQPAVAGRRAGVTIPSELVVKGELHRNKAGELVEEKVFGRSRKEWLFRHRVVTEHRSWQERIKAANGESDKHVSQGWKRTVDGAPPSYGDSDFINLGAVDKQYAVIENNPVVAGEIVLRMVIQGKWYRLIFPFDNSRFTEGKVTLPVIKVEDNQPVFIFTVVTDNPVVQFSGDYTIGVDVGINDYATVVVRNSTTGQVVHKTTLSQRVHSLWNSVRASEKQVRPLNKKADKLLYQRQAHMCAIDEAQLHREAASRKKRELAILVAQEIAHLSHQFNNAVAAVEDLSWIRNTMQSGRWNRGAFVQWLTHYVAQNGGWVVAVNSANTSQICHVCGSKVTHPEHKVSRCPKHSDMDRDVNAAANIAARAVSKVEKARKTRAKNRKLQPQARLKTPIARASLKYSGRDRTKHAPTPKRKKRTSREVNLPSSPARVNPTTVLADWDASGILETYQAAINQGNITRKCRLCSLN

SEQ ID NO: 1141 - protein, 382 aa, unknown
  TnpB Polypeptide
MTTKIHRGIRYRLYPTSEQQILINETFGHSRFVYNKMLRLSKDACDRGERFVSRNDFNYRLTALKEEFVWLCDVDSTALTSATDALAAAFNNFFAKRAKFPAFHKKQINESYTSKKIHGSNNIALGSKYVKLPKLGYVKAKIHKLPDLNWMIKSATVSRDSDGKFYVSILFEFDEPANTYIADTHNAIGLDYASDGLYVDNNGNIGTNHKYYRQSHAKLAKAQRKLSRMKGSKKHEKKSSNYMKQLCKVNKIHRHIANQRKDNLHKLSTEIANRYDVVCVEDLNMRAMSNKGFGNGKATMDNGYGSFVSMLGYKLSDRNKYLIKVDKWYPSSQICHACGTLHPEMKDLKIRTMRCDCGLVIGRDQNAAINILNEGLRILAAQ

SEQ ID NO: 1142 - protein, 441 aa, unknown
  TnpB Polypeptide
LKYTTETRLYSKNNEDVIAYFDEVKKQYNYILRKVYYIIRNNPKLNTDLLNIELQNKCNISKRTAKSIIKTVQGRINSIKELKKTEIKQSQYRLERISKKLEKLIPILLDLKLKAKENNVKDLTKYRNLKTKVAFLKIRKDKLVNKIKSLNYQLETNKFKITFGTKKLLKQDLEEFLNKRDNQMIFLGSKEETSCNQTFQLKYVPKTNQFIMKVRKDFKYKNTKGEERYVYGKCFFNNHKRLLKEILKTKNSPLTYQIIKRNNKYYLQCTFEINNYNLSLTDNAQGVIGIDFNKGFVAISQTNKYGHLIGIDKMTYRFGSGNKTKNDLLLIINKLTELALKTGKDIVVEDLNFLKKKSKAIKGESKKGRKYNRTIHGLACRMFLDKAEQICNKRNVGLIKVNPAWTSWIAKNKFCDKMKLNIHTGAAFVIARRGMNIKDVV

SEQ ID NO: 1143 - protein, 432 aa, Natronomonas sp.
MCFGSVGVGGTATATKTLEATLTPPTAHKERRLQRTVATYRHALSESFDSGADTQSAVNDVVTGYNLTSYAKDALKNYIPQLHRTYNAEELDEDHPVRFTNRGWRLDHSEDREHEFCWRVPQAGRGNAFWIPLRINPAQRELWDDLRDGGVSVGEFRLTENRTNWVLHVTVEYEVAEPEESNDLTPVGLDIGESKLLTGCACRDGTPTQPMLFDGGRARHLRKEMFTTLRRLQQRDAEWRVDERFDQNALTDIVEKASRDAVEYARSFENPVIVLEDLSYIREHLNYGKRLNRRLHNWAFARLTGRIEDKARDAGIPVRFVNPAYTSQTCHACGHLGSRSSQAEFRCTNAECWVSEYQADINAAANIAGHLNPRGESLSLKPTGDDSPRDGSACESTTGHREQSRQSRQTTLGDFSSETSDDEASLVGSPAL

SEQ ID NO: 1144 - protein, 273 aa, unknown
  TnpB Polypeptide
MKISWITAVIKLDTPEGADKHLRETIEQFKYCSNTPSEWCWHGDGGYHVTLKAKAEDALYDQLREDTELTANLVQKGIHQAVESIKSGVERLETDQDTSRPKFTADTAVHDKRSATFHRDHVSLSTPDGRIECDYILPENPDTPPTEYVTDEDYAFRRATPHRRDGDWYLHASMLKVEDDDTDTTTGHRTVLGVNQLTVASTGRFWLADEFKNWKREYEKRRGDLQQCGTRAAHDAIAGVERKENGRFERFLHRVANEIVAEAVEYDCSHIAI

SEQ ID NO: 1145 - protein, 264 aa, Caldanaerobius sp.
MMICQHFLLEPTKEQEEKLFYTLYLCRKLYIKIKAHRDFDPTKVKTINIKYHTGKWYINLSVEIDVGEKEKASIGEKAIGIDKGINSIAATSDGELYLNPRWLQKAEKKLKRLQRQLSRKKKGSKNREKQKKRLAKLHEKVANQRRDYLHKISYNIVKNNDIICVEDLQVKSMMKNHKLAKSIANAGWGMLDKYLQYKAERERKIFIKVNPAYTSQRCSRCGKIVEKDLSVRIHKCECGLEIDRDVNAAVNVLHEGLRQLGIAA

SEQ ID NO: 1146 - protein, 419 aa, unknown
  TnpB Polypeptide
MTRAYKYKMEPTDAQKEFLSKCFGCARFVYNHALSEKIDAYRNDGKSLSFFDLCASIRTLKNQEEYSFLKEVPAMSLTYSLLNLSNAYSHFFKTKSGFPMYKSKKHCRDSVKFAPNSIKYDFTNFKVRIPKAGWIAICRNRTFDQTAVKLNSTTVSRDACGDYWCTVSFEDGALPEPKAKVGKETAVGIDMGLSEFAVLSNGEKIPNLRFSERKEQRIAKAQRCLARKRRGTKDEEPSKRHTRYRTKLARIHRSIENRRTDFLQKLSTDLIRRFETVCVEDLNVKGMMQNPNLAGAIGSASWSKFVRMLGYKADWYGVNLLRAGRFDPTSQLCSACGYRNPDTKDLSVREWICPVCGTRHDRDVNAAVNIMNTVIEKHFNKQSPAVTGITDADGVDSENNAETRSPGCDYASVETSMQK

SEQ ID NO: 1147 - protein, 377 aa, unknown
  TnpB Polypeptide
MRKTFMFRLYPTRQQISLLSDTLELCRWVYNETLATRKNAWEQEHQSLSLYATNKLLTGWKQARPELARVHSQVLQNVQERVDLAFKAYFRRVKAGGEKPGYPRFKGYGRYDSFTFKQSGFALQGNGVQLSKIGLVKIKQHRPIEGTIKTLSIRRDAVGSWYACFACETEPHPLPTRAKAVGVDVGLKSFATFSKGERIANPRFFRRDEQELAKAQRKLSKAEKGTPERARRRKVVAQVYQRMVNRRKDFAHQLSRSMVNTYGIIALEKLNTQGMLHNHYLAKSIADAAWHQLVRCTLYKAEEAGRVCVLVDPDGTTQRCSRCGRVVKKSLAVRIHDCPGCSLKMDRDENAAINILALGLQCLDASPRSHAASAAVE

SEQ ID NO: 1148 - protein, 270 aa, Rhizobiales sp.
LPGRALGIDLNPNWIGLAVASNVRDASRTEDTKLLKHALVKLDMAIDASPETVRETLAAICDRAISMARKHRCGTIVLETGLGKLRSSGKSRSLNRLLNYWARTVFVQMLTRRARLAGIEVLEVWAGYSSTIGNLAFDAPDACASATEIARRGIARLAGIKDVLPALEEGCVFHLWKNGKVPAELGSWQDIHRTIKAAKIGYRRPHPDVPIGARGSDVHGTRLFCGHAVVRLGRRHRPGLLFRMTAAKADAAVRSSAKCGLVINRHGSTF

SEQ ID NO: 1149 - protein, 338 aa, Arthrospira sp.
MIGKLKLRNLVMQSDLPQWVKETPCHIRQNAIFDAYQAYRASRDAKFRSIRNPRQTIKFNDSNFTKGTWYSQLTKTLSFKASEPVPVRCEYGTQLVYRRGLWFAIFPEPVIATHTSSQKIIALDPGVRTFLTGYDGDKVIEIGSGDMGRIVRLCQYLDDLISRSTKVSAKQRRSMRKAANRIREKIRNLIDEVHKKTAHYLTNNYGLIFLPRFESSQMVAKSRRKIRSKTVRSMLTWAHYRFKLILKHQAAKRGCVVLDVGESHTSKTCGACGHRHAQLGGAKIHKCPHCGSQTPRDANGARNIMLRALRDSSFTVSNDGIAIVTVRALSINVQECSA

SEQ ID NO: 1150 - protein, 278 aa, Arthrospira sp.
MQSDLPEWVKETPCHIRQNAIFDAYQALTASPDARFRSCRDSSQGIKFNNTNFSSGSWYPRLTKGLTFMVSEAIPKTCGQGTQLVFTKGRWLAIFPEPVAVTPTEANGVIALDPGVRTFITGFDGSKFLEFGSGDIGRITRLCQHLDDLMSRIASCPSKKRRRRMRRAAQRMRIKIRNLVDEAHKQIAHYLTRNYSLIFLPTFETSDMVAKAKRKIRSKTARAMLTWAHYRFKLTLRHKRGNNWNHSCRCDGRIHQQNLYSLWSCAFPARWLKSVPMS

SEQ ID NO: 1151 - protein, 441 aa, Arthrospira sp.
MVVTVLMTRAKLSRSRMRLKSQVRFWRRVGWATTRLSLTVLEFKAYGKPQQFSAIDEAVRTVQFIRNKAIRYWMDNQGTGQNDLQKLCAQLAKEFPFAAELNSMARQASAERAWSAISRFYENCKKGIPGKKGFPSFKKNNRSVEYKTSGWKLDSNRKAITFTDKKGIGRLKLKGTRDLHFYPIEQIKRVRLVKRADGYYVQFCIRVERTEFVEPSGRAIGLDVGLKEFYTDSNGETVGNPRHLRKSESRLKQSQRTVSRRKKGGQNRAKAKVVLGKRHLKISRQRKDLAVKLARCVIQSNDLVAYEDLRIRNMVRNHSLAKSISDASWYQFRVWLEYLGKVFGKSTIAVPPHRTSQECSRCGVIVQKTLSTRTHVCRCGCVMDRDYNAARNILSRGLSTVGHTGTLALDASNASGESTSTLAGAILSEQVGSLSEESPSL

SEQ ID NO: 1152 - protein, 403 aa, Arthrospira sp.
MAQTTSIIRTDRWNLNPTAAARVLLSQTVEVSLGVCRHLMGILLTHWPSIGGLSSQKRVLAVEKLIHQTAKNPNPKYWQFDQTFYKFPSYYRRAAIVFAAGQVSSYMTRYREWQSGTRQRRDAKPPVLNPNSGCYPTLYKGQCYKLHGYDRIDIKVFNGTDWVWTTIEITSLRERHTVDSNKLLSPSLIFNEQKKACHLSVPFECHPPQREGEGRVVSVDLGINTTATVAVVNFDGTVTYREFIHPARDIDEVAAAAGTCVQRNGDRRDKRLKSVSKRASKTMGLGGSLQKGFCSHTYRKCRNINRQIGQIVSKRIVQIAQQFNADAIVFENLKGWKAKGGRKRSLLRQRFHGWLKGMIRDLTEMKWQEIGGKVIDVVAAYTSKLAYDGSGVERARRPKLCPG

SEQ ID NO: 1153 - protein, 295 aa, Arthrospira sp.
LYTSSPIKAKPSQYQAIDEAIRTSQFIQNKCWRYWMDNKGGGKYDLNKYCAVLAAEFPFAKELNSMARQSVAERAWFAISRFYDNCQKKVKALTSLSVKGKKGFPKFKKHSRSVEYKTSGWQLSETRKAITFSDKKGIGTLKLKGTWDLNYYDITQIKRVRLVRQADGYYAQFAIAVDAVDAMVEKSKKYSYAQKKARQKPSKNYHKARNRYARKHLRVSRQRKEYCKRLAYSVIQSTDLNVKGLARNRKLAKSISDAGWSTFRSWLEYFGVKYGKVTVAAEPRYTSQECSNWGQ

SEQ ID NO: 1154 - protein, 369 aa, Arthrospira sp.
MTRYRKWQSGTRQRRDAKPPALNPNSGCYPTLYKGQCYKLHGYDRIEIKVFNGTDWVWTNVGIPSLRERHTVDSNKLLSPSLIFNEPNSACHLSVPFECHPPQREGEGRVVSVDLGINTTATVAVVNFDGTVTYREFIHPARDIDEVAAAAGTCVQRNGDRRDKWLKSVSKRASQTMGHGGSLQKGFCSHTYRKCRNINRQIGQIVSKRIVQIAQQFNADAIVFENLKGWKAKGGRKRSLLRQRFHGWLKGMIRDLTEMKWQEIGGKVIDVVAPPKSWLMTVVESKGRDSNNYALAKFSSGKRYNADLNGALNIAARGILQLTRRKDSEEPSIQRSRAPRLEAGLVCVTCGLVQSQVSTDTPTCLGQVG

SEQ ID NO: 1155 - protein, 241 aa, Arthrospira sp.
VFTKGRWFAIFPEPVAVTPTEANGVIALDPGVRTFITGFDGSRFLELGSGDIGGITRLCQHLDDLMSRIAKEPCRSRRRRMRQAAQRMRTKIRNLVDEAHKQIAHYLTNDYSIIFLPTFETSNMVAKVKRKIKSKTARAMLTWAHYRFKLTLRHQAEITGTTVVDVTEEYTSKTCTHCGHVHSQLGGSKVFRCPECGFTLPRDWNGAFGIFLKALRDTASVTLTGNSAIVALSGNNRINVA

SEQ ID NO: 1156 - protein, 377 aa, unknown
  TnpB Polypeptide
MHKRTFKYRLYPTAKQKKALQSSLDACRWVYNETLATRKKAWEEKQESLSLYDTHNLLTQWKELNPDLTNAYSQCLQNAQLRVDLAFKSFFRRIKAGEKPCYPRFRSFDRYDSFTFPQSGFRLSGDKLRLSRIGSVKMRNHREIDGMIKTLTIRRSSTGKWYASFSCEVLPHPLPKIDPVIGVDVGCSAFATLSTGEKINNPRFFKTEEKKLAKEQRKLSKQEKGTIQRQKTKKIIAHIHERIANKRQDFAHKLSHRLVKENQIIAFEKLDIKEMMSNHSKVFGHKLNRSISDVAWNQFMHFTAYKAEGAGRQVVFVNPQNTSKQCSRCGQLVEKTLADRVHRCSCGLVLDRDENAAINILALGLKSLGLAPRSRLL

SEQ ID NO: 1157 - protein, 414 aa, unknown
  TnpB Polypeptide
VKIIKYTYKFRLKPTLDQKVLLNKHFGSVRWTYNYFLNQRKTEYLNNKKSLNYYDQAAELTQIKKVNEWLKEINSQTLQYSLKCLDMAYQGFFNKRTKFPNFKSKRNKNSFTIPQNVRYDGTKLIVPKFLDGIEMIMERQIKGIIKHCNISKTPTGKYFVSILTELEYQPVRKTNQSVGIDLGIKDFLVLSNGTKIKNHRFLKHYERILAENQKYLSRKTKQSNRYEKQRLKLARIYEKVTNSRMDLIHKTTNNLIHNFDIIYLEDLNIKGMSKRCKPKQDENGKYLPNNQSAKSGLNKSILDVAWGTFIDTLEYKALWNDKQVIHIDRFFPSSKACSKCGWINNNLTLKDRNWICPKCGEKHDRDINAAINILNEGYRKNISDGTSDYERGAKIRPISTGTSNETLKKKELVS

SEQ ID NO: 1158 - protein, 447 aa, Leptolyngbyaceae sp.
MSAAATFSPKKKYALHYAEGNVVYGAWKPKLSAWVKYGDRRKKAPDLLPEPIKVDPLLAKVKRFSVRLTAEQTALFDDWCERLRTLWNEALELLIEYTEFSGIDGAPCCPVPWSYRWAKDKNDKWISVPYSKFAMRRNGGRQCCPVPRYYKEPRLDQPSLYSLQQYFGKKRLPKNHSIQPIPILIARARLADLATAWGRCKGGERNRPKFQGKGDTPTSIAILDGKQVQHGASWVKIPKLGKISVPGLHKKWGVRPILTMSLVKVGNRFELHLAGNFHQKKRKPSRPKASIKLIGVENILIEDDRGKRWEAISNPQHTVKDAFRIVRLQQILSRKQFLSNGWWTVKLKLKNAWRETTARKHSRYTKIASFLARTYSEITIENKAASTVSKPKPVVESVDPIKYGPNGAAKIARYNKRISGMAMKTFVAVLKRKCEEFGTIVVEPEIE

SEQ ID NO: 1159 - protein, 404 aa, Streptomyces sp.
VVIAGRIVIVCAVVVLNSDVMKLVVQVKLLPTPVQTLALEATLRTCNRAATHASQVAFAKNLKDRNGLQKEVYADLKATYGLSAQPAVRAVKKVVDAYATLKANLRAGNLGPPNSKRYRKALSTPVVFRPEAAQPFDDRCLSWQYDARTVSIWTVDGRMKGIRFACSPGQLKTLVQYRKGESDLVCRGGKWFLIATCDIPDPEAYEPADWIGVDRGIVNLATTSDGTNHQGRRLGRYRRWQARKRSELQAKQTRSATRRLARRAKREKRHATHVNHKISKEIVSVAQRTARGIAVEALGGIRERVRLRRDQRGTLSSWPFHQLGQHLAYKARRAGVPFLEVDARHTSQRCPRCGHTERANRSDRDHFCCRRCGLAGPADVVAGVNVRSRARSAWVFVTAPAPAP

SEQ ID NO: 1160 - protein, 557 aa, unknown
  TnpB Polypeptide
MKKKSNDITWTVQGEWFPEITLPGGEKTKPGETVIDTEMRLFCACTRWAFNRLLEGESRKELKKQGQKMFGINSRFCDDAILKAKAIIESQKELLALEIRETEQKLVRAKRKLSRAERNLTKALENNDPARIKKHQLTVNGRKMRVKTLSKKLYELETHQRNGTIPKVIFGGRALWKKVCKRRATREEWQQARRNRLFSRGDETKGGNPNIKIKYRDGEFYLSVTISHLAEPGKVDKKGIQHMKPAPRIEGKLWLPQKHRLKVWELLLAGESYTVELIKGKDNRYRAHITFDTEKPARVSDPARGYLGIDINPDGVAVANTGYTGRPEPWPENFTVPYPKALHKFEGEFQIKIHPNGFLYIKIPELSYSRSFRSKYLIGVLAKVIVDIAKELGKPIALEKLDFGKDRLDIGRKFNRMAANFPYRKVVEAVIRRAYKEGIGTKQVWPAHTSPIGYWKYMQKHGVTLHHAAAYAIARRAAGFKERITKELKQKITVIKEKLAKKVNTVPGEGKGMTRKVKRLFNRLDEKLVLHNGLTRYKQESFYSIWHDLKQLALLSR

SEQ ID NO: 1161 - protein, 389 aa, Mycobacteroides sp.
MDHYNHHVPQGYKYRVYPTPSQQVALARAFGCARVVFNDALHARQTAHASGLRISDTDVQKLVVTQAKQTSDRAWLADVASVVLVQACQDARRAYRNWFDSLSGKRKGRKIGAPRFRSRKDSRQSIRLTRNGFSIRDNRKLYIAKVGQLKVRWSRDLPSEPSSVTIIRDAAGRFFATFVVEVTQSCLPPTNREVGIDLGLTTFAVLSDGRAIASPRFLRRSERKLRLAQRALSRKRKGSNNRAKARARVAKVHANVSDARKDWAHKLSTEIIRENQAVFVEDLCVAGLARTRMAKSVHDAGWSTFTRQLEQKAVQYGRVFVKVDRFYPSSQICSGCGRLDGPKPLSIREWQCKACGAVQDRDLNAAKNIHAAGRAEWLNACGGSVRLPT

SEQ ID NO: 1162 - protein, 440 aa, Methanotorris sp.
MLKTIKLSKTMALKSKPLTRTKIKIIENTIEAYKEILSIALDFGLKNKRKSHRKIREGIYEEIKNKYPKLPTHYIYTASQDASTRIKSFISMKKRGKAYTETPEVRNVSLWLDDILFNYKDFKTNIEKLFSIDKEGKKTLHLRLSTPNGRIVIPLKPHKQFFKVLNEGWKIKAGFKLILNKEDGTITILIPLEKEITINDDYKAVYALDFNLDNITYGNFENIEMIKADLGKLTEKYSNIMANIQEKFSFKGIHKQEKPLKRKGFILLKKFGRRLKNIREDKLKKLANKIAKELKEKDAVLIIEDLSSYFNQNIAKKSFKKLKHKLHNISAKKFLNYLKNKCLEFGVKVVEVNPAYTSILCPNCGNRLSQLYKLADERALPLRLMYCFDCEFYADRDAVAVFNLIKRFMGLYPFSPKSNEPIAEGTVFPMKLWVEDNPFP

SEQ ID NO: 1163 - protein, 373 aa, unknown
  TnpB Polypeptide
MYKAYKFRMYPNEETKSQINNIFGSTRFTYNYYLTKIKKDKFKSSKTTIDTKSIIKDINTNLKNAYPFLKEIDNNLIIKTIYQLSDNYKKYSTNNFGYPKYRSKYQRNSFTITSSNIEVNLKTKKVKLPKLGNIDIRGYRNLNKIDDKIINVTISKENIGKYYISIVYEQITPKKVTPKTIVGLDLGVKKQIILSNGITYDNKKYEEKYKKKIAKLQQILSKRKKGGKNYYKTLKKLNIVYEKLRNARKYNTHKITKEIIQNNDIIACETLQVKKMLMAKKISKQITDVTLYEIIRQLNYKATYYGKLFYQINTYYPSSQICSICNHKDTKYKDLNEREYVCKSCNSVIDRDLNASINIMFEGLKLYIKDNFA

SEQ ID NO: 1164 - protein, 218 aa, unknown
  TnpB Polypeptide
MGIVGVGFPIPTSDKCKLIFGFYYKPLPTTGKSVGADFGMKDAYLTLSTGEKIQHPQPLKHSLKKLRSLNKALSRKVKGSNGWWWCVRQIARLYRKISNQRKDFHWQLASKLCKKFDTIVLETLNIDGMKRLWGRKVSDLSFYQFVEILRYKCQKHKRLLKEIDQWTATTKPCSTCGFHNENLTLNDRQWTCPECSSHHDRDINAAINILRAGMVSVT

SEQ ID NO: 1165 - protein, 431 aa, Acinetobacter sp.
MKISQYYKFRLLPNQEQEILLNQAIGSARFVWNQILAKSFEMFSKDEYIRYETLEKNLVPLKKIPDCSFLGKTYSACLQQKIKDLAKAWLKFYNSKEHARLKENKRKPKKPKFFKLADGAEIQLRPLMPRFKKKSDGEQSFRLPFADCKVLGDRLSLPKKTGWIKFKKSQEIKGKITSVTIKKICGFWYVSFCTNREVVEPIHPSKSAIGVDLGVKKLITTSNGQVFDPINSFKTNQIKLSRLQRKQRKKVKFSQNWKKLNFKINKLHHHIANIRHDYLQKITTTLSKNHAMIAVEDLKVANMSKSANGTAENQGKNVKAKSGLNKSILDQGWGMLIGMLEYKQQWRGGLLVKVDPKYTSQTCSECGHVAKENRQTQAKFECVGCGYVANADLNASRNILSAGHAVLSVEGGCGKGRPKKQKASEIREEVA

SEQ ID NO: 1166 - protein, 299 aa, unknown
  TnpB Polypeptide
MDFKSAWEKYITKCDHTTYTKRAIRRSESGTEALSFRGLKGMPKFHAKVRGYNSYRTVAQYPSESNNLKNATVRLTGDVLYVPKMKKGIKLIIHRNLPENAHICNVTLNLDTDGHFYASIAFSYVMQMEMDLRNLAITGGTLPENLTFLGLDYSQNDFYVDSDGKKANYPHYYRKSEEKLGKIQARLAKKQKGSNNYKKLQAKIQKLHAKIKNQRNDFLQQESTRLVRKYDVIVVEDIDLRAMGGALKLGKNLNDNGFGMFRTMLAYKLEQKGSCLVKVDRWFASTKPAAIADMFRSQP

SEQ ID NO: 1167 - protein, 479 aa, unknown
  TnpB Polypeptide
MVMARHTTFRFCLDPTVEQRDVLARHAGASRFAFNQCLRIVKTSLSGRRTDPGTTVPWTVFDLINTFNGWKKTEDAGRVFAVDADGGVEVVVTGLSWRGDVCQQVFEEAAVDLGKGLAAWSDSRSGKRKGRRVGFPRFKKKTGDIPSFRLRNKHPKGKPAAIRIGDNDRPRSLTLPGIGQIAVHDDTRRLRRMLAKDRAKILFATLSRHGGRWWIALNVEAADLHSAHQHPPRRDDGGGWVGVDRGLSAFLVAATVDGTEVARIDDAPKALAAGIAHQRRLSKSLSRKKKGSRNRKDAAARLGRHHHRVANVRRHFLHQVSGELVKTHDRIVIEDLNVTGMLRNHRLARAISDASWSEFARLLRYKQAWRAGQLIEADRWYPSTRLCPECGDIDSSMTLADRVFTCGCGHTADRDANAARNLARWGQGHQHDTSTDPRTPKQLGRATKARRRDGAGQHPRVGETSPNDAGTDVHTAPAA

SEQ ID NO: 1168 - protein, 380 aa, unknown
  TnpB Polypeptide
MKKGGKVMEDYVRGYKYRIYPTKEQETKFNQMFGNARVVFNYFLGIRQKVWKEEQRSVGYPETSRLLTELKRQPKFTWLNLSDSMSLQESLRDLDNGLQRFFTGDAKYPKFKSKHNAKKSYRTRNQKNGVRIEGSKIHLPKVGWVKIKLSRIPNGVILNATISKTPTGKYFISLCVREDWNNVLKRNAGKEIGVDVGIKSFYVDSNGNVVENPRTFTKFQRKLARAQRRHARRKDGSRRKQKARVVVAIVHEKIANIRRDFLHKESTKLVSDNQVIGIEDLNVAGMLKNHKLAKHIADVSWSAFFRLLKYKSVLYGCDLVQVGRFYASSQTCSNCGEKNPAVKDLDVREWDCPHCGAHHDRDQNAAINILRKAKEILATA

SEQ ID NO: 1169 - protein, 342 aa, Hapalosiphonaceae sp.
LQDALKRLDKAFKFMMERGFGFPRFKKIGQYRSFVFPQFKSSPLTGVQIKLPKIGAIPINLHRPIPDGFVVKQVRVVSKASGWYAQLVLQSDVSVPDVMPNGNSIGIDVGLEKFLAVSDGRLVERPQFFNSLQRKLRWLQRKLKNKTKGSANYRKAQHKIRRLHERIYDIRKQFHINVAHALCDNVGMVFAEDLNLKPTSRGMLAKHCLDAAWGSFLEILSWVCWKRGVYFAKVNPNGTSQTCPQCGTHTGKKKLSERVHVCHECGYTTGRDVAAAMVVEQRGLASAGLAVKLPVEVSLFGDASLGATNEAGKSSRKAGKPTPNQRLRCGRMSRSSHCSRVN

SEQ ID NO: 1170 - protein, 441 aa, Clostridiales sp.
VKIFSTYSVKIKHYNHIFKDTVSVYRDAVDFFIDVCLNEWTVIFTIKGNLLQQQHIEHLCHKTADNKNPKYHNFDKEFYKFPSYLRRGAINEAIGKVSSYKSNLVNWETKPNGKQPSPPKAGYVYPCMYKTVMYKQTDTYEAKIKVFVRNTWDWITVKLRKSDIDYIDRRCASRKKCAPTLQKRGKEWFLDFPFEEKTTLNDTNIYEQTIVAVDLGVHTAATISVMRSDGTILGRHFCKLPKETDHLMHGINRIKKAQQHGNHKTPRLWAKAKGINHDIAVKTASYIIEMAVLYNADVIVFEHLDKNGKVRGSKKQKLKMWRSQEVQSIVKNKAHRLGMRISHICAWGTSKLAYDGSGSVLRGGDGGFHTYERCKFQNGKVYNCDLSASYNIGARYFVREILKSLDASSRLPIEANVPQCSKRSTCTFSTLISLNAALMFA

SEQ ID NO: 1171 - protein, 379 aa, Clostridiales sp.
MEQITVTAKIQISAASDDKGLLDETMSVYTDACNYVSDYVFHTHDLKQFSLNKVLYATLREKFRLKSQMTQSVVKTVIARYRTILENQKEWIKPFFKKAQYDLVWNRDYSLTQNCFSVNTLKGRVKLPYFARGMSKYFDSTIYKFGTAKLVKKQGKYFLHIPVTYDMEESNLCDICNVVGVDRGINFVVATYNSKHKSGFVSGKAIKQKRAHYSKLRKELQMCQTASARRRIKTIGQRENRWMQDINHQVSKALVENNPKHTLFVLEDLSGVRNATERVRTKDRYVSVSWSFYDLEQKLIYKAKQKQSSVIKVDPRYTSQCCPVCGHMERANRNKKMHLFCCKNCGYQSNDDRIGAMNLYRKGINYLEDSQVPDTVTAE

SEQ ID NO: 1172 - protein, 320 aa, unknown
  TnpB Polypeptide
MVNYTLWSNFKGLAASKKNGRKIGHVRFKGYGWYNTMNYNQSGFKIDQDHSQLHLSKIGEMRIKIYRKIEGCIKAVIIKREGERWFAIVQADQGPQTLPETGEAVGIDVGLTSFVVDSEGNDIENPRCAEQSEDKLAGLQRRLARAVRGSNNYGAIKDKIAKLHKRINCQRDDFLHKLSRMYVNNFDIICVEDLDVKGLKENGHNNGMHRSIRDASWSKFIFMLSYKAQSAGRKLIKIDPRNTTQRCSACGGIVKKDLSVRVHECHYCGFSCNRDYNASRNILIAGMEQPVAPIESKPLNHISVMQVLAMKWEAAPFRTR

SEQ ID NO: 1173 - protein, 371 aa, Stanieria sp.
VITWKTELDFNNKQKTLAKKHAGVRRHSWNWGLSIIKDEIENKSKWSSAIDLHKKLVAEVKSVNDWYYEVSKCSPQQALRDLVVARDRWKKKIAKFPRFKKKGIKDSFYLEGNIQISKNRIKLPIFGWVKTYEKMPVMRAKNCVISCRAGRWFIAFKIEAEKLPISNKPQQVVGVDLGIKALATLSTGFQVDSPKHYKQADKKLKRLQRKLSRQVKGSKNREKTKLRIAKQHYRVASIRQDILHKLTSYLTKNHGEVVTEDLKVSNMLKNHNLARAIANGGFYEFKRQVAYKSNWYRTVHTTIGTFYPSSKTCSSCGAIKKTLKLSERVFNCPCGFSCDRDLNASYNLANLAVSSTVTVCGQSRLQKLRFQ

SEQ ID NO: 1174 - protein, 411 aa, Stanieria sp.
MIVLEFKVKAKTEQYRAIDEAIRTTQFIRNKCLRFWMDNKGVGRYDLNKYCKVLADDFSFANELNSMARQSAAERAWSAIARFFDNCKKKVPGKKGYPRFKKNVRSVEYKTTGWKLDRITCKHIVFSDKKAIGRVKLIGTHDLRFYENKLIKRVRLVRKADGYYCQFSIDVDNKENVEPTGKAIGLDMGLKFAYVDNTGHSEPNPRFYRSSEKRLAKLQRRVSKKYRKGQPQSNNYKKARTKLAKLHLKVSRQREEWAKRVARCVTKSADFVAYEDLKVKNMVRNPKLAKSIQDIGWSRLRYWIEYFGVKFGKVTVAVPPHYTTVDCSVCGNKVQKSLSTRTHRCNVCLTQMCRDKNAAANVLQKALRTAGHAGTWEQSLNASGEIPSWAVGATLLSNGNSMIEESHGFRR

SEQ ID NO: 1175 - protein, 382 aa, unknown
  TnpB Polypeptide
VFRTIKLKLPYDRTLIETAKQFKEAAQIVLDYGFENKTFNKNKLNKGTYRSVRERIPTLPSALIQTARDTASEALKATNLKKKIKRKSLTIRYDNRTFKFYPDSHTVSLTTVKGRVLYPVAHSPLIDKYKGEYTNAQLVIDEKRNRIFIMVQVNIPDKEVVKKEDVKVLGIDRGVKNIAVLSNNLFFNSKHVREVKGRYQYLKRKLQHLGTRSAHRKLKKLSGRERRFVRDVNHVISKNIVSLPYDVFSLEALESAKMKHNGKGKRFRRSLGSWSPFELEKFIEYKAKDAGKAVIYVNPKYTSQRCSKCGYVDKNNRHGSVFKCINCGFELNADLNASRNIEVLGRSEYFRLMSTSQSLRFNESPLTGGGENSNKLRSFSEE

SEQ ID NO: 1176 - protein, 592 aa, unknown
  TnpB Polypeptide
LADDEDFWTPEQRSVLLDLIREQVRNVSEMKVRASFVAHETILTCLRNPTRYKLPELEQSFFYQCLTVSSETKTNSLVKDVAENEFWDYPEIPRMMHDRDALSYAAREMVTVFNNNIKLPFLGRLKGFIATWMRKEGISPDDVSPFDVLATILKWKEKQRPMDEFPQIVRTFIVKERVHLQKQKGEGKTHRNLRYYYRVLELYRSWGVGSGFPLVPVYAIKSHFIGLTTESLCGILRDLQKRTEGPSWLPEGLTIEKMAEIHGERIWRRMFTLDGLVRRRRFNRYIQTDGHTIIVHFVAKKADIEERQRRAKKHKRDGNVVDHVLGFDPGRVNMVAGVEMRGEKVIRHVTLTRGSHYQALRGSIARRKRWDVPLLGVFARLGRGSLRSTCPVKNFEYRRAVIDNYTRLWDNKTSSKRGRERLFAFSKKRSGLDKFFSDLRGDRSQPAPRVVYGGASIRPNGKGEALTVPVKGVLASCKRFFNVEMVNEYLTTKTHAKCGVRMNPIKRRGESRAVRGLCWCPSCKVFVNRDGNAAENMCSLRATGRRPDHLKFGQAKVVMATLPLLPSRAEKQVKYKSAVSVFRKTGRFGFLE

SEQ ID NO: 1177 - protein, 350 aa, Cyanobacteria sp.
  misc_feature (51)..(127): Xaa can be any naturally occurring amino acid
MPVIMHRPLPDGFELKTATLVKKADGWYIAISLEDSSVPAPLPIDEIKSAXXXXXXXXXXXXXXXXXXXXXXXXXXXXXXXXXXXXXXXXXXXXXXXXXXXXXXXXXXXXXXXXXXXXXXXXXXXXXIDEIKSAVGIDLGLKSFLVTSTGEFVAVQQHYRKTQRHLARQQKKLARKQSGSTNSEKQKQKISRIHQRIGRKREHFHYNVAHQLVRNYDLIAVEDLNIKGLARTKLAKSIYDVAWGKFLTILEAVAVKCGVHFVKVNPHSTTVDCSQCSAKVPKTLSVRLHQCPKCGLELDRDENAAINILYKGLTTVGLTVAACGRLSGYTPDEAGMPNSDVRMLTLYSQN

SEQ ID NO: 1178 - protein, 463 aa, Lachnospiraceae sp.
MPCPHNEISIVQRSQQQSAVAAAAYQSGEKLFCEYDQEVKHYPEKRGIVHNEILLPANAPPEYADRNTLWNAAEAVEKQWNSQLARRWVLTIPREIPPDQYAVLVREFCQQQFVSKGMIADFAIHDPHPPGHNPHAHVLLTMRAMDEHGKWLSKSRKVYDLDENGERIKLSSGRWKSHKEDTVDWNDQKYCEIWRHEWEVIQNRYLEANDRPERVDLRSYARQGLDIVPTVHEGAAVRQMEKRGIKTNIGNLNREIRAANSLMQSIRQLIHNLKDWITELGEKRKELLAQKAAEEAVFLPNLLMKYMEIRKEERNRYKKQKKKVARIHTHIAHQRKDFLHKESRKIANSYDIVCMEDLNMKEMSQDMCFGKRVHDNGWGMFTDFLAYKMERAGKKLVRIDRWYPSSKTCSCCGNIKEDLQLSDRIYECACGNRMDRDQNAAINICREGIRISGMILDTEKKIS

SEQ ID NO: 1179 - protein, 380 aa, unknown
  TnpB Polypeptide
VQVFKSVWQHYTPAPETSWLLEQFRQMLNDCIQIGLAENVTSLKSLSLKAYRQLSRYDVVSYYKLCAISAATGILRNYRKAKRKNPDMKEPYARRPRLTTCYGFKVRDGELSLPIHAKKHVRISLNQHVQATVNGFTLRSVTLTKDRLSLAYAIEIQQLQPHGFIGIDRNLDNVTVAATDGTVHQHDLSEATRAKAVYRDVRSHFKRNDVRIRREISGKYGQKQRDKVNQTLHHASKMIVEEARAKQYGIAIEKLTGIRRLYRRGNRQGCWYRGRMNSWSYAELQRQIEYKARWEGLPVIYVHPHGTSSKCSICGERMKPEENRILHCPSCGYTVDRDVNAAKNILAAGTLRFGVVGLAGEAVVAASATVRESAKSMRGS

SEQ ID NO: 1180 - protein, 442 aa, unknown
  TnpB Polypeptide
MTIKTIEKTIKLKLTPLTNGDKSQLISLLNDYTLMVKEALDIIIKNDVRSRRRAHELCYRRLRDKYPHLHNKFVQEAYKRALAMYRSYRKLLNKWKRLPKKKRKRISPPSPPTIKGNRVVELHVETYKLERSHDFLVLIVSKGNGVYLRFLVMEYCYARKELEGAKLGNSKMLVDGDEIYLLLTIRKNVEVNKHRNKLLIDINEDSVDCLLVNYDRNEAVLFSIRHDIRKIRANYRRIRKSIQEKVRNTNLRDKLLAKYGHRERKRVEDRLKKLTTLLAEIAREHNADLVRENLKDLKLNGKRRSKQLNYRLSTFPYHKFITYIDYKFHERGLSIIEVDAKKSSITCPICGYVDKKNRIDKEGFRCKRCGFLLNAQYVACLNLLSRSNDGMMAIKGGRLYLVSRKAAQVVTVDVAPNEPPIEMRWLREKPVQVSKILVVTKR

SEQ ID NO: 1181 - protein, 403 aa, unknown
  TnpB Polypeptide
MKIQLTQQILINKKHRWFSMLDELCLKSKNLYNYGLYLIRQHYKETNKYLSYYELNSVLAKENQIDYRSLPYIQCSQQVLRQLDKQYVSFYKAIKSDKMKGKKIRLPKYKDKTNGRNIVVYTNQCFKLKNRILTIKVNDTNKIQLNTDLDVQIVRIIHKGNHIVIELIYNKEYELKEDNRRYAAIDLGLDNLATLTSNVSQSNIYDGKKLKNINQFYNKKKALLQSKLKENKGISNRIRRINYRRNNKIKDYMHKVSCLIVTYMETNNLNTLFVGKNIGWKEGINIGKTNNQNFVSIPYNLLLNMLDYKCKLTGINMIVVNEAYTSKCSFLDSEKICKHDTYCGKRINRGLFLSLEGKKINADINGSFNIMRLGITKCNCDVLNLIPADKRFVYNPVRIKIKT

SEQ ID NO: 1182 - protein, 273 aa, unknown
  TnpB Polypeptide
VIIRNLPAVLNFQNISIKQKEGTVKQIRFVPKSDCYVIEVVYESIVKKQLDDNNRIMSIDLGVNNLASIVTNVSNKPILIDGRRLKSINQYYNKKRSDIQKQLKKVNGKENSRRLMSLTRRRNNKVKDYLHKASKEIINTCLKEDITTLIVGHNDGWKQNVNLGKRNNQNFVSIPFEMFISMLRYKSERQGLRFVEVNESHTSKCSSFDLESVGHHDTYVGRRVRRGLFMTRDGILINADINGSYNIMRKVKGDAVMPLHTGFGYNPVKKFIN

SEQ ID NO: 1183 - protein, 362 aa, unknown
  TnpB Polypeptide
MFVAYKYKLYQTKKLKYIHNKIDISGIIYNHCIALHKRYYRIYKKHLNIFQLQKHLTKLKKLAKYDFWKNIGSQAIQNITERIENGYKQFFDYLKNRKKEKVSPPNFKKVKRYKSFTLKGKVGYKIENNTISLKGYRYKFWLSRPIKGQIKTITIKRDSVEDVYICISLEQEEKKSNRSTGNSVGIDFGLKKFLTLSDKQSIDSPLFHLQNLSEIKRLNRNLSQKRKGSNRRKKAKRRLAKLHIKVANQRKDYFHKLSNELVKKYETIFIEDLNMRAMKRLWGRKVSDLAFSEFVKILEYKTVVVKIDRFYPSSKTCSGCGTVKDNLDLKTRVYKCESCNLVIDRDYNASINIHRVGASTLK

SEQ ID NO: 1184 - protein, 379 aa, unknown
  TnpB Polypeptide
VHKRKTFQFRIFPTKRQETVLSATLNECRWLYNKLLEQRKNTYEESGKSLSLYTQINNFAALKQERESLKTVHSQVLQNVAVRLDLAFKAFFRRVKAGEVPGYPRFRGFNRYDSFCYPQSGFKVEGHHLKLSKIGNLHIKLHRPIEGKIKTCCLRRSSTGKWYASFACEIEDPQPLPESLEQVGIDVGLTTFAYLSTDERIENPRFFRKEERALTKAQRRLSKEEKGTPERAKRRKPVSRVHERIKFKRHNFTHQESRKIVNRFGVICVEDLSVNRMMHNRCLSKSIADAAWSGFSSCLSFKAENAGRRYVAINPAYTSQDCSRCGHRQKMPLEKRKYVCPCCHLEINRDLNAAKNILAHGLVSIGIQSVEAPAFTHGE

SEQ ID NO: 1185 - protein, 167 aa, unknown
  TnpB Polypeptide
MNKTARRVIDDCIDHDIRTLVVGYNETFQKDSNISKRNNQTFVNIPFGLLRNKLEYLCELNGIILVMQEESYTPKAIFWDKDVIPVYKSDDTEEHHFSGKRIHRGQYRTASGQVLNADVNGALNILRKNSVVDVNILYSRGEVDTQQEYRVLSRGSSQIKNVIPLLT

SEQ ID NO: 1186 - protein, 243 aa, Unicellular sp.
MYGCQQNLIHPDNNIKAILEFICSEANKLANCAIYYCRQMFFKARRYVTKYEVDSILKNNPHFKAMRSAFAQQICHDVVESFTSYKRFSKLWKNGRLANKPRLPKYRKKRGMSVVSCPARWIKLVDGMLKIPLGKQVKAWFGLDHFLLPMPSNLDFKSIKEFRIVPRNNCFYLECVYKQSDVKKVNPNLSDEGSQGQQEQTLISTAIEMAEHLINKVELVMLKLPSLIFTIRFTIRRNINFIF

SEQ ID NO: 1187 - protein, 411 aa, Unicellular sp.
VLNLNYCYRIYPDASQEKELLDWLEICRGVYNYALRERKEWINSRKCKVNACRIKSEYIIPADQPFPDYYKQKKALTQAKKEYPELKRVQSQVLQEVMGRLDKAFNFFWKKSFGFPRFTKYGQFRSINFPQFKDNPITGYQIKLPKIGSVSINLHRPIPDGFVIKQVQIVKKASGWYAVVCIQSDIKVPSQSPQGKSLGIDLGLEKFIATSQQELIARPRFFVELQSKLRWLQRRLSKKQKGSKNWHKAREKVARLHEYIYNTRKNFHYQVAHHLCNQANIIFAENLNLKAMSRGMLCKHTLDAGFGSFLEILKHVAWKRDVYFEKVDANLTSQTCPNCGVVTGKKDLSQRVHECSNCGLITNRDVAAAMIVEQRGLAALGLGVKLPVEEEVIGDVSKKMSRASRRSRKAS

SEQ ID NO: 1188 - protein, 253 aa, Unicellular sp.
VPIDSAFTNFHAQRAKYPNFKKKRNGGSAEFTKSAFKWKDGKLFLAKSKKPLNIVWSRFFPQDCKPSTVTVKLDPSGRWFVSILIKDPTIKPLPKTGKQVGIDVGITSLITTSDGEKVANPKQFNRLYKKLKRKQKALSRKTKGSNNRYKARLEVAKIHAQIKDSRTDFLHKLTTKLVRENDLIAIEDLAIRNMVKNHKLARSISDASWGEFNRQLEYKYQWYGKELIKIDRYFPSSKRCGNCGHIVFPTYSI

SEQ ID NO: 1189 - protein, 245 aa, Bacillus sp.
LPKLGLVRFAKSREVEGRIVNATVRRNPSGRYFVSLLVETEVQELPKTHSYIGIDVGLKDFAILSDGNPYKNPKFFRSLEDKLAKAQRVLSRRMKGSSRWNKQRVKVARIHEYISNARKDYLDKISTDIIKNHDVIGIEDLQVLNMLKNHKLAKAISEVSWSQFRSMLEYKAKWYGKQVIVVSKTFASSQLCSCCGYQNKDVKNLNLREWDCPSCRTHHDRDINASINLKNEAIRLLTARTAGLA

SEQ ID NO: 1190 - protein, 408 aa, Moorea sp.
MKLVERHVISKLPSKWSEIDILVNLANYHYRQYFFENKKKLSFKTLYHLVSKTDDYQALQTQVSKQIIRRLELAWRSYYATLKEWQKKTNKFLIIPKITKYKKTKYRNIIGYYQESIYKKTLKKGIGYLSMSELKIPRAQRSIREVRIVPQSSCYLIEILNKKEKRTTDSQQVSGISLGINNSMAVTTNKKSVASILVNGRPLKAINTFYHKKCYLRQSQLKTRNNQTSSNRLNPLTHKRNCRGKKYLHTASKRIIDWCQLPRIEVLIIGHNDKGKQSLNLGKKNNKQFVSIPHYRLREMLNYKAQLKGAKVIITEESYRYQSNALDGDDGGKYGEKKPMFKGKRVTRRLSKTGEKKLLNADINGTLKIIRKGIPDVFDQGIKGLPFNPVVLDALRMAGLPDSLGKSS

SEQ ID NO: 1191 - protein, 612 aa, Holophagaceae sp.
MAFGGNKARKGWEMRAFPLGIGKLSATKLASILALRAQVLDLMRNMASACFTQEPLAGTLASNDLNQRLLEVQRAKAGLNSVWRESARLRVKPALEEADDRYFRKLVGRLRHVDQEIIYHESRGDRPCFINIPQEIETAVTATEIEGLKQLASSGKAVAAFRAVALEGSRSGLTGNQVAILLHIHACVQKGHRPPEFGAKDEFVLQLHIDSRMLPTGQSTEAMALRTGVSFLLEDDQNKRYCRFLDISGAEPRSERIRIPLTLTPEIAKRLETTETGWASLILEISSRSVGVRLVAGKPKPEQPTVAERFVGRDFGYTNTICLSVLEAPAAVNLEEIRSSLEVLDTKEQSQKHLEGHRLPEGTIVLERHRFSGRPFMERIKVLCEGIDGYKSRIDLDDNTLDALKAELVKELGLEPGDMILPENKKASAKVCAFFQLLGRINDLKAARRVCYRKVASIKKCWFGYLSTQEVELAKKHGAAVVREDLTVEAIEKDSPSYKGRAFNKMLNNGSKGQYQRRAASKLLWNGIPEVVAPSWYTSRVCLKHSVIVAKQHRKGESIYLPCCGHHDHADEHAADTIAGLAFLVPKINGVPPSGPVCDTSTPAISVGSPVL

SEQ ID NO: 1192 - protein, 433 aa, Selenomonas sp.
MIKSVRIRLLPNNKQKTKLFQFAGASRFAYNWALDKQMDNFREGRKLQSDYDLRKEFTVLRNSGEKPWLLDISNNVTKQAIKDLCIAYKNFFRKQKQAGYVKYSPKKLSHFARIDRKPTVYDMNGHPKFRSKKNGDFRFYQDNVKIQFTNTHVKLESIAGSKKKNRQRLNWIRLAEKGRIPVGMKYTQPRITFDGENWWLGIGFVVKHKLKPMRGLKFVRKQPKRSYTEGVGIDLGIKDLAIISDSTVVKNINKSHTIRKLKKKRRRLQRQISRKYQMNKKGDSYCKTSNLIKSEKRLLRINHRLANIRANHVHQATRIIINRKPRFICLEDLNVQGMMKNKHLSEKVQEQNFYEFRRQIEYKAQWARIPVVIADRWYPSSKTCIECGYVNKDLKLSDRTYVCPVCGNVIDRDFQASLNLKRYGEAELSKSAS

SEQ ID NO: 1193 - protein, 367 aa, Sulfobacillus sp.
MNLTLLIKLQPNSDQVQALLLTMERFNAACNTIAATAFREHTANKIRLQKLVYAEIRATFGLSAQMTVRAISKVAEAYKRDKTVQPTFRLHGAIVYDPRILSWKGLDRVSILTLDGRQIIPVVLDGYHQARMDRIRGQADLIYRDGTFYLAVVVDVPEPPLLQPDDWLGVDLGIVNIAADSDGQTYSGGQVNGLRKRHAKLRQRLQKTGTKSAKRLLKKRRRKEQHFAANENHRIAKQLVTKAQDTRRGIALEDLQGIRDRITVRRAQRRRQHSWAFHQLREFIVYKAKLAGVPVVLVDPRNTSRTCPHCGLIDKRNRPHQASFRCIGCGFAGHADTIAAGNIARRAAVNRPDAGPAAEQVPASSAL

SEQ ID NO: 1194 - protein, 235 aa, unknown
  TnpB Polypeptide
MKNDMQKRPLLGLTLSELQNVVKNLGMPGFSAKQIASWLYDKKVTSIDEMSNLSLKHDCFLKDQMHKLSTAIVRYFIAHRIGILVVGTNRLWKQHASMSKKNNQKFVSIPHEKLRWMISYKALIAGIEVIWQEESYTSKADCTAGDLIPVYGKERTHPVFSGRRIERGLYLCKAGYCINADCNGAANILRKAFPHAWDACKDFQFLSTPASVGFKSLNPSSVPNRQKQRAANKKK

SEQ ID NO: 1195 - protein, 425 aa, unknown
  TnpB Polypeptide
LVQYNVVAAYRSYEERVKAANGESSKYVSQGWKRTVNASPPSYGKDYVNLGTVDRAYAYIENDPFTDGEIVLKMVVQGAWYRLIFNFDDKRFTEGKVTLPVIKVQDGEPVFIFTVVTDNPVVQFSGDYTIGVDVGINNYATVVVREVETGRIVYETTLSQRVHSLWNSVRASETQVRDLKKKAATLLHDRQERMSALDEAQFHREAASRKKRELAILAAQEIAYLSHVWGNAVVAVEDLGWISNTMQNGRWNRGALIQWLAHYVSQNGGWVVAVNPANTSQLCYKCGARVSHPTHDVSACPEHGAMDRDVNAAANIAERAVPRVAKARVTRAKNRKLGPQRTLKTPVVRRSLKHPGRDRTKSAPTPKRKNQPRTVGEVILPSSPARVIISARVLADCGAQGATGTCQAAIKQGSMTDKCKLCNLD

SEQ ID NO: 1196 - protein, 309 aa, Clostridioides sp.
VIVVEKAYKFRMYPNKKQQELINKTFGCCRFVYNKYLAKRIDVYKSDKETFTYKQCSSDLTNLKKELKWLKEPDKFSLQNALIDLDNAYKKFFKKKSGFPKFKSKKINRFSYKTNFTNGNIVYCGQHIKLPKLGMVKIRDKQVPKGRILNATISKEPSGRYYVSLCCTDVDIEAFENTNNQIGLDLGIKEFCISSCGEFIENPKYLKKSLNKLAKLQRELSRKTIGSLNRNKARLKVARLQEHIANQRNDFLQKLSTKLIKENDIICIEDLQVKNMIRNRKLSRSISDVSWSEFIRQLEYKLIGMVEKL

SEQ ID NO: 1197 - protein, 412 aa, unknown
  TnpB Polypeptide
MRSQKLRLKPTKDQERLMWWYSKISRNYWNLLVDIDRRNNKGEFDEILRNNGNKTYHSNFYEREIYKLSQMDYTSLAKFVVAKNYEVDNEAWSWYYQPNQRFIYDFLAREVVKIRSQNKGKLNFRSIGKIQPNFNVRCCISSNKKRPSRIYLKENGKLQIPTLGDVRFGSTRQDFDLSCKKQVANISFDGKYWYLSYTEDIEVQVNSLPNYTDGIGIDLGIKTLATVSDGISIPNIKTFRRVRILNKRLKRLQRKVSRKYLINKCNKYNKTKNIIKLERQIKLIHRSLKNIRINHIRKFVSDLVKKQPQYIAIEDLNVKGMMKNKHLAKDVANCSFYAIREHLIRKATERYIVVRLVDRFYPSSKTCSNCGSYKQDLKLSQRVYRCDNCQKKIDRDFNASLNIATTDNYVLA

SEQ ID NO: 1198 - protein, 299 aa, Spirulina sp.
LVFPRFKKYGQFRSINFPQFRENPVTGYQLRLPKLGSVVINLHRPIPDGFVVKQVQIVKKASGWYAVLYIQSDVNIPSPKPQGKSLGIDLGLEKFIATSQGELIARPKFFLELQSQLKWLQRRLSKKQKGSKNWHKAREKVAKLHEHIYNTRKNFHYQVAHHLCDQADIIFAEDLNVKAMSRGMLCKPTLDAGFGGFLEVLKHVAWKRDVYFEKVDANFTSQICPNCGVVTGKKDLSQRVHKCSHCGFVTDRDVAAAMIVEQRGLAALGLGVKLPVEEEVIRDVPKKTSRASRRSRKAS

SEQ ID NO: 1199 - protein, 430 aa, Spirulina sp.
MRIAYQYRIKPTYEQRCQMERWLDMLRCQYNWMLADRFDWWEMNRTPVNVCPLVCSIAEPREQPDYYNQKRSLVSLKDERPWYKEIHSQVLQDMVKRAGKAFDRFVKGDKNGKRSGKPRFKGKNRYRTFTYPQAKPDWIDGNRIKLPKIGAVKFIQHRSLPDGFALKTVSITLKADGWYVTFSLEDKSVPSQLVETIVPTVANSIGVDAGLEYFMACSDGTMKPPPKFYRQAEDKLAKLQSKRDERGLGSKSRRKLNERIAKLHQRIARQRKQWHFETAQELLDKAEVIFVEEIKVSNMSRRNKPKQGEDGVFLPNGQSAKSGLNKSFADAGIAGFLNEILPFKAAKAGKMVVKINPAGTSQHCAICLNRVPKKLSDRWHDCPHCGASMPRDVNSGVLIKKVGLGHRLTIKRESGATRRRSPRCTAKRSA

SEQ ID NO: 1200 - protein, 410 aa, Spirulina sp.
MIVYEFKLKGEDKQYRALDEAIRTSQFIQNKCLRYWMDNKDIKVDKYALNKYCAVLAAEFPFANELNSMARQSAAERSWSAIARFYHNCKKRIKGKKGFPTFKKNCRSVEYKSSGWKLSETRKVITFSDQKGIGTLKLKGTYDLNCYDIKQIKRVRLVRRADGYYAQFVISVDVKIETQPTNQAVGIDLGLKYFIADSQGHVQSSPQFYRRAEKQLNRANRKKSKKFSRERKKAKVKQSNNYHKARNRYARKHLRVSRQRKEYCKRLAYSVIQSNDLVAYEDLNVKGLVRNRHLAKSISDAGWYTFRSWLEYFGHKYGKVTVAVPPHNTSQKCSSCGEKVKKSLSTRTHVCPYCGYVEDRGINAAINILKLGLSTVGHTGTYATGDLPSWAVGASLLSNGESVNVESPRL

SEQ ID NO: 1201 - protein, 224 aa, Spirulina sp.
MTVKLKGTRDLNFYPLDQIKRVRIIKRADGYYVQFCLNVDIREYAKPLEPTKRCVGLDVGLKVFYGNSDGETVEIPQYYRQAEKRLNRLNRQKSKKFKKGQPQSNNYQKARKRYARKHLRISRQRRGFAEKEALRVIKSNDFIAYENLNVKGMVKNSRLAKSINDAAWSTFRQWLEYFGFKYGKATVAVPPHNTSQNCSNCGQKVPKSLSTRTHVCPPPWLCGR

SEQ ID NO: 1202 - protein, 449 aa, Spirulina sp.
MSKSIVRTDKWKLNPSPEVMKHLEGTVNEYRAYCKALSYVVMANWSVISTAKSQCSAVEKLIHRTSANPNPKHPYFGKRFYKFPSYLRRAAIEFVCGQVSSFLTRYQLWQSGIGRHKQAKPPKFNPEAGCYPALYRGQCIKFQEDFTVAEIKVWNGSDWVWASVQVVGLRQHHLLSYSKGLSPYLIVKQGKAHLSVPFKLHPQKLSGELVCAVDVGINTTATATIVNSGGTVISRKFFHRGGDIDRRDKVLQQIRNKAKQTKKLHKGFCKGLYRRAKGINHNMAQHISKEIVQFALQYGASVIVFEDLKAWKPKGGRKRSTLKQRFHGWLHRLLVQLTENKFVESGGKVELVYPRGTSSWAYDGSGKLQRSKKNYALATFQSGKRYNADLNGSCNIGARYWAYKLKLAYRNGRQLSSSKSSGDKQRMPVTLSALWDREAAHVRVRVSVT

SEQ ID NO: 1203 - protein, 451 aa, Spirulina sp.
MKVKKPTKIIRTDKWRLNPTAQQRVLFGETVKVYRRLCRYVVGIVFTHWSALGGLSSQQQIPAVERLIHATAKRPVVKYPSIDGIFYKFPSYYRRAAISFAMGQVSSYITRYREWQCGRSRQRRQAKPPILNAEAGCYPVLYRGQCYKLHGYHAVEIKVFTGTDWIWTKVQITGLRERHGIPGNKMLSPALIFNNRACHLSVPFDCVPEKRNPDKNVVAVDLGINTTATVTVVTFGGTVIHREFIHPGRDIDRRDQRLKSVAMRARKTMGKGGKLHKGFCAQTYRQCANINEQISHIVSKRIVQIASAFNAEAIVFENLKGWKAKGGRKRSTLRQRFHGWLKAKIRDYTEMKWQERGGNVMEVKAAYTSKLAYDGSGMVKRDAKNYALAVFANGKRYNCDLNGSQNIAARGILQLTRRKDSEEPSSKCSGGSPRSWACLCDLWTEKSPGLA

SEQ ID NO: 1204 - protein, 377 aa, Caballeronia sp.
MKIKRAYRFRFYPTPEQKVILARTFGCARFAYNHMLRQRTEAWYERQERMGYHESSAALTVLKKTEEYGWLNEVSSVPVQQALRHLQTAFTNFFAQRAKYPNFRRKDGPQSAEYTTSAFRWDGAALKLAKMKEPLAIRWSRAIPKGAKLTTVTVSKDTAGRHHVSMLCDDVVSARPVAAGQIGIDLGLAHFAILSNGEKIAAPNVFRKNEAKLAKLARRLAKKQRGSANRKKARVKVARMHARTTDSRRDFLHKLSTRLINENQVIAIESLSVKNMQKNRRLSKSMSDAGWSEFRRQLEYKAQWYGRTLIGIDRWYPSSKRCSDCGHTIAKMSLETRAWTCPECGSIHDRDINAARNVLAAGLAVSAHGESVSPMSL

SEQ ID NO: 1205 - protein, 284 aa, Burkholderia sp.
ILARTFGCARFAYNHMLRMRTDAWLQRQARVGYHEISAALTALKKTPEHAWLNEVSSVPLQQALRHLQTAFANFFAKRAKYPKFRCKDGIQPAEYTASAFKWDGTSLKLAKMDAPLAIRWSRTIPKGVKVTTVTVSKDTAGRYHVSMLCDDVISAKAEAIGAVCIDFGLTGFVVLSTGEKVPAPNAFRKNEAKLAKLQRRLEKKQKGSANRRRAKLKVARMHAKVADFRRDFLHKLSTRQIDENQVIAIESLGISRMQQNRRLAKSISDAGWSEFVRQLTYKAA

SEQ ID NO: 1206 - protein, 407 aa, Thiomonas sp.
VASVAARCTGARWRSERRRRMRRSRTATTARLSSSVFECRAAPCAASGWTWLADAPVHPLQQTLKDLERAYSNFFAKRADFPRFKKKGQGDGFRYPDPKQIKLDQANSRIFLPKLGWLRVRFSRDVLGAVKNVTVSQSDGTWFVSIQTEREVEQPLPQGDAVGIDMGVARFATLSDGRFVAPLNSFRKHEIALRKAQQAMSRKTKFSSNWRRAKARVQRIHSRIGNARRDFLHKTTTTISKNHAMVCIEDLQVRNMSRTAAGSTEKPGRHVRAKSGLNKSILDQGWFEFRRQLDYKLAWNGGWLVAVPPQNTSRTCPCCGHVSAENRQTQARFACVECGFEENADVVGAINILSRGMQMLRDEGQNTADASAGCASTARIACEVSGAARPPTAGTHRSDSGAAPCRA

SEQ ID NO: 1207 - protein, 373 aa, unknown
  TnpB Polypeptide
VKVRRAFKYRIYPTTAQAETLTWTLDRCRELYNACLEERREAYRMCGVSVSYYDQTRQLPEMKDVRPEYKQIGSQVLQDVTRRLDRAFGAFFRRVEEGVAGKKVGYPRFKSRYRYNSFTLSQAGWSLDKRLHVAGIGAFKVKWSRPIEGAIKTVTIKRDTDQWYVIFSCAVEIEPAPVQDKPAIGIDMGLEYYATLSDGTHIENPRYYRKAQETIAHRQRVMERRKKGGKNRGKAGVLVRKAHRTVANQRRDMQHKTARRIVDTYGAVAVEDLNIAGMVRNHCLAKSISDAAWGQFIAILTSKAASAGCVVVAVNPRGTSETCSGCGAKADIPKTLGDRRHTCAACGLSIQRDHNAAINILDRAGLARYAAGA

SEQ ID NO: 1208 - protein, 413 aa, Bacterium sp.
LNHLYSYKFRLHPTKQQEVLLNKHFGCGRFVYNHFLDKRIQEYKNNKKSISRKDNEKELPILKKEHPWLKEVGSQSLQYAVECLQNAYDNFFRKVKQKNKGNKGFPKFKRINDKQSFRVKQNIKIKGKKLCFPKFLSGVNFVQDREFEGEIKFATISRNKVGQYFVSITVQKEILPLPTSSEVIAFDLNVKNIVDSNGNKIQNPRPNKQYEQRLKLLSKGVSRSEKGSNGRKKANRRLAKLHLKITNKREDFLHKLTHRIINENQVICVEDLSVESMLKKVSPDKRDETRWKERNRHKDIADCGFRSFVDKLTYKAKWCGRELIKVDRYFPSSQLCNNCGFQNKELKPTDREWFCFNCFENVDRDHNAALNILDEGLKYRTVGTTELAACPDVRPAFGGQLVGAETHPSLAGG

SEQ ID NO: 1209 - protein, 372 aa, unknown
  TnpB Polypeptide
MKNRAYKYRFYPTDEQATLLAQTFGCVRKAYNTILRWRTDAYYQAQEKIGYIQASAKLTEIKKRSELKFLNDVSCVPLQQSLRHQQTAFKNFFEGRAQYPTFKKKSRKQSAEFTKSAFKVVDGKLYIAKSREPLDIRWSRELPCEPSTITISKDCAGRYFVSCLCEFENQILPKTDKTVGIDVGIKHLFVTDNGIKIDNPRHTASFAAQLAKAQRELSKKKLGSANRAKARLKVARIHAKIIDCRLDNLHKLTRELINDSQVVCVESLRVKNMIKNPKLSKHIADASWGKFIQQLEYKADWAGRILVKIDQFFPSSKRCSDCGYILPRLSLRVREWTCPECNATHERDINAAKNIRTAGLAGLAFGENVIPV

SEQ ID NO: 1210 - protein, 372 aa, unknown
  TnpB Polypeptide
MLKAYKYRAYPNNQQKIQIAKTFGCCRFVYNRTLAHRKETYEKEKKSLGKTECNNYCNRELKKEYKWLKEVDKFALTNAIYNMDSAYQKFFKEHAGYPKFKSKHDNRKSYTTNCNHYEKAVSNIEVDFENNKIKLPKLKWIKAKISRTFEGKIKSATVSQVPSGKCFVSILVEEEERELPKSGKSVGIDLGIKDLVITSGGEKFDNLKLIKKYEDKLAKEQRKLAHKQKGSKNREKQRIKVAKIHEKIANARNDYLHKISHRLINENQVIVSEDLSVSNMVKNHNLAKAISDCGWSELTRQLQYKSNWYGRTYVKIGRFVPSSQTCHICGYQNKETKYLKVRKWICPQCRAEHDRDINAAINILHEGLKQIA

SEQ ID NO: 1211 - protein, 364 aa, Aquaspirillum sp.
METVKTLKLRIKDKHAKALLAMARDVNTVWNFCNETQYRSLRRYTNKPQRWLSGFDLQKLTNGFSKCDGVYIGSSTQQAVCEEFATRLRQFKKQRLNWRVSNKTSPKYSLGWIPFKKGALTYKNGQVRFKGIHMSLWDSYGLSKYEFRAGSFNEDSRGRWYLNVVVKCQTEAKPVQYGASAIGIDLGLKTLATDSNGGKFEPKQWYRESEAALGIAQRARKKARVRAIHAKIANQRKDAIHKETTRLVKAHAIIFVGNVNAKALAKTPMAKSVHDAAWTTFRTQLKYKAMRQCVVFEEINEAFSTQTCSCCGKIPASSPKGRASLRIRAWICSECGATHDRDTNAAKNILAAGLRRLAAGIPAL

SEQ ID NO: 1212 - protein, 383 aa, unknown
  TnpB Polypeptide
MSKANKSNKAIKYRLYPNDEQKVMFAKTFGCCRFVYNQLLALQKQRYKDGESHLSKLKSNEFATRILKKDYDFLKEIDKFAVSNAVFHLADAYDRFFKKQNHFPKFKSKRKSKKSYTTNFTNNNILIGKNVIKLPKVGMVKAVIHKLPKDDWKLKSVTVSQDGVGNYFASVLFEYEQEDIPSVSKSSTNAIGLDYKSDGLYMDSNGNKAGVHKYYRESHKKLAKEQRRLSRKAGSKKNETKSSNYFKQMRKVNRIYRKIANQRLDSLHKKSTEIANQYDVVCVEDLDMKAIGNKGFGNGKATFDNGYGMFLNMLEYKLKERGKYFVKVGKWYPSSQICHCCGSVKKFDLKDRVYTCDCGYIGDRDHNAAINILTEGLRILQSL

SEQ ID NO: 1213 - protein, 389 aa, unknown
  TnpB Polypeptide
METVETHIQVKLHPTKEQEVVLKKSCEIYVKCLNAASTYFFEHACNMTKNQLKKSIGKSLRDGFGSSPLIASAIKEVLLYYKEEEKRLKKEFYTYSDEKGEQKVSKDLSWLKKPIVFKEEHICYDPTYWKIKYGGAKISLLCFDETILCDDSHKKSVKLTNDARKPAKLVCRENGDFYFLIQTGMKIKPEIPFKKTSTTTVVGIDIGERFIITAYDGEKTIFVSGKEVLEKAKKYQQQKAELTGKKSKAAQERLKAVTQKERNWLCNVNHKIAKDLVESYGKQTVFVFEDLPHAMFQSKSRLWFLERLEEYFRQKIASRGAHMLKVSAQYTSQRCPYCGKISKKQRNHNKHEYRCSCGFRTNDDRVSAINLHELGQRWLEGEKNPRIVL

SEQ ID NO: 1214 - protein, 262 aa, Massilia sp.
MREALRFQDRIVSATISRVANHWYASITVDIPNPFLPSAENQDAVGIDLGVSSLATLSTGEAIAGSRALRTLLQRLQRLSRALSRKVKGSHNRGKAKMKLARLHARIASIRRDGLHQLTTSITRRFHTIGIEDLNVKGMLANRRLSRAIADMGFYAFRRQLEYKAAWRGGQVIVADRWFPSSKQCSGCGHVVKELGMGVRHWCCPECGEYHDRDVNAAVNLKNMAVSSTASACGGEGAGLARKRETKPAPAKQESSAKVNDE

SEQ ID NO: 1215 - protein, 369 aa, unknown
  TnpB Polypeptide
MMETFRQMVNHCIKTGLENNCSTLKKLSSFAYPMLRDYNIMSYYKLTAISQACGRLAQMKKDIKKGRNPKSPYVQKPYLVSCYGFKINGMLLTFPIRNREFANILLNEHVVKILSDQSITSRSFTITPQSLSISIAKNVELIKVESTIGIDRNLRNVTFGNDKKVIQVNTSEILKIKENYTHIRSACTRNDHRIQKKIYGKLGKRQTNRVKQRIHRMSKSIVNYARKQKAAIIFEDIKGIRKLYRKGNGQGNRFRRKLNSWSFYELERQASYKAAWNGIPFCKIDPKCTSTRCPACGGTLQVDKQKRRDLWCGNCERWQDRDVIASMNIAYKGLYRFCNPQGDASEAMRGNLKELVILRVDVSKLVMDW

SEQ ID NO: 1216 - protein, 386 aa, unknown
  TnpB Polypeptide
MPTKAQEIELNQHIGNVRWLYNYALDLSNKYYAEYKKGLSRYDIQAKIPQLKQANEWLKKSNSQSLQVSLINLETSFKNFFKKRGKYPVFKKKVYGGSFSIPQNAKVNFENNTVSIPKFKSIKVVLHRKFEGKIRQATVSKTATGKFYISFLVETSEILPTKKNIDESKAVGIDVGIKDLVICSDGTKYENPKWYRKAEKRLNRMNRWRSRKVKGSANRQKWNRKVAKQHEKISNQRKDMWHKISHELLSKYDTICVEDLNVKGMMRNRKISKSIGDAGWGIFFTMLKYKAEWQGKNILEIGRFEPSSKQCNICGVTNNNLKLSDRIWTCENGHTLDRDTNASINVKRFAFYKITTTDGISGSNACGDEAIASSAKQEAHWSLANG

SEQ ID NO: 1217 - protein, 374 aa, unknown
  TnpB Polypeptide
VKLTLKIKLLPTDEQAKSLLQTIKEANKACNLISDIAWEQKAFQQFKLHNASYHTIKSATDLSSQVIVRCISKVADAYKLDKKTQRTFKPIGSISYDSRILTYKPNNIVSIWSIGGRIKMPFVCHNRNYLPYIKGEADLVYKKGKFYLFQTVDIIEDDVKDVEEFIGCDFGQADVCTLSDGTNYNSEQLKKVRKKYSKVRASVQAKGTQSSRRLLKRLSGRERRFVSINNHTIAKQIVEKAVRENKGIAIEDLSNIRKTAKPKSKALKTELNRWSFYQLRQFLTYKAKLKGVKLYAIPPAYTSQTCADCLHIGERKGKRFSCKNCGNVADADHNAARNIATWGCVVNQPEISDMFSCALHYSDLKPIPSLCVGG

SEQ ID NO: 1218 - protein, 420 aa, Hydrocoleum sp.
MIISHCYKIKPNREQIAKIDYWLELLRRHWNYALGQRLDWLNRTRCPIDRCSIVSSPIGEIPIRPDYYFQQSALKQTKQFFPEYKEIYSEVQQINLQRLDKAWKRWLVPDKTGKRFGRPRFKKSGKLRSFCFSRVNHPKAAVKFNGKQIIISRFGAIPVIVHRPIPDGFTIKTATITKKADGYYISFSLEDNPPLSPPGRGTKGVGLIPTDNIKNSVGIDVGLKEFLTTNAGETVSVPNFYRKAQSNLARKQSKAARKEIGSNNWKKAQNKIARLHQHIARQREDFHYKTAHKLVKEYDLIAVEDLNIKGLAKNSKLSKSIYDVAWGAFIEKLDAVAVKRGVHIVKVSPHNTSQNCSNCGQKVPKTLSVRTHSCPKCKTVLDRDENAAKNILNKALNEVGIILSACGGVRLRSACETRNF

SEQ ID NO: 1219 - protein, 302 aa, Moorea sp.
MIVLEFKVKGNKTQYAAIDEAIRTGQFVRNKCIRYWMDNKGIGQKDLYRHNTWLRSEYPFVKALNSHACQASVERAYNSISRFYDKCKKQVPGKKGYPKFKKFSRSVEYKTSGWKLSPDTKSINFLDKKGIGKLKLKGTWELWRYDSAKPTLREQTLIKRVRLVRRADGYYVQFCIKVDISKPLEPSHTNVGLDVGLKEFYTDSKGGVETNPRFYRKGEKLLKFYQRRVFRKKKGSVNRKKAINRLGRTHLKISRQREEHAKRLARCVIHSNDVVAYVRAACRKARLEGKKFGKKSLSCQVY

SEQ ID NO: 1220 - protein, 416 aa, Deinococcus sp.
MFMHRAETVILKLTAPSANKRAWLESTAQAFRDGVGMVLGVAESEKTSSRAKLHNACYAAIREETGLPSDYARMVVNAGVALARSYWGLRKGKRRPSFPKVGKSQGIGLGVNAYAVLKRGERFFLRASTGKRGQYKWLPLLVPVHLASKLAFVHGDAKLFQRGRDWFVMLLLRLPHTPAVRDGEPTVLGVDLGVVKLMTVLTPDGVKIWNGLPVRHRRERFAAVRRRLQRHRRTDRVKAQGGRERRWMSGLNHKLSRELVDLARFYKDAVIAFEQLDGIRDRVRGSKKFNRMMSSWTFRDLVDKVRYKAEAAGVGVVFVDPRKTSQTCHRCGHASRSNRTSQAEFRCVNCGFRTNADWNAATNIAAAGLRALQQGPTDTARSEKPEQASSSLTALDGVKVCEAQVSHTDSNLVSPA

SEQ ID NO: 1221 - protein, 467 aa, unknown
  TnpB Polypeptide
MTAFQFTLQPTAEQETLFKVAGGAARLTYNVLLGQVKDALDSREWDPAVKVPWTNFDLIKAINSWKRAELVGRGLDWHKQIPTLAFEEAAVDLSRALADFSASRDGRLPGPKRNFPVFKTKNSSPYSFRVRNQNGCLLIGTDSGPRTIKLPKIGIIKVREDTRRLRRMLRPGIDESGDRTAPRAVITSVTVKQCRGRWIASFRVTADDFHPDRRHAVRSDGDVSGSVGVDLGLIDLVVAATDEGREVVRVEASKTFQRRQDGLARHQRALERKKRGSKRRREAVRKVAAYEGRTAAIRRHRLHEVTNQLVKNHDLLVIENLNVLGMMANHKLAKALADASFGTIARMLTYKAGWYGVTLLSADRFYPSSKTCSGCGARKKKLALSERLFSCDECGLRIDRDLNSAINLARLVAVLLERPGRGSSPGPGPVSGRPGDQCATQAPKRHRQSKITAAAEGLTTARTDRVA

SEQ ID NO: 1222 - protein, 383 aa, Enterococcus sp.
VNFVERLKAYKFRIYPTEEQEIFFAKTFGCVRKVYNLMLNDRKKAYEEVKNDPSKKMTFPTPAKYKKEFPFLKEVDSLALANAQLHLDKAYKNFFRDKSVGFPRFKSKKNPVRSYTTNNQNGTVALIDSKFIKVPKLKSLIRIKLHRQPKGMIKSATISRHASGKYYISLLCKEEINELPKTNSAIGIDLGITDFAILSDGQKIDNHKFTSKMEKKLKREQRKLSRRALLAKQKGINLFEAKNYQKQKRKVARLHEKVMNQRTDFLNKLSTEIIKNHDIICIEDLNVKGMLRNHKLARSISDVSWSSFVAKLQYKADWYGREIIKVDTWFPSSQICSECGHKDGKKSLDIREWTCPICHTHHDRDINASINILTEGLRIQSLA

SEQ ID NO: 1223 - protein, 415 aa, unknown
  TnpB Polypeptide
VSKIKKTYQFKLRPSKLQGERLLSTIELCRRIYNACLFQRRIAYRDWNVSLTSYDQIKQLPEVKSNIGEYREVHSQVLQDVVRRVDKSYKNFFRRVRNGKERPGFPRYKSMKRYDSFVYPQSGWKMEGTHLVLSKIGTVKVILSRRIPKNAIVNTVSVIRDRCGDWFVSFSVELESTSKPVPVPVPEDRSIGVDVGINKLAVLSNGDFIENPKFIRKMGVRMKRIHRNVSRKTKGSNNRRKAVYRLARCYRKLGRMRKDYAHKSSLYLVNNFDLIAFEDLKIKNMVKNHNLAKSILDGCWDMLIRFTSYKAEEAGKIVVKVNPMNTSQECSVCGALHKISLSDRLFTCGHNRGSDFCIDRDLNASVNILKRAFEKLGWGPPEVKLAEPGPLCSPIRLDISSGCETRISRIHSGVA

SEQ ID NO: 1224 - protein, 390 aa, Streptomyces sp.
VKLVVQVKLLPTPLQAAALEVTLQACNEAATWAASVAFEKDALRPLPLRKHTYAEIRGRWGLGAQAAQHAIKKTCDAYTTLKSNLRAGRYGRPGTKRHTRASGKPVTFRPQAAQPYDDRMLSWQHEQRTVSIWTTAGRMKGVAFTGQAEQLAVLAAHRRGESDLLRRDGKWFLIATCEIPEKDLNAHPIGFLGVDLGIVNIAATSDGERHFGRRINRKREGDRELRSKLQKKGTKSAKRRAKKYAGREARRNKDINHKISKRIVAEAERTGRGIALETLTGIRERARLRKPQRTTLHSWPFAQLGGFIAYKARRAGVPVIYIDPAYTSQECSQCHHIERGNRPDQASFACRSCGFVEHADHNASHNIARRGWMAWVCGAQSTAPELTLIA

SEQ ID NO: 1225 - protein, 472 aa, unknown
  TnpB Polypeptide
MKCRIFRLHKDTNSGKVARLEALHVEYVKYVRICVQTMLDQRTHTMPKSAKQAFFPRATRLSSQIEKNARDHALQIVSTWAKGIYARKIKPTITNLQHEGILTEQDAKALYTIGTKLLSKPWRFVTQDHLDAYHALLGAYGGNPPTVRDNLPMRLSEMTTRLEDTDEAPLGDFWLRLSSLQPRKSVWLPLVGNPYVQQANQVSRGISARKTKRGFWRFEAVSKVEWAVPEARGGWVKLGVDVGLNVLAATSGGMIYGEHIKPKFDKLYAHIKRLRVNRQRQGLKENSPRLDRLESRLTGLVKTETGQVVNTLIQKHPETVFVVEDLDLSGCRGQKRFAYRALQVNLERKAPTKKINPAYTSQECPSCGYVHRGNRKSTKFQCRSCGRKAHADWVGSRNVLRRSEDEHITTGDRPRSVKRVLRERYRVKRDSFSGFGRLRAPSFAPLPLGRRLTTEVLGPPRIGTASNLMPAC

SEQ ID NO: 1226 - protein, 246 aa, unknown
  TnpB Polypeptide
LGELRLKEQIPFLCSAQTFTISREADIWYVSFVVDADKLPPLFHEVVEPTGIDLGVLTFATLSDGMTYDAPKPYKKAKTKLAKIQWRNRNKQPGNRKQGIRASKNAHKYYCKLQKNYARIANQRCDFLQKTTTEISKKYAHIRIEDLNVQGMMANHKLSAAIADLGFYEFRRQLEYKSPMYGTKLELVDKWFPSSKICNKCHHTQPMPLAERIFVCGECGYTVGRDLGAAINLKHAPDEVLRSARP

SEQ ID NO: 1227 - protein, 427 aa, unknown
  TnpB Polypeptide
MPRQRPTDAPQVVHRTARIALRTTPAQRQRCFGLLRSGGDVWACVLELNAIRRRRNGAPLVTYQALCRVLSADGPGIFGELSTTGARSILRRYSDSWMTTARRRRDGEMSARYPRRKKALVPSRYYAGTFSLDERRLTIPVARGAAPLVVRLTREVPYPATAIRSVTLLADGAWLCVDVTAEVEVERYTPEQAPDPTGIAGVDLGVIHLFAVVADEGSLLVSGRALRAESRLHLVESKTRHRAVARRAPSKGQRGSRRWRKYRARTKVLEARHQRRLAQARHEAARSVVDFARERRIGCLVVGDPRGVLDRDVGARQNLATRNWRVGRMIGVLEDTSRPGRPAGLLVSSDGPLVRVARARHGVPTARSPQERRRSSGAGPSCLRSVNGVGSVIALIEAIAVAGSSTPRVSTRSGDGDIGWVPSSVSY

SEQ ID NO: 1228 - protein, 406 aa, Frankia sp.
VAQGRGPVRRTYKFLLRPSGRQVASLNAMLGDHRALYNAALQERRDAYRHPSRTTVRYGDQSAQLKDIRAYDTDHARWSFSSQQATLRRLNLAFAAFFRRVKAGETPGYPRFQGAGHFDTVTWPVDGDGCRWDSQPEHPSQTFIRLQGIGHVKVHQHRPVLGTVKTLSVKREGNRWYLALSCDDVPAVPLEPTGAVVGIDMGVASLATTADGRHFGNPRFLQRSADRLAAAQRDLSRKKRGSRRRRKAVARVARQHRAVARQRADLAHKTALELVRDHDLIAVEKLNIKCMVRRAQPKPDPDRPGQFLPNGQAAKSGLNKSIHDAGWGVFLDVLRAKAESAGRTVVEVNARHTSQRCAECGHVAKENRPTQAKFLCVQCGHSAHADENAAVNILRAGLALQVATAS

SEQ ID NO: 1229 - protein, 106 aa, Paraburkholderia sp.
MEDLCIKGLMRTNLARSICDAAWGELLRQLAYKAKWYGRTYWQADRYFASSRTRHACGFKLRALPLSVREWTCPACGEIHDRDKTAAKNILAAGLIATATAGRAAS

SEQ ID NO: 1230 - protein, 240 aa, Listeria sp.
  misc_feature (64)..(65): Xaa can be any naturally occurring amino acid
  misc_feature (199)..(232): Xaa can be any naturally occurring amino acid
MLYDRIQSYQKSQKVSKGKITFPTPAQYKKEYPFLKEVDSLALANAQLNLDRAYKNFFRDKSVXXPRFKSKKNPVQSYTTNNQNGTIFLIKNKYIKLPKIKDYIRVKIHRQPEGIIRSATISYHSSGIYYISLLYKEEIIALPKTGLAIGIERGMNNFIVLSDGRKVNNMLDNEKMRLKLKQEQRKLARRMVLTKNNGXXXXXXXXXXXXXXXXXXXXXXXXXXXXXXXXXXIIKNKNKK

SEQ ID NO: 1231 - protein, 170 aa, unknown
  TnpB Polypeptide
VKAELQGRGTKSAKRKLRKVSGGESRFKRYVNHCISKDLVKVAKDTKRMLALEDLRGIRSRVTVRSGQRDRLGKWAFGQLRAFVEYKAKLAGVPVLVIDPRDTSRRCSECGHTEKRNRVSQSEFRCSACGHAENADLNAAKNIKRRAEVNQHIMVCQPEGLEVESQTHLL

SEQ ID NO: 1232 - protein, 241 aa, Burkholderia sp.
MILVYRYRVKSLNGLLNKQSRAVNYVWNFCNDARGNWFLNIVIEMPDVQARPIRSGVGIDLGLKDFATLSTGEKLSNDRFGRRAAEKLAKAQRARKHKRHIAKLHAKVANARADFQHKLALDLVRRFDYIAVGNVSAVKLARTRMAKSVYDASWSSFRNKLRYKAIAHGATFEEVDESGSTQSCSSCGSKDSTTRPKGIAGLRVREWACDGCGVVHDRDINAALNILRCGRASPGVGITCL

SEQ ID NO: 1233 - protein, 364 aa, Herbidospora sp.
VKRAFKYRFYPTPEQAEQLSRTFGCVRLVYNKALEERTRAFRTDGRKVSYLQSSAALTAWKRTEELGFLNEVSCVPLQQALRHLQAAFANFFAKRARYPVFKSRKRSRASAEYTRSAFRWSGGTLTLAKMDTPLDIVWSRPLPNRAKPSTVTVSKDAAGRWFVSILVEHEIVPLPSVEAAVGVDVGIAELATLSTGEKIDNPRCERADRRKLAKAQRALARKGKGSNNRAKARTAVARIHARIGDRRRDHLHKVTTRLVRENQVIAVEDLSVRNLVRNRSLARAVSDAGWRELRTMLSYKSAWYGRELLIVDRWCPSSKRCSECGAVAESMPLRLRQWSCVCGASHDRDVNAARNILAAGLVER

SEQ ID NO: 1234 - protein, 403 aa, unknown
  TnpB Polypeptide
VFLVERHIIKKSHPFYEECDSLCLKSKNLYNQGLYNVRQHYFEHKEYLSYYEGFHQAKTQEAYKQLPAKVSNQTLMLVDQNFRSFFGLLKTMGSMARMPKYLDKQKGRYMVKFDKQALSLREFKKNGRLKLSKTIISMQTNLKDWSQIKEARIIPRNGYYAIEVVYEQQEKALITDGAIAALDCGLNNLATIAFNKNEIQPFIINGRPLKSINQFYNKQRAEAQSKLESGRNTSKAIIKLTNKRNEKIKDYMHKASRILVNQLLKRHVKTLVLGKNVGQKQDINLGKRNNQNFVGIPSFRFLDMVAYKARLEGIEVLWQEESYTSKASFLHGDCMPTYGDGQAIPEFSGYRIVRGLYKLKRENRTINADLNGALNILRKAIPNAFADGIEGVAVRPMRLTTTA

SEQ ID NO: 1235 - protein, 414 aa, Blautia sp.
MKEPETGKKENTGKSGYSITTWRLHLWCRHPEWLRTTQEFYNRIAEFYYNLLLDHTDLWELGSQQTLRELEIMSIPGRGGRIPSDPLPWQKVPLYFRRAAANEGIASAKSYLSRFAQDEKIGRAEKLNAAVTYYKGMYQDFSAKEITLRVWTGDTWTWMHCRLSGRDFPENARLMSPSVVFEYKYDMLHVPVRQNNENTATVRQRMQAGCRILCIQFTNSDAFAAGVVLDGTGQEIAVKFWKGGKEYSHHCRKLLEKIQKSQEATGGRQTGRVDQKYWMHLKHLSEHYGHQVTSQILRFAVEQDVSVIVLPRYNQEYSRNVMKGSGNWGPLHLSTRIRQYLDYKAWKNGIIVIEVHATGISKICAKCGAEIIRTDTRTELCCCANGHQTNRYLNAARNLGRKCLTQFGRQTQTK

SEQ ID NO: 1236 - protein, 159 aa, Bacillus sp.
LQRQVSRKYEMNKEGSRYVKTSNILKIERNIQLLHRRLSNIRKNHLHQSTNDIVKTKPYRIVMETLNIKGMMKNKHLSKVIAKQCLYEFKKQIQYKCMKFGIEFVEAELWYPSSKRCSNCGSIKKILKLSERLFRCTCGYEIDRDLNAAINLAQYQLAI

SEQ ID NO: 1237 - protein, 380 aa, Bacillus sp.
VIQDLFQIRHQCGDIWNDCVELARYYYRLGDSWITKSQLQAELKGKYPLHSQTVQAVCHKFLQARDGVKEARKANKKIRYPYKRKFVFNPKWVDKAFSLEGNILKLSLGNWNGKRQAPLVLKLAQVPNGEVKEVELVFDRTLQLCLSYDDGCEASPSTGAHTTAIDVGEIHTISAVSTNEQAIIITGRQMRSIHRLRNKKLRELQKLMSRCQKGSRQWKKYNRAKRYVLSKSEVQLRDVLHKTTKSFVDWCISQEVKHVVIGDVEGVQRNTSKRSKNRKRKMHRHTNQKLSNWSFGRLYSYLSYKLDAKGISIAKEDESFTTQTCPACGKRNKCRGRAYRCRCGYTKHRDIHGAANFLSKHLHGRFQEMSIDDIMYLRPS

SEQ ID NO: 1238 - protein, 363 aa, unknown
  TnpB Polypeptide
METVIKTLSVRVRDKHAKVLSRMAFEVNQVWNAANAETAEWSYIPVPEVGYIRNNITAFDLQKQLKGIKKERGFIIHSTTVQEVIAVHHKSRKQFKRDKLRWRVSGGSRRSLGWVPFKSGAAQWKNGQVYFAGHYFKVWDSYGLSKYSFRSGSFSEDARGRWYFNIVVEVPIQKPKGNGQLGIDLGLKDTATCSNGEKLERGNFYRNSEEKLAKSQRARKKKEVKNIHAKIKNRRKDAIHKFTTKLVNENELIVIGNVSASGLAKTKMAKSVLDAGWAMLKTQLDYKSIATRVAFVEVNESYTTQTCSCCGCISSSSPKGREGLRIREWICSECGTHLDRDQNAAINILAAGHRRLAAGIPGL

SEQ ID NO: 1239 - protein, 494 aa, unknown
  TnpB Polypeptide
MKRTVTESYCVTFEVKVKPSDLPEIDRRTECARQVYNTCLGQCQKRWRLIRSIPDWRAALKELPALNRKPELSPDEKFRQKSLRQQLKTIEQNEGFSEYALHAYALTVNRHFGSLLGVNEMQKAATFAWRTFERYRFGNAEKVRFKRRDDPILIENKSNVTGLRLKDDKVLWGSKHARTLEFPIIVRRNDKYAQQTFLDKTKFIRFFERTIRGKRRFFVQAVKEGTPPPKHRQYGDGKPAVGIDLSPSTLVAYSPEAAVIEELASDCESIEAAIRRINRAIDRSYRATNPEAYNENGTFKKGCRLVPSKRCQELMAERKELFRKQAAVRKQSHEKVANKLIAQSTDIKVEDTVVSSWTTRVKETSVNRKNGKNRSKKRFGKTVARRAPAMLLAIIDRKLKYRGYALKRVVSRKVKASQFDHSTGQYRKKRLCDRWCVIDGHRVQRDLYSAFLISHVTGKNLDTIDRKACCDDWMNFLKLQDEVLKTCDKNLGIF

SEQ ID NO: 1240 - protein, 387 aa, unknown
  TnpB Polypeptide
MKKLLKSFKTEINPTPEQKIRIHKTIGTCRYVYNFYLCHNKTLYDKGEKFMTGKSFSVWLNNEYIPNNPDKAWIKEVYSKAVKRSIEDGCTAFTRFFKHQSDFPKFKKKGKSDVKMYFVRNNPKDCVCERHRLKIPTLGWVRIKEKGYIPTTKEGYVIKSGTVSIKADRYYVSVLVELPDNKTADNSNEGIGIDLGLKDFATVSNGKTYKNINKSAKLKKLEKQLIREQRSLSRKYENLQKGESTQRANIQKQKLKVQRLYQRIDNIRTDYIKKTIAGIVKTKPSFVTIEDLNVKGMMKNRHLSKATASQKFYEFRTRLQGKCAEKGIELRIADRWYPSSRRCHNCGQIRKDLKLSNRVYQCSCGYCEDRDLNAALNLRDVKTYQSA

SEQ ID NO: 1241 - protein, 425 aa, unknown
  TnpB Polypeptide
MKIKRAYKYRIYPNREQKSILDKWLETCRVLYNDCLTERRDAWDVSHKSINYYDQANQLKEIKNFDDDLKRVHSQVIQDVLKRIDRSFKNFFRRVKRREKAGYPRYKGSDRYDSFTYPQGGFKLEDRKLILSKIGSINIKKHRGLPEDAEIKTCTIERDLDRWYACFTVEVGIEKQNPQKITLANPIGIDLGINHLLTLSNGDIEDNPRYLVKSEKRLKRKQRKLSKVLTTSSWDLENLRFSKTKRGSDNRTKRRFELSKTHRKVREQRTDLIHKISRGLVNAFDLIVFEDLKIRNMLKNHHLSKSISDATKSLISCRKNGTFLHVSWSQLTNFVSYKAEEAGRRVEFVNPKNTSQECSNCGKIVKKPLSQRVHKCPFCGLIMDRDQNAAINILNKGLKHVGQELSEFKPEDFSKRRVIQEAPML

SEQ ID NO: 1242 - protein, 381 aa, unknown
  TnpB Polypeptide
MSTKQVIKAQKFRFYPTKSQEELLAKTFGAVRFFWNKRVESFNNLNGPGFGSCSIKELKEVYPWLTEVSYNALEQKNQDWIATKKQYFSKTRKIKLGRPKFKSKHGKQSFRLSQNGYAVTADGLKLAKLGFVKIRSSLNIQEIPNIKSVTVSKDGPRYFITVLYSGFVNVFPKTGRVCGIDLGLTHFYTDNQGMKLENPRFLIKSLESIKAIQRKLSKKKKNSNRFNKLKSRLNKLHYKVRCQREYFLQCESTRLLKNYDTICIEDLSVKNMLQNKQLSKSISDVSWSMFTSLLKSKATWYDKEVITINKYYPSTRICSVCNYENFNLTLADRDWLCPQCGSHHDRDHNAARNILAKGLEIQSRQNTPTSKSSTKSRKIAG

SEQ ID NO: 1243 - protein, 441 aa, unknown
  TnpB Polypeptide
MTIYGQATTTISGHTRQKLINGLQESADLSARLQPCGQIGVLRARSRACARPQTLSCALCYNHTTRKTFEYRLFPTAAQGRVLQTTLDECRWLYNQLLEQRKTAYEERGETLTLYDQQATFGALKAAWPALAGVHSQVLQNVAVRLDLAFKAFFRRVKAGETPGYPRFRGSNRYDSFCYPQSGFKVEGQRVYLSKIGHVKVVLHRPLEGTVKTCCVQRASTGKWFVTFACEVEDAPLSATASAVGIDLGLTSFATMSDGTAIANPRFFRRDERDLVRAQRRVAEHPTPERGHPSTRERRRRARIVARIHERIANRRRNFAHQESRTVVNAHDTIAVEDLSINRMVHNHCLAKSIHDAAWAMFVAMVAYKAACAGRRFIAVNPAYTSQDCSRCGHRQKMPLSDRTYQCPCCHLVLSRDVNAAKNILAVGLHGLGEEPSKPMA

SEQ ID NO: 1244 - protein, 419 aa, Sporolactobacillus sp.
VKRGEIMPLKGLKVRIYPNKAQKIKIKMNFGYNRFVWNQMLNMLIERYKNNPKAPFLNAYALNTLLPALKREYLWLKDAESTSLQATNHDLIEAYKKFFNEHKGFPKFKSKKFLKQSYQSKCVNKNIKQVGAKYIKLPKLGILRFKSGRPIPDKIKSVTIKQSFTGKYYAVLLVECENQAFEKTNQQIGLDMGVQDLLVYSDGTKVPTIRFDKRLAQRKHYWEKRLARRRLIAQKEIAWDKHNKVLNPRVLSDFVNYRKAKVMVAKYNEKIANQRNNYLHQLTTKLVKQYDVIAIEDLKTKNLLHNHKLARAIANQAWRELRRMLSYKCEWYGKQLIVVNPYKTSQICSHCGHDDGKHPLDVREWTCPSCHHHHDRDVNAAKNILTIGLGQALVKELSPLLLRLRTKKQVCNVPRSSVL

SEQ ID NO: 1245 - protein, 366 aa, unknown
  TnpB Polypeptide
MLKTHKIALDPNNVQATQFAQHCGYARVAYNHVLADFKRGLNAGKWHSHIELNKRFNSVKHEQYEWCKALNQRAAHNAIYFNFQDAIRRWQSDQSRFPKFKKRSRGQSFQADAGRGTTIVEGHRIKLPKIGWVRMFQSLRYLGTICKVVISKHGHRWFASILVDTFTDAPTPEIRHLPVVGVDVGIKHLAVTSEGVYYENPKVLKRYERKLKRLQRQLSRRKKGSRNWHKTKAKLAKQHYRITCIRQDAQHKATTAIVNRASRIGIESLNVAGMLKNHRLAKALSDASLSSFLSMLRYKAERMGVKIVEADTFYPSSKTCSACGRGDSDLSLSDRTYHCSVCGHTQDRDLNAAINLRTVAMGHTET

SEQ ID NO: 1246 - protein, 366 aa, unknown
  TnpB Polypeptide
MLKTHKIALDPNNIQSTQFAQHCGYARVAYNHVLADFKAGLDEGQWHSHIELNKRFNATKHEQYDWCKALNQRAAHNAIYFNFQDAVKRWKAGESRFPKFKKRSKGQSFQADAGRGTTIIEGQRIKLPKMGWVRMFQTLRHLGTIVKVVISKTAHRWFASITVETFDNDTITDTRHLPVVGVDVGINHLAVTSEGVYYANPKALKNYERKLKRLQRQLSRRQKGSRNWHKTKAKLAKLHYRIACIRQDAQHKATTAIVTGASRIGIESLNVAGMLKNHRLAKALSDASLSSFLTMLAYKAERIGVKIVEADTFYPSSKTRSACGAKDKDLSLSDRTYHCSDCGHTQDRDLNAAINLRTVAVGHTET

SEQ ID NO: 1247 - protein, 374 aa, unknown
  TnpB Polypeptide
MNKAYKYRIYPTEEQKVLFAKTFGCCRKVWNLMLDDKIAYYRSEKKMLHNTPAQYKKDYPYLREVDSLALANVQLQLQAAYKNFFSDKKSGFPKRKKKHKSKDSYTTNNQNGTVAVFDRAVKIPKAGYVKAVIHRAAPSSWKLKSATISHTKDGKYYISVLYEYDAPVRPVEVDKDKVLGLDYKSDGLYVDSNGVCADMPHFYRKAQKQLAKAQRILSRRKGSKKNSHKSNNWIKQHLKVNKIYAHVANQRRDFLQKLSAEIANQYDLVSVEDISLKVISSKKGLGLGKATADNGYADFVNMLTYKLRDRGKWLIKVDRFYPSSQLCRCGYKNPVTKDLSIRTVTCPVCGRTYDRDVNAAINIKNEGYRIYRSA

SEQ ID NO: 1248 - protein, 336 aa, Euhalothece sp.
MFVLEFKVKAKKTQYQAIDEAIRTTQFVRNKCIRYWMDNQGVNKYALNKLCKQLAEEFPWAKELNSMARQSAAERAWSAISRFYDNCKKGIKGKKRVLNSEVSSECKKHSRGYPQFQKNNRSVEYKTCGWKLDLNTRKHITFTDKKGIGRVKLVGTRDLHFYHPDEIKRIRLVRRADGYYCQFLINTEVKEQLEPTKRTIGLDVGLESFYTDSDGHKEPNPRFFREGEQKLKRLQRRLSKKQKGSSNRRKARQKLGKAHLRISRQRKEHGSATRWMVKWQGFHTSFRAIPDENSPWSPSELYLLIGEAHLPSPIIPVCGMTSLPLSKRWLREDKAG

SEQ ID NO: 1249 - protein, 403 aa, Euhalothece sp.
MCYTHRRDFLKTMEQTLTLVVKLNVEPEQATQLEETAQAFADACIWINENVNHRLTNRNSIQAVCYNDVKEKFGLKANHIVRACARVASNRKTAKHKGRKVKGFQPTSFDCDGRTFSFREKDWTISVSTLGKRLRLALRASNYHKGKLTGRKPTSAQICKHRDGQWYCHIQITIDYPEPQRTDKVIGVDFGRREIARTSTNQGWNGKEVQQKRDKFSRVRSSLQKKARQGTRSSRRRCREVLKRLSGREKRYQKWINHNISKAIISEAKETNSAVAIEDLTGIRERTNEKPRNKTERRRSNSWAFYQLRTFLEYKGIKEGVKVISIPPAYTSQTCHCCNHIGIRANKNFKCSNSDCSWEGDADDNASKMIAKWGCSINQPGGSEILSCRIFRATENANLSEAG

SEQ ID NO: 1250 - protein, 432 aa, Euhalothece sp.
MKAMRVSYQYRLKPDKDQIAKIEKWLELLRCQYNYLLGQRFDWWETHRTAVNSCLLICHLPELSDRPTYFSQKQRLTQLKKDRPWYKEVQSQVLQDCVKRVDLAFQRWLRGDKNGKKSGKPRFKGKGRYRTILFPQVKPDCVQGDYITLPKFKTIRLIKHRPLPDGFKIKTAQVTRKADGYYLTLSLEDISVPESTIDIVPTSENTLGIDLGLKDFLVSSEGEKVEIPQFYRKGQDRLKKLQQKVSRRQKGSKRYQKAVKQLGKHHQKVARQRKDFHFNTIKSILSKGDVIAHEKLNIKGLAKTKLAKSIYDAGWGTFLSRLAVKAENAGQLTVEVNPKNTSQNCSGCGKKVPKKLSERIHNCPHCGLSIDRDQNAAINIRNLAAGISVSSKAQSRTEAQAGAPEKLRGCHLRFPQMFIRPVQPHSVGIGCG

SEQ ID NO: 1251 - protein, 422 aa, Euhalothece sp.
MLNLTYNYKIKPTKEQIEKIEHNLKVCRSVWNYALAERKLWYNSRSCPINSCSITSEYIVPPFEYPNYHIQSSNLTKAKKTYPFLKSGNAQAMQQTLRKLDRAFNDMKSQGKGFPRFKKKMKSFNLVSNKIEVEGNQIKRPLLKQVRFVKSREIPEGFQIKQVQVIKKASGYYVNLALELDVDVPTPPPHGHAVGLDVGIKSLLATSDGLTIKRPQFLDRVLRKIGLLQRKLRNKKKGSGKYLKLQKRIAKLHEKVANQRKDYHFKLAHQLCADTGMLFVEDINFTAWSKGMFSKQSLDMGLGQFITILEDVCSQTDIYFAKVDKDYTSQVCPNCGVHTGKKDLNQRLHVCPECGYQQDRDVAAAEVVLKRGLTAVGAPVVKQPSHGKGLWAEFSSALYKPRRSVGGNYGCLDKSLYGNLPL

SEQ ID NO: 1252 - protein, 471 aa, Euhalothece sp.
MVASCYNQLITEKTDTAMRFSYQYRLKPDKEQIAKIEKWLELLRCQYNYLLGQRFDWWETHRTAVNSCPLICHLPELSDRPTYFSQKQSLTQLKKDRPWYCQIQSQVLQDCVKRVDLAFQRWLRGDKSGKKSGKPRFKGKGRYRTILFPQVKANCVQDNQINLPKFGTVKFIKHRPIPDVFKIKTAQITRKADGYYLTLSLEDTNVPESTIDITPTSENTLGIDMGLKDFLVTSEGEKVEIPQFYRKGQERLKKLQQKVSRRQKGSKRYQKAVKQLGKHHQKVARQRKDFHFNTIKLILNQGDVIAHEKLNIKGLAKTRLSKSIYDAGWGNFLSRLAVKAENAGQLTIEVNPKNTSQNCSGCGKTVPKKLSERIHNCPHCGLSMDRDQNAARNIRNLAVGMNASSKAQLRTEAQEKGAAEKPRGCRLDAATQERSDEEVRISPDVYTPRPTTSRSDWLWVIHQIPPKTAIL

SEQ ID NO: 1253 - protein, 403 aa, Euhalothece sp.
VFVLEYKVKAKPSQYQAIDGAIRTVQFVRNKCVRYWMDHQGVNKYDLSRLCKQLAEEFDFAKRLNSQARQASSERAWSAIHRFYKNCQNGIKGKQGYPRFQKNNRSVEYKTSGWKLDPNTKKHITFTDKNGIGRLKLIGSRDIYFYSPDDIKRVRLVRKADGYYCQFCINIDVTENIEPSNQNIGLDVGLESFYTDSNGHKEPNPRFFRKGEKELKRCQRRLSKKEKGSSNRRKARQRLAKKHLRISRQRSEHAKRLARCVITSNDVVAYEDLQVRNLVKNHNLAKSISDVGWYQFRVWLEYFASKFGKVTVAVPPQYTSQKCSNCGRIVKKSLSTRTHTCVCGHSLDRDHNAAINILREGLRTIGQIGTASLELENAWGDGTATVVGEVQSQQVPSPCEPSS

SEQ ID NO: 1254 - protein, 412 aa, Euhalothece sp.
MFVLEFKLKGNKTQYHAIDEAIRTSQFVRNKCLRYWMDHYGVGQKDLYRFNTHLRSEHKFVKELNSHACQTAVERAWTSIVRFYDNCQKGKSGKKGYPKFKKNLRSLTYKTSGWKISKNRKRIKFTDKKGIGSLKMKGGWDLHRIDLEQIKRVHLVRRADGYYVQFVVKEDLSNLVLTELPPTKHNIGLDVGLKYFYVNSDGNQVEIPQYYRKSEKQLNRLNRRKSKKFRKGQQQSNNYLKARNRYARKHLRVSRQRKEFCKETALRVIQSSDLVAYEDLNVSGLVRNGKLAKSINDAAWSSFRRWLEYFGNKYGKVTIAVPPHYTSQKCSNCGQIVKKSLSERTHRCQCGVVLCRDQNAAINILRKGLATVGHTGSLELDSINAWGDCPSTLADGENCLSKQGRSSYELGL

SEQ ID NO: 1255 - protein, 381 aa, Euhalothece sp.
MKKAIKVRLYPNSTQQQLLAQSFGNCRWLWNHGLSLMNQTYKETGKGLSSYDIKKQIPDLKKEREWLKLTYSQCLQQVCINLNTAFTNFFYGRARYPKFKSKHGKQSIQYPQNVEVKEGYLKFPKIGEVKAVLHRPIKGSVKTVTISKNSCGEYYASILIEDGKEKPPSYISPSGGEREGRKAVGVDLGLSHYAITSDGDKFNNPRWMNKHERNLKIKQQQLSRKEKGSKNRNKARHQVAKVHKKVSNSREDFLHKLSRSLVDENQVIVVENLAVKNMMKNHNLAKAISQVGWGQFCTMLKYKAEQDGKTYVEVDRFFPSSKTCNVCLNQVDSLPLDVRSWKCASCGTHHDRDINAAKNIRDEGLRIIACGTRDDSLARQG

SEQ ID NO: 1256 - protein, 524 aa, Euhalothece sp.
MLVSYQFKLKPKLSQVNVMEQWLNMLRAHYNYCLRDRIESYEQVKSPKLGNYCDLDTESECCPLTCSVSKNSNLGSPYKSNGKKRNAYEHQSSELSTLKKARPWYREIHSTVLQQNLKRLEVAFKNFFEGRGYPKFKTRQRFKSFNYPPNQVQVTGNKIYLPKIGWMRFFQSRPFPEGFALRSVTVRRKADGWYVSIGLENQDVPQSSPKNIEEISSVVGGDLGSNKLLALSNGEQIANPQFEKRLERTKIIRQRRASRKKRGSKNQKKAYQELARLDQKIVNQRTDYQWKVANQLVRLADVIVLEDLNIKGMIKRCQPKQDENGNYLKNGQSAKRALNRLIRDCSWGELKLKIQSVAAKFGCLVVEVNPKHTSQQCSACGQIDRENRKGEKFACIECGHVQDADNQAAINIANRGLEQLNVSLSKLLGVTQEVTANSEVTEDTGNSEETSVSLETEPSNPKQLVLFEWMEEQVTGSPESPVIATQEARAGEEVNVDVRQKWFAQGGSWLLQLRSRSDNLQTFP

SEQ ID NO: 1257 - protein, 407 aa, Euhalothece sp.
MFVLEFKVKAKKAQYQAIDEAIRTTQFIRNKCIRYWMDNQGVNKYALNKLCKQLAEEFSWAKKLNSMARQSAAERAWSSISRFYDNCKKGIKGKKGYPQFQKNNRSVEYKTCGWKLDLNTRKHITFTDKKGIGRVKLIGTRDLHFYHPDEIKRVRLLRRADGYYCQFLINTEVKEQLEPTKRTIGLDVGLESFYTDSDGQKEPNPRFFREGEQKLKRLQRRLSKKQKGSSNRRKARQKLGKAHLRISRQRKEHGKRIARCVVKSNDFIAYENLKVSNMVKNHCLAKSISDVGWYQFRVWLEYFAQKFGKVAVAVPPQYTSQECSNCGRIVKKSLSTRTHACQCGTKLDRDENAAINILREGLRTVGRTGTAGFEPDSKLVERPASTSVVSEQLGQADSSAGNLVSSS

SEQ ID NO: 1258 - protein, 425 aa, Euhalothece sp.
MCYTHRRDFLKTMEQTLTLVVKLNVEPEQATQLEETAQAFADACTWINENVNHRLTNRNSIQAVCYNDVKEQFGLKANQIVRACARVASNRKTAKHKGRKVKGFKPTSFDCDGRTFSFREKDWTVSVSTLGKRLRLALRASNYHKGKLTGRKPTSAQICKHKDGQWYCHIQITIDYPEPQRTDKVIGVDFGRREIARTSTNQGWDGKEIQQKRDKFSRVRSSLQKKARKGKSASPGVSPGVYAGRTRSSRRRCREVLKRLSGREKRYQKWVNHNISKTIISEAKETNSAVAIEDLTGIRERTNQKPRNKTERRQSNSWAFYQLRTFLEYKGVKEGVKVIAIPPAYTSQTCHCCNYIGIRTNKSFKCSNSECGWGGDADLNGALMIKKWGCSINQPGGSEILSCRISRATENANRARSGLAQFINI

SEQ ID NO: 1259 - protein, 441 aa, Euhalothece sp.
LLNRVETVKLELVKVPNPMLTLSYEYKLEPNQLQISIIEQTLGVCRTVWNYALRERKDWINSRKSPVNACSIEQEYIIPADEPYPSYSRQAKALTDAKKESERLKSVNAQVLQQVLRTLDRAFSDMKSRGFGFPRFKNKYRLRSYLIPQLKGEVLKGNQIKLPQLGWVRFRKSRDIPDGFQFKQARVIRKASGYFVMLSLQLNVDVPQPFPHGHPRGLDLGFDKFVATSDGLEVKRPRFLKSLQRKLKLLQRRLKNKKKGSNNRQKLNRKIARVHQRISDARKDWHFKLANQLCDEAGMIFVEDINFRSWQRGMLSKQAADAGFGQFVNILEWVCWKRDVYFAKVDKDGTSQECSQCGAHTGKKTLDVRVHHCPECGYIGSRDVVSAEVIRNRGLSDLGQGLDIKQIACGGDLTGMEATSSSQEPETGNLVARLGISRHSA

SEQ ID NO: 1260 - protein, 420 aa, Euhalothece sp.
MFVLEFKLKGNQTQYQAINEAIRTAQFVRNKCLRYWMDNYGVGQKDLYHYNTQLRTEYPFVKALNSHACQTSVERAWSAIVRFYENCQNQKSGKKGFPKFKKNVRSVTYKTSGWKLSEDRKRIKFTDKKGIGCLKMKGGWDLHRIQLEQVKRVHLVRRADGYYVQFVVKEDLSNLVPTQLEPAKHSVGLDVGLKYFYVDSDGNQVQIPQYYRKAEKQLNRLNRRKSRKFRKGQSQSNNYLKARNRYARKHLRVSRQRKEFCKETALRVIQSTDVVAYEDLNVAGLVRNGKLAKSINDAAWSTFRQWLEYFGKKYGKITVAIPPHYTSQTCSKCGRVVKKTLSQRTHECKCGIVICRDHNAAKVILRRGLTTVGHTGSLESDSIDAWGDSPSTLADSNRYLSKQGESSVEPSSVNQESPSL

SEQ ID NO: 1261 - protein, 305 aa, Euhalothece sp.
MLTFNYQYRISPDQSQKEKLSEIMEVCRSAYNYSLREIKHWCNSRKCSIDRCSLVSEYIIPADAKFPSELNQLNQLPKAKKKFPRLKEVPSQVLQQTIKQLHRAWDFFRERGYGFPRFKKFGQLKSILFPQFKENPITGGQISLPKVGKIRINVHRPIPDGFQVKQVRVIRKADRWYVSVCLQLDVEVPAPPPHGHAIGVDIGLEKFLATSDGVLVKPPKFFKEMQRKLKLLQRRLSRKQRRSKNYEKQRIKVARMHHKVSNTRKDFHYKQAHALCDGGDMIFMEDLDYRITAKGMLGKEMLDGG

SEQ ID NO: 1262 - protein, 406 aa, Euhalothece sp.
MFVLEFKVKAKTTQYQAIDEAIRTTQFVRNKCIRYWMDNQGVNKYALNKLCKQLAEEFSWAKELNSMARQSAAERAWSSISRFYDNCKKGINGKKGYPQFQKNNRSVEYKTSGWKLDLNTRKHITFTDQKGIGRVKLIGTRDLHFYHPDEIKRVRLVRRADGYYCQFLINTEVKEQLEPTKKTIGLDVGLESFYTDSDGHKEPNPRFFREGEQKLKQLQRRLSRKQKGSSNRKKARQKLGKAHLRISRQRKEHALRLARCVITSNDVVAYENLKVSNMTKNHCLAKSISDVGWYQFRVWLEYFAQKFGKVAVAVPPQYTSQQCSNCGRIVKKSLSTRTHACACGANLDRDENAAINILRSGLSTVGRTVTSRLDLVNACGDSTSTSVAPEQLGQVESSAGNVVSSS

SEQ ID NO: 1263 - protein, 431 aa, Euhalothece sp.
MLFREAKLKHATQQQYQALDEAIRTGQFIRNKCLRLWVDSDKCGKSNMESLCKDLAKEFSFAGNLNSMARQAHAERAWLAVKRFYENCRNGVRPVGYPKFKKNSRSVEYKTSGWKLSDDGFYITFKDGFKAGTFSLYCSGKAREDILRSKINRVRVIRRADGYYAQFLLEADRVEEGTYTGEVIGIDLGLKYFVKDQNGNEIIYPQFLRKSERRLKKLQRRLSKKYRHGQKQSANYHKVRIQLGKQHLKVQRQRKDWALKQARALVASNDVVVYEDLRVANLVKNHNLAKSISDAAWSQFTDFLDYYGKLWGKAVVAVNPAFTSQDCQNCGHREKKSLSTRTHKCSNCGTELCRDQNAAINILKRGMEILGKEWSNRTQGHWGTASSEETTRETTTSTISENFDSESSEIASSVEELVISEPVKTEESPRL

SEQ ID NO: 1264 - protein, 318 aa, Euhalothece sp.
LLNRVETVKLELVKVPNPMLTLSYEYKLEPNQLQISIIEQTLGVCRTVWNYALRERKDWINSRKSPVNACSIEQEYIIPADEPYPSYSRQAKALTDAKKESERLKSVNAQVLQQVLRTLDRAFSDMKSRGFGFPRFKNKYRLRSYLIPQLKGEVLKGNQIKLPQLGWVRFRKSRDIPEGFEIKQARVIRKASGYFVMLSLQLNVDVPQPFPHGHPRGLDLGFDKFVATSDGLEVKRPRFLKSLQRKLKLLQRRLKNKKKGSNNRQKLNRKIARVHQRISDARKDWHFKLANQLCDEAGMIFVEDINFRSWQRGMLLTG

SEQ ID NO: 1265 - protein, 431 aa, Euhalothece sp.
MLVREAKLKHATPQQYQALDNAIRTGQFIRNKCLRYWMDNHGVGKSSMDSLCKELAQAFPFAKQLNSMARQAHAERAWIAIKRFYENCRNGVRPVGYPKFKKNSRSVEYKTSGWKLSDDGFYITFKDGFKAGTFSIYCDSKAREDILTSKINRVRVVRRADGYYAQFLLGVDRVEEGTYTGEVIGIDLGLKYFVKDQNGNEIIYPQFLRKSERRLKKLQRRLSKKYRHGQKQSANYHKARIQVGKQHLKVQRQRKDWALKQAQALVASNDVVAYEDLRVANLVKNHNLAKSISDAAWSQFTQFLDYYGKLWGKVVVAVNPAFTSQDCHNCGHREKKSLSTRTHQCSNCGVELCRDTNAALNILKRGMEIIGMEWSNSTQGHWETASSEGTTGEINASTTSKGSNLESFGVASVVEEPVISEPVKAEESPRL

SEQ ID NO: 1266 - protein, 339 aa, Euhalothece sp.
MYGCQQNRIQPSSDLIPILEHICYTANNLTNCGIYLARQTFFNEKRIIGKYEPEEVLKQQVNFKALYSQCAQQVLRSVAESFKSYQGLREAFFEGTIDKYPKLPSYRDKGGMAVASYPKQALKLKDGQVRIPLGKTIKAWFGLSEFFVSFPSNLEWDCIKELRILPRNREFYIEWVYERPEIDSTVDSIEALGIDPGLDNWLTCVSTIGESFIIDGKKVKSLNQNYNRRVSSLKKGKPQGYWDGELARITEKRNRQIRDAVNKAAKMVINYCLNKDIGIIVFGWNKGQRQGINIGHQNNQNFVQIPTAKLKNRIQQLAEEHGIEQRSRLVNPNAFGFIP

SEQ ID NO: 1267 - protein, 311 aa, Euhalothece sp.
ITLQGRIKVSYSGYQKHLDLIKSGEAKAKGAKIYYTPSNKTYYLLVGLEIDKPDIQPTDIKRVSGVDVGQRYLAVETDTKNQVSFYNGKSTIHQANHYQRRRKSLQRKGTRSAKRRLKKLSGRERRFRADINHRVSKQVAKPNSLIGLEDLTYIRERTNPRRKGGKASKKQKKANRKQTSWSFAELQSFIDYKAVLNGSLAIKVDADYTSQSCPHCGHTSKGNRPNKGLIFHCENCGFNLHADLVGARNIAMRTLLVRQDWASTGSLSACPDDSSGSSDVSSDEAKAMRLLRFMELRWTAETSPNHIAFSD

SEQ ID NO: 1268 - protein, 455 aa, Euhalothece sp.
MFTLSYEFKLEPNQLQIDMIEQTLGVCRTVWNYALRERKDWINSRKCPVNACSIEKEYIIPADEPYPSYSRQAKALTEAKKDSERLKSVNAQVLQQVLRTLDRAFSDMKSRGFGFPRFKNKYRLRSYLIPQIRGEVLKGNQIKLPQLGWVRFRKSRDIPEGFKVKQVRVIRKASGYFVMLSLQLDVEVPQPFPHGHPRGLDLGFDKFVATSDGLEVKRPRFLESLQRKLRLLQRRLKNKQKGSNNRHKLNRKIARVHQRISDARKNWHFQLAHQLCDGAGMIFVEDINFRSWQRGMLSKHAADAGFGQFVNILEWVCWKRDVYFAKVDKDGTSQECSQCGAHTGKKTLDVRVHHCPECGYIGSRDVVSAEVIRNRGLTRARVSRASSSDPSAGFPRIGKRSLESRPKGLSDLGQRLENKQIACGGDLTGMEETSSSQEPETGNLVVRLGISRHSA

SEQ ID NO: 1269 - protein, 432 aa, Euhalothece sp.
MYGCQQNRVRSSSDLIPVLEYICRIANNLTNCGIYLARQTFFKETRIVGKFDLEKSLKQQENYQALYSQCSQQTLRSVAESFKSFKELRKCFFNGEIDKHPKLPTYREKGGLAVATYPKQSLRLKDNHVRVPLGKTAKSQLGKKEFFLPFPSNLEFKQIKELRILPRNKEFYLEWVYETPEVKKTVNSEEALGIDPGIDNWLTCVATLGESFIIDGRKVKSLNQNYNRRVSSLKEGKPQGYWNFELSKITEKRNRQIRDAVNKAARMVINYCLDKNIGTIVFGWNQGQRQGINIGKKNNQNFVQIPTAKLKARIQQLAEEHGLEFVETEESYTSKASFLDRDLLPTFGEKPERWQPSGKRVTRGCYQDSKGRIVNADAQAAANILRKVEIQLGLVLAKVNRAALTLPSRLYIWHSKRKSGATRFLTRCEATS

SEQ ID NO: 1270 - protein, 466 aa, Euhalothece sp.
MLTLSYEYKLEPNQLQISMIEQTLGVCRTVWNYALRERKDWINSRKCPVNACSIEQEYIIPSDEPYPSYSRQAKALTEAKKNSERLKSVNAQVLQQVLRTLDRAFSDMKARGFGFPRFKNKYRLRSYLIPQLKGQVLKGNQVKLPQLGWVRFRKSRDIPEGFKVKQARVIRKASGYFVMLSLQLDVEVPQPFPHGHPRGLDLGFDKFVATSDGLEVKRPRFLKSLQRKLKLLQRRLKNKKKGSNNRHKLNRKIARVHQRISDTRKDWHFKLAHRLCDGAGMIFVEDINFRSWQRGMLSKHAADAGFGQFVNILQWVCWKRDVYFAKVNKDGTSQECSQCGANTGKKTLDVRVHHCPECGYTGSRDVVSAEVIRNRGLTRARVSRASISDPCVGFQRIGKRSLESRPRGLSAVGTLVDIKRYDLSASFPRISKRTLENACGDDLTGVSLRADLVKSLKQESPTIASA

SEQ ID NO: 1271 - protein, 384 aa, Rhodospirillaceae sp.
MKGYLVKLYPNKSQAILLDKHFGACRWVYNKMIEISQKKYHRTGKSMSGYDMQAMLPKLKKQYPWLAEVNSQSLQIVCHNLADAYGRFFKKQAAYPCFKKKDSHDSFAAINRSYFCGNKLKLQKISAIRFRGGDRPEGAVKKFTVKKIAGSYYASVLIDTGIVPPALQPPERILGIDLGVKDVVVTSAGLHVPAPKYFIFSQKALKIRQRALARCRKGSKNRAKARLRVAKLHQKISNQRKDFNHKLTHQLVANSENQAFAVENLAVKNMLGNHKLAKHIADCGWNQFITFLNYKARDAGKHVIEVDRWFPSTKTCSACGIVRGKISLSERQWKCGSCGSEHDRDRNAATNIALEAGRDFAFDCGGNARPVAILANPVETRKCA

SEQ ID NO: 1272 - protein, 397 aa, Microcoleus sp.
MEQVLTLVCKLNPKPEQVAQIEATLQAFAAACNYANEVVKPQTTSKTTIQNLVYQELRSRFGLSANLAVRTCARVGANRKTAKLKGKPVKAFKPTSADYDARIFAFREKDWTVSLTLMDGRHHIKLNVGQYQTGKLKGKKPRSAQLCKHRDGSYYIHIQVKDTPPEPIKSQQVIGVDLGRTDIAVTSEGEKWSGKQITALRDRYSRTRASLQAKASKGTRSTRRRCRQILQRLSGRERRFQGHENHVISKTIIQQALANNAIVAIEDLTGIRDHTNQMPRSKTERKRSNNWAFYQLRQFLEYKGLDAGVAVMAINPRYTSQTCHQCLHIHPTPGESYRSGKSFKCGHCGWHGDADLNGAMMIKLLGSSVNRPEGNELFCSLRAIESPRYIGTPISGG

SEQ ID NO: 1273 - protein, 206 aa, unknown
  TnpB Polypeptide
MPSGMIKLTAKSKLKEIPEGLDDLFFTYREIVNFLLTYAFENNLTSFYRLKRETYKGLRKEYPELPSHYLYTPCQMATSIYKSYRKRKRKGSNPALHFKRRTSFEFYPAKYHEKFKDWKVGQAWLIKTLKGVFINVVFSKELEVREPKAFVGMDLNENNITLALPNGEFVQIITYDREIRTGYFLKRWRIQKKIRAGNRREELLQK

SEQ ID NO: 1274 - protein, 147 aa, unknown
  TnpB Polypeptide
  misc_feature (133)..(139): Xaa can be any naturally occurring amino acid
VNTLAVASTGRFWTGTEFDHWRREYEKRRGDLQECGTRWAHENIQSVGRKEEGRFTQTLHRISNELVAEARENGCTVIAVENLTGIRERTGASWGHKWAFNRLYEYVEYNAKARGLAVEQVNPKNTSRRCSEXXXXXXXKATTWWRF

SEQ ID NO: 1275 - protein, 438 aa, Actinomadura sp.
VWLRYSFRLYPNGPQRAALARAFGCARVVYNDALRIREDARAAGLPFVTPNELSRRLTAAKKAPGRAWLGEVSAVVLQQSLRDLDAAYRAFFDGLKGKRPRVGPPRFKSRKDTRQAIRFTANARWKITPGGDLSLPKIGQVRVRWSRTLPSVPSTVTVVKDAAGRYFASFVVEVAPEPLPPVAPQVGVDLGLGHFAVLSDGTKITSPRFLRRAEKRLKRAQRALSRKVKGSKNREKARLRLARAHVRVADARREFHHRVSTRLVRENQAIAVEDLAVKGLARTRLAKSVHDAGWVQFVAMLEYEAAKHGRTLVRIGRFEPTSQVCSACGVKDGPKPLYVRVWRCRACGTVLDRDINAAINVAKAAGLAVTACGARVRPEPVPARRREAGTHRDGQPTVVGIPHPFGRGSGSQHSTDTRNEPLNLILGRHDGPYWALRT

SEQ ID NO: 1276 - protein, 442 aa, Prochloron sp.
LVSTNIDGSVSNLTAQSWFSTQKTYLKKQKWLKTSELYSTASVVDYMDSENIKLRSKKIKIYPSSELKKDWNKWLAACRYCFNQAIAYQKENGSIGKRKLRDIIMQSELPEWVKETPCHIRQNAIFDAHQAYSKSKNCKFRSCKAPRQTIKFNNSNYTKGKWYSRLTKGKDFESSESIPPSSAYASLIIKTKCGDWFAVFLEEVKPSIDNVDGIIAIDPGVRTFLTGFDGRAFIQIGTGDIGKITRLCQHLDLLTSKIGKSKSKRQRQKMRKAAARSRRRIRNLIDECHRQAASWLTKNHSYILLPTFETSQMTKKKKRKIRSKTARQMLTWSHYRFKQVLKNRAELSGCQVIDVTEEFTSKTWRIDCFPVSSRNRETVLICHIHTKLGGNKVFKCPECGHEINRDFNGALGILRSALRDTSVTFSSDAIVVKGDFVSLCTA

SEQ ID NO: 1277 - protein, 503 aa, unknown
  TnpB Polypeptide
LKLATRTATPKSKTTEVRIERYRIRFGRRAQAALCAQIAGACRLVWNFLLADCERRYRLARAYGKWTDFPPENRPDLSTSFFTLGKRFTDLRSRPDAAWVRAFLGSPWGRRYRDMDLSWLRALPFGSVRYTAKYLADAYTRFFEAWAAAKAEGKSLGVRKSDGKPKGFPKYKAKFDKDDGFTIPDTVRMDGDRLHIPKVGWVRLEGGGLYRGCKPKQVRIRKEGTEDHPKWYAYVFHEVPVDQLKQPAWTGAVGVDRNVGQATDSDGEVYEVPDDPKLEANIKRKERQAAKARARSKANGQPMSNRGRRVCGQLKKRQRKQKRRRENAAHQHSRKLADTAHTVVIEDLNTKAMTRSAKGTVAEPGKNVKQKAGLNREILKSNWGRTERMLDYKAGQVLKVPPAYTSQTCAACGHVDKENRRTQAHFHCTACGHTANADRNAAQNILARGLALLPKARGTGASARREALGHCPLPVATDKSTSPTREQGMPSRPRGSPPWYTGI

SEQ ID NO: 1278 - protein, 401 aa, unknown
  TnpB Polypeptide
MLLRAYKYRLYPTKEQANVIHQHLGCSRWIYNHALDTKVKSYKETGKSPSRFDIQATLPKLKETEETKWLSEVNSQTLQASLENLDKAFTRFFKEKKGFPRFKSKHDNRQSFSIPQNAKVDFDGGKLFIPKLKSGINIVLHRKFEGKIKTTTISKTPTGKYFASVLVETNDKEKTSKVPTIKKAVGVDLGIKTFATLSNGEQIKNPKHLRKSLRRLKQLQRKVSKKVKGSNNRNKARIALAKQHEKVSNKRNDFLHKVTKKLVSENQTVCLETLKAKNMMANHKLAQALSDIAIGKFNTLIEYKALWYGSNILRCGQFEASSKICNPCGATNHSLTLKDREWTCANCGSVNDRDKNASLNIRDFCFYKNNVKQLRQEMSDVKRVEKGNSRSVKHEAPIPLG

SEQ ID NO: 1279 - protein, 375 aa, unknown
  TnpB Polypeptide
MRKTYLYKAKINKQTEANCNQWLGLCHNLYNQALEQRINAYKEKKESISAFKQMSQLPELRKSSTELKAVGSQVLQDVIQRLDKAYKSFFQRVKQGNGKVGFPRFKSKSRYDSFTLKQTGWNLEGRYLYIKNVGRFKLFLSRPIEGNIKTVTIRRNSTNKWFVSFSCDNTPMKKVPESTTEIGIDVGIKHFLVDSHGNSVDNPKYFRQSEKLLRRRQRSLCRKKKSSNRRNEARVLVAKTHEKITNQRKDFLHKVGNAYINKFQTIYIEDLNIKGMIKNRHLSKSISDSSWGMFFNFLSYKAVETGRTVVKVPPHNTSQICSVCGEKVQKSLSVRIHNCPFCNTILDRDHNASLNILRLGQNRQTLTDRFLTTVV

SEQ ID NO: 1280 - protein, 377 aa, unknown
  TnpB Polypeptide
MNQEDALMYHNNENIDFLNYEHTIFPTKEQKGLLAARFDQEDGAYNTLAGLVNQSYSQGAGLEELKSLVRNHPIPAGNEVDRFAISQVRKRIISLLPRLCSGKMACIKPRRADRSQRSACYHYVGISDYHLVFPMIGSIAMEQHRDLPKDARIYGATVYADCYYAFYHVALHLIVPKKVVDPAPVHYGKVVGLDYAQDGLYVDSSGHSAGYPAFRHQAQGKLNRYHRAANRFKTGSRRWRKFRQRAAKIERHVVNQRKDWQYKQAHTLAQQYDAVCVETLDLAGMMQNDPALSGKLCDNAPAAFYKRLEQVLNARGKRLIRVDRYYPSSQICSACGRKVGKLPVGSMFTCPYCGLRLDRNHNAARNIREEGIRLLEQ

SEQ ID NO: 1281 - protein, 412 aa, Bacillus sp.
MNVNRVERHIINKNHKMYSVVNEYCFKSKNLYNFANYTIRQLFIKEQTYIDDRKLSKVIKHEDCFKDIGSNSGQQTLKLLHQNWKSFFAALKAYQKNPSSFLGKPQIPKYLKKDGRYVWVLTNIQSKIINGYLNFSFKPLHPFNGLVKTRIKEKHIQTRFIPKEDHYILEIVYQKEIPLQIETESKRMIGIDLGISRFATVQNNIGLKPFAINGGHIKSYNNFYNKLASKYRQKAKKVNKLDWTNTLQRLTTKRNNKMDYYMHCASKYIVDYCINNQIDTVVIGYNEKWKQNSKMSKINNQNFTSVPFSSFVSKLEYKLNDIGIKVIKTEESYTSKASFLDNDLMIKDNKFSGKRIKRGLYRSKNNTIINADINGASNIIKKVFPNAFANGIEGLDLHPSIVNIFLANGKRE

SEQ ID NO: 1282 - protein, 374 aa, unknown
  TnpB Polypeptide
MGACRFVYNCGLTHRSVNYQQWQKSVSYYDQQNALPEAKNDPELSWLKEVPSQSLQMALRNLDTAFKNFFRETGKYPQPKKKGVHDSIAFPQGNLMRLQKKSKKTSRVTLPKLGGVEFIHHRNFSGKIKNATISHSYGDGWQISFLVEEAELHQANSADDTIGIDLGVAKTIAISGENKDYCLPTERIKCIEYRIETLQKRKAKLEKYSDRWKQLGRIVAKLHARIARIRKDFLHKASCELSKNHGVIVMEDLRVKNMSKSASGTQEDPGTNIAQKSGLNRAILRQGWGAFRIMMEYKSKWYGSRLILVNPKNTSRRCCQCGYTHQDNRQTQADFLCQKCGHNENADKNAAANIRRLGLESLGCEPLEAPAIAS

SEQ ID NO: 1283 - protein, 383 aa, unknown
  TnpB Polypeptide
VFHTYKFRLWTNANQERELAIMLETHRRLYNDALAQRQWFWDEWQISRTYEGQSGWFKDERKKNAYFERLNFSSAQGTLRRLDKAFANFFRRVKAGEDPGYPRFKGVDRFNSILFPSHGDGIRLKGNRLRVQHVGTIRVCLHREKEGKIKTLSLKREGDNWFAVVTCEVPETPKVGNILPAVGLDVGLTHFVTTSEGEKIANPRFLKDALPELRRAQRSLSRKKKGGRNRKKAKRQVRRLHARVASLRHEHRHKVSNDLISRYGKIAVESLNVRGMVRNPRLARAISDVGWSAFVAVLTHKAERAGGEVKQVSPNCTSQACSACGENAPKDLHVRVHRCGCGLVLDRDQNAAINILNRAWPGTGQLSVTPSLGRVLKEAVCFS

SEQ ID NO: 1284 - protein, 195 aa, unknown
  TnpB Polypeptide
LNWNDISTKRSQGCRPGGYGQQPGKGVKHPVTSKHIRKLYKRKQDSVTDYLHKITRYLAEYCREQGITCVIAGDIRNIRREKDLGHRTNQKFHSLPYNRIYIMLEYKLKRYGIRFIKQEESYTSQCSPLSPKVEKRYAEPSKRKERGLYRDGNRTYNADAVGAYNILRKYHFVSGEKKELSVTGLKTPEIIKVAV

SEQ ID NO: 1285 - protein, 384 aa, unknown
  TnpB Polypeptide
MGFAMDGSTTVHRTYRFRIFPTRGQRLALEAHLAFACDIYNAALEQRRYAWLRRRRSVPLYQQVYELTDVRAAKLGPPAMSYSAMRNSLRRVDRAFETFIRRVKAGETPGYPRFRSRRRYDSLTWSADWSIWQRRLALHGIGHLKVKWHREIPKVARVCTVTVRRVNGRWNACFALEIRVPTAQKREMERAVGVDLGLKTFAALSTGELIPGPRAHRTASRRLRVAQRRVARRVKGSRRRYKAGLLVARLHERIQNLRRNHAHQLSRRLVLDYGLIAVEDLQLMGLTRGFLAKEIRDQGWAEFLGLLGYKAVDAGIQLVKVPPAGTSQVCSRCGTAVPKPLAVRIHNCPSCGLVIDRDINAARNILRLGLSRQATTWPTGVCVA

SEQ ID NO: 1286 - protein, 366 aa, Clostridiales sp.
MERIRGYRYRAYPNKKQREFFEKTFGCCRFVYNHYLEIRKAAWNDWHDRLSYADMCRDLKLLTREKEWLKEADSIALRQSLRHLEKAYQNFFKKRGNHPQFRKKHALQSYRTANINQNIRIDGDTIRLPKAGKVKIVNTRAFDGRIVSATVSKTASGRYYISLQIEEEYEILPNGGGIIGIDVGIKALCTDSSGAIIRNPRTLAAHEKRIQRLQKNLARKKEGSKNREKARIKLAREHEKVVDIRNDYQHKITAKLAKDNQIVCIEDLNVDGLKKNHRLAKSIVDASWGEFCRKLEYKVAEHGGITVRVPRNYPSSQICSFCGEKNPEVKNLALRNWTCPVCGAEHDRDINAARNILNKGLEMLAS

SEQ ID NO: 1287 - protein, 407 aa, unknown
  TnpB Polypeptide
MKTYSFRLNPNVEQQHELIALSMASKQIWNHFIQEQNKRIISGSPALSAFDMHKLLTKERAIRVQWQKLNSKAGQRITSAVDFAFRSYSQLLKKDGSSKPPAPIDIEEGKFYTLVFNQSGWSFKNGLIYINKLPIAYKSHLSVHEMNIKELRVKLCNGKWLCDICVEDATASSGQIVMQNKALAIDMGLSKLATGVDSRGNVIVLPNKARKISAYYGRIISELQSKQANKTSNSRQWRHLQKRKQFFHNKKKEQVKHALHAQSKRLLSMDHGTVVVGDIQIKKMMELKRNKDRKVSRSFGRSNLSMFMDMLAYKAIAKGVNVVRVNEWNTTQINCLTGKLFGKKVELENRTVLLKDGLLIDRDLNSAINIYRRWYENHIAAVVPPPESFLSGVLERNNLFKESSIYR

SEQ ID NO: 1288 - protein, 389 aa, unknown
  TnpB Polypeptide
MLLGFTTKLKLNNQQRSAMAQHAGYRRWLWNRALSWWSIAYQEGLQPTANKLKKFYTNHIKPSYPWQSHLSSKVYQYCFQDLDTAFQNFFKGGDYPRFKKRGVNDSFTIDNSGKSISLKGVRAKLPFIGWVSTYEPLPECQVKKITISYRAGDWYISLAYEQSRTVPPKVKTTVGVDLGIKSLATLSSGEVFANLQVYRWQERKLKRLQRSLSRKKKGSANRLKARLKVARAHRRVADIRKAYLHKLTSYLAKNFETVVIEDLNVSGMLANHKLAKAIADLGLYEFRRQLEYKCKIYNTKLVVADRWFPSSKMCSHCGYVKGLLLLEERVFKCDDCGCSIDRDLNAAMNLRNWGRLAPGSLPRDNCSHAPVEVESKPQCPDLSGVVSVL

SEQ ID NO: 1289 - protein, 412 aa, unknown
  TnpB Polypeptide
MKINRSTKCSLKFSTENKYKQLCHILTEYGNTVNQFIDYFWTNGTVSKTKLLKPIVDIPNSWLSARLRKVAAREALDMIKSTKEVHQSNKKQLELSVKAIEQRINKTKPDSKINRRKLNNWGKSLKRKVNRLSHMQPTKPKHSGKRMHVSSTIAELQQPKKTNKFDNWLHLASIGNKIILDIPIKLHKHFNILQAKGKKLNDYIITKDYVQFCFEIETGEKKEVKIALGVDTGINALASTSDSKQFGTDIKEKINKIKRCQKGSKKQKSLIRGLKQRIDEVAKEIANKTDLVVVEKLKNMNNNTKLKGRLSKNIRSSIGSWNYSYWLDRLQQKCEENRVTFRTVCPSYTSQECFQCGYIDRRNRNGEKFRCMKCNHSCNADINAARNILERFLSGPYGATYKCELVDFTTFL

SEQ ID NO: 1290 - protein, 1176 aa, Actinopolymorpha sp.
VRRAGQRPAVRLHPDAHAHARTLRRRRATRRPAQPAVRVHQGLPGASRAGRAAGEHLPARLDAVRPRQRPAPGRPAGRRRDRDPPGRPDGGADAGRGGAAGAVHPAGSAGHRGHRAGAPAAAPPARAGASGHHAAATAGGVPRRCAHAHHAGGRAAGRPRRCGLDGVRRTRPVGQPAGRHPRPPVAARARRGGPRCARRRTPAAAGARTRGRLTSRRVSAGWRRVQWAGSVDCKRHHLGYLRGVEVVVGDEHQRPLTARQPGPPGHRLQVVHVREAGAGEVGEVDHQALAHRPVTAVGQALPVEHVRRAAVVDLVQPDAVAHAGRVGAFQDEIVVPVDGQELADPVVGGAGRWVRRHRDRVEGVRQLPERPAGALVVPRQPVGRAVVDGRQRAVLVERTLHRRHQPAPVGGEGHSLERRVRPGPHLADAHRQVGRAGELAYVLPCRCRLAYPRVDQRGRGPVGGHHPLALAGPVQAAVAGVDADRLRVGHLRVVAGERREDRAVGAFERGGAGEPDLPHACAGDVEPGGEHAHRAVLGVVGQQIPLTGTRVAVEAGELADGQAADDQPLRNGSHTEQSRRTDCRVVAAGTNAMNDGRGHHGRPSAGRGVRCRGGGAGGERDAEQRRDQRGGQDECGGPTHARHPTRSHPARPFATPSDLCRRRKLARSSPSVRGCLHWSLTAIAPFNQRTSSPINTCGAYRTGGCTWSGSSRTPDGRTTGRRCGPGAGSPVAAYPRLSVLSSTVGWVSIRQRLYPEPGQVVGLVEHCHHARFVYNIGLEQRAMWRRDKHVRGDRSAAKVTTSTQMRELAQLRGELDWLRAGSSSVQQAALRDLDRAFTNFYAGRARYPQFKERNDREGGFVIRDLTVHRLNRKWGVVTVPKVGAVRFRISRLWADVEAASSARVTRRNGRWHIAFTTPTAPKIKASTGAVVGIDRGVKNTLATSEGRMVQAPSLTAAEQARFLALQQHLTRQRNGSRRRRRTLDRLAVLRRRLEDRRTDWVEQTTTDLAHTYDLLAVEDLRVPNMVRRPVPKPDPAQPGVFVPNGARAKATLNRAILASVWGRFLTRLEHKMPEGAVVRVDPKNTSCTCAACGHCAPGNRESQAAFECEACGHQAHADTNAAVNILARGLSTIPEESGYTAGHEARQQPSGRKAAVNGRISPTATSAAGNANQPAA

SEQ ID NO: 1291 - protein, 273 aa, unknown
  TnpB Polypeptide
LEAFGCRAGWPRQKHGEEEGSALPEQNRLLHFNSAQGASRKPGVSVCVKLEPSGRIHVVFIVGEPEAEEHSSEGEPRKAVGVDLGIGRLATLSDGRILENPRPLERSLERVRVLQRNLSWKKLLSDNWLKAKRKLAKRHEHVKDFRRDLFFKLGALFAGEYDIFVLEDLNVGGLIQEGETRKRRLRLDDSSFSELKRILEWAFEMGGKLVLPVPSSNTSHECFHRGGINQSLTLEDRVFHCPHCGFTLDRDLNASLVLLKRSGWVPPFWCACL

SEQ ID NO: 1292 - protein, 387 aa, unknown
  TnpB Polypeptide
MSIRTIALTLAPTEAQRTAFVQLRRAFVDACNHTSGVAWETRTFNMVRLRSLVYRDIRATHGLMAQHACNAVSVVAQAYKKDKDTKRVFKPTGAVVLDTPRLYLVKGNHVAITTLDGRLSVKLNIGGIQREQLKTALKLGEADLIQDRKGRWRLMVSAHYPDPPTMDTEGVLGVDLGRRDIAVTSDGNTFSGQQVTAVRDRYTRTRSMIQRNVSKGTRSSRRRGRATLARLSGRESRFQRQVNHTISKRIVGQAVDSNRAIALEDLTGTRERTNRQPRSRTERRRSNSWAFYQLRAFLTYKCVGAGVPLVLVNPAFTSQMCHCCLHIGERDGKRFACVNPACLWCGDADYNAALVIALLGASVVSPRGPWLCCLYQPGRRAPESPRL

SEQ ID NO: 1293 - protein, 392 aa, Ruminococcaceae sp.
MILAHKIKLDPNNGQRTYFAKAAGTARFAYNWALEEWKSRLDIGGYVTEAELRRLLNSIKREKYPWMLEVTKCAPQIAIMNLGAAFANFNNNKAEFPQFHKKGRNDSFGLSNDQFIIDGKKIRIPNLGWVRMAERLRFDGKIIDAVVSRKSSKWFVSIRVEMPDAQPIHTVTSDSQAVGVDLGLHNLAVLSDGTAIAGAKPHKAMLARERRLNKSLSRKQGAKEGEKKSRNFRKTQLRLSGLHARIANIRNDGAHKLTSMLTQNYPIIGIEDLNVSGMAKNHRLARSLLDMSFYEFKRQVIYKSSITGSSVVIANRFYPSSKTCSTCGIKLDEDIPLSVRAWFCPVCNTHHDRDINAAINLRNNAVSYTVSACGELMEVVTSMKQELNIING

SEQ ID NO: 1294 - protein, 384 aa, Bifidobacterium sp.
VVAVRAAPLVERQQGHAGRGRERCAVVAGEQQGGVQQRSGGPVERLANWSKSRRGRRRGRRVGFPRFRAKDRTTPRFAYTTGSYGLIDGDANALRLPRIGRVHCMENVAKRVGDGRVLRMTVSRHAGRWHAALTVERADNAPLVPPKGGAVGIDLGVKTLAVLSDGTMIANPHALGMSERRLKRAQKALSRKTKGSNRRRRARERVARLHARVANQRRDLLDKLTTRLASTYSDISIEDLNVHGMVGNHRLAKAIEDASFFEIRRQLEYKTMRTGARLHVIDRWYPSSRTCSNCGRVKAKLSLSERVYHCDGCGLVIDRDLNAAINIKVAGSAPETINARGADVRPATLRGGGQSAVKREPSSHDNGIRLGADTRKSVLQAKTN

SEQ ID NO: 1295 - protein, 177 aa, Acidobacteria sp.
VRIENHRYDQAAQAKLRKAQRKIARRQNKKSKRRRQAILLLQKVHQHVANQRKDFQHKLSTQLVQNFGLIAVEDLNIKGLSAGILAKAVHDVAWSTFLNMLAYKAENAGRQLLKVDPQYTSQECPNCHALEKKPLSERVHRCDCGLTIGRDHAAALVILGRGLRLQAQTMEQSVLVA

SEQ ID NO: 1296 - protein, 371 aa, unknown
  TnpB Polypeptide
MESYQMGFKFRIYPNKMQQNLIDRTLGCCRFVYNHFLALRRDEWMANRKTLGYVQTAALLTDLKRYEEYRWLKEADSMALQEALRNLDTAYQNFFQKRAKYPRFKSKHSHSQSYRTRNQRNTVRIGDGKIKLPKIGAVKIKLSRTFEGRILNATVSCTASGKYFVSLCVEQDREKLLRSNDGGKIGLDVGLLVFLTDSNGNTVDNPRVLKRLMRKLVREQRRRSRKMPRSVNRGKARIRVARVHERIANIRKDFLHKLSTRLTDENQVIAIERLSVKNMMRNHRLAQAIADVSWSEFFRQLEYKAKLREGRILKVDPFYPSSQICSHCGRQNAEIKDLGIREWICPECGSHHDRDTNAAKNILRKALENAA

SEQ ID NO: 1297 - protein, 390 aa, unknown
  TnpB Polypeptide
MDTVIRKEEWIIENFMTMKAFKFRLYPNQEQQIQLAKTFGSCRFVYNTYLAKRIELYKSEQKTMNYNACSVDLTNLKQEKEWLKEVDKFALQNSLKDLDSAYQNFFREIKKGNKDQGLPKFKSKHNQECSYRTSFTKNNIRIEGNKIKLPKLNFVKFAKSQDIKGRILNCTITKTCSGKYFVSVCCTEVDIVKFENNQNIIGMDLGLKEFAITSEGEIIHNPRFLSKLENKLKKEQRKLSKKKKDSKNRNKQRIKLNVVYEKITNQRTNFLQKLSTRLIKENQIICLEDLDVKGMVKNHKLAKAISDVSWYEFIRMLQYKSLWHDRIIQKVDRYFPSSQLCNVCGYKNVEVKDLSVREWICPECNSHHNRDVNAAINIRNEGLRLLGLMS

SEQ ID NO: 1298 - protein, 302 aa, Acidimicrobiaceae sp.
VRLADSHHVRVARIGEIKTYESTRKLFRHLERGTGKIMAATLTERGGKWTISFTVEIAQSIPEPRAPERIIGIDVGITTLYTGATLNGEHVLDVENPRHYVRAEKKLAHAQRIASRRQGPKKGTAPSNRWKKANGRVQRTHAGIANARKNLINQTTSMLAKNYDVIVIEDLNVAGMVKNHCLAKHVADAAWGEFARQLEYKTQWYGSALVRVDRFYPSSKTCSQCGTVKATLSLDDRVYHCGTCGLTLGRDVNAAINLARQGLAGTNSGAGRGGEVRPAQQKLVATAHPDEASTETLTVVGA

SEQ ID NO: 1299 - protein, 417 aa, Carnobacterium sp.
MSSAVAFTACENTNVRLKVMVMLTAYKTEIQPTLNQQQKIDQTIGVARWVSNEYIAKNQEQYKKDQSFISGRTFSKWLNNEFIPNNPDYAWIKEVSSKSTKQAIMNTEKAFKSFFKGLSSYPKFKKKAQQKTKLYFVKNDAKHVIQSERHRIKVPTLGWVKLKEKGYIPTHDDQHMIKSGTISKQADRYYVSVLVEQSISTASLKQTPSAGIGVDLGLKDFAVFSDGMIYKNNNKSVRIKKLERKLKREQRVLSRKYEAEKTRITQKQLKKGESTRKNVCKQLLKVQKLHQTLADIRQDYQNKIVASLVRTKPAYITIEDLNIRGMMKNRHLSKAISKQGFYTFRTKLQTKATQHQIELRLVSRWYPSSKTCHTCKAIKKDLKLNDRVFLCPCGYSADRDLNAAYNLRDASIYEVIA

SEQ ID NO: 1300 - protein, 217 aa, unknown
  TnpB Polypeptide
MATQTLSLKLPFLRLNATKAAEFARLQDLNTATANEIVALPKKEARLVRHVNHIISKEVVRFAVDHGCGIRLEELRGIRQTTRQRKDIKKQADKNRDYWPYYDLETKIVYKAALAGVPVEKVPAAYTSKSCCRRGAIGLRERHRFRCPRCAYRGHADHNASRNVGRWVGASCPVVLERGASVMGVSVPPGAVHDSPHAPYATDPVRGTAQEGESRRL

SEQ ID NO: 1301 - protein, 514 aa, unknown
  TnpB Polypeptide
MVKTNKFLTFLIDMPEELVWIYDFLQEKMNLWIGNPVVRKQLFQIDLSQPRGKIWEEIRNIVGQEEITQWEIPNPAWYSRMIFENIRRLLLSKQEAIVCFEELKKNGNKVDDDLLETLKKKGIFPKRTFLFNLRRSDELPTLARKATFVMDYSVSIDQTCIRINETTFGFKVQKGEYFTYEVVLPLSLRKNLTGKITKPRFLKRKRDGKYVGHCSYEVEIEPSEGQNILGVDLGKKKLFSSVVLYSDGSYSEEIVNSRLSSTVDEKFKRKKKDLDKLLNKNRVLEELINGDLNLFNSHLEEIRQNRIGQIIELRTNMLRTKRNQAKQIAGEIVSIAKENDCKEIHLENLSWLESKGGRWNHAEVQDFISEFAELEGIRVIKIYAKYTSSAHPVAGELGKKRNRNIQFQNGDAIDRDLLASINIAKRNKRNQKENKVTKLRKHHTSTPKKIKKPSNRRVSLTIRQKLLTNQRGTEIVVLYPRKTGNRTWEVLDISSKPHKLSLMSHLSHQCQFVT

SEQ ID NO: 1302 - protein, 465 aa, Oscillatoriales sp.
MPLSKKKGYRIETKTLQTKLLRDGFDLTETNQLFSDIALFWLLIIAEDPGGVDVADFKRYYEPRFFSPEAAQTFPFDCPQLFRRAALAKAIGIYKSWRSSYQNWQAREAKRLARRGKSSKKHRPPTLPTELRLNATLYAGMFKEDDGRSIVLKIVVKGVWKWVKFTYQSPQHPEGWTLSTPTLVTRANGSAWLSWVVERYQLATGGLNKVMQDGSRICSVDLDLDGELTKCAVYDVEVNGKLREVARMITSGHKCHTTLRKSRIGKIAQSMNRTGIIGEGFASTRWQKVRNTEQDQARKQARQITEFAARHGCAVIVFEHLTRLRPQKGKYSRRSNQKRAYWLKSAVWQQVARIARQDHNILTARVNPRNTSNTEAISGEPVMRVSAMWQAQWLVFDEENWDYFRQAEGYHPGSLAVSRSGKIINAGLNACRNIALKFCQRYYSKPLLVTGWCDEGSIRPVARPT

SEQ ID NO: 1303 - protein, 254 aa, Oscillatoriales sp.
MRIAYQYRLLPTSEQRAEMSRWLDMLRLQYNWMLTERFQWWEGNRTPVNACPLLCHLPELKDQPDYYSQKRSLVPLKQDRPWYKEIHSQVLQDMVKRVKLAFDRYLNGDSNGNRSGKPRFKGKNRYRSFTYPQASIDWIDGNKIELPKLGVFKVIWHRPLPEGFNVKTAIITQKADGWYITLTLEDVSVPKFAPDVKPTADNSIGIDLGLEKFWLTQKGNLSRYLSTSESQKKSLYVCSRKYRLPKKGVVPESC

SEQ ID NO: 1304 - protein, 460 aa, Oscillatoriales sp.
MYGTIQVKLNVSDEVMAYLVHQCQHSNSLINSTLFEVRQSHFEDCPRVEFFDANGFYRSEFKTKTVKAPYAHLCSVMKDNPHYKVLGGQCAQQTLKSVSESFTSFNKLLQLFFKGEVDKPRMPNYRTKGGLAPITFPAQALQFDIETGECRIPISQENAASVKEHFGLSELRINGAFGIKADQIVELRILPRNNEFYAEYVYKHGNDGATCHLGLDSTQALGIDPGLSNWLTCVSTRGKSFIVDGRKLKSINQNYNRRVASLKTGKPAKYWDFELARITEKRNRQIRDAINKAARLVINHCLENRIGHVVFGWNEGNKDGINIGAKNNQEFVQIPTSRLKNRIKQLCEESGIQFTETEESYTSKASFIDEDFLPTYGEKPASWKPSGKRIKRGQYKTAQSILINADCNGAANILRKVSAQLGIVLTESVRAVLTLPKRYDLFKGLKKSYRKRCEASLQSA

SEQ ID NO: 1305 - protein, 370 aa, Salmonella sp.
MKRLQTFKFQLRPNGQQERDMRRFAGACRFVFNKSLALQNENHDAGNKFLPYVKMAAWLVEWKISPDTQWLKEAPSQPLQQALKDLERAYKNFFQKRASFPRFKKRGQNDSFRYPQGVKLDQKNNRISLPKLGWISYRNSREVVGEVKNVTVSQSCGKWYVSIQTEYDVTEPVHTSTSMVGLDAGVAKLATLSDGTIFEPVNSFKTNQKKLARLQREMSRKVKFSNNWKKAKRKVQNLHSRIANIRRDYLHKVSTTISKNHAMIVIEDLKVANMSKSAVGTASQPGRNVRAKSGLNRSILDQGWYELRRQLEYKQLWRGGQVLAINQPTPARNAPAAVIQRKRTASHKVGSSVWNVDIQRTPISTVLVIF

SEQ ID NO: 1306 - protein, 420 aa, Halobellus sp.
MKRTNTFEVRPRSESDEALLQEVMDATASFWNELTYARRQQFFDDESIWETDEFRGQYKGQLGAAGVQTVTRKNNAAWNSFFALLESGEDASPPGYWGNADDGRDLRLFVRNDSYEIQWGEHSRVEIPVGQDLKDEYHMGYFERLRLEVRGDPKWSGEQGELEIQYDEVEDTYRAYQPVTIDESELDSPLASEEAALDLGVNNLVACTTTTGEQYLYDGEELFEQFRSTTEEIARLSCKLPPDQDTSQRIRRLYRKRSRQRTHAQKDLIRDLVERLYDEGIATVYFGDLTGVIKTQPSPEINEKLENFWAFKKFIDQLQSVCEEHGIAVEEESEAWTSQTCPECGEQTDTVRHRETLTCPCGFEGHSDLTASETFLRRNTDKQVRPMARPVRFQWGNHEWRSTTDAPELGTNPNEQRTNP

SEQ ID NO: 1307 - protein, 532 aa, Bacteroidetes sp.
METAEQIEIITESRAVKFSAGWANKSKIHNAQKIDYFVCDKKNEISKFIRENLQALIDNKKGFLTKYEQFGCKEKEIKDRTIFAWETQTIFSDICKVYENIFEQFKEKIDTTIQSGIKIECYKRGVNLPKGVVKNKGDVKNYSIVKKTTALSKVVKMLALLDVDRLDQYKGEPIYDDVITVWMQHKHWNKIMHVARQIRMHMMIKLPVAKFTTGTYRINLKGYELMYDVSNTKFKHWFRYDGKHYPLQVNSKYHGDLEKLNTGVNKQAFVKVVGNRVDFIFITDRELKFKDFAKAIGLDINIKNNFCTSSDRHLFDYDRKYINEFLEEIKKIDAIGYQNLNALQKAHLEKIIARNEFYFKQIISKLLHQLDAEGYSDIVMEDLTNFDKGKFNIKNEEFKMHYTRLTRLLRLGNIKKWMKEQGEKLGIRVHITPSPYTSQKCPKCSTVDKNNRPTQEKFECVECHFTDEADFVSPVNILTNFTSDVLREKLHTADIYGRCQPKKLKRGTIKKILSSCHEASLRASSNGYPVMV

SEQ ID NO: 1308 - protein, 373 aa, unknown
  TnpB Polypeptide
MIKKFKPINKAYKFRIYPNQEQQELIDKTIGCSRFIYNEFLAKSKDNQYKSYSKNSKELTQLKKEYTWLKEVDSIALQQSLKDLDRAFKNFFSGKYNFPKFKSKRKARLSYRTQKFIRPSGSTNIEINDNKIKLPKLSWVRFAKSKEVKGKINNVTVSKSKVGKYYISINVSQVLVTTVKDNQGELGLDLGIKDFLTTSNGEHISNPRHLSKYQDKLAKLQRRLAKKQKFSNNWYKLKKKIAKVHTKIKNVRLDFLHKLSTRLVKENQLLVIEDLNVKGMIKNSKLAKHIADCSWSKFTTMLEYKGKWYDCILHKVNRFFASSQTCNICGTKNPKVKDLSVRDWTCSCGATHNRDTNASLNLLKQGKLDLGLR

SEQ ID NO: 1309 - protein, 419 aa, Halorubrum sp.
MEYSHRYHAYPTQKVAETVEQHIDVHRQAYNFTRYEYTNHNDADNVGSAYKHHDRLTDWKDEFSVFTEVHSKALQRTVTRFYQNLSNLSEKKRNGQKVGMLKWKSPAEFQSMTYSQSGFELKNTSGHNATLWLSKIGDIPIRYHRELPDTAEIKEVTIKKETTGEWFVSFGLETDEADLPEKPSVDALNTNNSVGIDLGIRNYIHTSDGKTVDWLDLGDEYEQLRRKQRKLSRKEEGSNNYEKQRLKVAKIKRHIRRKVLDYQHKLTTWLVREYDAVFVENLDVKEMLEQSYNAQNKQDAAWRQFITLLEYKAELYGTHVVQVEARGTTKECASCGVETAKPIWVREHSCPSCGFECDRDANAAMNVLQRGFAELGLGWPEDTPVETALPADTHSVSAKRVVEAGSPTLKERAASAVSE

SEQ ID NO: 1310 - protein, 424 aa, Halorubrum sp.
MSDPQALVKTLDFQLNIQSDNESLLYDATLEARSVYNESIRLAKQDVDWDAISSRIADDTNLVKNTTQCLVSKALGAMENYYEYDDFGLPSHTKDGYYPLRANYEEGYNLSLTDDRDVTFRISAKPYKHVKGVLEGSDAHLDILKTALESDEWKIGTAEALFHSDNPELHVNVTNTEQTVRDKYDSRTLVGVDVNEDNVALSALSEDGVENTLVIDFPEIKFARHRYFTMRMRVQNAGKDSIHDTLEGREERFVHDRLHKVSRHIVEWSQQFEKPCIVFEDLKDMRDSIDYGVRMNRRLHHLPFRALQYYTSSKAAFEGIPTAWINPEYTSQRCPICGHTERANRNKKRFKCKDCEHQDHSDRGASVNIAVKGIKKLDRNVPALNSLPTVRKVRRQASGAVDAPTVTHDTVRGYQTDGVAGVSD

SEQ ID NO: 1311 - protein, 430 aa, Halorubrum sp.
MEADGLTHTLDFQLDIREGDPSLLTDGTLESRRVVNEIFRLDKEGWDWDDIEDAVVDRSDHVQNTTQRLVAKATTALREYYGDEDHNYGRPNNNVREPFPIRMNHGEGYDLSLDGDTNDIHFRVSALKHNHVRGVLTGSPDHVEQLQTALQDEDDEWRVGTAEVVPVDGGHELHVNVTRTTADVAPKEDAQTVVGVDINEDCVALAVLDEDDIIASVIIDYTRIKERRHEFFTIRKRMQQNGQTAFETVLQDREKRYVHDQLHKISHGVVEWVSQFENPIMVFEDLTDMREDIEYGTRMNRRLHSLPFAKLRSYITYKAAWEGIPSDAVDPEYTSQECPRTECEHRVRANRRGKRFKCVVCGCQDHADRGAGISIAKKWMSKEERNVPLLKILPGFQQVRREASGRVDRPTATPSLVGGHQTESGAGVLR

SEQ ID NO: 1312 - protein, 343 aa, Okeania sp.
MAQHAGYGRWCYNWGLSLWNAAYKDGYKPNARKLREVFTNHTKPFYPWMKNLSSRVYQYAFINLGEAFKRFFQGLGKYPKFKKKGKHDSFTIDNCGKPIELNGWNHKLPFIGVVRTYEPIEATTQKITISRQAGSWYLSCSYEFTQAPTPKTTEVVGVDLGIKTLATLSDGKVFESANSYRKFEAKLSRLQYLNRNKIVGSTNWQKAQLKIAKLHTKVANIRKDVLHKLTTYLAKNHGGVVIEDLNVRGILANHKLAKSIADQGFYEFRRQLGYKCQWYGSELVLVDRFFPSSKTCSNCGHVQDMPLNNRTYDCPECGLSIDRDLNASINLRDAVGSTVNACG

SEQ ID NO: 1313 - protein, 690 aa, unknown
  TnpB Polypeptide
MPDVTRKKGRHKQCRENSIEEDDEEIVQRIALSNHDNHEDNENENPSTNCVKIIKMKLNTFLKDHCRGVLHSHINRYVFLGNRILGEAYALANFHVLRILTLNKDDLLSCFPANKAIEPDEIGRVLPSLDKKFFYTCLIACSSCKVREKTLGESLSESVKIFDSMRNGCSTEKSDFVGMTQILSDLSITMATMTTNHIQMNIGNRITEYVKANYGNDLKGFIPAIVRSLTSDIKITLEKVFPTSQQNQRSHKAKEIANYLRSFIPQGFNINFSSHTHKLLPLYYVLLNSIEQKRNEKCQEIKDREVNENVRLNDAKSKIRSRLPRTFNLLPIKNSFTLGYITFSNMTVLSMLKKLKIEDFKNDGRFLSKEEVKSIWGRSFNLKAVETRNTLFDCRILSDGYGVSIQMEGTTSDSSIRSNQNQKDETILNFGRRVSVDPGISDVVTTTDSNGVSQSFSSAKYYEHAGFNYSERRTQMWNDETGSETKSIPTSKTAKMNDYSRYVESYMQHLPGLLHHRASNGYRQMRFLRYTKRQKAIKEICDFIAPPGEMSVVGFGDWNGGARSCISRRTSGPLKEIKQMLQESPHVKYHGIDEFKTSQTCCACHNRLTNMRAYTTRVRRKRDTGGLLHEEKVTSLGKVHKVLHCTSGKLGDSLSCGMTWDRDVNASRNILELLTLELGGKERPKVFCRS

SEQ ID NO: 1314 - protein, 489 aa, unknown
  TnpB Polypeptide
VDWECRAGERVLAPPRGYSCWWLGERQDAVAIFGDHRSGPAGEAGANVGGGWDSGRMAVMKVIQAYRFALQPSPAQERALRSHAGASRFAWNWELAKCTERYAAEGRWYSAADLHRLWNAVKKADPALAWWDQNSKCAYQEAFRDLDRALRDFIKSKRGKRKGRRVGFPRVKKRGKCKDSFRFGTGVMRCSGATVTLPRLGAIRTHESTRKLARRLEAARARILSATVSRTAQRWFVSFTVEAERAVPDGHARPGSAIGIDLGVKTLLTGVDDAGNVISIAGPKPLRASLRKLCRASRAHSRKTPGSANRRKHAARLARIHARTADVRADALHKATTSLAVRYQTVVAEDLNVAGMARNRKLARAIADQGFGAARRMLGYKAAWNGGTLLVADRWYPSSKTCSACGWRKPSLTLAERIFTCGACGLAMGRDENAARNLLGLAASGADSENACGAQVRPGPAGHRAVKQEPGTADASKTGTAAWQPAAAK

SEQ ID NO: 1315 - protein, 403 aa, Nostoc sp.
MQRTIRIQLKPDIETDSVLSQTIEQYTWSFNAVCKHGWKNDLANGVELHKATYYDHRAITGLPSQLVCAARVKATEALKSAKSLKKKGKTVSCPISKRCPIRYDARSYTAWFDRSELSILSINGRVKLSFEIAEYYRQYLAWKNTSADLLQDRKGCWWLHVVMEIETPQASVTDEVVGVDLGIASPAVDSRGSKYGSGHWKKIEDKTFELHRRLQSKGTKSAKGHLKKLSGRQRRFRKDCDHVLSKRLARSVESGATLVFEDLTNIRGRAKMRKAQRRRLHGWSFAQFQAFVTYKAEARGVNVGFVDPRYTSQKCSQCGHIERGNRPSQAEFRCKKCGYERHADYNAAINIRAEGIRMLKAEGSAVSAVGGEIRPKLGRKSKLRHSPVSTEADTVLGTPSQCG

SEQ ID NO: 1316 - protein, 443 aa, unknown
  TnpB Polypeptide
MQSRKFTVVTQLHEKNNRGLIEYIESSRRDYGKALRETFYAIKRGGFNKSKYNTHLQYKYEIVSRTANSIIYDAQGRFNAFRELKEYERKQLKRKIKHLEESVIPKLVKQRNKNSTKFQEGASVSLVQQRNLRLRVVAKRSRLNRLKQKLKALEYQLKSGRLKLCFGTKKLLRQGYEKFIEQRDSQMTFIGAKEKTACNQVLQLTYNRRSNQFLVRLRKDFGGYKSAKGEDRYVYGKVYFNHHKTQIVSILRYKTSPLSYRIVKKDGRYYLYCTFEFQVGNGDIVTRSSYGTIGLDFNKGFVTLSETNQYGHLVQTEFMQYRFKSGNKTKTDLQRIASRVAWLALRRGKDVCIENLDFREKKAKTEAKQGKKYNDMLHSLAYRELSEVMESVAYRNRVELHKVNPAWTSWLAERIYCKPMKLNTHVGASYVIARRGQGYKDAV

SEQ ID NO: 1317 - protein, 395 aa, unknown
  TnpB Polypeptide
MIRAYKTEINPTKSQIELIHKTFGCARYIYNQYVNENLENLALGKDFVSAFSYSKRVNNDPNTPYWLKEVPSKAIKQALIYADRAFKDYFSKRRGKPKFKKKWNNDESFYLIGTIKVERHRIFVPKLKWLRLKEFGYIPKNISSVTISMKNGRYYISCLCKEEKDERIPLSDSAMGIDFGLKDQFITESRTIPSINRSLRIRKLEKCLRREQRKLSRKVEANMVDKVYVQSGSKKGQLKSYKWVKHLSECKNIQKQKLKVARIHERLTRIRTDYNRKSLYSLVLERKPSSITIEDLSVRNLMKNRHLSAAIMKAQWYQSRLYLENLCDRLGIELRVADKFYPSSKLCSTCGFKYQDLKLKERFWTCSNCGSEHDRDRNAAINLEQCKNYTVLTAV

SEQ ID NO: 1318 - protein, 445 aa, unknown
  TnpB Polypeptide
MPDFLVSGKSGRSRKEMLVQHRVVTEYRSWQERVKAANGESSKYVSRGWKRTVDASAPSYGEDYVNLGAVNKQYAAIENNPFTDGEIVLKMVIQGQWYRLIFDFDNERFTEGKVTLPVIKVQDGQPVFIFTVVTDNPIVQFSGDYTIGVDVGINNYATVVVRDTKTGQIVHTSTLSQRVHSLWNSVRASQRQVRGLRKKADGLLSQRHERMSALDEAQLHREAASRKKRELAILAAQEIAALSHVWGNAAVAVEDLSWIANTMKNGRWNRGAFVQWLTHYVSQNGGWVVAVSPANTSQLCYKCGSKVTHPTHEVSVCATHGVMDRDVNAAANIAARAVPRVAKARVTRAKNRKLRPQAPLRTPVARNSLRYPGRDRTKNKPTEKRKNHRRTVKEVILPLRPARAQAPCLDTRVLADGGTLRASGTSLAALKQGNRAYKSRLCCLI

SEQ ID NO: 1319 - protein, 364 aa, unknown
  TnpB Polypeptide
MLRAFRYRLYPNQAQQAMIRKTVDACRFFYNWALETMKITYETTRKTLSWFDLNNRLVNLKEDYPFLKEAYSQSLQQAIKRLHLAFQHFFRWVAQGNEQPGYPKFKRRKAYRHSFDVPQFFIVNFFARCVKLPKIGMVKTIFHRRFTGKPRTCSIISTHSGKFFISIVVDDGKRPPPKLQTSSQTSVGVDVGLTTYITLSTGEKVGNPRHLRNALKRLQCLHRRLSKKMKGSCNREKARQRLACCYERVVNQRMDFQHKLSTRLIRENQAIMVESLNVSSMMRIRHLAKSIADVAWSQFLQMLRYKAEWYGVTLVEVGRFVPTSKCCHGCSYINYELSLTNRVWTCPACSMSLDRDLNAAKISS

SEQ ID NO: 1320 - protein, 410 aa, Streptomyces sp.
MATHVKRSFKYRFRPTDAQAAELSRTFGCVRKVYNMALTARSEAWARQERVNYNQTSAMLTEWKKTEELAYLNDVSSVPLQQALRHLQTAFTHFFAKRAMYPRFKGRKKSRRSAEYTTSAFRFRDGRLTLAKMSEPLRIVWSRPLPAAATPSTVTVSQDSAGRWFVSLLCEDTGVKPLPPNAEAVGIDVGLDHLLILSTGEKITNPRHERYDRTQLAKAQRELSRKAKGSKNREKARRRVARVHARITDRRRDHLHKITTRLVRENQTLVIEDLTVRNLLKNGRLARAISDAAWSEFRGMLEYKSQWYGREVIAVDRFFPSSRLCSACGALKDRMPLNVRTWTCDRCATTHDRDVNAANNLLAAGLAASACGAGVRPQRRTPGGQSAMKQEFGGATRRVPVRRAGEEVKR

SEQ ID NO: 1321 - protein, 400 aa, Sphaerisporangium sp.
MRTAYKVRIYPTPEQAAVLNRTFGCVRLVWNRVLAWRHARYQADRTRTSYAQTDRYLTELKRDPEFAFLFEVSSVPLQQTLRQQYAAFMNFFAGRARYPRFKSRHGRQSATYTRSAFRWRDGRLHLAKMDAPVAFVWSWPEVDPATLNPTTVTVSRDPDGRWYASFAVETAGEPEHAPATDSSAGVDLGVKDFAVLSTGEKIANPRHLARRAKNLARYQRRMARKQRGSANRAKAKAKVARAHTKVGDARADFLHKTSTRLVTGHDVIVIEDLAVKNMVRNRSLARAISDCGWGEFRRQLEYKTAKYGRHLIVIDRWYPSSKTCSSCGHLLAGLSLGTRTWQCPSCGTRHDRDVNAAKNILAAGRAVSACGADVRQAGTSRVQLATKQETSPARVGIPLL

SEQ ID NO: 1322 - protein, 299 aa, unknown
  TnpB Polypeptide
MLRAYKYRIYPTDEQKVLFAKTFGCCRFVYNWALNMKITAYKERKETLGNVYLTNLMKSELKAEHEWLSEVNSQSLQSALRNLDTAYTNFFRNTKAVGFPRFKSRKDRQSFLCPQHCRVDFKKETITIPKAKDIPAVLHRNFKGTVKTVTVSMTPSGKYFASVLVDTAIQELPAIPVQVDTALGIDLGIKSLAVCSDGRTFDNPKNLQKSLGRLKLLQKRLSRKQKGSSNRNKARIRVARLQEYIANSRKDNLHKITHALTHDSQVRTICMEDLNVKGMQRNHHLAQAVDLQYVTSLQI

SEQ ID NO: 1323 - protein, 390 aa, unknown
  TnpB Polypeptide
MSAARTMLTQMETYGTSASIAVATAVFSVRPRFSRLSARTAKRGSRSSASRRREKRTANPDSGATRKTGENSARTSATRRTPLSGVNTPLEILVGKDLKDEYGLGHRERLRLELRGDPNWKEYDKQGRLELFYDEQAQSFRAFQPVTISEDHSRLAQPLASEEAALDIGANNLVACTTTTGQQLLYEGRDLFERFRETTREIARLQSLLEDGRYSSHRIRRLYDRRTKRRDHAQDALARDLIERLYDEGVSTVYVGALTDVLETHWSVETNAKTHNFWAFRAFVNRLACTAEEYGMSVEVRSEAWTSQECPNCGSTEDTTRHHDTLTCPCGFEGHADLTASETFLRRQTTVTRSMARPVCLKWDDHNWSESPRSVPNEEHTNPQVASVSR

SEQ ID NO: 1324 - protein, 495 aa, Mastigocoleus sp.
MLLGYQNKLKPNKKQTLKVLSWIDMLRANYNYNLADREVTYQERFVQGEYCNLRNKGTACPLTCSVSSNSATSDTGDIYKVKKKTREIKLKTAEEIQITNLPILKKTRPWYKEIDSTVLQQNVKRLQVAYNNFFAGRSKYPKFKNKSNFKSFTFTSGIKVADKAIYLPKLGWVKYFNSRPIPEGFKVKSATVRLKADGLYVTLKIENKAVPPFPTIAVEDAKTVVGLDMGITKLVHCSDGSQYDNPRHSTNKRTRKLLKVRQRRLARKKKGSKNRKKAGKLIGRLHQKITNKREAFQWQLANKLTRKADAVVVEDLNISGMKKRCKPKEDVSNKGRFLTNGQSRKRGLNRSISDASWYSLTQKIEYLAAKQGKVFRRVNPRHTSQKCPECGHVDKANRNKEKFLCGNCGYLAHADLNAARNIKQRGIDEYSFPVACKVKIRMVPEDFREPEQLCLFKMPISETTEVRRRAARKGRRRVPGNPAKQLSLFEDISDI

SEQ ID NO: 1325 - protein, 427 aa, Geitlerinema sp.
VEQVLTLVVKLEVTESQREILAETANAFVSACNWINTTVNPKLTNRNSIQAVCYHEVKEKFGLSANHVVRACARVAANRLTAKQKGRKVKGFKPTSFDGDARTFSFFEKDWTISVSTTRKRLRVQIRASNYHRGKLTGKTPTSAQICIHRDGDWYAHIQLKSEPPKPSKTDNAIGVDLGRREIAKTSTNRGWDGKGIKDIRDKYSRVRASLQKKASQGTRSTRRRCREVLRRLSGRERRFQAWLNHNISKSIIEEAKQSNSVVAVENLTGIRERTNKKPRSKTERRRSNSWAFYQLRCFLEYKGIKEGVKVMAIPPAYTSQTCHCCNQIGVRTHKSFKCSNSRCGWTGDADLNGALMIQKWGRSVNRPGGSHLLSCARDEGLLKARAVCESFTRRVVYSPNPVSNRTKLEGDFSSGDVGVARHRAIR

SEQ ID NO: 1326 - protein, 383 aa, unknown
  TnpB Polypeptide
MQRAFRYRFYPTPEQESLLRRTIGCCRLAYNKALAVRTEGWFQRGERISYAQTDRMLTGWKKEESLHFLNEVSSVPLQQALRHLQTAFGNFWDKRTGYPTFKKKRGGGSATFTRSAFRYRDGQIFLAKCSEALPIRWSRQLPAGVKPSSVVVSLHPSGRWHISLKVDDPTIQPLPPVERSIGLDMGISALVTDSDGNAIANPRTIDRFRQRLRRAQKALSRKVKGSNNRHKAKVRVARIHARIADIRQDHLHQLSTRLIRENQTIVVEDLNIRGMVKNHKLARAISDASWSELVRQLSYKAEWYGRKLVKVDRFFPSSKTCSACGYLLDKLPLSVRFWECPSCGAIHDRDHNAAKNILAAGLAVEVCGASVSPNHQKVGRQER

SEQ ID NO: 1327 - protein, 250 aa, Azotobacter sp.
VSASCGKWFVSVQTERKVEQPIPQGGAVGIDMGVARFATLSDGTFYAPLDSLKRHETALRKAQQAMSRKTKFSNNWKRAKARVQRIHARIGNARRDYLHQTSTTISQNHAMVCIEDLPVRNMSRSAKGSAEQPGKQVRAKSGLNKAILDQGWFEFRRQLDYKLAWSGGWLVAVPPQNTSRTCPCCGQVSADNRQTQARFACVECGFEENADVVGAINVLRAGHARFACEVSGAVIPPAAGTHRGESALLG

SEQ ID NO: 1328 - protein, 214 aa, unknown
  TnpB Polypeptide
MRLVEKHIVKDNRFKDICFKPGLLYNYVLYNVRQNIFSGNYLKEYDFSTKLCRENQFDFRNLPSSISQQVIHQVFSNINSWIKLKKDFEKNPGKYNNHRPKLPKYKKGEKQDMIVFTTSCCRLKKDGYIHFVKNIIDPIKANIGDNKLCQVRIIPQATCYIVEVIYEKKEQDLNLDKDNVLSIDLGLNNLCTCISNVGVKPFIVNGKVIKSFNQ

SEQ ID NO: 1329 - protein, 401 aa, Thermotoga sp.
VIRTYKVPVPVELYPLCSELNRIAARIYNKTMSLVKKIKNKKGFWLSPNTAQKYILRWSSAIDIHTHSKQAMVQLYFQALNSYFVAVKTNPHAKPPYKRKNFLPFIWKNQAIKLLPDGKVKLSMGRNREPFVIPTTLPAGTTIRQAKLVYEAGRYYLHLAIEVKSEHKRGQSQKVMSVDVGILRPITCFDGSEVISYHGGVLNSILRYRNKRLADIQGALSRCQKGSRRYKKLSRAKRRVLYKTRNQINDVLHKITSHFIGLCVQKNISTIVVGDITNIRERTNGNDNFNQKLHQWAFRKLMSQIEYKAQIFGIEVVRISEAHTSKTCPVCGTQNRPSGRNYKCAGCGFEYHRDGVGAINIWKRYLGTKSQVVAGLAPARGVRFNPHLCGYGAISAPWKAA

SEQ ID NO: 1330 - protein, 316 aa, Thermotoga sp.
MSLVRKIHQKKGFWLSWPTADKYILRWAENIKIHVHSKQAFVQLYFQALKGYFKAAKKNQDAKPPHKKKRYLPFIWKESAVKLLPDGTLRLSLGKERESFVVQTPLKPPLRIKQTRLVFEDGYYLHLAIEVEIEEKNAGSGVMAVDLGVLRPITCFDGKEVISYHGGVLSSTLRYRNKRLASFQSAIAECKKGSRRYNKLVRAKKRVLRRLRNQINDIMHKITSQLHRTVPQKANQNHRDRRRHRDQRKSGLQRQREPEDPPVAVQKTHRDDKVQSRAVRNRSETHLRSEYKQDVPCLWCKEQAEWKKIPLQSLRF

SEQ ID NO: 1331 - protein, 398 aa, Thermotoga sp.
VIRTYKLAVPGHLSQTCEELNRTAARIYNKTMSIVRKIHRKKGFWLSWPAADKYILRWAENIKIHVHSKQAFVQLYFQALKGYFKATKKNPDAKPPYKKKRYLPFIWKESAVKLLPDGTLRLSLGKERESFVVQTPLKPPLRIKQARLVFEDGYYLHLAIEVEIEEKNAGSGVMAVDLGVLRPITCFDGKEVISYHGGVLSSTLRYRNKRLASFQSAIAECKKGSRRYNKLVRAKKRVLRRLRNQINDIMHKITSNFIGLCLRKQIRTIVIGDVTGIRERADYSDNANQKIHQWQFRKLIEMIRYKAEQFGIEVKLISEANTSKTCPVCGAKNKPNGRRYHCKACGFEYHRDGVGAINIWKRYPGTGQVVAGLAPVRGVRFHPHLCGHGASLAPWKVA

SEQ ID NO: 1332 - protein, 226 aa, Thermotoga sp.
MGRNREPFVIPTTLPAGTTIRQAKLVYEAGRYYLHLAIEVKSEHKRGQSQKVMSVDVGILRPITCFDGSEVISYHGGVLNSILRYRNKRLADIQGALSRCQKGSRRYKKLSRAKRRVLYKTRNQINDVLHKITSHFIGLCVQKNISTIVVGDITNIRERTNGNDNFNQKLHQWAFRKLMSQIEYKAQIFGIEVVRISESAYKQNVSCMRHSKQAVWTKLQVRRLWF

SEQ ID NO: 1333 - protein, 365 aa, unknown
  TnpB Polypeptide
LNETLAICRLVYNSMVHERTALHEQGLKAPTFYTQVPALARWKKDYAELKTVHSQVLQNIARRVDLAFQAFFRRVKQGETPGYPRLKGHGQYDSITYPQSGFSVGQSAVSLSLLGKQEQVKAKIHRAIVGTVKTCTVRRYGKKWFVCFSVEQEDDFLPTCTDSVGLDAGLNSFMALSNGEFIDNPRFFRKDEKALAKAGRKQAKTKKRCPARKKANKVLSRIHERIRNRRHDFVHQTARRLVNRFSVIAVEKLNVKNMLGNHCLAKSISDASWSMFRTVLTNKAESAGREVIAVDPRYTSQDCHACGYRAKKKLSERWHLCPMCGASLDRDTNAAINILNLATNHGGITPCQVTPVEAPPFMAGE

SEQ ID NO: 1334 - protein, 385 aa, unknown
  TnpB Polypeptide
MKTKRAYKYRFYPTPAQENLLARTFGCVRSVYNTILAWRTTAYQTEQKRIGYKDASAQLTALKRDPARTYLNEVSCVPLQQCLRHQQQAFQAFFEKRAGYPAVKSKKHRQSVEFTASAFKYRDGQLFLAKCKEQLAIRWTKGREALPSAPSTVTVSRDTAGRYFVSLLCEVETQPLPVSQRTTGIDLGLKALFVTAEGEQINSPRHTAKYAARLAKAQRALSRKQRGSKNRAKARQKVARLHAKIADTRLDGLHKLSRRLINENQVVCVESLAVKNLIRNRSLSKSIADAGWGELLRQLEYKAVWAGRQLVKLDRWFPSSKRCSCCGHTLASLPLRVRDWTCPACATHHDRDLNAAINIKAAGLAVLALGENVSGIGQVPLSRSR

SEQ ID NO: 1335 - protein, 495 aa, unknown
  TnpB Polypeptide
MSSLERTLVRQFEMPNETDRVSLDRMCSSYGFVASKFLFAFQTRELRGEVRDFRAFRNKLVAALSKKPVEFNQRLADLRTNGKAAEANLLTLLRELKETSGPHLQVRHWKLALEETSKMALTHWKSVIAEAKKKLAHTLKHFNDQDRHYACWLLCGVNRQFFELLDGRIPVPNPEVSFDRNYCLSYDRPLSSKALRSIAGVVRRTVNKVRRDSVCYPRTQAFHNRIDFDASCYTVRSTEDAQFLELMSLQPGKRISLRLKGRSKIRGTLQLIRDTAGTYSLRVYVPQQCEEKRKTGTVIGIDLGYTEMMATSEQELLGTDLGQYFSAISDKRRKNSEGRNRMHSLFRNLLKKPNKDNLAKAERIRKHNLGRKKQRARYIRDIGVIKTIVNRELNLLFTRKTNPIKQIVVEDLSARMKVHFGKKWNRRLSGWMRGYLQERIRYKAKKHGIEVSEVNPAYSSRECPRCHCTDKKTDTGIHLSARFAGTTDMLTWLLR

SEQ ID NO: 1336 - protein, 414 aa, Leptospirillum sp.
MIMSGMKTMQAFKFRLVPTPEQEHLLSRHAGCVRFVWNKALDLQKRRLEAGMPLLTYGDMAKLLTLWRESDEYGFLALAPVPAPAADPQKSRPGDPGSPGQKEPQTFPPVQEEGREDLLSLSPGNEARPEHDRPGGSSGPSTDLSLPKVGWVKLRLSRQIEGEIKNVTVGERAGRWSVSIQTEREVPEPLPKTRPAVGLDLGVATFATLSDGTRIHPAPDLVEAMKRAEERLSWEQRKLSRKYRKGSKSKSYRKQKLRVARAHERVANMRRDFLHKTSTAIGETQAVVHVEDLPIRNMSRSARGTVESPGKKVSQKSGLNRSILSQGWGIFLTLLGYKLSRNGGRLVRVPPQYTSQTCSVCGHAAPENRKTQEAFVCGVCGHAENADVNAAKNILRAGQARCACSEAKTSESAA

SEQ ID NO: 1337 - protein, 356 aa, Bacillus sp.
VVFGSKNLFKHQFTKKEFVQDHQSWKEFFLAVRNKQVLILGRKDAAAGNFVFTYQPDTNDLHMTSLSGKVVTFSNVVFPYGQEQVNQTVLRQRKCKDKKANGKPISWSVEDHGDYYIIKCLLDVEEEVLVNFSTSDGVIGVDCNVDHFAWTDVSKDGNFLESGTFSFTLNKKTNGQSTKILEAEAIALVDVAVQKNKPIVMEDIDTTLSKTGDAYGNKKVNRLKSIFAYRKMAQAIKSRAQKMGVAVLVVNPAYTSITGKLKYMREFGISIHQAASYTIGRKGLGYKEKAPQVLRHHIVRHPLPYWKQWWALNKKLHVRKEMFYQLFDVNKPSGNINLTHKELTEKESKHLKKAFA

SEQ ID NO: 1338 - protein, 397 aa, Natrarchaeobius sp.
MAAEHHIDVHRQLYNHVKWDYTNSPDDGKPSEYTQNKKLTQWKRQWPVFAELHSKAAQATVARFHDNLSNLRKKKEKGYNVGWLKRQAPSEYRSVTYNQSGFDLDNKRGRDGYAYVRFSKIGWVKIRYHRPLPEHATIKEVTLKKEVTGEWFVSFSLNTDEEHVPEKPSIDTLDASNSVGIDLGILNYIHTSDGNTVDWLDLGDEYERLHREQRKLSRKEHGSQNYEKQRRKVAKVKRKIRRKVLDYQHKLTTWLVREYDAVFVEDLNVAGMLQGDGNARNKQDAAWRQFITLLEYKGDLYGTHVVKVPTCGTTKECACCGVETAKPIWVREHLCPACGFETDRDANAAMNVLQRGFSELGLGWPESTPVETVTAVDAATFQRVSASHVVETGSPEA

SEQ ID NO: 1339 - protein, 331 aa, Rhodococcus sp.
VGDRRLPVPRISDGGPAKNAGPLVRVCAGGIQRCTPGSTGCPRRGGEDLRHRRAAPGRDPRQRHPAAGMVGRGGSVALVQARQDARRAYRNFFDSVPGKRKGRKVGAPRCRSRKGNRQALRLTRNGFTVTSRCVRLAKIGDVELVWSRQLPSEPSSVSVIREADGRYFVSFVVERDEQPLPQAPTVAGIDLGLTDLAVIARSDGTREKVPAPRHLRAAEKRVARAQKALARKEKGSHNRAKARIRVAVVHRKVRETRLDHHHKLARRLIHENQVVAVEDLAVAGLVRTGLAKSVHEAGWSTLVRLLQEKAAMHGRTVVKIDRSWTAITTPR

SEQ ID NO: 1340 - protein, 377 aa, Exiguobacterium sp.
MLKGYKYRIHPTPVQAEFLVRTIGCARFIYNKLLEDRIAIREEAKAGDGTRRKPATPASYKPLFPFLAEADSLALANAKLNLDKAFAKFFAGTDGFPVFKSRRRSRASYTTNNQHGTIRIEAGKVRLPKIGFVRFTQHRLFEGVIRSATVSMTRTGKFFISILVEQDDEPFVPAEHKVGIDLGLKHFAVMTNDAMVSEKIDNPRFLQQSETKVRKAQLALSRKKIGSKNREKAKLLLAKKHEKIANQRQDFLHKLSRRIVDENQVIVVETLKSKDMIQNHKLAKSIGDVSWYEFVRQLEYKSNFYGRTLIKADPWFASTQICSTCGVKGEKKTVDVREWTCACGAHHDRDINASINLLMLTIQGRDCPTSLVHNRGW

SEQ ID NO: 1341 - protein, 389 aa, Chlamydiae sp.
MEYTYRFRLDPSKPAKVFLNKLVGSCRFLYNKLLEISKEEKLYNYYELKKRIVNLKKEYPFLKETNSQSLQGSCLNLKRAFDNFFNKRAKFPNFKSKNKRNSISIPQFFKIADNKLYIPKLKTAIPIILHRKSIGNIKSISITKTPSGKYYLNVLVEREMNKLSSNKNAVALDMGLMTFAKLSNGEEIKNLRFYKKAEKRVKKIQKKLSKKQKGSNNRKKAIIKVAKVHEKIKNKRNDFLHKESLKVIRDNQTRIMEDLKVKNMIRNKKLSKSIQDASWSEFNRMIKYKARWYGREYIELDAFYPSTKKCSICGYKNQKLDIHTRKWICPKCRTFHDRDYNATINQLKIGLGQSKLTPVDYAMAAEQKYIFWSTSYHKRKQEACHFNGE

SEQ ID NO: 1342 - protein, 419 aa, Komarekiella sp.
MLTLNYRYRIYPDTTAQNTLFEWMEICRSAYNYALRQIKDWCNSRKCQIDRCSLKQEYILSANLKFPSEMQQLNALPKAKKEFPKLTEVPSQVLQQAIKQLHRAWEEFSERGFGFPRFKKYGQFKSLLFPQFKENPITGIHIKLPKLGLIAINLHRPIPEGFVVKQVRILKKADKWYASVNIQCDVNVPAPMPHGHPIGVDIGLSKFLATSDGVVVKPPKFFKQMQSKLKLLQRRLSRKFHRSNNYEKQRLKVARLHHEIDNARKNFHFQQAHTLCDFADMIFMEDLDYRVSAKGMLGKHMLDAAFGQFRSITQYVCWKRGKFFGEVDAKGTSQECPECGNEVKKDLSIRVHCCPHCGYVTDRDVASGQVIRNRGLALISTPGLGGMETACADDLPGVGVTQSRQVSKSRKGKTRKFSK

SEQ ID NO: 1343 - protein, 474 aa, unknown
  TnpB Polypeptide
LEKSFRIAISAYNEALSFGLRKFEALKENLQYQKLLELRRNNGRQVKEYDKKLFELRKMYGLTEFGLSARLSQQRKKSNSSYRKLNSGELQVIAEQAYKTLEKVIFYQIKSSSIRFRSKYDLNVSYRNKVNTTGTRIMPSDRKGYAYRLYIHKYRTFIDIPIKAFNNHQQMSLLKSERIKYVQIIRKTIRGKYVYILQIVCQGTPLAKVKKGKDILGIDPGISTVAYVSKKDVALVDFVPKDINRKEKLIIYLDRAIERSKRVNNPECYNINGTIKKGAKFKRQSNRQMRLLIRRLKAYRSLSEERKKLQGQLINYLVSQASMIKIEDLNVQGLQRRSREIRINPKTNRPFSKKRFGKSVFRAAPSAFRQALQTRANQLGVDIEIISPKGLKPSQYNHLTQTFKKKTLSTRLYDLSDEWTGVQRDLYSAFLIRHINNGIYQQEQLTQDFPDFYRKMKMFMQQPRKTNRLDWYLR

SEQ ID NO: 1344 - protein, 405 aa, unknown
  TnpB Polypeptide
MVEKPFDKLTANELEVYNEIAFALPKMGNRYKMPVKGKQFLNYNFLDALLKVTKNPDYFAVGLPKHTAQQVLKEVVKNMKGFYVGIRKHKKDHAAFTGKVKLPRYGEKGGKHTAVFSNQECLIYDIKNKPGFHEIKFPGIKKRLYIADMPIRGRLMQITVKPNHGNYIVSLVFDNGKENPVTRPPHRMVGIDLGVDNTAAITNNLGLPCLLFKGGVLKSINQLYNKKMAAIQSEQTKGTDKKFVMTKEAHGLCIWRNNRIEDTINKIGSSIVAWCYDNNVDTIVIGHNTRWKQNANMGKKNNQTFVQLPLYKLILNITYRAQRCGIRVINREESYTSKASFLDNDVIPTYGKEDENHKFSGKRIKRGLYKAADGTVINADLNGSANILRKEFPDAFASHQRISVM

SEQ ID NO: 1345 - protein, 438 aa, Saliphagus sp.
MKRTNQFVVRPRSEQDRELLHELLDASASLWNELTYERRQQYFNGESIWDTADYRKQYVGVLGSATAQQLIRKNKSAWNSFFSSKEKSEECSPPGYWGNEDDGRTLRTYVRNDQYTLEMGDRSRLEIPVGKELKEKYGLGHTERLRLEVAGDPKWDGKQGRLELYYDESSGQFRAFQPVTVVHSRLDSPLADETAALDIGANNIVACTTTTGKQYLYKGRDLFERFRETTREIARLQSKLREGRHSSNRIRHLYRRRTRRRDHAMDALARDLIERLYDEGVSTVYVGELTDVLETHWSVRTNAKTHNFWAFRTFIDRLACTAEEYGITVELRPEAWTSQTCPNCGSTTDTTRHQDTLICQCGFEGHADLSASETFLRRHETDVPRPMARPVRFEWGDHDWSEISHSRERPKEARTNRSIHGEEKVARVVVRHEPRPPT

SEQ ID NO: 1346 - protein, 421 aa, unknown
  TnpB Polypeptide
MLLQKKEIDKLDKKKVNRYWKPNPYYEQLQNKIPIKTKIPIPKPTDYINSRKIRIYPSTEQKNLFNKFLGANRHFFNKTNHYIKEEVDDKKRYNHYYMRQKMFEDQQHWYNEIPYDNKSLAVKQCITAYKSAFENQKQGHIDHFDIGFLSKKQTTQVCYLRKNAYNFNKNYIFPRTLNKHKKLRIKEFLKETTCSDLVLLKIKPGIWYLCIPYKDNTSTHSPSIYKNVFIDPGIRTFLTCYNPENNTYKKLGNHFTDELLPLGKRVDKLISVRTDAKGRTKYNLSKRICKLRYHIKNKTTNLHWQTCNYLTTNYQNIFLPHLDTIEISDHIKSNISNETVRKMMMLSHGYFRTKLEHAVKIKQRSLFYIPEAYTTKTCPKCGYENNIGALKVHTCIACDYRGDRDNTGALNICISTLLRTN

SEQ ID NO: 1347 - protein, 458 aa, Clostridium sp.
  misc_feature (221)..(254): Xaa can be any naturally occurring amino acid
MKKLKRAYKMEINPTDEQKSKIHQTIGVSRFIYNFYIARNKEIYEKEGKFVSGMDFSKWLNNEYIPNNQEMKWIKEVSSKATKQAIMNGDKSFRDFFKKAKGFPRFKKKKNQDVKAYFPKNNKTDWTIERHRVKIPTLGWVRLKEFGYIPTNSIVKSGTVSQKADRYYVSILVEETDIKISNSNIGIKIFNHNNEGIGIDLGIKDFAICSNGNKFKNINKXXXXXXXXXXXXXXXXXXXXXXXXXXXXXXXXXXGIGIDLGIKDFAICSNGNKFKNINKTSTIKKVEKNLKREQRKLSRKYESLKIRNKKEKGGNVTRQNIQKQIVKVQKLHQRLTNIRTDYINKIVSSIIKQKPSYITIEDLNVKGMMKNKHLSKAIASQKFFEFKTKLMSKCKQNDVELRIVDRFYPSSKTCSQCGEIKKDLKLSDRVYKCSCGLVIDRDLNASINLRNAKEYKIA

SEQ ID NO: 1348 - protein, 709 aa, Parvibaculum sp.
MTVEISEFMADALVQPGPDRRVFAIGDVHGQHDAFLDVLKAMTAAASECEEHTEFVQLGDLIDRGPYSLCCIDEMMKSAAELGFDDKTVLMANHEQIARIVMDVDAGKADLWIENGAKAIFRECGVPDDARRRFSASQKARAMRDFWGKDRLEFLRSLEPHRQIGNLLFVHAGLNPNVPKDEFLALPWDYTFQPNILGDRENHWAWIRFPFLNHISGWGGDLIVHGHTPEPRVIAYEREDPRMAHRIRYDRLDLDGGAGMGEPVAVAGAEFIRVARETRPFRAGRKARWPRSLEFSVSDYFPRMISNRAYRYRLKPTEEQAAQMRQFSGVVRLVYNLALEQRRDWWRQYVARTGKSLTYVVQARELTELRRSFDWIAAVSQTSQQQALRDLDRAYANFFAGRSGYPSPRRRGVHDGFRFQGRECRVRRLNRNWGAIHLPKIGPVRFRWTRDIAGAVKNVTVSRDPLGWHVSIACEVEIEAPEKPPLKALGIDRGVVHTLAFSDGRFADLPLERLRVLDRRARKQARSLARCRRGSKRREKAKARLARTRAKTARVRKHWVHERTAGLARSCGTVVIEDLRVRNMTASARGTVEAPGTNVRQKAGLNRSILEQGWFFFETCLRYKLEAAGGTLIKVPASYTSRTCFACGSISKHHRKSQAVFLCSDCGYSAHADTNAARNILKAGTRPSGRVPVAGPSNRESRQIAQTAA

SEQ ID NO: 1349 - protein, 385 aa, Parvibaculum sp.
MRRAIKLRLYPTKEQAEELDFQFGAARWVFNDALEQRSSLWKERKGSISRSDLIKRLPRLKSAPETAWLKRGDSQAMQQSIMHLDEAFQRFFRKRGRYPRFKSKHGRQAISYPQRVRIVGGSRLYLPKVGDVRAVLHRPVEGEIKTVTVSREPTGKFFASILVEDGREAPVAPEEVSASDAVGIDLGLVHFATLSGNSDGRNVKVPNPRHYRNALAALKRQQRALSRKKKGSSNRAKSRLKVARAHERVTNARNDFQHKLSRLLVDENQAICVETLNVRGMLRNRALARSVADAGWHGFVSKLAYKAQESGRHFVKIDRFNPSTKTCSLCGSINDDLSLADRSWTCGNCGAEHDRDGNAADNIRREGLLKLQAAGLSVSGLWRHA

SEQ ID NO: 1350 - protein, 510 aa, Parvibaculum sp.
MAKKPEHRPIHRTDLLPSNMTAGKEAAVREMLAAYRTGAVMLGREQWRLFFETGRFNKNFDKDKKTYAAVIGAANRVQMCRYQVVGALQSWVSNRSNEFRETVVRSSLPPETKHMLHVVNKAGACFSKDDVFMPKSGEVIPDDLRRLARSIMRHVMAKHRRPNLSRISMRLDRRAGAISRPAAADQNGRVGWWVRLSTMEKGRKIDAPLLTYDFHEKRPGRVTDGIQINLDRDGRLTFGVVTDMGEACAASRDAYDGNGEIALDFGLSTLFATSEGQLLGQGWLKELRRYDERITKIARGMQRRGLKPRQSRRYKNAVTALRGFLRTEIGRVFNKLVEQGQPKELVLERLDFRNPTLSRRLNRILQNAGRSIIHAKLQDLEERLGITSTEVNPAYTSQTCSCCGYLDKKNRRDQKTFRCLWCGHVMHADLNAARNIGERRALAIGSGFHGKAAVLAELVRQFGERRVYSTRSGGRGSTVDPLSTNPYFKGKVERGSDVAKARPSQNLVAA

SEQ ID NO: 1351 - protein, 406 aa, Streptomyces sp.
VQLRYSFRLYPDAVQRGVLARAFGCARVVFDEVVQVREDARGRGTIPYGGWAAQASDYPGQAVAGACLAERGLHSGAPAVPARRGGRVPELLRIPQGHTQGPEGGRPRFKSRKDHRQSVRFTANARWKIPEAGRLDLSKIGAVKVKWSRTLPATPFSVTVIKDAAGRYFAPFVIETDPATDQAWMPGSDRAIGIDLGLTHFAVLSDGTKIDSPRFLRRAEKKLKKTQQDLCRKQKGSKNRDKARLKVARAHAKVADARREFHHQLSTRLISENQGIAVEDLSVAALCRTRLAKPVHDAGWSSFISMPEYKAQRYGRTLVKVDRFEPTSQTCSTCGTKDGPEPLHVREWTCSACGTVHDRDHNAAINVKVAAGLAVSACGAPVRPGAIPAQREEAGSHGFPTGNRAA

SEQ ID NO: 1352 - protein, 421 aa, unknown
  TnpB Polypeptide
MLKAIKVRLYLNNEQTNLINSLLGSYRFVYNQCLAYKKLNYETDKKNTSLSDLGHYFHGDLRNNYEWLKEHNTKVLKQSIINLEVAYKNFFKQHKGFPKFKSKHDEQKVRFPQEAVASKTFDEETSRLNLTKTIKGLKFECSDRDKQYLYKNKQGIKSVTITKTKSGKCFATILIDGDLLRTVNKSNKSVGIDLGIKTLLTFSDGETIDNPRWIKTNEKKLKKIQKQLSKKVKGSKNRNKVRLRLAKLHEKIKNQKQDFLHNITTKIINENQVIVLEDLNVSGMMKNHKLAKSIQELGLYEMRRQLEYKSKWYGRELVFVSRWFPSSKTCCECGWKNNNLTLKDREFVCEECGTVIDRDLNAAINIEREGIRIYNEQIGQRLPEFTLVDNPTMDDPTGNSLLKSSGWLKQENDGLYNFVQV

SEQ ID NO: 1353 - protein, 371 aa, Vulcanisaeta sp.
MRRLVHRTLLIKRPLRLFSAEEQDALVKVLNRVDALGNLWARGFEVYPVDLDSRFVDKFNYFKNELRAQNAKRWLVRIHAIFNVGVRLANERDMGQGVFIDLTMNIVRLRWVIKGRAITISLTESEAKYIRDRLSEGGKPKLARAWVDGENLYIAITFERDVESIQLSDRRLVIDVNSWRNGIVWALVNGKVGSMGRERPNLGCIEMLYKHVTKLGQKYGALKRLGLHKSQYGRRLWREIKATRRRLYAYLKDYAQKLAHKLAQKALKYRAGVIIDDVLEESRRGLMEEGLPNGLAKVYMLYLRRFVKLLTNQLEWYGIPYEFKRLPSTICPVCGNELVQLPNRLMQCPKCGLKANRDEIPIKWALILANL

SEQ ID NO: 1354 - protein, 428 aa, Vulcanisaeta sp.
MKRCSVVKLEPDREAENKLKLLCSISSRLWNEVNYARRRQFFENKRVDLKNTYREFYGKYKALIGSVTAQQILNKNNEAWKSFFNLLKARKEGRLPPFMRSVSPPGYRKRYGSRILWVVLRNDQYKVERSKIILKGLGAIGRIEVQYKGLIHIKGKQGRMEIRYDPDSRTWYAHITFEISEKAVRGVWRKIPEAPKASLRAGIDIGINNLFAVYIGDGRAFLVNGRPLKAISYYWKARIANYQSTLNRYGLRTSRRLRIMYKKWRRQVKHYINTAVRRLAEELYNAGVSTVYIGYPKMISQNNGNFNTVQTWSYGYLLKRVSEVLEEYGVNVVFVNEAYTSSYCPFHGNKCGKRIARGLFKCTSLNRVFNADVVGAYNILVKGDTITPSPRDGIGATRPRPGVGLNPAKAGNVAPNLLAFATPRTLTL

SEQ ID NO: 1355 - protein, 297 aa, Vulcanisaeta sp.
VKIHYRSNRQLHRYLYGGWRLTDELKIKLDGKRVLLYLTFKRDFEVTYNPNNVIAVDVNENNVTLAVFKDGGLSDVYRIETNLGRIVIAYSERRKRITKGRSTRDREVRKALRKLRERERKMDIIYKTARIIEELALANNAVVVVGNVHRGKRRLINESGNKRLTHRIHQWSVATLVRVLGGKPIHVVEVSEAYSSSTDPFTGNRIKSFNPSVIRTAVRGVRRIRVVKIALRLTRLGNGLVLDRDVIGAINIGLKYLSTGGSPMALASTGPHEVRLKLMTPNQGPTPPTEIKAIKIH

SEQ ID NO: 1356 - protein, 440 aa, Vulcanisaeta sp.
MKRTNVVKLAVDRNTHGKLRELAVITAKCWNEVNWLRMQQFKEGERVDFARTEREVYEKYKHVLKVNAQQVARKNAEDWRSFFSLIREKEEGKLPKWFKPRPPGYWKDEDGNYRLIILIRNDRYVVDETNQVIHLKDFKLALRFKGRLRWRGRQGRLEIHYDEARRAWYAHIPVELGNTVKAKGNLRASVDLGIVNLATVYVEDGSWYLFKGGGVLSRYEYYSKRISSIQKVLARHGQGSGRRLKLLYDKRRRFLKHALNSMVRRIMNILIEKGVGEVIVGYPKEILRNHGNKLTVNFWNYNYIIRRFREIGEELGIRIATVNEANTSKTCSLCGETHESGRIHRGLFKCPRTGKVINADLNAAINILSLHSPKSLASARDRGNGLKTQPVVYRWTSGAGWLKATSNEAMRMKAANHKPMNHPEKTHTLQGGKEVRLMDL

SEQ ID NO: 1357 - protein, 357 aa, Vulcanisaeta sp.
MLAHRTLLIKRPLRTFTNEEREALVKVLTRADALGNLWARGFEVWPIGLDSRFADKFNYFKSELRLVNVKRWLARVHAIFNVGVRLDNERDMGQGVFIDLTRNALRLRWVIKRRAIVISLTESEAKYIRDRLSEGGKPKLARAWVDDEHLFIAITFERDAEQITPSNYRLVIDVNSWKNGIVYAIVKDSTRNLERLYNHVTKLERKYGALRRLGLHKTPYGRRLWREIKATKRRLYAYLRDYAQKAVSILVKQALNLRAKVIIDDIIEESRRELMEEKPLNGLAKVYMLYLRRFVKLLTNQLRWYGIPYEFKRLPSTTCPICGSELTQLPGRIMICSKCGFKADRDLVPILWAIKQP

SEQ ID NO: 1358 - protein, 457 aa, Vulcanisaeta sp.
MASFPGELLENGEWGPTTPAIPGEGVREVEFSNVRTNVVRLLPNGFQDRKLRRLANISAKLFNEVNYERRQQFFRGEQVDFKGTWKKYYEKYKGILGVNAQAVLQKNNEAWSSFFSLLKLKKERKLPRFLKPNPPGYWKDMETRRRKLILVIRQDRYEVDEQRHVIILKDFKMEIEFAGRLRWFGKQGRLEIHYDETRNAWYASIPVEVGVEETRTGKRSKYIVRGERRSIQIATPKGSKVASIDLGVNVLASVVVSDGTWLLYRGVRAKEDYFYFQRRISEIQSWLDKNKDRLLDDAIEEVRREVGRLHGKLRRRLLHLYRNLASHLIKKLHELGVSTIYLGYPFNIAQENGNKFTVNMWSYRKLMEVIELKAQEYGIKVYEVLEYNTSKYCAYHGVEVNRQPRGVVNCPMGHKLHADLNGALNIMKKATNPVVPAIKKPLSFLVLHNRVAPTKGV

SEQ ID NO: 1359 - protein, 368 aa, Vulcanisaeta sp.
MRRLVHRTLLIKRPLRLFSAEEQDALVKVLNRVDALGNLWARGFEVYPVDLDSRFVDKFNYFKNELKLVNAKRWLARVHAIFNVSVRFTNERDMGQGVFIDLTRNALRLRWVIKGRAIVIQLTPSEVKYIKERLSEGGKPKLARAWVDGENLYIAITFEREVEPIKPSNYRLVIDVNSWKNGIVWALINGGVGSMGRERPDLGYIEMLYNHVTMLEHKYGTLRRLGMHKSLYGKRLWREIKATRRRLYAYIRDFAQKAAHKLVMKALKYRAMVVIDDVIEESRRELMEEKLPNGLAKAYVLYLRRFVKLLTNQLAWYGIPYEFKRLPSTICPVCGNELTQLPNRVMQCPKCGFKANRDEIPIKWALLH

SEQ ID NO: 1360 - protein, 510 aa, unknown
  TnpB Polypeptide
MLQTYQTKIKHVPTDYLDKISKFSGSIERKLFLDSFIHDKPRAECKVAYLPQYGITARQFNAIYIQLEGKIKSLIELKSLHLVELKDKIKSLEKYIVANTEKRELLREKLVKLENRLPFTVKFRKAVKGYRNIKFKLHQKKRKLASCKIKLGRLEQDVQNGTLRICFGSKVLFKKQFELEANGYQSFAEWKVDWINARSSQFFCIGSKDETAGNQTCTYTANGQLRLRVADKFVKDYGTYLVFKDVTFAYGQEVINDALHTYIGTTKGGKPAKYVNSSVSYRFSKNKRGWYISATVDKMLPNIVTSLSLGSIGVDMNAGFVSLCDVDRFGNPLREESLPLPMYNRSTDQITASIGDVVKTIANKALHSGKPIVIEKLDFSKKKATLGEESRNYSRMLSGFAYSKFKEMLKARASKFGVAVIEVNPAFTSLIGQIKFMKRYGLSSHGSAACVIARRGLGIRIEKPKYDSILGRFEKTNNHKPLRSRWSTIAYLVKKNHRFNDRIELLKLDA

SEQ ID NO: 1361 - protein, 540 aa, Paraburkholderia sp.
VRGSKHRNRHHPPRRAAVVRGRTRKGCGRNHHGLFGAAVRLAQQKEQATSRRVAGSRQVIVRVHKIRLDPTVEQAKYFARACGVARFAYNWALAEWTRQHKEGGKPNEAALRRQLNAIKAAEFPWMGEVTKCAPQVAIRNVGLAFDHFFRRLKLGQKPGYPRFKRKGIRDSFRADNGPADKASHAVQVVGATVKLPRCGVVRMREELRFSGRVLGAIVSRMADGWYVALCVETEDRLKAVEDRGAVGADLGIKTLATYSDGGIAPAMKPHRAEHRRIVRLSRKQKGSANRAKAKTKLARLHLRIANVRKDALHKLTTNLATNYSTIGIEDLNVSGMLKNGRLARAIADAGFFEFRRQLEYKAAMTGAQVIVIDRFYPSSKTCSACGAIHAITLADRVIECACGLKMDRDLNAAINIRRQALAQQSVERKALAGASATVKPASVKQKKSGLHSNVQTTYSGAQNCQTASPYRTAQNGMSLSNWTAGCRRLRRFNQPLSCLRSSNTSRSASRTRRSCRNSPISFARLRRTVVGETSMNGGIW

SEQ ID NO: 1362 - protein, 466 aa, Thiorhodospira sp.
MKVTRILCAKRPNQGKVGALRDQAGRLGQVRSEVWQRFGSIGGVTRSDRQIRDQWLKDKRVFSVSANAWKETLRDAKGDITASMEAAKVKVRRCIWRHTQDQTEQKRLFTALKGNDWVHDPYLRRMMRKHWKHGHNHTHNQIIVRSDNYTTFHLGGRVWIKIPGLVKGQRIAIPLDTHVAPTGTLRIILTDDDRIEVHYTIEVEAKQNCGTRTLGVDKGYSEVLVDSDGDHHGQELGAILTDTSDKLKIKYQRRAKLRALANNTRNPRKRQHIRQFNLGRKKLNRQMDQTHAHIRDIVFQSVHKVVDKAAVIAAEDLTAPMAGKSFGKNVNRRLASWTKGVIAEALDSVSSRRGSTVVLVNPAYTSQMDSRTGCLDGKRQGDQFYCSDGVVLQADQNAARNVLARLYDPDIERFTPFKRVKAILLERTERLRLGLLNPDSSCSPFGALSTESELPKNHPEQLCSGF

SEQ ID NO: 1363 - protein, 383 aa, Syntrophomonadaceae sp.
MSGPLGESYMLKTYKFRLYPTEEQAQIMHNTCFLCSILYNRGLAMRKEKWENEKLSLSAYDQIKGLPAEKEETPFLNGVYSQILQDVYRRLDKSFQNFFRRLKEGEEPGYPKFKPARKYDSFTYPQSGFSIEKEGRGGRLKLSKIGTVKIKMHRPVCGKIKTLTIRRRAGRWYACFVCEIEAEPLPKTGNSTGIDFGINSLVATSDGELIPSPRNLLQSEAKLKRLQRAVSRKKKGSRRRKKAVLALQKQHEKVANQRRDFAFKVARKLLEQNDLIAIEDLQVTNMVGNRRLAKSIHDAAWNKLATILEHKAEEFGRTIVKVNPQNTSQDCSGCCEKVPKTLSARQHNCPHCGLSLDRDVNAALNILHRGLDEAFGDREAEAS

SEQ ID NO: 1364 - protein, 396 aa, unknown
  TnpB Polypeptide
MSRYRLLPTSAQEAVLVNHCGHARYVWNLAVEQHQHWHPGRKSAPGYLAQCRQLTQARAEYPWLAAGSQTVQQQALRDFAQAMAAFFDPRNPARRPSWRKARRDEGFRIVGRRGQHWDVRRLSRHVGQVWVPKAGWVRFRWSRALPPGLKSYRITTDRAGRWHVAFAAIPEPVPAPGNGEIVGIDRGVAVSAALSTGEFLHVPGLTARERNKLRRLERKLARSKRGMNRRRRVKHAIGRLKARETDRRKDWAEKTSTDIARRFDVIRVEDLQIQKMTRSAKGTQESPGRNVRQKTGLNREILRSGWGLLVRRLEEKAPGRVEKIKPAFTSQRCSACGHVDKKSRESQARFVCTACGLASNADLNAARNIAAGHAVAARGGFRAAGPVNREPQLLAS

SEQ ID NO: 1365 - protein, 397 aa, Streptomyces sp.
VTANHVKRAFKYRFYPTDAQAAELSRTFGCVRKVYNMALEARTRAWQQGERVNYNATSAMLTAWKKTEEMAYLCEVSSVPLQQCLRHLQGAFVNFWEKRGKYPRFKSRKKSRRSTEYTSSAFRYRDGQLKLAKMTDPLDIVWSRPLPEGAKPSTVTVSQDGAGRWFVSMLCEDPSVKPLAATGAAVGVDAGLDHLLALSTGEKIADPRHERKDRARLAKAQRNLARKVKGSANRAKARLRVAKVHARIADRRRDHLHKITTRLVRENQTLVIEDLTVRNMVTNRKLARAISDAAWSQFRSMLEYKAQWYGRNVVVVDRWFPSSKLCSTCGTLQNRMPLNVRTWTCDCGTTHDRDVNAARNLLAAGRAVQACGAGVRPQRSSPGGQSAMKQEVSRREP

SEQ ID NO: 1366 - protein, 363 aa, unknown
  TnpB Polypeptide
MTMKTNERAKYIYLTLQLLPTEKEREALQMTWDNYKKACNTFSRIKYLKLAKGKHMNVSACKKEEPKSARALAQRLLHAVYENSIKYTVEEAYKNQEDSKKLALIVFGEYDETNVKLLAIPYFRKPTFTVDFSTKKCRLDLAKNFQKIAFTIPKGLPEPPESWEVKRAYLKLIYGTWYLTLGFSNPTIKTEVKPDAHIVGIDRGEINIATTYSPDKGAKRYSAKDYYTSCKGGTKDDYHKNLFAKDVIVAQEIVERESPDTIFVLEDLHFNKLRKGWSYRNFSDAFIYLAALHHQCVFFCDPRNTSRTCPKCGEVTNTKRNRDEHRFICCSCGYGEKEIVNDDENAAENIYLRGRKELLKDDF

SEQ ID NO: 1367 - protein, 335 aa, unknown
  TnpB Polypeptide
MFVEDGKLRFKLRKMQFGIQVNDRFQSDEVNAVLSYLENPDKMDADAVNTLIEEACCIDTYRPCYATLVPRLIRGKYRVYLHLTIEGKAKSKYDRFGNPRHKYGKGMIGADIGTQTVAYTSDTEVGLKNLSERGNSIQTSERKERLYYRAMDRSRRATNPQNYNPDGTIKKGKKTWKYSDRYKKLKAKHTELCRINAVNRQLAINEDANYLRSLGDTFVTEPKNASKLMKRAKKTTVNSKGKFNKKKRFGKSIKNRCPSGFQTTIEKKFKVTGGAYIEVPNNYRASQYDHTQMTTLRKSCLIALQTSRRNIGTKRLVFIIFALLLRLQNAGYRQR

SEQ ID NO: 1368 - protein, 404 aa, Euryarchaeota sp.
VKVDVNRAYRTELSPEDRQRQRMVQACGAARFAYNWGLRRKTTVMDLNRSSIERTKVPTAIDLHKELNGLKATQFPWMYDVSKCAPQEALRDLDAAFANFVEGRARFPTLKTRKHGLGAFTLTGAITIRPGQIRLPRLGWVRLKENGYLPSKIHINSATVSERAGRWFVSVNVVMQREKPKPISGPVVGVDRGLRSLAVVSDGIIVENPRALHRHERKLKRLQRAVSRKVKGSTNRRDAARALARLHLKISNVRKDALHKATTKLARTKSVIVVEDLGVRGMMANHRLAKSIADAGWGEFFRQLEYKTAWYGSRLVVADRFFPSTKMCSQCGNVKETISQIERMYSCERCGMVMDRDLNAAINISRWPGVARTLKTPVESGVPLTATSAQPLGEAGTTSLLREA

SEQ ID NO: 1369 - protein, 537 aa, Catenibacterium sp.
MITDKEHKRHLKKFHKLSDRHILAVETDMSSSDIQKVAKLSNKIRKAGNELVGLMRKNYDQLMRTKRYRKLLFLYGDSKDKAKRKTYAEQLNEMQKDYNITWEYCRTSMIPIGKKYGVDAVFALTKAEDIWRGIEKCLYGNGNAIHFSKYGEMPCIRAKQINRGIPIFVRDNKLQFKLGRMVFGIQINDRFQQDEVDAVLSYLAESEILDDRAVSILIKDGYCIDTYRPCYATLVPRMIRGKYRVYLHLTIEGKAKQKYDKHGSPRHKYGKGMIGADIGTQTVAYTSDTEVGLKNLSERGNSIQTSERKERLLYRAMDRSRRATNSQNYNDDGTVKKGRKTWRYSNHYKKLKEKHSELCRINTINRQLAINEDANHLRSLGDIFVTEPKNAGRLMRRAKETTVNSKGKFNRKKRFGKSIKNRCPSGFQATVEKKFKVSGGIYIEVSNDYRASQYDHTVDDYIKKKLSDRMYKLQDGTEVQRDWYSSFLLYCYDYRTKNIDKNKCISEFDKCYSKEKALIEWIKANEIKVLNSGIKIA

SEQ ID NO: 1370 - protein, 361 aa, Meiothermus sp.
MIHAGMSLLSVRCKLIPDASTAEKLSRTVDQFAGACNHALRVARRENAWDKFALQKLVYRELRERFGLSANLAVRAIARVGKRKGHKAGGFKATSVDYDRRILSLNIADEVVSLSTVEGRVKVPLHIAGYQRHLLRTAKSIQGGQLVRGRDSWYVHLWCEYEDPPVLDPQGFLGVDLGIVNIATDSDGETYSGQHLNSVRHRHRRLRKKLQKKGTKSAKRRLKKLSGKERRFANDLGHRISKRIVAKAQRTGRGLALEDLQGIRERVRLRKPQRAALHSWAFHDLGQKIRYKAERAGVPLVWVDPKNTSRQCPACGHTERVNRPTQALFRCVACGCSGPADYFAACNIASRAAVIQPNAGV

SEQ ID NO: 1371 - protein, 571 aa, Actinomadura sp.
VGAVPAAAIHPGVDDAVCEIGHPTARDGRPLRPIGAPFVAVGSSGVAIRTRLKGLTLQDENVLGEVGAHLGSLAGRDLKARCRAGTAHDADVWALRKRELTGGSSARWAGSITRATHDQWALARRGQLAHQRSLEAGIAAIERRLSIPVGQKGTRRAAGGYRSRREWFAKSRRLHALKDRLDAVRADWEAGRVRMVRGGKRLLNNRHHLKAAGLTEERWRARWEAGRWFCQADGESGKRYGNETIRVTPDGEVSIRLPAPLAHLANAPHGRYVLTACRVAFAHRGTEWADRITVDRAVAYRIHHDPDRGRWYLTASWKRPTIPTIELEATRARGIIGLDTNADHFAAYRLDSCGNPVGDPQRFGYDLSGTATHRDAQVRHAITALLHWARRCGVTAIAIEDLDFAQDKTREKHGRRTRFRQLISGLPTGKLRTRLVSMAAEQGLSVVAVDPAYTSRWGDQHWRKPLATTKREVTRHDAAAVAIGRRALGHPIRRRTTPPRTHQSDGYGHRTVQAELSVQGREGTRPLVTERAHDARPRTGTQRTRATSASNTVRDTRSTGSRQQMSLLDTG

SEQ ID NO: 1372 - protein, 256 aa, unknown
  TnpB Polypeptide
MMLWTSKRISRPQPYKPRDTIAVDINERKIVYGVDRINKERDTKIGEAHRWKKLAEDLQKRYSSPRYPAWRRRRGILNRIRSYHRKAKNILEDWARKTSLEIVGLAKRLGCAVAREDLTGLINSLRKIKNKDHRIKHIIMGYSRLGRWIDWQAMKHGVPHAIVNPNGILSECPKCDSKLEETGYRRLRCLRCGFEADGDVIGKLNIRKRALKKLRIKVIPGGILATLTAPQVTDVNPNRWGEPMNRPQRGRGTPTL

SEQ ID NO: 1373 - protein, 395 aa, unknown
  TnpB Polypeptide
MQLTKTIILKLTSLDNDLAELLNAFSQGMNYASQIVFDIGKPIGSGQLQKLSYHYLRNQLNLKSQMACNVARQVSGSYKTLQEQVSIKQTEWQLLEFSPTSATFSFERDFGFSQDTLSITTLAGRKKYKLLNYRYAERYLDGSWRFLASKLCLHRDGSYYFHLSCEKDIPDKKVTDASTFMGVDVGINCLAVASTTDKKCKFFAGGEIKNHRNIRKNERRRLQKAGGRYLGTRSSMRLLRTLAGRETRFMTAVNHTISKQLIEFAIENEVSVIGMEDLTGIRKETKSKIAKEFRYEHSSWAFRQLQGFVEYKAKEAGIAILYVNPEYTSQTCPRCNHISRNNRSGLSFRCGKCGYETHADRVGAMNIEHRTRDLRYIFESQGGNVSPPDATRLFA

SEQ ID NO: 1374 - protein, 395 aa, unknown; identical to SEQ ID NO: 1373
  TnpB Polypeptide

SEQ ID NO: 1375 - protein, 472 aa, unknown
  TnpB Polypeptide
MKKTIKNYCFTATQENLSELHELAIRYVRLKNEVFRFYGSLEGLKYVNYTRDLRNNWSRLGLFKRFNLLSKYSQCAFDDAFANIRSNWSNSIIMTKKNINKNHRFTKDEKHYMFYLLKAKDLLYKAITFQDFDKPDPFKDMVLDQDRLHKYLKSRLRNHLGSKPHQYSNRSFRIDKDLYRYYTDEKDRLWINISGLTSGKRIRLLLTSKIKINTTLIVVLKDNYIKIHSPSTIEINNNDNIETISIDKGFKTVITSSNNNKYGENFNDLLKMESDRLNDKNKKRNKLRFLSKNSKDFIKSINIKTHNLGHKKYNHQKEIQDNKIKEFVNQSLNKFFNQEKPKILITEDLTWQSKFRYNKRSNRLMSSWVKGYLQDRIDFKCIVNGVHQVVVNPAYSSRFCHLCGRLGSRTGDKFYCTQCGVLDADYNATRNLLSRHTDKEITFYTSYKKVKEILLSRSSKQTDETAPSNDRL

SEQ ID NO: 1376 - protein, 401 aa, unknown
  TnpB Polypeptide
MQQKSINLRLYPTQDQEILINKTFGCNRFIYNKMLDEKNEVYNRLKNNKPEIKNYKYKTVKQYKEKYPFLREVSSWSLIQTTIDLCNAYICFFKEQNDHPVFKTRKNPKQSYRECQSIYFSKTKNKKIDKIRFEDNKIKLLKLGWVKTKGYNNQEFSRINNVTIKKHNDKYYVVLNVNFNPIQKEKNDAKIGLDLGLTHFIINSNNNKINNPKFFKESEKKIKQENRRLSRKKIGSSNYKKQKKRLATVHEKITNCRNNFLHNLSSKIVNENQVIICEDLSVKSMMKNKYLSKSISDSSWGEFIRQLKYKSGWYDRNFIQIDRFFPSSKKCSKCGHIKDNLNLSDRIYKCDNCGLIICRDYNAALNILEEGLRILNILMSSQEFTPVEKQGYFVETGTLFT

SEQ ID NO: 1377 - protein, 469 aa, unknown
  TnpB Polypeptide
LLHGYSRKLIELYELSIRYARLKNEVFRLYGSLQGLKYVTYTRDLRNEWSRLGLFKKFNLLSKYNQCAFDDAFASVRSNWSNSITMTKKNINRNKKFSKDEKHYMFYLLKVKDLLYKAITFQDFDKPELFKDMVLDRDRLHKYLKSRLRNHLGSKPHQYSNRSFRIEKELYSYYNDNQGRLWISISGLVRFKKIKLLLSSKIKFDGSLIIVLKPDTNTVEIQRSIDLDININTGTDIIALDKGFKTVITSSNNNKYGENFNTLLKQESDRLSDKNKKRNKLRSIDKNIKDLIKSINIKNNNLGKKKYNHQKEIQDNKIKNFINHSLNNFFSQERPKILITEDLTWQGKSKYSKKTNRYLSSWVKGYLQDRIDFKCIVNGVHQVVVNSAYSSQFCHLCGRLGSRTGDKFYCTQCGVLDADYNATRNLLSRHTDKEITFYTSYKKVKEILLSRSSKQTDETAHPIMDSRNS

SEQ ID NO: 1378 - protein, 455 aa, unknown
  TnpB Polypeptide
MIKVIHGEAYFKPEDKQIILDLMKSQCSAMRSSYQAIHKHRLDLNNIRKYVKNNYSRFLNARYIYDAVMLAFSNPHEKVLFGGKRLWKKLQTGSITKQDWIQIRNNQLYSRGESNKDHFGNANIQCQKYDILKVNDPSQRGKWIQGKLFIPDKFKDFDHTCYTVRLIYKNDKFQTKISYEIDDPEIITAKTNGMIGIDTNPDGVALSETDQHGNLLKHFYIRKQRIQYAQKDKRDYDTRLLAKEVVDYAKSVGKDITLEKLKFKTNDKNKKKSKTKKAKKFNRMKSNFKHRGIIISIIARSKKDGVQTHLKNPAFTSVLGNLKYRKMYSLNSHTAAALVIARRGQGVKEKLNFKINKVKSRKTKKSKTISEKGPKFNLEGRGFKTVITHKSMNYLMLLGKSILATLTASGLVPDQLSGIGPSTGETPVSESYSITGRVGVDFLDKNQPGIRKSSF

SEQ ID NO: 1379 - protein, 309 aa, Sutterella sp.
MAIDLGLGALTYATEDGTIAKVQIAPSADTDHRAVRKLQRAMERSRQATNPDNYETVEVVRHGKKHKSLKVKSGRLQWRFSKRYEKLRSELAEMLRLCAATRKREHGEVCNRLLGHAGHIIVEDNSYKAFQKGRFGKAIGRHAPAALYAQLASKAESAGLLVEVVSPKKLKPSQHNLLTDTFVKHELWERRARLGEDDDDRRIDRDAAACLNLLYADLENQAYAPERIREAVPAGVTAWLDAGVAVIQAREGITEREFGRFRRRGIPSLAVQGLRQQGFRGRSDGKSGATPRRKASTVSKPSHFSGEVV

SEQ ID NO: 1380 - protein, 533 aa, unknown
  TnpB Polypeptide
MKIGIKLRCYPDSQLKQLIHQTAGNNRFIYNYFLNLKNIKYQENKTSLSYQDCSALLPSLKNSVFAFQKDSKEPIDFMTISGHDFNLLQKNYFLKSGFSTSIQFALKSLDNAFNNFFKSKGKVGYPQFKKKNSADSITITPNNWKFVHIVTNNRLPDLGSNSKTKDNIQNFLIDNCGKTPSIYDYLLYFSGCDKPLKIQLDGRDFNPATISKINLSYNAAGQYFITFLADEDIQTIKVKNILKNNDNYLKLSDPATGEYYPIHTSIDLGIKNTLNIRSIQNNFEDNPNNKSINKNDTYLEKKLQGLNRHNKKLRRYQQSLSRKKKGSCNYNKQKIKVAKHHQKMVNIRTDFYHKESTRIVLESDKIMVENLNIKGMVKNKNMAKSISQQGWGQFITMLKYKSQWYGKTLIEVDRFYPSSKICSACKQYNSAIKREDQWVCEYCQTKHQRDENATKNLLEYEKYTKVGKIYIHNSYIEKNNSSKNQAELNNVKNKEKKLPESGGEVKTVEMYKTNNIPSNIIGNINEAVNANLH

SEQ ID NO: 1381 - protein, 208 aa, unknown
  TnpB Polypeptide
MEITPEPIDLTEEILGVDLGLKHLAYVSDGSVYQNINKTKTVRKLEKKRKACQRQMSRRVKDSNNYFKAKREHLKVCRRLTNIRDNHLHQVSRALVKTKPKAIVLEDLQIRNLLKNRRLSRAIQDASWYKLRLYITYKAERQGTEIVLAPTSFPSSQLCSSCHERFDTVAQKRTWGLDIRKWRCTHCGETHNRDLNAALNLKWYYNSK

SEQ ID NO: 1382 - protein, 410 aa, Meiothermus sp.
LTPSFYVGSAGNISAGVIERYIESQRSQWMTMRKAFKYRLYPTKPQARDLERTLFLCRQLYNAALQERRDAYRKAGVSLTYYQQKRSLPEIRTELLEYKGVHSQVLQNVIERVDLAFQGFFRRVKHGENPGYPRFKGQGRYDSFTFPQAGTTGVKLQKDGKRVLLYGIGSVKVKLHRPLEGRLKTATVKREAEHWYIVFVCEVEPKPLPPNEETIGIDLGTNPHFLVTSEGEMVEAPRYFQKAQAKLAPAQRSLSRKKRSSNRRKEARKRVAALHRKIANQRRDFHHKLARRLVKQYGTIVHENLNIEGLARSCAAKGVQDAGWAQFLSILAYKAAEAGRRVIAVDPKYTSQACPTCGHRERRPLWVRVYTCPGCGAHLHRDVAAAQNVLARAWTGPSGVAIPCPRSPGL

SEQ ID NO: 1383 - protein, 350 aa, unknown
  TnpB Polypeptide
MLIAHRIALDPNNAQATYFARAAGTARFAYNWALDEWRRQYDAWKIDNTQPKPSQQALRRQLNAIKRKRFPWMMEVTKNAPQMAIIQLGRAFQNFFAGRARYPRCRKKGVDDRFTLTNDQFSLDASRIRIPNLGWVRMHESLRFAGKIMSATISRVADRWYVSITVDTPDSPCLPEAENQGAAGICVDVSTLARLFRGEAIAAQPDYNALLNRQDRLSRSLSRKQKESANYRKAKARLAKLRARIVAIRSDALHKLTTNLTRRFHTIAIEDGEVRGTTQNSRPARSVGNIGFFEFRRQLEYKAAMRGGQVVDIDQYLAGGEKRSARRRELDDVPQSAREETCPACMTIDD

SEQ ID NO: 1384 - protein, 429 aa, Actinomadura sp.
VQVTQAFRFALDPTPAQERALASHAGAARFAWNWGLVACQDRYAAERMWYSGAELHKLWNAVKKTEPALAWWGENSKCVYQEAFRDLDRALREFVKSRKGARKGRRLGFPKFKRRGRCRDSFRFSTGVMRCAGRTVTLPRLGTIATHEPTRKLTRRLENGTARILSATISRTAQRWHVSFTVEVDRAVPARHARPRSAVGVDLGVKTLLTAMDDHGTVIEVAGPKALSAGLRKLRRLGKAHSRKQRGSANRAKAAARLARHHARVADLRAEVLHKATSALAARFETVVVEDLNVTGMLANRRLARAVADQGFYATRRMLEYKTRWNGGRLMVAGRWYPSSKTCSGCGSRKPSLSLAERTFRCDGCGLVLDRDVNAARNLLNLAASGAERINACGGDVRPGSAGRSPVKQEPGTAPAGQTGTAAAQAAAA

SEQ ID NO: 1385 - protein, 386 aa, unknown
  TnpB Polypeptide
MSTKSFIINLPIITGDQDRRRLRKSFSFGCNLQNTVMGGGWDRVPQLRATPEWQAARAMPKGRERTQAFRDLRVRFRLSEYDLHADVAMHRKASGRGHLHGINECQKHASRAWISVERDLYEGGSPKFISSRRGLHSLEGKSNRQGIMWKAEKKCLVFCGQSYRIRIHKHDDWLTRALHPTKPRKVKYCLLSHADSIIVEDNSFKAFQKGHFGKSIGRHAPAAFYTQLTSKAESAGLQVTVVSPRKLKPSQHNLLTDTFVKHELWERRVRLGNDDDDRWIDRDAAACLNLLYADLEKQTYAPERIREAVLAGVTAWLDAGVVVIQAREGITEREFGRFRRRGIPSLTVQGLRQQGFRGRSDSKSGTTPRRKASTVSKPSHFSGEVV

SEQ ID NO: 1386 - protein, 415 aa, Actinoplanes sp.
MVFTSWSASLWAMSTRVVKRAYKYRFYPTPEQAAELARTFGCVRLVYNKALQARSEAWTLRQERVNYNATSALLTGWKKTDELAFLNEVGSVPLQQALRHLQVAFTNFWAKRAKYPTFKSKKKSRRSAEYTISAFRWRDGRLTLAKMTAPLDIAWSRPLPEGAAPSTVTVSQDAAGRWFVSLLCDDRIEQTPAVHAAVGIDAGLDSLLILSTGEKITNPRHERADRKALAKAQRAMAKKEKGSANRAKARLKVARVHARITDRRRDMLHKLTTRLVRENQTLVIEDLTVRNMVKNHSLARAISDAAWRQFRTMLEYKAAWHSRELIVVDRWFPSSKLCSTCGALAERMPLNIRSWTCRCGTVHDRDVNAARNNLAEGLSVAACGGGVRPQRGNLRSGQPTMKQENPRATKGIPVL

SEQ ID NO: 1387 - protein, 321 aa, Actinoplanes sp.
LQQALRHLQVAFTNFWAKRAKYPTFKSKKKSRRSAEYTTSAFRWRGGRLTLAKMTDPLAIVWSRPFPENASPSTVTVSQDAAGCWFVSLLCEDVIEQVPATAAIGIDAGLNSLLTLSTGQKVVNPKHERADREALARAQRAMARKEKGSANRAKARLKVARVHARITDRRCDLLHKLSTTIVRENQTIVIEDLTVRNMVKNHSLARAISDAAWRQFRTMLEYKADWYGRNLVVVDRWFPSSKLCSTCGALAERMPLSTRTWTCRCGTVHDRDVNAARNILAEGLSVTACGGGIRPQRGNLRSGQPTVKQEHPRATKGIPVR

SEQ ID NO: 1388 - protein, 357 aa, Actinoplanes sp.
MMVAELLKLAPTGEQIELLSAAMTACNRAANRVAEVAFVQRTANKIALQKIVYADLRSEFGLSAQMAVRAIAKACEAYKRDKSIKPVFRTGGAVQYDQRMLTWKGRDAVSILALKGRIIVPVVYQGRWTKVPGAVVRGQADLIVRDGKWYLAVVIDVPEPPGGGEPDGWLGVDLGVVNLATDSDGTAYSGKAVRAMRRRHNRLRAKLQAIGTKSAKRLLKKRRRKESRYARDVNHCISKALVRTAKGTRRGIKLEDLSGIRDRVTVKKAQRSDLHSWAFFQLRQFVGYKAAIAGVPLALVDPKNTARECHECNYIDKKNRRSRDDFLCLRCGHAGPADHNAARNIAGRAAVMRPDAA

SEQ ID NO: 1389 - protein, 392 aa, Gammaproteobacteria sp.
MSSEPPPEVDGANCIRTLRLKLKPEAYAWLNAAAVEINRVWNFANETSAKAARPFAGPPKWLSAYDLDKLTAGATEYFERIGSASIQRVNAEFATRRKQVKKTKLRWRSSRGSRRALGWLPFKAVQLKRKGKSLRFSGKAFRVFEQQRLLGVSWKSGCFTQDAVGDWWLNLAVEVRLEPPVAQNEEVGLDLGLKDTVATSDGEKLEAGHFYRNIEQQIAQAQRRGHKRQAKRLHRRAARRRKDALHKFSRMIVNRYQRIIVGDVSSARLVKTRMAKSVLDAGWGMLKAQLQYKSQQASRSVFIVSERNTTRACSNCRALTGPTGLDMLAVRTWVCSGCGGTHDRDVNAAKNIRFAVRCSPSLSGNESSPSHAPPSQAPCLREARNSALTAVA

SEQ ID NO: 1390 - protein, 443 aa, unknown
  TnpB Polypeptide
MQKRKFTVVTQLHEGNNADLIEYVDKTRVLYAKAMRETFHVLKRVEHFNKSSYNTYLQNKYDITKRTANSILSDAQGRLNALTELKKYEKSQLIHKINHLENTVIPKLVEKRNNNNVKLCQKSHVSLMRHRNLRRQLVAKKSKLNRLKQKLENLNHQLDTGLFKLCFGTKHLLQRDYEKFINQRDSQMSFVGSKTEIAGNQNFQLIYDPKNNQFKIQLRKDFGFKTAKGDDKYVYGKVYFRHHKNKIISILRQGNSPLSYKIIKKNNRFYLYCTFEIQVCDEDFITHSSHGTIGLDFNKGFVTLSETNQYGHLVQTQFLPYRFKAGNKTKTDLQRIANHVVTLARSTGKDVCIEDLNFKNKKAQTESKSGKKYNEMLHLLAYSQFITTIESCAYRNHVIVNKVNPTWTSWLAKELYCPTMKLNVHTGASYVIARRGQGYNDSV

SEQ ID NO: 1391 - protein, 367 aa, Streptomyces sp.
VLEDRLERERSDRGAGVVHVVRGGQRLARGRHHLEAAQLTEYEWRRRWQAERWFLQADGESGKRFGNETIRVGPDGEVSIKLPAPLAHLANAPRGRYVLDGRIDFRHRGKEWADRVSANRAVAHRIHLDVDRGRWYLTASWTIPPVQTVPLALARANGLIGVDTNADHFAAWRLDEHGNPTGEPRRFLYGLDGPATYRDARVRHALTRLLHWARREGVSLAIEDLDFGAEKTREKHGRRKRFRKLISGMPVARLRARLVSMAAELGITIVVVDPAYTSRWGAEHWQKPLTSKTRKTTRHDAASVAIGRRALGHRIRRRTAPPHTTGAIVWGIGPPRPDAAPAGVRKSAPASPDHGHDPCRRTRSERG

SEQ ID NO: 1392 - protein, 384 aa, Nocardiopsis sp.
VQLRYSFRVYPDADQRTELAKAFGCARVVYNDALRARETARAEGEAFPMTGELSKKLITDAKRTPEREWLCGVSAVVLQQSLRDLDTAYRNFLDSLTGKRPKTGPPRFKSRKDHRRSVRFTANARWKITDQGKLSLPKIGEVKVKWSRPLPSAPSTVTVIKDASGRYFASFVVETNDEPLPETAADVGIDLGLSHFAVLSDGTKVANPRFLRRAERKLRKAQRELSRKRKGSNNRDKARMRVARAHAKAADARREFHHQLSTAIIRDNQAVYVEDLCVKGLGRTRLAKSVHDAGWSAFVNMLEYKAARYGRTFARVDRFLASSQICSRCWVVDGPKPLHVREWACRACRPFMIGTSTRPGSCSPLDGNSPESGKRRAETPVEVG

SEQ ID NO: 1393 - protein, 281 aa, Moraxella sp.
VTVIRGHIIRLDPTDKQATYFAKACGVARLAYNWALAEWQTQHQADKAYRDDCLAKGIEIDISKLNRPSQGSLRKQLNAIKRTQFPFMLEITKCSPQLAIMQLGDAFKRFFKGEAKYPQFRKKGVNDRFSLSNDQFKIDHKRIKIPNLGWVKMRENLRHTGKILSAKIFKKGDHWFVSVAVELQDPPQPIPKTGKVVGIDLGITDLAVLSDGTKIQAPKPLKQQLQKLKRLSKQLSRKQKGSNNRAKAKTKLSRLHAKISNIRQDFSHKLTTQLVKGVVFK

SEQ ID NO: 1394 - protein, 384 aa, unknown
  TnpB Polypeptide
MSKTPKRCKAIKYRIYPTAEQEVLIAKTFGCVRFVYNQMLGYCERLHAAGEKYPGVFGLNYELKHLKKQYDWLYEVDATALEVANEALHAGYTKFFQKSGGHPKFHKKGYSGSYTSRFINGNIVVQEKHIRLPKLGFVKAVIHRTAPEDWALKRATVSRNSDGTYYCSVMYQLPDPLPEKFDLSYDGFTAVGLDYKSDGLFATNDGAVAGMPKFFSESQEKLARLQRNLSRKKGSKKGEKKSKNWLKQHRKVAKLQAHIAHQRLDYLHKMSTEIANQYDIVCVETLNMKAMSNKGFGNGKATLDNGYGMFLNLLEYKLNDRGKYLVKIDKWYPSSQTCCKCGLIHPEMKDLTNREMLCCCGNHMDRDVNAAINILTEGLFALPA

SEQ ID NO: 1395 - protein, 559 aa, unknown
  TnpB Polypeptide
LLFDVLANHCNRCPATTTREVAGRPKRIAPELLADAGKSLLPHHATGYTLETVHQRGHGHLWRIVHQQMHMVIFAIEPDQLSLEVGADTGEDDAQVIQDFFGEHPTSIFGYEDQMNVHQKYTVSAVANVSIISHRPSIIANMQRLQAYKYELMPNGEQQRDMRRFSGACRFVFNKALALQKANHEAGGKFIGYVAMAKRLTDWRNGLETPWLKDAPCHPLQHALKDLERAYKNFFAKRADFPRFKRKGSGESFRYPDAKQFKLDQANPKMARIYLPKLGWMRLRLSREVLGTLKNATVSLNAGKWYVSIQTERNIEQPVPTASTAIGIDMGIARFATLSDGTFYAPLNSFKKHEQRLARYQRCMSRKVKFSKNWLKAKRRVQNTHTRISNARRDYLHKTTTTISQNHAFVCIEDLQVRNMSKSAAGDTEKPGKNVRAKSGLNKAILDQGWFEFRRQLEYKLGWNGGTLVAVPPHNTSRTCPCCGHIAKEKRLTQAKFLCVDCGYEENADVVGAMNVLARGHRVAACGEDGSGLGLAPKAKPASVKQEPTEATMHEVSHA

SEQ ID NO: 1396 - protein, 382 aa, unknown
  TnpB Polypeptide
MFGYPMIRTYKRKLKLTKSQEQRISSWIGACRVVYNLGMEIKQASYKSTGKSVNKYDLINQLPDLKKDFDWIRDVPSQTLQASIERLDRSYQNFFRSFKKGGGYPKFASKKTFKSILFKSVSVNGNFASIPKIGLVKMFKDSEIKGHPKTAQIIIEPTGFFICIQCEQVPVKFVSENQAIGIDMGIAHFCIDSNGQFVANPKHFKRHERHLRVANRSLARKKKGSNRWTRQAKKLSRLHHAIANVRKDFLHKESTRIAKQNSIVYMEDLKIKNMSKSARGTAEEHGKNVAAKSGLNRSILDCGWGNFGILLEYKTAVLKVNPKHTSQICSYCGQKDAKSRISQSKFVCTSCAHTSNADVNAAKNILSRGTALYRQREALACA

SEQ ID NO: 1397 - protein, 475 aa, Iningainema sp.
LLTNYVYKLRPNVTQSDKMDNWLDMLRSSYNWSLADRIAQYNQQFIQGDYCDIRTKAEACPLTCFVSKNGATGEPWKDSKFDKEGKLKNPRRSAGDIQITALPELKKARSWFADIDSTVLQQNIRRLDIAYKNFFEGRGFPTFKNRSLFTSFTFTVGVKIDGNKIYLPKIGWMRFHNSRPIPDGFTIKAVTVRKRQDGWYISVRIEDKTVPDYISRPLSEVQSAIGIDLGLTKLVHVSNGQQISNPRFSTNKKTKRTLKIRQRRVNRKKKGSKNRKKAAKQVGRLHKKISDKRQAYQWYVANKIVSKNADAIGLEDLNVAGMLRRCKVKVDEKTGRLLKNGQSRKKALNRSISDAAWSELTLKIEYLAAKQYKVVIKVNPKFSSQECRKCGHIDKLNRDKERFICTNCGHMEHADLGAAKTIRDRALSMVREDFAKPEPRGSKRPKQCTEISARPMGKRVEPGNPSSRDIKAAMS

SEQ ID NO: 1398 - protein, 380 aa, Pseudonocardia sp.
MGERVVKRAYRYRCYPTPAQAEQLAKTFGCVRYVYNRALAERSRAWTAEQRRVTHAETDRWLTGWKRDPETAWLAEPSKGPLQATLRHLQTAFVNFWTKCARYPTFKRKGKSTDSATYFRGCFTYRDGQVTLAKQDRPLDIRWSRPLPTGAVPSQVTVSRNARGQYHLSILVETVVHDAPATTAQVGIDAGITSLVTLSTGEKVTNPRPERRDRTRLARAQRALAHRRKGSANRAKARLRVARIHGRIADRRRDLLHKLSTRLINENQVIVIEDLSLRNLVRNHSLARAISDASWSELRRQLEYKAAWYGREVIVIDRFYPSSKTCSACGAIREQLPLSVREWTCRCGAVHDRDVNAARSVLAAGLAVSACGDGVRPPRS

SEQ ID NO: 1399 - protein, 403 aa, unknown
  TnpB Polypeptide
MQSVTKLRLFASPDERRMLFATMERYNAACNAVSPVAFSEREFSNIGLQKRLYRHVRETFGLSAQMTLLAIRKVAGSYRSTREAIKEQNKVLAALSKPRKSLTELSFQEHGAICYDARVLSLGQNRVSIWTLDGRIKLRYSKPAYFPAVATIKQTDLVYQDGAFWLYATVETPDVEPAEPSEYLGVDLGVVNIATTSDGTTFSSEATEMVRQRYGRLRGVLQKTGTRSAKRRLRKIAGRERRFKIDTNHVISKQIICAAQGTKRGIALEDLKGILLRTTVMKGQRERHHKWAFHQLRTFIEYKARRAGVRVQVISGAYTSQQCSACRFVHPGNRPNQAAFRCLACGHTENADINAAKNIAARAAVNRPIAVCSLDTGGEVESQACKEHGATYGIMPPTSVGGS

SEQ ID NO: 1400 - protein, 397 aa, unknown
  TnpB Polypeptide
MRHVARYRIYPSQKIAGRLFASFARCAFVRNWCLENKVYQDSCLPTLKTEYPELKEVHSKVLQNVVQQIVHNLRALRKLKEQGRKVGKLRKKWVHSMIYEQSGFKLTGNHLWLSKIGEMRIELSRPVPGRIKQIVVKHTPAHKWFVAVISETPDTPEPTTGTRAVGIDLNLENFSTDTEGTVFPHPHNVMKAAKRLRRAQRKLSRAADGSRNRRKQRIRVARIHEQVENRRNDFLHKWSRYYVDHYDLIALEHLNIRPMVESLDAKLRGRSQSILDAAMGRSGRSRRLRLAWYKAREFIRYKAANAGTYVHLIDPAYTTQDCSVCGHREKKDLWQRTHACPVCGYTVPRDLNAAQNILKRASVGWGTPESTLVEIGTTTPPIPAVHVPVNESRISRL

SEQ ID NO: 1401 - protein, 348 aa, Ottowia sp.
MSTKVYRYRVKSLNGLLNKQARAVSYVWNFCNDTQKHALKWRKRWPTGFDLDKLTAGSSKELGIHAGTINAVTAQYAKSRKQFNRPYLRYRGKKSLGWVPLKGRDLKREGNAFRFAGNTFRVFNSRPLPEGKIKDGTCFSQDRRGNWFLNIVVEVPDVQARQPLRGVGIDLGLKDLATLSTGEKIKHPRCFRQLEERLAKAQRAGKKRLAAKIHAKIANTRQDFLHKASTDIVRRFDYIAVGNVSSGKLAKTKMAKSVYDASWHSFKKMLAYKSIANGAWYEEVNEAFSSVTCSSCNARSGPNGLKGLQVRQWVCAECGCVHDRDQNAALNILARAGHRTPVEGIRLL

SEQ ID NO: 1402 - protein, 351 aa, unknown
  TnpB Polypeptide
HENAKRMREEAGKRTPPKAPPLPLLVKFVMPDGSIRGNKNAPCVIDLQRGELRIPSYSVRVPLRRSLVKALIRENLLEPRPDFVLMVTRRGFLRLIASRYVPAPGVLPLWIIAIDENSLNGEALGVWDVLRADRVVRSRYEELMPRNRSFIDKTAALFQSATAGKAEALEKVKELLRKSSKTEAEIAALLASEQLADIAARTREKEERLNKAFAEELTALVRALVREARARGWSVAIVIDPSNHESLKGSELQRTLLKPRRLLRNLALYEGARFKLYRVSGKQCPNCSSWGVEVAHRRYRCPCCGIEWDRDKAATFWLAKRFLDEWLREECGDETYVDITGWLEKHPRGLL

SEQ ID NO: 1403 - protein, 399 aa, Hydrocoleum sp.
MKQITTISCKLKVSPEVVKEMNATMEIFANACQYVHNNSDQKLTNNVAMQSLMYDTVREKFQLSAQTTIHAIRRVCSNRKTSITNHIKKELTFAPTSVDYDSRTFSLDTKKWIVSLKLLSKRTKFELLIGNYQRGILKGSKATSAVLTKRNDGTYYINIHVNHIVPEPKSTNKIIGIDLGRTDIASTSEGESWSGKNITSKRNHYYQMRAVLQRKASKGTRSSRRRCRQLQQRLSGKERRFQKQVNHEITTYLVKKAATNKNSIAIEDLANIRKRTNQQPRSRKERRLSNSWAFYQFRIFLAYKCVLHGVKLILVNPAYTSLTCHKCLHISPTKETTYRKGKNYHCLNCGWKGDADYNGAKNIAALGLSVNQPRGSEFLSCAVVLGLPKARAVKNLSAG

SEQ ID NO: 1404 - protein, 386 aa, unknown
  TnpB Polypeptide
MFKTIDELCFKSKNLYNYANYIVRQEFIFNHKYINYYDMKKELKTHAPFKDLGSQAAQQVLEVLDKNWKSFFIAIKDYSKHPDKYLGRPKIPKYKNKDGRNIVILSNIQFKIENALLKFSWKPFRKFKIPTKVQGKLMQVRFVPRASHYVMEIVYQIDVPDVNHNSKNIVGIDIGIDNFATISNNIGVKPIIINGRSIKSINQYYNKKKSEIQADLKVRHKMDWSNKLQRLTDKRNNKVNYFIHNASRKIIDWCLFYGIDTIVVGKNDNWKQESKMSKKVNQNFVQIPHALFIDKLTYKAENRGIKVICTEESYTSGTSFLDGESPVKSNYNKGRRIKRGLFKSNTDKLINADLNGAYQIIKKVFPNVFSNGIEGVHLHPFRLNVI

SEQ ID NO: 1405 - protein, 402 aa, Klebsiella sp.
MLKRQAFKFQLRPNGQQERDMRRFAGACRFVFNRALAFQNENREAGNKYIPYTKMASWLIEWKSAPGTAWLKETPSQPLQQSLKDLERSYKNFFQKRAAFPRFKKRGKSDSFRYPQGVKLEQGNSRIYLPKLGWIGYRNSREVIGEVKNVTVNQSCGKWYVSIQTEYEVAAPAHHAKSMVGLDAGVTKLATLSDGTVYHPVNSFKANQRKLAKLQRQLSRKVKFSANWQKQKKKIQRLHSHIANIRRDYLHKVTSEISKNHAMIVVEDLKVSNMSKSAKGTAEQPGRNVRAKSGLNRSILDQGWYEMRRQLEYKQLWRGGQVLVAPPAYTSQRCACCGHTAKENRLSQSKFVCQVCGYTTNADINGARNILAAGHAVLACGGMVQSGRPLKQEPIEVIQTSV

SEQ ID NO: 1406 - protein, 394 aa, unknown
  TnpB Polypeptide
MKKVLDSLCDYRRYCWNQGLELWNTMYDARLIGLSTELRDKIKASLKDKTIEFSEEEQALRALFSVPSERKVRDELVARKADWQFEFSSRVLQFAIKDLASAWNLFFNNPKTANKPGFQSRKKPKQGFKTDYARIKNGRLVLDKPIAYKGKWSSIRFKGVNIPDGELKLCAVTRVKGKYIATITMDVETVALPKTGQKTAVDANVDHFDTTDGQTSLKPESLDPMYARVRIYQRQLARKRNVNKNYRYSKSYQATRAKLQVTYERIRNIQNDLLHKFTTDLYRQFDTVVIEDLDVRGMQMKKKAKNLHRSLFGRFRQFMEYKAEKFGKTLIIADRFYPSTQRCSNCGHIKRGDEKITLSGNAKRGTKHHEYVCYQCGYADDRDHNAVLNLLALA

SEQ ID NO: 1407 - protein, 392 aa, unknown
  TnpB Polypeptide
MKAYKTEIYPTKDQIKLIHQTCGNVRYIYNQFIAFNFERLEKKEPIVSGYDYSKMINHDPTIPSWLKTVSSKALKQAIMNANGALWAYLKGDKGKPKFKKKSKYNSFYLTQGIKVERHRVFLPTLKWVRLKEFGYVPKDISSVTVSIKNGRYYISCLSKTETDERVTTSSEGIGIDFGLKDQFITKDQTIPSINKSDKIRKLEKKLCREQRSLSRRYESNMTNKVYYKSGAKKGQLKSFSWKRPLPECKNLQKQQLIVNKIHERLSRIRKDYNRKGLQSILKRKPSFIVIEDLNVKGLMKNKHLSKAISQAQWYQSSVFLQQQCEKLGIELRLAPRFYPSSKLCSNCGYKNVDLKLKDRSWECPDCHVVHNRDENAAINLEKCVDYTVLTTV

SEQ ID NO: 1408 - protein, 211 aa, unknown
  TnpB Polypeptide
MTVTSNCFNPLIFNGKPLKSINQLSNKTIAELRSKLSERGLRTSSLLQSVYNKRSRRLTDLLHKITTQLVNHLDSHNIDTIIFGHNIGQKQDINLGNVTNQNFVQIPFTQLMHLLRYKCELQGIRFIETGESYTSKCSFLDEENICKHSSYQGKRLKRGLFETSSGKLINADVNGSLNIGRKYLTRVNVYTKQLHEDLIKFMVNPKVVTIR

SEQ ID NO: 1409 - protein, 506 aa, unknown
  TnpB Polypeptide
MDGARGLEGMSRGVRLRRGRSWARRLGSRSVPVLLALSRGGPVLLRTDGYRTNIVRLRVYPEDLKELVYTALRYDECIEFLNELRRELYEAGLLDSRGFAWTRQEAHLAFGEYLKGNVHLVARLNEYAWRGFMALKKLEEEGRLPRGIRVRMPGRGRRFGRCLRLFVDSSYYRVLSRVVAEEMGMEVGENCSGVIVLNAPVKMAVGYHGVIRWSGAQSYMVVKIKDPSRVYAYIHVRVLEPSELEVAIYKGRRVVFGERYGLRSYDPLGSFRAWVDLGVRNLIAAVVEDGTALLYRTGILRSMYNYYRRRKRELMRLIEWLSRTTPNSPWIERYEEELEDLRERTFRKLRLVRRRAVRHFVDECWKLGVSRIYVGYPSWMNMDHPLSSIIMAYSETAWDIARVGEEYGIRVYAVDERGSSRRCSLCDEAHANGRIHTGLWRCPKTGLEINADLNSARNLAGRVSGVKPPLNGRLLSFIVTLEGVWPANQRRGPKPGNPPSHSPDEG

SEQ ID NO: 1410 - protein, 440 aa, Symploca sp.
MSNSIVRTERWQLAPTPEQVKQMVRTEKMYRSYARALIGVVFTHFDQIVSADSPCAATERLIHGTKNNPNPRYKYFGRNFYKFPSYLRRAIIQAAIGQVSSFVTRYYRWQQGQRSKKDALPPTLNAVTNLHVVLYRGQCILFEGDCVQIKVYNGKEWTWERIAVVQRRQRHKLPNSKSLSPQGVMNHKGIFLAVPFKVTPPRMGKPEKVCGVDLGLNTIAVASIVSPDGTVTARRFFNNCAAGIDRRDKRLQAIRHKARLTMGKTGKLYKGFCQSIYRKAHNINRQICQLASRQLVDWALQEGATVIVLENLKGWRPKGGRKGSTLRQRFHGWMKSRLAQLVAEKFEELGGKVEFVFARGTSSNAFDGSGTVRRGKSNYALATFSTGKQYNADLGASYNIAARYWLKTIKPARRNHSGSVSGGSSRMEPRIPGLLCHLWR

SEQ ID NO: 1411 - protein, 400 aa, unknown
  TnpB Polypeptide
MRATGNPDFFAGLPMQTAQQVLKDAVHDFKAWLDSLKEYKKNPSNYTGKPKMPGYCKSIRKTFTVTNQDAVIYPVIDKNGCITGNELKLPGFKKKERVPVNYIDHKSNLRMMTFKPYYDKYIMTFVIEDMAPPFYPDMPYMAGLDFGTDNIAAIACTDNSSVIYKGGAVLSSNQFFAKKKAKAVSLITQGHSKMHAESEYLLTLSRKHSCFIKDQMHKISTEIIRYCVKHRIGILVIGVNKLWKQKSSIGRRNNQNFVSVPHFQLRQMIEYKALRAGIDVIEQEESYTSKADITASDYMPVYGKEKCRPVFSGRRIERGLYSCKEGYCINADCNGAANILRKAIPDAWKDTSDFHFLATPESIGFAMLNPADSHKKYKQHNNWIFVSADAAAVLTDLPHS

SEQ ID NO: 1412 - protein, 244 aa, Streptomyces sp.
MRYTGESGQLKLLSEHRKGESDLIRQKGKWYLLATCEVPDPEITEPIDWIGVDRGIVNLATTSDNVNYQGRRLSRYRRWQAHKRAELERKNTRSSIRRLARRAHKEQRHAAHVNHKFSKEIVSVAQRTGRGVAVEQLDGIRDRVRLRRDQRDTLSSWPFHQLGQHLAYKARRAGVAFLEVDASYTSQRCPRCGHTEKANRPTRDCFHCRRCGLAGPADVVAGVNVRNRARSAWVLVTAPVPALA

SEQ ID NO: 1413 - protein, 300 aa, Sulfolobus sp.
MARRVKAIRATVSMKIAVSDSLLALVINYVKALRFTLFWLKENVKNPNEKGVLGKVHEELYTRLREEYNLPSKVAEDCYRDALSVYKGWYNNPKKGRFPRVYKPTVWLTPKASYSVNFERMTVRIAGVGELQILGYPRNLKEYLSWKMKEARLVVKDGKAFLKVVFEKEGEKVEAGESIAVDINMSEIVVGKDDIHYVRIPTRLHEVHHWKSLTESLQRKYPGRWRESKGILYRIRSFHQKAKRIMEDFARKVGKWVVEIARDFGANVVKLENLENLIKNVDRLPKEFRDKLYLMQYRRI

SEQ ID NO: 1414 - protein, 249 aa, Sulfolobus sp.
MVYLRSYNGSYIFLGFKLKELRRYETGLGKIVINYFLRREEVAREHSTKDELRKLREGERKLDVLRKTVKRITGLARDLKAKVVVGKFSSKAKERMEGDKSAKLRHRIHQWSVVKFVEILKNQPIDVLEVSEAYTSSINPFNGEKLKKRQLVEKVIKVFNPYLMTGTAHEGGGIKVFKVNVRYLESGEVLLERDSIAPLNIMKKVDGRVVVFPSTSPDDLRVKVYDPLGDVPMAELEVRRSYATGKHYI

SEQ ID NO: 1415 - protein, 448 aa, Sulfolobus sp.
MKRTNVVKLVVDKETHEKLKKLGIITAKCWNEVNWLRMQQFKKGERIDFTKTEKEVYEKYKHVLKVNTQQVARKNAEDWRSFFSLIEEKKEGKLPKWLKPRPPGYWKDKNGKYKLMVIIRNDRYEVDENERVIYLKDFKLSLKFKGKLKWHGKQGRLEVIYDEARRSWYAHIPIEVESNAKTEGNLRASVDLGIVNLATVYVEDGTWYIFKGGSVLSRYEYYSKRISEVQKVLARHGQRRSRKLKLLYDKRGRFLKHALNSMVRKIMNELKGKSVSEVVIGYPKEINRNHGNKLTVNFWNYSYVIKRFEEIGEELGIKVTKVDESYTSKTCSLCGEAHKRIKRGLFKCPRMGKVMNADLNGAINILHIPESLGSGSGGQLPVRDRGNGLKTQPVVYRWTNGARWLKATSYEMMRMKAVNHKPMIRPKGTLTFRAGRRSVGPYRWIISL

SEQ ID NO: 1416 - protein, 395 aa, Sulfolobus sp.
MWRAKEKNDKTQLSFKYKIYPTREVEEKLIKVMQIEAKVYNALLDVVNNARKEGKKITPKDTQNMLKDLKIEGKELVYSKALQMVNNQLWYNINALHELKKKGKKVGKLRYKKIMKTINYNQSGFKVEGDKLILSKIGEIRVLFHRPLEGEVKGVIIKKSVTGWYAIFQVEVEKKPLEKTGKVIGIDLGVEKLVTTSDGVVIENPKVFDKVERRIKILQKSLSRKKKGSRNYEKVRKKLAKLHEHVKNLMSDYIHKVTSWLVEQYDEIYVEDLDVKEMVEDGESKVLRKHILLHSDFSKFVSYLYYKAERAGRRVVKVDPRNTSKTCARCGYVKKDLALADRVFVCPSCGWTVDRDYNASLNILSRSGSERPLVPVELRPLPLASLGYEAGSYVR

SEQ ID NO: 1417 - protein, 385 aa, Sulfolobus sp.
MARRVKAIRATVSMKIAVSDSLLALVINYVKALRFTLFWLKENVKNPNEKGVLSKVHEELYTRLREEYNLPSKVAEDCYRDALSVYKGWYNNPKKGRFPRVYKPTVWLTPKASYSVNFERMTVRIAGVGELPILGYPRNLKEYLSWKMKEARLVVKDGKAFLKVVFEKEGEKVEAGESIAVDINMSEIVVGKDDIHYVRIPSRLHEVHHWKSLTESLQRKYPRRWRESKGILYRIRSFHQKAKRIMEDFARKVGRWVVEIARDFGANVVKLENLENLIKNVDRLPREFRDKLYLMQYRRIQYWIVWQAKKHGILVEFVNPSYSSVLCPKCGRRMEERGYRWFKCSCGYENDRDVVAVVNLNGRGSLALSSAHHMRDVVPNRWWER

SEQ ID NO: 1418 - protein, 393 aa, unknown
  TnpB Polypeptide
LPADNRRRSHNTKIHRKSRQVIIVNKAYRYRLYPTTEQKIMFSKTFGCVRFIYNKMLGDRLDYYKETGKKLNNTPAQYKEEFPWLKEVDSLALANAQMNLNKAYNNFFRNRKHFGKPRFKSKKTGHASYSTNNQHGSVRIEGNKVRLPKIGLVKLCLHRPLMENSTIKTVTISKTSSGKYYISILVEYENQILPIMPKKFLGLDFAMHGLYVASDEEDADYPHFLRKAEKRLAKAQRKLSKRQNGSHNRDKQRLRVAKLHEKIANQRRDFLHKKARYLVDHYDAIGIEDISVKAMAKYKKGGKFSFGKSVADNGWNMFTNMLEYKLAWQGKQLIKIDKWYPSSQLCHVCGYQNNETKDLSIREWDCPNCGSHHNRDKNAAINIREEARRISAA

SEQ ID NO: 1419 - protein, 412 aa, unknown
  TnpB Polypeptide
VEKSWFSTNLQAVQKPSLPPTFCPSFTSSLAEFTDSENTVTKSRKIRIYLSAKQRLLVRKWFGVSRYVFNKTVELLRDGFVKANWYAIKTGILNNLPEWCGEVPYQIKAVAIRDACTAVREAKKKYKKTGQIQQVKFRSRKDLVQSCFIPKSAISDKGIYYTKLDKLAYSQKLPDHVCDSRLMSNNGNYYLCIAHKVAKTPAENQGRVVALDPGVRTFVAFFSETSVGKIGYSDFSRIQRLCQHLDNLKSKISKANGGQKRRMRQAARRMVIKIQNLISELHHKTARFLVDNFDVILLPTFETAEMSKRGSRKIRSKTVRNLLNFAHYRFKEFLKHKAQEMGKIVLDVCEAYTSKTVSWTGELVNIGGSKKIKSKVDGLVMDRDINGARGIFLRALGETPWLRNQLALVSQC

SEQ ID NO: 1420 - protein, 396 aa, unknown
  TnpB Polypeptide
LIDEFCFRSKNLYNVANYIIRQEFIINHNYIKYREMDKILQQTKEYKALMSQSSQCLLQVLDRNWKSFFESIKDWSINPSKYLGKPNIPKYKKKEGRYTWFLKNNQAYIKDGYLNFKLRAFNGYKFKTSVQGRLISVRFVPRGSIYVLEIIYELDVSKNVPEIKNICSIDLGINNFVTMVNNIGLQPIIINGKGLKSINQHYNKQRAKLQSELQIRHKQRWSNKLNTITLKRGNKIKNIIHHTSHYIIDYCNKNKINTLIVGLNKTWKQNCKLNGSATQNFVFIPYDMLIKQLEYKCQDVGVRLIMTEESYTSGTSFLDNETPEKQNYNKSRRVHRGLFKSNNGQLINSDVNGAFQIMKKVFPNAYADGIKGCLTPVIINVVKTSRDIKNGKENFR

SEQ ID NO: 1421 - protein, 238 aa, unknown
  TnpB Polypeptide
VKIKKHSQPDVGWTLKGATVSCTRSGKYFISLLYEFEKDIQPVVPTKETSLGLDYSSHDFYVDSNGKVANYPQFYRQSEEKLAKEQRKLSRMKVGSRNHDEQLHKVQLLHEHIANQRKNFCHTVSAVIAKQYDAVFVEDINLRGLAGSLKLGKSTNDNGFGMFRTMLEYKLTSQGKTFAKIDKWYPSSKTCSVCGFVKEDLTLADRVWTCNACNTTHNRDHNAAINIRNVGLLGLYPA

SEQ ID NO: 1422 - protein, 260 aa, unknown
  TnpB Polypeptide
MQKGIKFRIYPNREQKNFIHQTLGCCRFIYNRGLAMRKEGYENGEKIGYSQTSAMLTELKKQEEFAFLKAADSIALQQSLRDLDRGFVNFFEKRASYPTFKSKHNRFQSYRTVNQKDNIRIVGRYIKLPKLGFVKIRQSMEVEKINHVIIEHTPAGKYFAVLNVDFEPEPRLNAGGTIGIDVGIKAFYSDSNGNTVSNPRYLERSMRKLIREQRRLSRKQKDSHNREKQRIRVARVYEKVTNQRNDFLQKQSTMLVRENQ

SEQ ID NO: 1423 - protein, 293 aa, Vibrio sp.
VNNNNCIRVEKDKITLPKIGPVPIVLHRKLVSSIKTATVQFRHGNWEVSLTQEVECDEAKKLLHSIAGYDINSKQTVVESNGVTVDNPKYLKAEKEKLTRLQRQVSRKKKGSARWKKAKSRLNQLHGSIARKRMDFAHKTARRIANASDIVVFEDLNVAGMQKFNGKMVADNIMGLISDLTKYKVELRGGVHHEIGRFERTTGVCSSCGQQHKLTLKERSFTCTSCGLLSDCDYSSAIAVERRDELDLMANGTVVRVANTLNTKQKLGVKTKVFALAKLPSGSEEIDKAAWPP

SEQ ID NO: 1424 - protein, 230 aa, Okeania sp.
VDVQNILTLRKNAWGGSAEFTKSAFKWKDGQIYLAKCAEPLPIRWSRQLPQDCVPSTITVKVDPCGRWSVSLRVNDTRNLKLKPVNKQIGIDLGITSLLTTSDGEKIANPKNFNKLHKKLRLAQKSLSRKTKGSNNYHKARLKVARIHAKIKDSRLDYTHKVTTQLIRENQTIVVEDLGVKNMVKNHKLARAISDANWSELLRQLEYKAQWYERELIKIDRYFPSSRALL

SEQ ID NO: 1425 - protein, 461 aa, Actinoplanes sp.
VKVIQAYRFALDLNPGQERDVLAHAGAARVVHNWALARVKAVMDQRVAERSYGISESLLTPSLSWSLAGLRKTWNHAKYEVAPWWPEVSKEAFNTGLDALARGLKNWADSRKGTRVGRSAGFPQFKSRRRTTPSVRFTTGAIRVEPDRMHVVLPRLGRLKLHESARKLARRLEAGTARIMSATVRRDGGRWHVAFTVEVERTGRVPARPGSVVGVDVGIKHLAVLSTGKLEPNPRHLAAAQQRMRVLGRALSRKTGPDRRTGQRASKRWKRAAAWLGRAHARVANLRRDGLHKLTTRLAATYGTVVVEDLKVSGMLANRRLARHIADAGFAEIRRQLTYKTGWNGGRLLVADRWYPSSKTCSACGTVKTKLALSERVYECEACGLVIDRDRNAALNLAALAADFDTAGSGPVAARGADQRTCIRGQVAGSVNPARHQSVRPGPSRRKAGLSIVCLPRRTER

SEQ ID NO: 1426 - protein, 360 aa, Actinoplanes sp.
MFTALKAGTWPADPFLARQMRRHWRRGHNRTTNQIIVRADQHNTRADDRGRLWLAVPGLQRRQLVKIPLNTTVAPTGTLRLILRGGKVEIHYQIDAATMPSSQRPCGTATLGVDKGYTEALTDSDGNHHGVNLGTLLTAESDRLKERNRHRAKLRSVHNSAALRGDHAKADRINRNNLGTVKRDRQAATHQARVRSEIFTAAHRVVDKAVVVVAEDLTKTFAGRKPLGRNINRRLAGWTKGVTAEALKNVSERRGSALVHVNAAYTSQACHQCGSLGKRSGDSLHCTMCRVVWQADVNAAINVLQRHGDPDITLHTPHHVVKQIVQERTDRRRSRLPLPDSSPPCKRRAESEPSECLTLL

SEQ ID NO: 1427 - protein, 367 aa, unknown
  TnpB Polypeptide
MPLHKAFKFRLYPNKEQEVLIAKSLGCNRFVFNHFLAERKWLWEEERQTLGFNQCCLNLTQLKKHLPWLKEVDSTSLQATLKDLDFAYQRFFKEKLGFPNFKSKKNPVQSYTSKNNGAAIRVIGNTVQLPKLGHVEFAKSREVVGQIIKATIRRNPAGKYFVAILVDTPIAHLPEVKQIVGIDLGVKDFAILSTGEKIANPKHYRQEELRLARLQKSLSRKKKGGSNRHKARNKVAILHEKIANRRNDFLQKLSTKVINENQIISLEDLQVGTMLKNYKLAKSIADVSWAKFRAMLEYKATWYGRTIVVIGKSFPSSQLCSCCGYRNRAVKDLNLRVWLCPSCQTEHDRDINASHNILAEGLRLLAV

SEQ ID NO: 1428 - protein, 338 aa, unknown
  TnpB Polypeptide
MVSEHTNAKQIYKYALSVVKSAKRNNGRKPVLKKLSARLDRYDTKIDLENQMVIVKLRDKEFRIKLLHSREYTRKFVGKKWYEVIISIDRQRRIWVCIPFKWIYEPHKPRRVLSLDINLKKIVIYNGKSVRRIDTRFTESLYLKHPAENIQKKHSYAWRRNKKWLKIIKALHRRSKNIVVDWSRKFAKYIVLKAKRTRSAIVLEDLDKLWFNASQKSSSLADMLSRFAYRKLQLAIITKAIEYNVPIVFVKPRNTSTTCPEYGAKLNYNHRLALCTRCGLIADRDTVGSMNIYFKSIQVLAPRLGSWSTRSMTDENQPKGGLLIDEPMTNYIHSYKFI

SEQ ID NO: 1429 - protein, 413 aa, unknown
  TnpB Polypeptide
MAIRNRLYPAPEQQPTLREHCAHARRVWNLAVEQQSWWWPGRGSAPSSAERYRQLTQARHAEPWLGAGSSSVQQQALRDFDRALAAFFDPASPVGRPGYRNSRGTQGFAIAASRARHVNRRWGEVYVPKCGWVRFRWTRPLPVKLGTARITCDRAGRWHVSFPAPQPSVVRQRNGAMAGVDRGVRTALVTSGGQHYRAPRISDRQAARYLALQRRLARQPKGSRRRERTCQAMALISARVADRRKDWAEKISTCLVRDNDVLVLEKLNVAGMTRKPASKPDPGQPGSFLPNQARAKARLSRGILASAWGLLGQRITDKGQASGVIVVFADPRFTSQQCHACGHTDAANRDSQAVFACVCCGHQDHADRNAALNILARGLLLTTGELVPAPAAGHAASCPHQPASAAAGTTWAA

SEQ ID NO: 1430 - protein, 611 aa, Streptomyces sp.
MVKRMLGGKGRELRPLRAVSAPFVVAPPSGCRIRTRLHVSPADVAVLRAVGTHLGALAGADLAARVQMGNVPAARNRRAQRKKALTAQSSSRWAGAITRTSEDQYQLDRRALNAHIGSLRQAISTIASRLAVAPGARVRQGRRLVRGYADDAERRAKQQRLQILEGELRRALRERESGRVRITRGGRRLLNSRHHLYDSATAPKPLSEADWRAQMEGWGEVWSARRMFLTADGEAGAPFGNYTISIDPTCGRIALVLPEPLREAHVNAPRGRYVLDATALFPHRGGQWADRIASGASVRYDITYDPERGRWYLDASWSTAAKGQTVPVPTLQALRQHPVLAVDVNADHLAAWILDSCGNPVSTPHTIPLELAGLPATTRDARLREAISHLLHLAQRQGCAALVIENLDFADARATGREKLGRGRRGKAFRRTVAGIPTAKLRDRLSRMAHHAGLSVIAVDPAYSSRWGAQHWLNSLKEQQTSSVSTTITGHHAAAVVVGRRGLGCTARRRNDGPRQTPATTASRRTEAGAVRPEDRTGTTAPEAPSHHIPDRTEQAAPGRTSRSTHVVRQTRARPPGKHPPPGPTTVRGPSIHDQLTLFGMPDTANLGQPT

SEQ ID NO: 1431 - protein, 352 aa, Methylobacterium sp.
MLRDFCGLYNACLQQRIEAHRRRGIGLRYGHQAAELKACRAADRDGLARWSFSALQQVLRRLDQTFTAFFKRGRGFPRYRASARYHAATFRVGDGLSVKKDRRIGVVGVPGGIKAVWHRDLPPGAKLATAILTRQQGKWYVVFSVEATFGEACGSGTVGIDLGLGSLIATSDGEMVEAPRHARRAQKAQRRRQRALVRCRRGGRRRLKAKARLAAGSAKMARQRRDRLHKLSRSLVSRYRGIAFEDLDLTGLKKGMLARSVHDAAWSLLVQLVRYMAGSGGAEVVLVDPRGTSQTCPECGTLKAKTLSTRVHACACGCVLDRDVAAAMVVHHRAFGLGPGHGLRCVSGRVAA

SEQ ID NO: 1432 - protein, 395 aa, Nostoc sp.
MTQKAFKYRFYPTPEQEVLLRRTMGCTRLVYNRALAARTQAWYEHQERVGYIESNSMLTNWKKQEDLQFLNDVSSVPLQQGLRHLQTAFSNFFAGRAKYPNFKKKHHGGNAEFTKAAFRFKDGQIFLAKSSQALAIRWSRQLPLGVEPSTITVKLSPSGRWTVSMLVDVEIERLPESSNQVGVDLGITSLVALSSGEKIANPRGFKAKKAKLRKAQIALSRKQKGSNNRQKARLKVAKVHAEISDARNDFLHKLTTRLVRENQLIAVEDLSVKNMVKNKKLALSISDASWGELVRQLEYKCDWYGRNFVKIDRWFPSSKRCGNCGHIVDKLDLFIREWNCPNCGTHHDRDINASKNILAAGLAVSVCGANIRPDRLESKRQLRKTSNGKKQKPKS

SEQ ID NO: 1433 - protein, 402 aa, unknown
  TnpB Polypeptide
VRILLKAFKTEIAPTEEQKTKIIRSIGVARFLYNQYIAYNRRLYKMYQRGMLDERQKHFVTAIDFDKYVNHKLKKELPWIDRCGSKARKKALVNAEQAFRRFFAGISHFPTFKKRANQDVKLYFPRNNRGDWKIWRHKLMVPTLKQVKLKEYGYLPVGSVAKSGTVSYTAGRFYVSVVVDIDEKSKHNKDLASCYAKQTEEIGIDLGVKDLAVVSDGRVFENINKSSKIKRLEKRLRREQRCLSRKYESRKKKGIETAAVSANVEKQKLKVQKLHQRITRIREDHENKTVHEVVKQKPRFITVENLNVRGMMKNRHLAKAVAAQRFNHLLSKLKHKAKIIGIEFREVDRFYPSSKTCHACGHVHRGLKLKDRVYICPECGYRMDRDYNASLNLRDAEEYRVV

SEQ ID NO: 1434 - protein, 426 aa, unknown
  TnpB Polypeptide
MIVRKGLRFRLYPTPQQAAYLPRISGCVRLVHNLALEQHSMFGRAGRSFRYEGQRAELKDLKAHADFLREVPHHCLQEALVDLQTGFERFFKGTAGYPRPRLKGRRDGFRFPDPKQFSIRPSDDEGFVLLHLPKLGKQKGDQGPLRLRLHRPIEGKVRSVTLNHEAGAWHASILCEVEVADPAPPRGEAVGVDRGVAVPIMVSDGTAPYVPVPTPRQRLRERRLHKALSRRKRGSNNRRRAVRTLARHKAKEARRRRDALHKATTHLAKNQSLVVIEDLRVMNMTASARGSTEAPGVNVAQKSGLNRAILSVGWGITAVMLGYKTTWYGSELRRVAPMRTSQECNRCRHVDPASRVSRDLFRCTACGNEEHADLNASKTVRNRGLLLPTPEDTRPGSACGALCARQGQEAGNESRKARSPAIHGGE

SEQ ID NO: 1435 - protein, 370 aa, Pseudoflavonifractor sp.
MEYSYKFRIYPNTTQTQLIQRTFGCCRFVWNHYLALRKEAYERDGKTMNYNACSGDMTQLKKVLPWLKEVDATALQSSLRDLDTAYQNFFRRVKQGQKPGYPRFKSKHDHRRRYKSKCIGTNIRVLDKTVQLPKLGLVKCRVSKAVKGRILSATVSQNPSGKYFVALCCTDVEIEPLPSTGAAVGLDMGLKAFAITSDGTEYPNHKYLTKNQKKLAKLQRQLSRKSKGSNRREKARIKVARLHERVANQRADMLHKLSTEFVRQYDVIALEDLAPSNMVKNHSLARSISDASWGEFRRQLEYKAAWYGKQVVTADRFFPSSQLCSACGAQWAGTKDLSVRKWTCPVCGVAHDRDINAAKNILKKGLRLLA

SEQ ID NO: 1436 - protein, 375 aa, unknown
  TnpB Polypeptide
MFKTYKYRIYPNQKQALAFEQHFGCVRFVFNWALALQKRYYAMFGKSLSRTKIQSQLVKKKKTAKFAWLNEVNSQSLLNALLNVYTAFTNFFKGRAKFPRFKSRKIPQRSYQCPQHCTVNFKQGIINLPKIKDIKTVFSREFVGKIKTVTISKTATGKYYASVLVENSDVVPTPTTIEPNLTLGIDLGICDLLTLSDSSKFDNPKYLTKASKRLKAQQKIFARKQKQSKNYQKQKLVVACIHEKVRNQRLDLHHKITHKLICENQATSYALEDLAVKNMVKNRKLAKAIHDVGWGQFVTLLTYKAKWYGKNILKVNRFFASSKICSHCHHQLDSLPLSIRNWTCPNCQTQHDRDTNASNNIRSQALADVAGLAIV

SEQ ID NO: 1437 - protein, 370 aa, Bacillus sp.
MAKHNKAYKFRLYPTEEQAYLMRKTFGCVRFVYNKMLAERKEMYEKYKDNKEERKKQKLPTPAKYKAEFEWLKEVDSLALANAQLNLQTAYKNFFSSQNDFPAFKSKKDRKSYTTNRVNGNIMLLNGHIKLPKLKMVRIKQHREIPQDHIIKSCTISMTPTGKYYVSILTEYEKEIVQKEVKTVVGLDFAMVELYVSSEDEKANYPRFYRQMLDQLAKAQRVLARRVKGSQRWNKQRIRVAKWHEKVANLRKNFLHHKSKELATNFDVVAIEDLNMKGMSQALNFGKSVADNGWGMFTTFLAYKLQEQGKQLVKIDKWFPSTKTCSNCGNIKDIPMSERTYECSCGLKIGRDHNSAINIKNEAIRLLALA

SEQ ID NO: 1438 - protein, 255 aa, Methanococcoides sp.
VDFETDTIKLPKLKQPIKAKLHRKFEGKLKTATVSITPTGKYYISILVDDGKELPEKEMFDEKSTLGIDVGLTHFAILSNGEKIDNPKHLRNSMDRMKILQKRTSKKQKGSKNRNKARLAVSTLHEKIRNQRTDFLHKTSYKLISENQAIAVETLNISGMLKNHSLAQAIGDVSWSEFFRQLEYKAERYGKTLLKIGQFEPSSKLCNVCGFHNGKMTLKDRYWSCPECNTEHDRDINAAINIKKFALQNQNLLNI

SEQ ID NO: 1439 - protein, 476 aa, unknown
  TnpB Polypeptide
VLQAYRFALDPTAGQARALASHCGAARKAFNEGLARVRRCLDQRAAERSYGVSEDQLTEVPWTLPALRRWWNANKDEIAPWWPENSKEAYNSGLDALSRGLKQYSGSRAGTRRGPRVGFPRFKSRRQSRVSCRFTTGAIRVQDGTHVVLPRIGRVKTHEPTAALLDRIRGGTARILSATVSFDGRRWQCAFTVEVQRHLGRPAHVGLDRAHPVIGVDLGVRDMLVAAAADGTVLARVPAPKPLAAAQARLRVLQRKAARQAGPDRRTGQRASRRWRRTQGRIGRVHARAAHLRRDTVHKATTALAQRHLVIVVEDLNITGMLRRKPGAGRGGRGLNRAIADAAPAELRRQLAYKSSWYGSRLVVAGRWYPSSKTCSACGAVKAKLALAERSWTCDGCGSRHDRDANAAINLARLSEHAPGVKGRPAGSGPVAGRRAIRKTSPPSGAMAGGEEASTPHSGLPAADQTGTAPPQGEAA

SEQ ID NO: 1440 - protein, 398 aa, Nonomuraea sp.
MAVAVRRSLKFLLRPTSKQAAALAACLEDHRTLYNAALEHRRTAYAKAAVSVRYGEQSAELKHIRADDAGGQGRWSFSSQQATLRRLDKAFRAFFDRVKAGRTPGFPRFKGRGWFDSVEWPKDGDGCRWDSQPEHPTATYVRLQGIGHVRVHQHRPVKGRVKTISVKREGSRWYVVLSCDDVPVEPLSATGAVAGIDLGVAWLVTTSDGEHVANPRHLAVTAERLATAQRDLARKKRGSDRRRKAVARVAALHAKVRRQRLDHAHKAALALVHAYDVIVHEELRIASMTRSASGTIEAPGRNVSAKAGLNRSILDAGWGVFLTVLAHKAESAGRELIAVNPANTSRTCARCGHGAKENRLTQAEFACTACGHAAHADVNAAVNILRAGLALRQAAEAA

SEQ ID NO: 1441 - protein, 307 aa, Ruminococcaceae sp.
MVEYGKNPKKFKGHPHVPGYLNPKKGRGSLVITSQNFKVDEDGNVTMPKFLSGIHIRARHRNIRQIRIKMFKDSILISLMYEKEEKQISGTKVMGIDLGVNNLIAAAWDSEDRPVLINGKPIKSINQYYNKARAHMQKEAKVYNGKNRTRRIDKLTAKRNRKIKDYMHKASRKLVNLAVSSNVGLIVIGANQGWKQKVHMGNVTNQNFVSIPYKTLINMIEYKARLEGIEVKTVRESYTSGTSYLDGEKPAREYYDKARRVKRGLFKSNSGIFINADVNAAYQMMKLGDTRAIPIKTGEQIIKIKAA

SEQ ID NO: 1442 - protein, 391 aa, unknown
  TnpB Polypeptide
MKVIKAFRYRAYPDDEQIIMFNKTCGCCRLVWNKSLAEWDNDYQANGKSTIGKFDMVNNLTEWKKSEELAFLNETYSSALVITITNAYKARKAFFDGLKQHRKVGYPKFKSKKYNTQGFTMQVINNNCRFANKNHIRIPKIGNVRVKNHIYAPGNWKEVSFKRTASSKYFITVMSEVEIHPKEVNENQVGIDLGMKNFLITSNGDVFDNLSPLKNELNRLGREQRKLSRKQKFSHNWEKQRLKVARLQEHIANVRRYNLHKLSTYLVNTNGYIFAENLDIRNMQQEKLVSNNVTRSKNRSISDAGWHSFRQMLKYKAEWYGRTYLEVNTYYPSSQICSICGSKNSDIKNLSVREWTCPECGAHHNRDENAAINILREGLRLLNQAECRCAA

SEQ ID NO: 1443 - protein, 404 aa, unknown
  TnpB Polypeptide
MQLVEQHIIRRTNPRWQTIDAASFAAKNIYNAANYRLRQAYIQEGRFISYGELDKGFKQKDLLADQHLPAKVVQQVLRQLNNDWQSYFAALAVWKAQPALFTGRPRLPKYKHKTAGRNLLVYPENAYFKHSLKQGFIRLSQLDFTIHTRQLHIDCVRIVPHKTHYTIEVVYTKTPETDMALDPTLVAAGDLGVDTLLALTSNKPGFRPLLVNGRPLKAVNQGYNQQRAELQSRLPPGQFTSRQLDALTEHRNRRIKTELHRCSKLVIRALLDNHIGTLILGKNDGWKQQVNLGTRTNQNFVNIPHAQLINLLTYKATLVGIHVIVADESYTSKCSFLDLEPIGKQAHYLGRRIKRGLFRASAGQLIQADVNASYNILRKVLPNAFADGIGAAVVRPVRVYPRAN

SEQ ID NO: 1444 - protein, 405 aa, Massilia sp.
MQRLQAFKFELMPNGAQVRDMRSFGGACRFVYNKALALQKENHDAGHRFIGYVAMARRLTDWRNGPETPWLKEAPCHPLQHALKDLDRAYKNFFAKRAGFPRFKRKGNGDSFHYPDTKQIKLDEANLRIFLPKLGWLRYRKSRDVLGDVRNVTVSWSGGKWFVSIQTQRELEQPLRTATTAIGIDVGIARFATMSDETCIEPLNSFTKHQQRLARYQRRMSRKVKFSNNWKKAKARVQKIHASIANARKDFLHKATTTISKNHALVCIEDLQVRNMSSSARGTNKQPGKRVRQKCGLNRGILDQGWGEFRRQLQYKMAWSGGMLVAVLPHHTSQRCPTCGHVSKENRQTQAVFRCVECGYENHADAVGAINILERGCRLLACGEWAQSGLSVKQEPAEATAQFSA

SEQ ID NO: 1445 - protein, 366 aa, Massilia sp.
MSAKQNKPATHTTRVLRLRLKDKHATALQAMARDVNFVWNYVNDLSFKVWQRERRFLSAYDIDKYTAGATKEGLNLPATTVQAISKELVTRRIQHKKVKLRWRVSRGSRRSLGWIPFKASALRYRNGQLLFSCLDKPLSLWDSYGLSQYKLGAGCISEDAHGRWYINITVRVEKAQRSEATSAIGMDLGLKDFAATSSGDKVEAERFYRGQEAALAIAQRARKKARTRAIHAKIANRRKDFLHKFSTTLVAGHGAIFVGNVNAAGLARTRMAKSVLDAGWSTFRTMLQYKCDDAGVWFDEVEEAYSTQTCSACLARSGPKGLKGLGIREWSCLECGAAHDRDVNAAKIILARGLARLAGGISSLSA

SEQ ID NO: 1446 - protein, 379 aa, unknown
  TnpB Polypeptide
MANRAIKYRIYPTTEQKIMFAKTFGCCRKVYNLMLTDKVEGYKATGKFPTVTPAKYKKDYPYLKEVDSLALANKQLDLQAAFHNAFSKTRKKKNGFPKFKSKKHSRKSYTTNNQNGTVAIIDNRYIKLPKVGKIKAVIHRIPDSRWIIKSATVFQESDGKFYTSVLFEFELVENDYIADKTNAIGLDYASDGLYVDNNGIVGSNHKYYRESHGKLAKEQRKLSRKAGSKKNKKKSNNYLKQLRKVNKVHRHIANQRMDHLHKISTKIANQYDVVCVETLNMRSMANHGFGNGKATLDNGYGMFLSMLEYKLSDRNKYLVKVDKWFPSSQRCHCCGKIHPEMKSLQTRTIKCDCGLTMSRDQNAAINILHEGLRLLADTA

SEQ ID NO: 1447 - protein, 417 aa, Chloracidobacterium sp.
MFRPVESINSQPALTKGSLRKADHTMANSKDTTIKTFEYKMRMNEKFKEVCERELEHSRQIYNAALAERIDCYKTTGKGLNFIEQSRHLTEARTLPDVKSHLRTIQSDALERVEAAYQAFFRRLKEGVEKPGFPRFKGIDRYHTFSLKLEAVRACPIKGDKITIPGIGSCRVRLSRPFEGKAKQIRITRRADGWYVLLVSEIPKPEPLPATGESAGIDVGIKSFAVLSTGEEIENPRCIGKAEKELKKQQRRLARKIRGSKNRGKSRSKVALAHLKVSRTRKDFHHKASTYIVRRFDAIAVEDLNIKGLLKNPKLAKAIADVAWSAFFTMIEVKAENAGRRFEKVPARFTSQDCSQCGHRQKMPLAVRVYQCPSCGLVIDRDHNAAINISSRAGLARIYACGDLSEVAEAGTAQQAI

SEQ ID NO: 1448 - protein, 222 aa, unknown
  TnpB Polypeptide
MRASGMRPSPSNVPPKAFPRKTENRRTVIVRSAWIWASGLATLSDGTTFPNPRNYVRMQRKLRHAQQALSRRDRGMSHGCGSKRYNRALERVRRIHARIAAQRADNISKLTTWLADNYSDISIEDLNVQGMSHNRRLAKHVLDADFHEFRRQLEYKTARAGTRLHVIDRWYPSSKTCSNCGTVKAKLSLSERVYHCEECGLVIDRDVNAAINIQSPGVPRRR

SEQ ID NO: 1449 - protein, 281 aa, unknown
  TnpB Polypeptide
VSRKGLKKGIVQPSGVPIEIQTRHTNVNQVRIVPRNGHYVVEVVYTQETHQADVDATLVASLDLGINNLVALTSNKVGFTPRLVNGRPFKCVNQFYNKRKSELQAAIDPDTRFTRRMERMTTKRTRRIDHYLHTASRRIIDLLVEQRIGTLIIGKNPLWKQEVTMGRRNNQTFVNIPHARFISMLTYKAELVGIQVIVGEESYTSKASFLDLDPISTYGKVKQEPVFSGRRVKRGLYKSKSGKKLNADVNGSYNILRKVAPNAIRGKGVEDAVVHPVRLHV

SEQ ID NO: 1450 - protein, 365 aa, unknown
  TnpB Polypeptide
MQLTLQIKLLPDELQAKILESTLREVNRVCDSISRVAWEKKTFNQVKLHHLVYHPTKKSTQLSAQVIVRAVAKVADAYKLDKKALRRFKPFGAIAYDSRILSYNIKTRTVSIWAINGRIKGLPFVCHNEKFLPYIKGEADLVTKKGKWYLFQTVEVPEEKVRDVEDFIGVDFGLINIATLSTGERLSGKKLELYRTKRQRVRSQLQSKDTRNAKRVLKRLSGKEKRTASIVNHTLAKRIVKMAKEQNKGIALEDLKGIRKSANNKSKAFRSRVGRWNFSDLRAKIEYKARLSGVPVVLVPPAYTSQTCNSCKHIGSRNGESFKCQCGNSQHADCNAARNIRLLARSVNRATESQAMSCSVFRHCA

SEQ ID NO: 1451 - protein, 365 aa, unknown
  TnpB Polypeptide
MENQTLTLKMAVPNKCYPRLNEVLGYAKVAIVNMLQDRTKSSSKYYTINHSLPCNIVKSLLQKYQRNKKCKQVSNPTLPICSDKEKQVRYKDGNLYVASLFGKEGIPVVFPHLTKYIQSVEFFKKRVKGKNGKRWFVAISYKVENNPTPIISSFIGVDRNEKGNVATIANIKTGQVIKIGPSARDIKQNYRNRRAKIAKKGKTRLLKKLSKKQLNRTKDINHKVSRQIVDYAKKHRCAIVMEDLSGIKKPNNKIKHKVEKSQWSYTQLDTLIKYKASLLGIPIYYINPRNTSKMCSRCGTINTPNGKSYKCLTCGHFDHRDANAAFNIAKVFLKSKPGILRGVRCGLIDNPLTRKEHMEETNNVR

SEQ ID NO: 1452 - protein, 442 aa, unknown
  TnpB Polypeptide
VTQPPDVTRVQVRQAYKYALDPTPEQANALRSHIGGTRFVYNTLLGLVKDNWDENRAKKAAGIEVTKVDYLGTGHLDLQALWYEQRDQLAPWRAENGSSTYNYACLNLSKAFTNHRQGRAKFPVFKPKRPGGSVSFLTSAVRLADSHHVRINRIGEVKTFESMRKLHRRLERGTGRIVSSTVSLSNGKYFISFNVEVERTVPTARPPEKIIGVDVGLTTLYTGATPAGDHVLDVANPRYVVKAEKKLAHAQRIAARRQGPSKGVAPSKRWVKANARVQKIHTAPRNARKNLIHETTTMLAKHYDVIVVEDLNVAGMVKNHSLAKHISDASWGEFARQLEYKTKWYGSTLVKADRFYPFSKTCSQCGAVKTKLSLDERTYDCETCGLVLDRDVNAAINLARLGLPGASSGTGRGGEVRPTSRNIASSAHPDEASTDTRTLVRV

SEQ ID NO: 1453 - protein, 442 aa, unknown; identical to SEQ ID NO: 1452
  TnpB Polypeptide

SEQ ID NO: 1454 - protein, 450 aa, unknown
  TnpB Polypeptide
MRCRHRQTSMYSERFLKTGNHTLSCWHRTVKTRESLRHSQNSLDISKTPYTTVTFTNQVAKRSDIKGKMHITFPRCLVPLCVGKPEGSYVRTEVKPCYGGYMVYVTFQDAVKMPEAPTNPTRILGLDPGLDNFLTALTNFSATPFIIDGHWLKSINQNFNRRRAALMSELTKGMDSTKSVKNSARLNRISKKRACRIDNFFYKAAHYIVDFCLKNKVEVIVCGHNKDQKQEINLGSGNNQHFVSIPYTRFFWILTCVAAKAGIPVIETEESYTSKASLIDKDPIPVYKEGDRLEYHFSGKRISRGQYESKEGTILNADVNGAGNIIRKVYPNAFDGVTDFSYTNKTVIRVTREALCHAKHKKKHARPQRKRGMNQWLHHRRQEQKLVYFALFKVSKCERQDQIYRRISLGQYQQSSYIPRSCILLLSVPLVARFSEGEIHNCYHGTFPHK

SEQ ID NO: 1455 - protein, 386 aa, unknown
  TnpB Polypeptide
VLKAFKYRIYPTGEQSVLLAKSFGCARWFYNYALNLTSVTYKETGKGLSRNEMIKLLPSLKKEYEWLSEAPSQVLQQAALNLSNAFLNFFEGRAKYPNFKKKQNRQSIRFPQGCKLKDDALKLPKIGDVYCKISRQPEGHLKSVTVSVNPSGEYFAACLYDDGKDLPEKSTEGKAIGIDVGLTHYAITSDGTKHGNPKFYRKYEKRLAKRQKQLSRKVKRSNNRNKARVKVAKVHAKITRCREDFLHKLSRKLVDENQVICVENLAVKNMVRNHSLAKSISDAGWGQFCTMLKYKSEWEGKIYVEVDRFFPSSKTCNNCLNRVDSLSLDIRNWQCPRCGENHDRDINAARNIRDEGLRILAVGHTASACGQRVRPSKGTAFRGNVG

SEQ ID NO: 1456 - protein, 449 aa, unknown
  TnpB Polypeptide
MRIGYLLGFFFCMGIQARGMKDKKIARTFRLSETALKLLLKMAERGGTTKTAILEALIRQAAKKPDTKWMFKAFVYRLYPSKSQRGRLEAVRETCRHFYNACRRERKEAYEERGETISKTVQLRKVKVEKATSPYALDIHSHILQNVVADLDKAFEAFFRRVKAGENPGYPRFKVRNRFAGFGFKEYGNGFKVDGRRLYLYGIGRIAVRWHRKLAGAIKTARVFCRAGKWFVSFACDVEKPDPLPKTGESIGIDLGLMRLATFSNGEKKENPRWYRTILQELCVLQRKIARCMPGGRNCRRLILRLQRLMVHVANARKDFLNKFVHELIERFDRIVLEDLRVAAMVPGRFAMSILDAGWFYLVSHLAHKAESAGREVVKVDPAYTSKTCSGCGVRFEHLSLWDRWVECDCGVSLDRDHNAAIVVFQRGGNEPLGAKLANGRVCPEAARL

SEQ ID NO: 1457 - protein, 444 aa, unknown
  TnpB Polypeptide
VDILKYTTETRLYSKNNEDIVNYFNKVKNQYNYILRKVYYIIRNNPKLKTNLLNTKLQNEYSISRRTANSIIKTVQGRINSIRELKKTEIKQKQYKLEKISEKLEKLIPILLVLKLKAEKNNIKDLIKYRNFKIKVAFMKIRKDKLVNKIKSLNHQLETNKFKITFGTKKLFRQSLEEFLNKRDNQMVFIGSRHETGCNHNFKLKYVSKINQFIIRIRKDFKYKNKKGEERYVYGKCFFNSHKNLLKEILKSQNSPLTYRIIKRKNKYYLQCIFEIDNRNTILTRKDYGVIGIDFNKGFVAVSQTNKYGHLVKTDKIKYRFGNGNKTKNDLLLIINKLTELAINTGKDLAIEDLSFLKRKSKTMKGKSKKGRKYNKMLHSLAYRIFLNRTEQICNKKKIGLLKVNPAWTSWIARNKFCERMKLNIHNGAAFVIARRGMNIKDVV

SEQ ID NO: 1458 - protein, 407 aa, unknown
  TnpB Polypeptide
MMLTETHHINKGNSLYDTFDDLCFKAKNLYNAALYKFRQSYFDETTKTLGWMEINTLFSQTRQEDFLSLQSKVANGVIKMLGSNISSFFGLLKLKKEGKYNKKVKLPKYLHKTEGRFVLDFRSGTISKKRGKNGEIILCPRSYNIKILTKIKEKVKCVRVVPCRNYYKIEVIYEFKEALPKNEGCIGGIDPGSKNLLAIAFSDKEKRPLIISGKKIKSINCYFNKLIGEAQSKLRPKTYKSSRLDRLWTKRENKLSYEMHVISNFVTNLLDESGCCKVVIGDNKEQKHEIKLGRKNNRKFVQIPHQKLFQMIEYKCKKKGIEVIMREESYTSKASFIDNDFIPKFDPKNKKEYEFSGKRIKRGIYKTFNGKKINADINGAYNIMVKQFPEEFSDRSGRKYSPIIFKL

SEQ ID NO: 1459 - protein, 456 aa, unknown
  TnpB Polypeptide
MNEITRTERHIIKRNHILYSKFGEITFASKNLYNLSNYYMRQVFIICDKIKNNIPVNNEQTKFLEEINKKVNDYNKFKENNSKNKSKEIKKLNFFDADNKSKSIKYDFLNFLMKNTPEYKDLYAQISQQCLKLLEKNWKSFFSSIKDWKKNPAKYSGKPKLPKYLKKNGKNIVILTNQLVEYHDNELFFPPRIGNFKFKTRINGKFQQVRVLPRNNLFVIEIVYRKQVPEFKKNNGKYVGVDLGVNNLAALTNSENILPVLISGKKAKSINQYYNKKLSFYRKVVKQMNNKEWSNKMGKITLKRNSIMKDCFHKASKSIVDYALSCGANTVVIGYNQGWKTNVNMGKKVNQAFVGLPHKTLVEQIRYKCEEHGINVELPDERYTSGTSFLDNEKPVKELYDKKRRVRRGLFKSNAGKFINADINASLQIIKKVSPDAFNKGHGVEDCGFNPVKVVL

SEQ ID NO: 1460 - protein, 389 aa, unknown
  TnpB Polypeptide
MITKELFRFIPTGKITKSKDGDIIEHKLFIGTEKSPIGELKFKAHRPYGIPNTITVSRHNGEWHVSFNYAVANLSGNLEPMSEEKLIEYFSGLTAEELDATAVGGDRGVTIPMATSDGVNYDFTETEKKRLTKAKKQRKKLQKRLAKQQKESNRRKVTKDKIGKTYTKERNIRQDCAHKISHTIVESEAQVFVHEDLPVKNMTKRAKPKQDKNGKYIKNGAAAKSGLNGAILRSMWGMVVKFIRYKGLKKEKLTIKIPPHGTSQECSRCGHTHPDNRETQAEFICQDCGFTANADYNAALVIKKRGVKALLDGTIVVKQKKSVRVRKGSRPQIGQGLPESKRASMDLGSIMGGPCVSGQEATVRHTTSIPPSVLVSANREAPTSTVSCG

SEQ ID NO: 1461 - protein, 389 aa, unknown; identical to SEQ ID NO: 1460
  TnpB Polypeptide

SEQ ID NO: 1462 - protein, 380 aa, unknown
  TnpB Polypeptide
MKENRAFQYRIYPTKEQEALIERTFGCCRFVYNQILSLQSETYANGGKYVSWTNANNYCNQVLKVDYPFLKEVDKFALTNSIIGLDRAFRSFFDKQCGYPSYKSKKRSRKSYTTNYSHNNIVVMDKGIKLPKLKVVKAKVHRKAPSDWTLKGATISQNAAGEYYCSVLYEYEKETANRSLDVNRSIGLDYKSDGLYAASNGVVCGSPKFFREAQKTLAREQRKLSRKKKGSNNYLKQKQKVAKVYRHIANQRTDFLHKEALALAEEWDIVCVETLDMKEMSNRSFGNGKATMDNGYGEFLQILEYKLKDRGKVLVKVDRYYPSSQICSCCFTLNHSVKTENLSEWTCPACGATHNRDFNAAENIRREGVRIYLESQPNAA

SEQ ID NO: 1463 - protein, 182 aa, Natronorubrum sp.
VEFTEQFSNPVIVSEDMSGIRDEMQYGTYVNHRLHKLPFRKFETLVSYKATWREISTDTVDAYYNSQTCSCCGECGYRWERRFHCTNDEYDVVQDHADRIASVNIAWREKAKLDGNESDYRTHITQPQVRLVRLSRSGACKPSNLIPLVRGTGSAIAWLRELQKLGPPRPRLFTHRICSLQE

SEQ ID NO: 1464 - protein, 473 aa, Halorubrum sp.
MAATTEEKRTRTNIFTLAPREEWKKVCLIELLDSATALVNIVTYHRRQTHFDDNQTRSDVWNAITKTEIRNRFRPVLGRAITDKMLDKCDEQWNVFFEQLDNYHDGERDDKPGVPGYWKDDDKRILKACIRNDAYTVEWGKHSRIELALGSELKEKYGIPLNKRIRVPITGNPQYDGHGGRLELVYDRSTESFTAKQPVTFLHDTTRATDSSDEECVAAVDVGANNFVAVTTTNGHQRVFHARPLFDRFHHYTERIGELQSQLPEQTDSSRLVEKLYAKRTRHRNHAQDALVRHLTRLFSEWGVEKVFVGKLDDVRKKHWSATVNEKTDLFWAHGRFRRRMQTVIEGQCGISVEEKSEAGTSSHCPRCEEGAHVSRNGDVFQCGGCGFEGHSDVVGSENFLQSMVDGDVDFTGKRPMARPVDSGQNGPERGHQTVPRLEWDDHCWRQRGHATKEEPTNQSIRKGNLASESGPA

SEQ ID NO: 1465 - protein, 425 aa, unknown
  TnpB Polypeptide
MLNKYRHKVLKKDIKEKILNKIAYDNNFKILEINGYLGHIHLLTAKNKSRKEVNLSILKAYKYRIYPTKEQEIQLAKTFGCVRFVYNRILAMKIDLYKNEGKSLSKTECNNYCNRELKKEYLWLKEVDKFALTNSIYNLDTAYQKFFKEHTGFPRFKSKKNHNYSYTTNFTNNNIEADFENNKIKLPKLKWIKAKVHREFKGEVRSATISQVPSGKWFVSILADVENKQLEKTNKQISFDLGIKEFLIDSNLNHIDNPKTLYKYEKKLAKLQRKIAHKEKGSQNFIKQRIKIAILHEKITNIRKDFLNKLSCQITNEYDVIISEDLNIKNMVKNHNLAKSINDVSWGEFTRQLQYKSEWKGKVYHKVNPWFSSSQLCSGCGYKNKEVKKLFIREWVCGNCGTVHQRDENAAINILNQGLLELGFN

SEQ ID NO: 1466 - protein, 445 aa, unknown
  TnpB Polypeptide
MKMIRSDRLKIKTDPQQRHVLSDTVLLYRRYVRDLMVLINARWRVFQHADGNDVIKLTEELIHPTRFRPDIKHPHFHKNYYKFPSYLRRVAIMDAAGQVRSFHTRYNDWLDSGMKNMPPKLTVSTSTFPSLYKGQCIKFSADSNTAFIKVWWNRDWVWQAFRLSGKSRYLGKGKAMSPLLTVKGKQWSLSTPVKIDVPLKENSDFSGCVLAVDVGINIAATCAVVDKSGTVVRRVFLDRTDKDRTYHIMQRIRSKARKATRHGNRLDRHFCSSEHRRLRNLSNNQAHQISKKIVNLATKLQCDAIVLENLKHWRPKAGKRRSVMKMRFHTWFKSALSDRITSKAQEKGIRTLNVYARGTSSYAYDGSGKVNRDADNYANTRFSSGKRYNADLNAAYNIAARGILKLYYPLMHKQQWSLGRPNACPTTGNPLVLSSLWLLAQQKTG

SEQ ID NO: 1467 - protein, 615 aa, unknown
  TnpB Polypeptide
MEPTRLPVPQPSRLPAPELVLLPLSDLLPPGEQVVLHEPSGILIHVARCVDAQRDHPVLHVQQLTPSELTVFRPLVDNVPDFAPMRCCWPISATIESPSRSSSACGGAGMRPRKRAWPTACCVRCAMCCRGCGSKCRRWALMSSPCSTWATNCCRSPAAAVAGRARSRTSARRRSKPMAARTSKTTQRITRAVTHIRLVEANPGKLAALDALAEVYLALCQQYVTLFCTQEAPDKFRASCFRTPLAERWQRVAMQQAAGIAQSWRTNRAQAYRDYLDALQDYQQRQAQGTLKPDEQAPLWCEWDVPTLRQRVIQATVNVVVLEPSTDSTFDYWLRISTLEKRHPIRVPVKLATYHIQALAGKTINSSVTLQRRPDGWWLTLSYDEMIAVQTDEDAPVVGLDVGIANFLTSSTGKHYGTFSGKLAERHQRDREKRRRKAKLRACLAKKGVQKLPSTSSKSGQRLARHVRQEINRAVNQCFAEHPDARFAYEQLSIRSMKFKARAMNAYLHASNLAHLPKQIAWNAAKRGVRATWVKSAYSSQECSRCHFVDRANRPNQQTFRCQVCGLEAHADVNAATNLAGRVRDKEIACCTDQHEIKALLLQRHQQWKQQHGWS

SEQ ID NO: 1468 - protein, 392 aa, unknown
  TnpB Polypeptide
MRRSYVFRLRPTARQHVALAQCLDAHRELYNAALQERRDAWSHSKTRIYYGDQSAQLTEIREACPDQAVWSFSSQQATLRRLSKAFDGFFRRVKRGETPGYPRFKGKARFDSVEWPKDGDGARWLPNHNRVYLQGVGQVKVELHRPVVGRVKTIQTKRQGRRWMLVLSCDDVPVVPLPKTGRKAGIDVGIASFATTSDGEHIYNPRWGRAAEEKLAAAQQRLQRAQRGSKNRQRKRETVAARHRKIAHQRKDFHHKQARTLVERYDVLVVEDLKIANMLRRAKPVPDPDNPGQFLKNGARAKSGLNRSISDASWGGFVSKLRAKAEEAGRVWIEVDPWHTSDGCEKCGHAAPENRVTQADFVCQRCSHRAQADEHAARNILRAGLALRAPAA

SEQ ID NO: 1469 - protein, 547 aa, Acidithiobacillus sp.
MSSKYAGSRITKASKAPKAKQPTFVLELPLLVNPHEDRVLAVRFEAGRQLYNAVLGEALRRLDLMKQSRAWQTARKLPKGNPGSREQKARAAEFSLISKTIGFTDYDLQAYATRCKNACWIGDHLDAHTTQKIGTRAFKAAQRYQFRTGGRPRFKPKWKTLASMEAKSNAAGLRWRDDHLEWNGLKLKAIYDQKDPHGVQAFALQNPVKYCRLVRRTLNGKARWFVQLVIAGYPKWKNKNPIRQGKVAIDIGPSTIAAVSETDAFLEQFCANVPDLQKTIRRIQRAMDRSKRGSNPGNYHEDGTLKKPAPGQRLQWVFTNGYLRLRARLKEMHRRLAAYRRTEHGKLANRVVALGSTVMAEKLSYKAFQRRFGKSVRDRAPGEFVGHLRRKAASAGGGVIEFPTRTTKLSQSCQCGAVVKKPLCQRWHDCPCGIRAQRDLYSAYLGLHVREDAGLWILDTESARVGWCAAESLLEKAVSGVVQAANGRRLPASFGISAPRSGARDRAALSRNGAESGEDSGCCNHIASAIVARAGKTPELSTGTPRL

SEQ ID NO: 1470 - protein, 377 aa, unknown
  TnpB Polypeptide
MIKSFKIRIYPTKPQEEKLWQHIGSCRYIWNYMLDYQQRLYASGEKHLSAFSMINLLKPLKNDGGHGWLYDVSNRSLQLICQDLASAYDRFFRKVSGFPKFKSRKRSKPSYPVCETVWFSESCVAIQKVGKVKCKTDFDLPLGREHKFSNPRISNVNGKWMLSFGMVRENQAPVLTDKSMGIDLGVKDLAIAEFNGEQIVFHNINKSKRMRRLTKQARHLRRGISRKYEANRKGSSYVKTSNIARDEIKLRKLLARISNIRNNYIHQCTHALISRLPYVVVMENLNVQGMMKNRHLSKAIQEQCFHEFVRQMKYKCEWNGIGFVQVDRFYPSSKTCSCCGNIKHDLTLRDRLYKCDVCGVVIDRDYNAAINLSRYVA

SEQ ID NO: 1471 - protein, 239 aa, unknown
  TnpB Polypeptide
MLKTYKYRLFTTKKQTTKLVQTLEECRWLYNHFLEERKTSWEQEKKSFNYHSQAVSIVKLKQDRQTLSDVHSQVLQNVAIRIDLAFKAFFRRVKAGEKTGYPRFKSKGCYDSITFPQTGFEITDNGLNLSKIGTLKIKLHRQPEGTIKTCTIRRSATGKWYVSFSCITEAKPLPKSDKAVGIDVGLTSFVTFSDGGKIDNPHFFRKDEKDLAKVQRKLSKAEKGSPERKKRRKAVAKVC

SEQ ID NO: 1472 - protein, 553 aa, unknown
  TnpB Polypeptide
VHVDVGRRGHLRFLGRGRGAGVGTCHRLLPGSTCGPGSPRPLRVAVAAGQRHLAVGQIQDQTMTAHTPGDAAPIASPTALAWSRDSGRACTAGRLTATVIRAYTFALDPTPTQEERLRSHCGASRFALNHMLGLVKANLDQRAAERTYGLDAADLTPALGWSAYTLRKHWNGVKSEVAPWWGEVSKEAFASGCVDLAAALKNWADSRQGKRRGRPVGFPRFRSRRSTMSCTFTTGPIRVEQDRRHVTLPRLGRLHVHKTTAQLGRLIAQDRARITRATISYRRGRWQLSLLTHVEQADRPHRQPGTAVGVDVGVKDLLVAATPSAAEVLRIPVPARLRDLDRRKRQLQRRTRHRQGPRRGVAPSKRWLRAQRRIDRVDWRIAAVREDLLHQATTDLARRFETVVVEDLNVAGMMTRGGAHKRGLNRGIARSAMATTRRLLTYKTAWAGGRLHVVDRWYPSSKTCSACGATRAKLLLSERTYACPSCGCVIDRDLNAAINLSKQVTSGSGPVAGRGAEQKTRAPSGVRAAGREASTSQPHRASIEDRRLATVGS

SEQ ID NO: 1473 - protein, 422 aa, Microbispora sp.
VEVARQARAHVARLDLTAAQVAVLDGQAHTARALWNLLHEYCTFRQGRLASVKDCDAAIRRARREIDWVGRLPAQAAQAVLRTYRQAWANFFDPAHPAGRPGFKSRSRSRLAVDVPQGRDLNIARLNRRWGAVNLPKVGRVRFRWTRDLPGVTRGGPAGRITGARLVKDAFGWQIVFRTEAVVAAAPVVHRGEPVGIDRGVTVALALSDGTTSEHGEWLTSGEKERLRRLEKKSARQRRTRSPGRSISRRLARTYDRIARLRATAKRRAVDWQHQTTTELARTYGVVVVEDLPIMNMVRSATGTVERPGRNVRQKAGLNRAITGQAWGRTVTLLEYKTRDRGGLVVKVPAPGTSQTCHRCGHRDPAARNGIRYACVNSACGWAGHADTNAAINIRNAAGTAVSGRGDLGAARSAKRQPPHAA

SEQ ID NO: 1474 - protein, 308 aa, unknown
  TnpB Polypeptide
LEQTIHKPRRVLDKDGLGRLAKRYEAVRNAKLEELKLKYPYAGRDEEGRRQNVTDTREFRKFLRRLRERRRKEARVRQVVRVMTKSPAVIITEELGKNPQEEMIGVEEKKVKKRELRHRVKQTPFKKLIRAVEDKAAEAGSVVVYVSPYRNSKVCPIHFSLLKNGSGWHTLHCSCGHDVDRDHAAVLNMLWKITPEGAAKGVWWDLKDVKRRLEKGRGLVPRELAKRRNPLVTWPVVYTVWTSLRALKASSQWPAVLARGAPMTPAQGADEDGARAPPQGAPAPGEEVRPTSSLGWRCTAPWATSPWP

SEQ ID NO: 1475 - protein, 246 aa, unknown
  TnpB Polypeptide
MEKVRRAIAVEIESPPSELYAVEEQYRRIVEEVAAYVAERGTLKKEKYNELYRRFRKQYHLPSQLIQQAINQGVETGRSFLQRKKDGRVHKPRPEVGRVSIRFAKDSWSFKKAVGSAAPVGLALSLPGGRKEVWIKLHRRFWLYWWKVLRREAELASTLVLKRRRSRWYAVFVFDVVPKKETPTEVVAFDVNENSVAVARLSLLATVDRVASWNRQYINPAVYLIRTDSAALRRGTKPSETQSWRS

SEQ ID NO: 1476 - protein, 542 aa, unknown
  TnpB Polypeptide
LIIDSKFTKVFTSCDLTKKKYKEISRLAKELLEHKRLVSVEIADNLLFYTDLSKYNFITYLEHKYKDLNISSNFYKGIYKDIYTAYTNKFNKVKEKMSFKINKIENIERYKRNSKFGKKDGIKSINYSKKSTKLAKVLTYLVRYPNDNLINYLNGRINDVNIEDSKKNFFKSIIFYIEKYGYDRIIKLSILKRSNILDKYAKPIEFESLNFRGRTRTSSLISYNENKKSIKKAFVTLSWVTKGKPMIIPVSYSKEFYGNIEKYQKKSNDYEYILTFTRKGKININFTIDGTRELPENQGNKNNFVGVDVNVKNNLFTLSDETTYDYDGDLLNQICKELEEMDRVKGSFESKKYNNEKKYKCGKKRKRKISTLRNKLKHSTERLISNMCKDMLEKGFDHAIFEDLDNSFGKTFGKMNDINFNRITKELGLSSLKNIFERIARKYGIAFSKVHPEYTSKMCSQCKCIDDDNRKTQEEFECVSCGYKNNADVNAALNIRNRVVETVFLYLLKQDEHLKTYSPHKLKRGEIKKFFDSLFPVKKLSS

SEQ ID NO: 1477 - protein, 398 aa, Escherichia sp.
VKRLQAFKFQLRPGGQQECEMRRFAGACRFVFNRALALQNENHEAGNKYIPYGKMASWLVEWKNATETQWLKDSPSQPLQQSLKDLERAYKNFFQKRAAFPRFKKRGQNDAFRYPQGVKLDQENSRIFLPKLGWMRYRNSRQVTGVVKNVTVSQSCGKWYISIQTESEVSTPVHPSASMVGLDAGVAKLATLSDGTVFEPVNSFQKNQKKLARLQRQLSRRVKFSNNWQKQKRKIQRLHSRIANIRRDYLHKVTTTVSKNHAMIVIEDLKVSNMSKSAAGTLSQPGRNVRAKSGLNRSILDQGWYEMRRQLEYKQLWRGGQVLAVPPAYTSQRCACCGHTAKENRLSQSKFRCQACGYTANADVNGARNILAAGHAVLACGEMVQSGRSLKQEPPEMI

SEQ ID NO: 1478 - protein, 390 aa, unknown
  TnpB Polypeptide
VIETIKVRLRPSNKQLTKLFQYAGCSRFAYNWAITREQQNYEQGNKFLSDCELLREFTQLKKQENHKWLNNISNTVTKQAIKDACNSYKRFFKGQSNYPKFKSKKHSKLSFYQDGDRLKFTDTHVKVEKFATSGKRNKQKLNWIKLCEKGRIPTNCKYMNPRFTFDGLHWWLSVGVDVEGSAIIPTNEGIGMDLGLKDLAICSDGNTYKNINKTNKVKKLEIKKRRLQRSISRKYNMNKEGVRYKKTSNIIKREKELLKVIKRLTNIRRNHLHQTTSEIIKRKPSFICIEDLNVSGMMKNKHLSEAIQQQSFYEFRRQIEYKARWNNIPVIIADRFFPSSKLCSCCGKINKDLKLSDRIYQCDCGNLIDRDYQASLNLKQYGENVLKQNL

SEQ ID NO: 1479 - protein, 141 aa, Clostridioides sp.
LWRFIENPKYLKKSLNKLAKLQRELSRKTIGSLNRNKARLKAARLQEHIANQRNDFLQKLSTKLIKENDIICIEDLQVKNMIKNRKLSRSISDVSWSEFIRQLKYKANWHGRQIVKVGKFFASSQICNKCGYKNEEVKDLI

SEQ ID NO: 1480 - protein, 388 aa, Limosilactobacillus sp.
MVIEKRGEIMPQTRLPFMMGLKLVMYPNHHQERVAWKNLNASRFIYNQLLANSWVDSAIKRNKLDQQYPIPAEYWRYKTTKQGKGTLLKASQIRPTGLARIKGNPRYPWLDDSDLDSDMFTNTEINYKNAWKMFHKVHTVGIPKFKRKSRPVQSYSTSNHHSSSQVNAKGGLPSLYNGSIHFTADGQHLQLPKLGLVKVKPTRSLPTNAMIRIATVTIKHHPSGKWFVALLLKSDKPFNAQLPRANSEVGIDLTTDNFLTDNNGQTIKNPRYYRTIKKRLAKEQRILSRRYRRAKKEHRSLRNSKNYQKQKLIVARLHEKVRNQRINFLHQVSTALIKNHDLVVAEDLKSKNMLKNHALAMSISDVGWRTLLTLLEYKASSQVWTDFY

SEQ ID NO: 1481 - protein, 359 aa, Scytonema sp.
MGFKSKEQKELDKEKNKNTYVSTVIQHLKLSSLGYAVISDILEHANSLYNTLTFNLRQGFFVYNTLNFQSLTIDLQTDFKENYHYKMLHSQAAQSVAHKVAENFKSFKQLLDKHYSEGAKKPKLPGYRQKGGMFEVTYPSQSVNLSQEHGIIFATVSTGIMFKKQHKEDVMGSTVNERLKFRVPDDVDPQRLVELVITSKHRKIYLHWVCRKKNEIVATLEKSSVLGIDIGLNNFVTCIPNTGEEGFIINGRPLKAINQFYNKTISKLKKGKDVNFWSGSLARATQTRNNQVRDFIKKSARTIINKCLESGIGKIVFGWNEGIKNEIDNGRVNNQNLYTPQRPQRIRDKGFILCRDSIT

SEQ ID NO: 1482 - protein, 321 aa, unknown
  TnpB Polypeptide
  misc_feature (3)..(36): Xaa can be any naturally occurring amino acid
  misc_feature (281)..(314): Xaa can be any naturally occurring amino acid
MQXXXXXXXXXXXXXXXXXXXXXXXXXXXXXXXXXXFRSKNLYNFANYQIRQKFFEESEYISYYEMDKLLKQEGMDFDYRNMPTAQSAQQTLRLLDKNWKSFFAAIKDWSEHKEKYTGRPRLPNYLPKNGRYQLILTNCNCKLKENVIYFPKSFNGFTLNTKADNLQQVRILPRYNHIVIEVVYKVNVPEVKEDNGRYISIDIGLDNFATIGNNVGETPIILNGKGLKSINQYYNKKISYYRKIAKRMNNLDYTNRMNKLTMKRNNKINDFIHKASKLVIXXXXXXXXXXXXXXXXXXXXXXXXXXXXXXXXXXTLCFFEI

SEQ ID NO: 1483 - protein, 271 aa, unknown
  TnpB Polypeptide
  misc_feature (21)..(54): Xaa can be any naturally occurring amino acid
MFPRDIAVPAMFYLPGSNLTXXXXXXXXXXXXXXXXXXXXXXXXXXXXXXXXXXGKYYACFTVEVESVLLPKTGRTVGIDVGVSAFVATSDGLLVQSPQTYRKAEKSLKTLQREVFRRKKGSNRRRKSVQKLASVHEKIANQRKDIAHKTARYLVNNYDLIAHEDLQIKNMVKNHHLAKSIQDSGWGMFFDILAYKAEEAGKQVVKVNPHNTSQICSGCGHIVKKTLAVRIHKCPHCGLELDRDINAARNILATALSITGLDGAFGDSLAG

SEQ ID NO: 1484 - protein, 356 aa, unknown
  TnpB Polypeptide
  misc_feature (20)..(53): Xaa can be any naturally occurring amino acid
  misc_feature (304)..(337): Xaa can be any naturally occurring amino acid
LPYSFSISRRSSCAIASDPXXXXXXXXXXXXXXXXXXXXXXXXXXXXXXXXXXGYPRFKGRGWYDSFTYPQSGFSLSDNRKGNQKLRLSKIGKVKVRLHRAIKGKIKTCSIKRELDNWYVCFSCEVQPEPLLKTQKSVGIDVGIEKYAALSDGVLIENPRFLRQSEAKLKYEQRLLSRKKKGSNSRIKQREKLAKLHHKIKNQRNDFLHKESHKLVKNYDVIVLEDLRIKNMVKNHHLAKSISDAAWAKFTEYLSYKAESAGKKVVFVNPRNTSQSCSSCGEIVKKGLSVRTHICPYCGLILDXXXXXXXXXXXXXXXXXXXXXXXXXXXXXXXXXXFCCFSYFYRFSSIYSSINN

SEQ ID NO: 1485 - protein, 177 aa, unknown
  TnpB Polypeptide
  misc_feature (43)..(76): Xaa can be any naturally occurring amino acid
MISLCSICTCNFYRINHRQRIFIVSSILHFFIVKCSKCRIFYXXXXXXXXXXXXXXXXXXXXXXXXXXXXXXXXXXEDLSVKGMVKNHNLAKRISDASWSEFTRMLEYKALWHDKIIQKIDRFYPSSQLCSVCGYKNEDIKDLSIRRWICPQCNTKHNRDVNAAKNILNEGLRLLAN

SEQ ID NO: 1486 - protein, 174 aa, unknown
  TnpB Polypeptide
EVENNNKLTYKYEKKLAKLQRQLAKKQKGGNNFHKQRIKVARLHEKIANIRKDNINKISSRIVKENQFIFSEDLNISNMVKNHNLAKSIHDVSWYELTRQLQYKSEWNGRIYQKVDRFYASSQLCNVCNYKNEEVKNLSIREWTCPECNTKHDRDINASINILNQGLRDLKLVV

SEQ ID NO: 1487 - protein, 252 aa, unknown
  TnpB Polypeptide
YRPQLMQYAKGEADLVLVKEKFYLHQTIDIPDEEEEAAEDFLGVDMGLTNIVTLSDGTNISSDEVKDIRNRYNKVRASVQSKGTRNCHKLLKRLKGRERRFATIVNHRISKQIVAKAKNEHKGIAIEDLKNIRMGMNSKKRNKTFRRRSNSWSFYQLRSFLEYKCKLNGVQIIAIPPAYTSQTCHECGHIGIRHGKHFRCVHCGNVADADVNAALNIATWGYVNTHERWELLSCPIHDSYSTSKAHKSLVCG

SEQ ID NO: 1488 - protein, 220 aa, unknown
  TnpB Polypeptide
IAKVADSYKLDKKTKREFRPLGSIGYDSRIMTYKPNDIVSLWAIGGRIKIPFVCHNRNYLPYIKGEADLVYKKGKFYLFQTVDVPEEDVKDIEEFIGVDFGQTDIAVLSDGTNYNSEQLKKVRKKYSKVRASVQSKGTKGAKKLLKRLSGRERRFVSINNHTISKQIVTKAKEENKGIAIEDFGGFALQSKNPTKIAARCTVFAESDLIHKAQTGHQPPN

SEQ ID NO: 1489 - protein, 571 aa, unknown
  TnpB Polypeptide
  misc_feature (242)..(275): Xaa can be any naturally occurring amino acid
  misc_feature (518)..(551): Xaa can be any naturally occurring amino acid
MEKHPQSALRNNVIGTKNLAELADQYEVETFIFISTDKAVQPTSIMGATKRIGEMIIQEMNGKSYTNFAAVRFGNVLGSSGSVIPIFEKQIQKGGPVTVTDAQMTRYFMTIPEAVQLVIQAGAMAQGGEIFVLDMGEPVKILDLAADLIRLHGLEPDKDIKIEITGIRPGEKLYEELFTANEKMTTTYHDRILVSENGHQSINVLELVDKLIVYNAFLDSADAIDIIRKFLPQFRAEGSTSXXXXXXXXXXXXXXXXXXXXXXXXXXXXXXXXXXAEAKKDFPWLAEAPSHTLQQTLRDLERACKTHGTFKVRWRSKRKNAPTFRFPDPKQITVERISRRWGRVKLPKLGWTRFRWTRPLGGQLRNATVLKDGGRWYISFCVEDGLMESAPNGKPPVGVDRGVTVAVATSSGWMRDREFVTPGEAVRLKRLQQQLARQRKGSNRRAATRAKLTKLNARIRARRTDFLAWTANRLTRDHGLVVVEDLNIRNMTASAKGTLAEPGRNVAAKAGLNRAILXXXXXXXXXXXXXXXXXXXXXXXXXXXXXXXXXXSCLFEPHNGGKAYRSNDLSP

SEQ ID NO: 1490 - protein, 269 aa, unknown
  TnpB Polypeptide
  misc_feature (50)..(83): Xaa can be any naturally occurring amino acid
MMRPVSEKIKRRVAGILDLPSEVMLDHAIINLMGDTEAKITNHKGLVQYXXXXXXXXXXXXXXXXXXXXXXXXXXXXXXXXXXNNKIGIDLGIKDFAITSNGDKYENPKWLRKSEKRLRKLQKDISRKQKGSNNRNKARLKVAKLHEKIANQRNDFLHKVSTQLIRENQSIVVENLKVKNMMQNHKLAKAISEVSWAEFRRMLEYKADWYGRELIIAPSNYASSQLCSECGYKNSEIKDLGVREWICPECNTMHDRDINAAKNLLKLAV

SEQ ID NO: 1491 - protein, 263 aa, unknown
  TnpB Polypeptide
  misc_feature (224)..(257): Xaa can be any naturally occurring amino acid
LRKNAWEQEQHSISLYETNKILTQWKKERPELNRVHSQVLQNVQMRVDLAFKSFFRRVKAGGKPGYPRFKGKERYDSFTYPQSGFKLDGDRLHLSKIGDVKIILHRPIEGTIKTCTVRRSSTGKWYACFSVEYDPPPASQKEMVIGVDVGLESFATLSNGEKIENPRFFRTDEKALAKAQRKLSKAEKGTPERKKARKNVARIHERIAHRRLDFAHQTSRRMVXXXXXXXXXXXXXXXXXXXXXXXXXXXXXXXXXXRRNKWQ

SEQ ID NO: 1492 - protein, 433 aa, unknown
  TnpB Polypeptide
  misc_feature (109)..(142): Xaa can be any naturally occurring amino acid
  misc_feature (378)..(411): Xaa can be any naturally occurring amino acid
MANSPSSQWRCLVCNYVHTGAEPPAGCPVCGTGAGDFVAHDAPTTTAAAVPTVWRCLVCGYIHEGNTPPAACLICGAETDCFQAQEEKQDNTTAMPAVNVAIIGSGIAXXXXXXXXXXXXXXXXXXXXXXXXXXXXXXXXXXYTTNNQGGNIYVSDRHIKLPKIGLVRVKKHREFDGLIKSVTVSKVPSGKYYVSVLVKQEDIEKLPECSNTLGIDLGIKEFAITSDGEMIENPKFLRQSEDRLRKLQKDLSRTKKGSKNRNKCRIKVAKQHEKIANQRKDFLNKLSKRLINENQVIALETLKIKNMMKNHKLAKSVADVSWSEFVRQLEYKANWCGREILRIDTWYPSSQTCSSCGHVDGKKPLSVREWDCPVCENXXXXXXXXXXXXXXXXXXXXXXXXXXXXXXXXXXNNTVRTVIRPAPSSSGKSPAQL

SEQ ID NO: 1493 - protein, 311 aa, unknown
  TnpB Polypeptide
  misc_feature (252)..(285): Xaa can be any naturally occurring amino acid
LLDLDTAYSNFFKGRADFPKFKKKSNRGSFNIPQNVIVENNLLIIPKFKEGIKINLHRDLVGTIKQATVSFTPTGKYFVSILCDTKEETPTKAPITENTTIGIDLGIKNFAITSEGEIFENPKFLRKAQSKLKYVQRKYSKYKGKRTKKKLAKLHEKITNQRQDFLHKTSTKLIRENQTICLETLVVKNMVKNHNLAQAISDVGWSTFVSMLEYKADWYGKNILRIGQFAPSSKTCSCGVINKDLKLSDREXXXXXXXXXXXXXXXXXXXXXXXXXXXXXXXXXXHPTDIRTDAQDAFAWNGAGLSERLPD

SEQ ID NO: 1494 - protein, 250 aa, unknown
  TnpB Polypeptide
  misc_feature (13)..(46): Xaa can be any naturally occurring amino acid
LAIAEIYRAPKKXXXXXXXXXXXXXXXXXXXXXXXXXXXXXXXXXXGLDVGIADLAISSDGVKYGTFSAKWYTKQATKWQSKYAKRKHRATTAVRQWNHNHKTIKEDLEDYQNWQRARIAKARYQQKIANQRKDYLHKLTTDLVKHYDVIVIEDLKTKNLQKNHHLAKSIANASWYQFRAMLEYKCAWYGKQLIVVKPNYTSQICSNCGFNSGKKPLKIRKWTCPKCGMHHDRDINAAINILHKGLKAVG

SEQ ID NO: 1495 - protein, 311 aa, unknown
  TnpB Polypeptide
  misc_feature (244)..(277): Xaa can be any naturally occurring amino acid
MFKSNWHNKFLHSHTYQQLLKVLEQDWKSFFQARKDYKTNPHKYKGVPQPPKYKNLERRKNQIIFTNLAIRVKRNILMLSLSKKMQSMFRVESLNFALPESVQKHINMDALQQVKIIWDNSKKCWYLIIIYKVEEQSLTKNFHNIMAIDLGLDNLCAITFKDSKEQFLINGKPLKSKNSYYNKKIARLTSVAMKQTGSNKFKRTKQIIKLQRKRNNYVNNYLHKVSRIIINLALEHKCSTVVIXXXXXXXXXXXXXXXXXXXXXXXXXXXXXXXXXXPSTNLPEGLIRISVLSSNGKSSKHCQSTFCLMSE

SEQ ID NO: 1496 - protein, 458 aa, unknown
  TnpB Polypeptide
MQIGNRFRCYPTRAQEQTLLQWIGCQRYIYNAKVREDHYFRRFARKSLQHAGQHAPIDQQYSQFKTDITPWLSEVPSIVLRNGAVLWKQAYSRYFSKLGGRPVIHQRHGKQSVWLTSEVFKFVPVVDTGTGEIISHQLHLGIKKFPVGILAFKAHKEYGLPASLHISIHAGRWHVSFNYDDDIPEPTDKDSTAWLRQFDETELRNLTVGLDRGVTLPLAGSGGQQFGFSEVQKKRLLAQERHKKRWQRRQARRTKGSAGWVNAKRKVARYQRYGADVRRDVAHKTSHALASDPRYKLFVFEALQIKNMTTKAKPKQDEQGRWIKNGAAAKSGLNKAILASTWGQTKVYLQYKARRQGKLVIEVPPFYSSQECAACGYIHQDNRVSQTEFVCLSCGNTDHADHNAAKVIAMRGVQQLLSGKGVQKEKKRCRITRIKVGAEGSEPVAETQPTTGKTVVSR

SEQ ID NO: 1497 - protein, 444 aa, unknown
  TnpB Polypeptide
MSFYPTLLQSSNNLKSYSWFDIKKIENVNCKRTKCVKNITSEGYKTTIININPTDNQKNILKKWFDGHTEMYNVTNSYMKEKIRQYYKELNQDKVLTGIFSYDKKNKKWSFNFKAVRKFLDEQKRIIVKQYNMNVHTVDYAIKHCVDMYNASHALHNGNMKRFCLKNLTFNRRRLKLTLEKQSFNKNYTGFCVKTLGLMKSNISMECCYKQTELQYDTLKKTYKLSVSHKYDKQRKINRFDTKVGIDPGIRTFLTTYSENCSYQIGDKTNQIIDKYIKKKDLMNRIINMKKEERGKKNVCNLRKAKIKYQIKMENLIKDLHNRVARFLAIRYETIILGKLSIKSIVSKKNTHLPRIVKRRLLVLSHHKFRMKLDTMSKKFGTNLVLISECLTSRNCSGCGNTKQKDELGGSKVYRCSKCKLIIDRDINAAINIYSNKPMIDTTK

SEQ ID NO: 1498 - protein, 311 aa, Bacillus sp.
MILAKKVRLIPTPEQEKVLRNHAGAARFAYNYCKRMSDRYYKLFGKSVSQLALQKRFTKIKKRKRYEWLNDINAQVPKQASKDFDKARKHSFKKYKNGSHTSYKSKKDLIQGFYANYERLIIGKKVVHIQSVGEVKTSQQLPRNKKPSNPRVTFDGRHWWISVGFQEDFASQELTNESIGVDVGLKELFVASNGTKERNINKDAKVKKLLKRKKSAQRDMSRRFKKGVKIQSAGYEKAKTEHLRLSRKIMNIRNNHIHQATAKLVKTNEDCCGRLIYLKPVKKQKTIESIFISKIKLLLSMFIIQVREVWH

SEQ ID NO: 1499 - protein, 404 aa, Oscillatoria sp.
MYAIKLELKLNNKERTLMARHSGYARFCYNYALNLYQEVKSLPGGSSKKVAAIERIFTNHVKKMPEYQWTNTLSSRVYKMTFRHFSEALSRFFKGLGEFPKFKRKKDGDSFTVDAADWNHSVLLAANKSIKIPTLGKFRLKESIPFPCVAQTFTISRTADKWYVSFAIKAEKIPPMFHPVTEPVGIDLGVSTFATISDGNSYESPRPLTQAKTKLSKAQWRNRKKQLGNRKLGVRASKNAIIHYRRIAKIHAKTANVRRDFLQKTTTEISQKYAHIRIEDLNVSGMIANHKLAAAISDCGFYEFRRQLTYKTEMYGTKVELVDRWFPSSKTCSNCGHVQSMPLKERVFNCGGCNLLINRDLNAAINLSRCSEKVRLAQSEVTPVDKKESTPLVEAGSEHQICRR

SEQ ID NO: 1500 - protein, 343 aa, unknown
  TnpB Polypeptide
  misc_feature (267)..(329): Xaa can be any naturally occurring amino acid
MKNRAYKYRFYPTEEQKQSFAKTFGCVRFVYNWGLRLKTDAYYNESKRLYCNDLSAQLPVLKRQPETVWLNEVSSVTLQQSLRHLEQAFHNFFAGRAKYPNFHKKSGKQRATFASTAFKWKDRELTLAKMSEPLDIRWSRALVSEPSTVTVSKDAARRYFVSFAVEEEIPQAPENDKYVGVDLGLTDFVILSTGQKFGSPQFSCKEKKQLAKAQRSLSRKQKGSKNRAKAKVNVARIHAKVKDQRLDFLHKLSTRLIDENQVIAVEXXXXXXXXXXXXXXXXXXXXXXXXXXXXXXXXXXXXXXXXXXXXXXXXXXXXXXXXXXXXXXXWSIKLIGTAEHLSR

SEQ ID NO: 1501 - protein, 265 aa, Oscillatoriales sp.
MKARFRYRIYLNRPQRLMLAKTFGCARVVYNDAICLHQDLYQQGEKVNDTELQKRVITQAKSTIERGWLSEVGCDPLIQSLRDSCQALKNFFKSLKGERRGRKVGFPKFKKKHSTQSIRFTTNGFSVKPNSVYLAKIGCVRVKWSRELPSDPSSVTIIKDATNRYFASFVCEVDPVVLKAVNDGVGIDLGLTTFATLSTGEKVLSPKPLAKSLKRLRRAQKRFSRKSTPESKINEPISYTSYQPGLFARTKRWRKPCGAISFWKI

SEQ ID NO: 1502 - protein, 435 aa, unknown
  TnpB Polypeptide
MIDKNKEIRVRKLQVKRGSQAEKELDHNMFLSKNLYNTCLYIQRNNFFTKRDCQDPKLKSEMKSFLTFVDLIKMLQDSNQVDYRALPVVNAQQTCIQSCNDFISFFEKLKNGDKTARIPKYKDKVKGRNKLSYTKNGISTKELRNGYIKLTGINTKFKIPDGIDYKDIQRVDVVKKSSHIEVVIMYKVPKVELKEKNNRYMGADLGLDNLITVASNVKGINPIIFDGRPVKAINQFYNKYVSELQSKLTKKGKEKYTSNKIYSITKNRYNKIKDYFHKISTYLINQAVSNGITAIFIGLNKEWKQEIKLGKKNNQKFVEIPFDILIDMITYKAKDKGIDVITTEESYTSKCSFFDNEEMCHHDKYQGKRIKRGLFRTSDRKTINSDVNGALNIIRKVIPTFSCETAKLEVADVANPVRISFRNGNLFQASKRMSL

SEQ ID NO: 1503 - protein, 498 aa, unknown
  TnpB Polypeptide
MKKLKAKTKNIKQTKKRRKKKSHKYSFMITLKFAYKIIFGDKELLEKLRKQFSSLVHIFYNLYVDNPKITCHEANEHIKGYKNLDLMDSYLILCAYNKAYEIYKRHNVDNKGEPAGHKLVFGERKNLIKTSKHTLTKKEFRKLRMMPLYLEGEKQYHGNRRVRIKDKHTLEFSVKGKVVFVFKVFDKRCSILNQLKKKQDAKQIPITYTIGDDYISITYNQKLLTVPKNHNLLANRIMSMDLNPDYIGITIFDVDQDSHIRNILKAYVMEWSTITEVQKELNQPNNSEGNKYLTNKRKHEIQEIAKHISDLSVFYKCKYIAVEDLDFDSNCKGFRNSKWNRNLVFQSLFKHSVENGVTILRVNPAYTSIIGNIVCRHNIPDMCRSAYEIGYRAVKGLQNGNFDKDWVDTNEYLHSLDKVKDFIIKSLEECGNKDKEIKKVSKFTNYRQISIFINENNIQYRVSIEDCHDNETVYRFKNKKSLAKIRSYGVRHYKKKIA

SEQ ID NO: 1504 - protein, 408 aa, unknown
  TnpB Polypeptide
LTITLTYLARYGNNDILDYLLERFVSETNHEKELFYASIIDHIYKYGLSRLMSLAMSKRQRIIKKYSENPIVFSSLTFRGRSRLASDIVSYNKNFNSKIKAFINISWGNNDRKKLTIPVKYSKDFHKDMKRYTNGRDTTYTLCFDENNRIRIILSYEDERDIPDNKTNFIGIDVNSKHNLMQCSNGESIDYDRNLVETLSNELLKVDSLKSNKDYVIGKRKAHKIKHLTNELRSTIRYEISSLCKKLKSTNIDHAVLEDLNGFEDKCFCKDENGLNYNRRIKLLKLSSIKDEFEHIARKYGIAVSLVHSYYTSQQCLMCGCIDKNNRKTQEEFECIECGYKSNADLNASRNILKRVVSTVLRNKLLKNSKLGNGTYEPKLLNRHRVKEVLLSLRYNLSTIGEEAMNST

SEQ ID NO: 1505 - protein, 395 aa, Halophilic sp.
MYREVTTTVCIRLHSLTQRKEFLLSREYSEFQTAVQDGDADIDLYSATSQQADKVRSNKNPRSDTTQPVVLRNDCITIEHDEETFLSEWWFKVPVYDPNRGQGNSIWCPAIVPDKHESLMKDEYISDSELVHEDGNWYVHLVCTRSVAVSEEYDDVLAVDMGAKWIAVSTFLSDRDTAFHGKRVRDVREHYKQLRKSIGKAKVRQGAQVIQRLGDKESRTVEDALHKTANEIVARARKRNAVIVFGDMTGIRFDNDKRRYVNDKTHKMPFAKMANFLTYKAHLDGRECLPVEEYDTSVTCWRCGSQNTNREVQGRIKCHSCGLDDNADKNGASNIGQRAVGKTIQSPLSAAGAVVAQPKTQIRLKGPDDETESANSPEDVGLSFSEGSPRVHSWE

SEQ ID NO: 1506 - protein, 367 aa, unknown
  TnpB Polypeptide
LGWVFFSLRRCYTRRVQPVTLAYKLKLYPSRNKADTLALLAGLFRRAHTECTTLIEQSEQRRCPSTTGLGEFIGRAYRRASLDYQRTRKAGHTPGFLKAELIDSAEIQQPRQAKGFDCWIMMRGTTTSRGKNGGFYIPAKRHVAINRTLALPGAKLNESAEVFRKNGTWYARVSVTIPLAELQEPKGWLGCDVGVRAAVTRSDGHQGPDLRLILKRDKQRRADQQRAGLERSYTMSPQRQALAKEARNVVSVSQRSGRGVSLEDPARMIRYKQWAGRYFASRVQVLAAIYGVAVVLLNPSGTSLTCSRCGFGEKRQRHKEMFRCWQCGQTCNADFNASVNLCHGAYRVTAVSPGSLSLVPRGGGADE

SEQ ID NO: 1507 - protein, 385 aa, unknown
  TnpB Polypeptide
MWTVIDRKCYFAKNLYNEANYIIRQNFFKTGKTIKGSIIDKTLQKTENYVSLGSQASQKTIQLLDKNWKSYFKGIKDWSKKKGKGYFGKPNLPKYKDKKNGRCVLMLKNIQCRIENQNLIFSWKPLRDFGGIKTRATGRLMQVRFVPKGSCYYMEIVYEYEIPEANKIIKNIVGIDLGVTNLATIGNNIGVTPIVIKGGIVKSMNQYYNKKRSDISQQTNMVWNNRMRLLTDKHLRKLDTYMHTVSKQIIQYCVKNSIDTIVVGLTKGWKDGINLGHINNQNFVCIPHDKLIKQIQYKAENAGIKCFLTEENYTSGTSFLDNELPIEKNYNVRRRIKRGMFKSANGISINADLNAAYQIIKKVFPEAFDSIGNRGCDLHPVKLSV

SEQ ID NO: 1508 - protein, 419 aa, Halobacterium sp.
MTTTTTKTLEATLAPPTTHKKRKLCDLLDTYRAGLHEAFDAGCETMTATSDVVTPYDLPYQAKAALCNYVPQLHGTYDAQELDDDHPVRLTNQAAEFDHSPERDYEFTWWVPQPGRGTNFWIPLRINPAQEGLWHDLGDGEASAGQLRLQRHRTSWTLHVTVEYPVEEPDYDATDDDDVTPVGFDIGEAHLLAGCAYEQGTPTDPLLINRGRARHLRKAMFTMLCRLQERDAAQWRIDERFDHSQNALTDIIEKASREAVEYAQQFEKPLIVLEDLAHIRESLDYGEWMNRRLHAWAFARVQQRIRDKAREAGIPVRYVRPDYTSQTCHECGHIGYRNGDEFRCQNEECWVSEYHADINAAVNIADRHDPWGESLPLKPAGDDISRDGSACDSAATPTEQSQPRQMTLGEVGSEPPAGS

SEQ ID NO: 1509 - protein, 462 aa, unknown
  TnpB Polypeptide
MSKIGLIIRSKGLNRAKHAALKEQARRLGRIRGEVWQQYGSVNSVQLSSRGIRDQWLKEKRQFDVLANAWKETLRDAIDDIKANREAAKVLVRRAIKRHTKDEQEQKRLYRLLRYDEWTEDPYLRRRMRTCWRRGRNRTHDQIVVRSDHYTAFVRKGRAWILVPGLVRRSRIAIPLNTNVVPTKTLRLIVRSTEVEVHYSVDEVVTDHHGDRTLGVDKGYTEVLTDSDGDRHGTGLGGLLSRESDYLKVKYRRRSRIRAVWEKALRCGDDVKADRIARNNLGRKKLNRRSRRQRQLIRDVVFKAVHSVVDKAETIAVEDLTWSNKTKGKLPKNVNRRLAAWVKGCIAEALTSVSRRRSSTVVLVNAAYTSQVDPRTGLLTASRRGDHLYCHDGVVYAADEAAALNVLSRLSDDEIHLFMSARRVRQILTKRTQRHRSGLLDLDSKRGNVSALESELPLIDHI

SEQ ID NO: 1510 - protein, 445 aa, unknown
  TnpB Polypeptide
VPGPHLRGERILRVGRDVRPDAHRGRAAVNAFKGRGGHPKTKRCPVLQGGGGRSLPGRIEPNMETIRRYNYRAYPTRGQREALSRLFGACRYAWNWYLDQRKVAWWLHLPIPSYAELSRRFTEFKREPENKWLWMVSSGPMAQALRHAETAYSRAYAHKAGYPRYKSRHCGEQAATFTRSDRCHIRHERNSRWMFLRLPKIDGEIKLRWSRDLPSRPSSVTVMLHADGTYEASFVVKAEPKPAPKPRHNACGIDMGLESLASIVYSDGTREKVAPLRALRKAERKLRKLDKELGRRQRGSNNYSKTRATKARLYARIGAQRRDLAYRLAPGWRARTKPSPWRRCASRAHAHPDGQKRGRRRMVDVHRSRRRALRPMGPQGHPHRPVVPEQPGLLAMRTQGRPEAAQRARVECPNCGAFLDRDWNAALNILDAAGLAESLTPVEAM

SEQ ID NO: 1511 - protein, 233 aa, Streptomyces sp.
VEDPERPGTGLIALAKQSGPLRIRWSRPLPAGVRPVKLTVSRDRAGRFFVSVLVEERIEPLPPVFLRDGGAPKAVGLDLGLTALVTLDDGEKVDHPRLLKKYGVKLADLQRILHRKERGSRNRDKARQEIELLRQLRYKCAWYGRTLVIVDRFFPSTRRCSACGVTGPKLDLSVRGWSCDGCGAVHDRDVNAARNLREEGLRLYALVASALPAGRVMPLVIKASEMPDVVLTA

SEQ ID NO: 1512 - protein, 429 aa, unknown
  TnpB Polypeptide
MARITSEDKKNKIRAALLATKEKRKHQRPMVFELKIDYSHLNKSERNTLKMYFIEAKWIYNHILSMENPFIYDSKVKTVNVLNKDRKLEKRELKYLPAKNRQDIHKVLMNNIKGLSVKKNNNKKVGRLKFKSEYNSIELSQYGVTHKITGRNRIKINGIKKPIKVHGLEQISKDYEIANAKLIKKPSGYYVNLTCYLDIKPSHLNHSNNMKPSIGIDMGITTTITTSDGDKYDISIRESEHLKSLQCKLARQVKGSKNRYKTCIKIGREYEYITNQRKDKANKIASKLLRENQIVCMQDENIAGWHKGWFGKQVQNSALGTIKSKLSLSKQVIIIDRFFPSTKKCYRCGNSYDIKLNERTYICPICGLTEDRDMKSAKSILYEGLSSVKYISVPTEHSRDFKPVEIVPLPASGLMASMVNEAGSLRIHS

SEQ ID NO: 1513 - protein, 380 aa, unknown
  TnpB Polypeptide
MFSAFRYRLYPKPGQEMRLNRSLLSLCDLYNDLKVEEMRRYREEHKSTSLTAFRVLALEARKHDEQLQDIHSQVVQNTGDRIHRSFRNFFEKRARFPKWKRSHRYNSLTFPQTGFKISLRRGLHLSGIGYVRIFVHRPLLGRVKHLTIKREADDEWYAIFVTERETPAKRLIAEIPANRIRGADVGLSKFITFDNGTSTNYPYFLRRSEDKIKRLQRRFSRKQKGSRRRRELGRRLARLHLHVGRQREDFQNKLVKQIFKENDGLILEKLNVAGMLRSHSLAKSISDSSWNSFARKAVFKANCSASTRSSSTPGAPLSSVTTAWLGCRRTWQKENTSAPDAASRFRETRTLLSSSKGLASLEARPRIGARHPQSKGLCPP

SEQ ID NO: 1514 - protein, 539 aa, Streptomyces sp.
MGGVRVLAAPFMVTGLAGVAVRDRLKHLVSEDERVLRAVGEHQGALASRDLKTRCADGLEHGAGTWAARKRDLTRVSSSRIAGAITKTSNDQWALARRCQAAHIRSLEDGIRTLKYRLSLPIGAKGTKRAAGGYRSKGEWFRKSRRLKDLEARHAAAMKDWRAGRVRIVRGGKRLLNTRHHLADAGLTEERWRERWESERWFLTANGESGKRFGNETIRVTPTGQVSIKLPAALAHLANTKHGRYTLASTVAFAHRGVEWADRIETNRAVAYRIHLDTVRGRWYLTASWQRPLVQAVPWEAARAGGVIGVDTNADHFAAYRLDTHGNPVGEPHRFTYDLSGTTHHRDAQIRHALTRLLHWAKQTGATAIGIEDLDFSAEKTREKHGRRKRFRQLISGIPTGRLKARLVSMAAGQGLATIAVDPAYTSKWGGQHWQKPLTTPRRKMSRHDAAGIAIGRRALGHPIRRRTAPPPHDRRDLVGHRTAQAAPGAREREGTRPPATDHAPRGVPPHGTRKRQPSAPKTVRDALRSHQWAQDPLV

SEQ ID NO: 1515 - protein, 294 aa, Planktothrix sp.
MFQAYKFRIYPNTEQQIALAKSFGCCRWYWNYALNLCQETYKTTGKGLSRKVIQGLLPQLKKEYPWLTDTYSQCLQVVALNLSTSYKNFFEKRARLPRFKSKHGRQSISYPQNVKFKGDYLKLPGKVGLVYCLRHREFQGVIKTVTVSKNPDGKYYASILVDDGKETPNLSTNGKAIGIDLGLTHFAITSDGDKYSNPKHFAKHQRNLKRKQQKLSHKQKGSNSRQKARLKVAKVHAKISRCREDFLHKLSRKIVNENQVIAVENLAVKNMVRNHKLARAISDCGWGMFCTMLK

SEQ ID NO: 1516 - protein, 424 aa, Bacterium sp.
MKITRAYKVELDPNNEQRTALLRHCGAARFVYNWGLAHKIEAREKGEKVLNWQKLDGVLRSIIDEEFPWLRETSKWSRQVALANLDNAYKAFFDRCKKGKKGKATGFPKFKSRKSGIGGFGDFAYIVRSDSIKLSCIGRVRLKESNCIPLGGYGKNTDTIRFYGARITERAGRWFVSVHVEIEVPDAIAKTENIIGVDMGVKSLAVASNGLTFENPKALKCRERKLKRLSRQLSRKVKGSTNRKKAARRVAVLHAKVADVRRHTLHHVSHVLTRKASVLVIEDLNVQGMMKNHHLAQAIGDASFGELRRQLTYKSQWRGVELVVAPRFFPSSKTCFSCGAVNADLKLSHRVWSCECGARVDRDLNAALNLRNVAASRAETLNACGGESSGEPLAARETSPREAGSGLETCVSLSPASSENGSNL

SEQ ID NO: 1517 - protein, 434 aa, Moorea sp.
MMILEFKAYGKQKQYLAIDEAIRTVKFIRNSCLRYWMDNKGITKYDLNKYSAVLAKQFPFANELNSTARQASAERAWSSIARFFDNCKKKVPGKKGFPRFQKHCRSVEYKQSGWKLSSDKKWIIFSDKKGIGKLKLKGTWDLWRFDKKPIKRVRIVRRADVYYVQFCVSVDIDEKLKPTGNTIGLDVGLKDFYTDSDGNTEPNPRFYRTGEKRLKFYQRRASRKKKGKAVGHASRTANRKKAINKLGRTHLKISRQREEHAKRLARCVIRSNDLVAYVREACRRQDLRVRNLVKNHCIAKSISDAGWYQFRRWLEHFGEKFGRVTVAVNPAYTSQNCSNCGEVVKKSLSTRTHVCKCGCQLDRDHNAAINILDRALGTVGHIGTLVTDQNACREETSILPGSGLVEQVASLKQESPRLMTGECQDVRKHRDHKP

SEQ ID NO: 1518 - protein, 628 aa, unknown
  TnpB Polypeptide
MLRSQISGLVLVGKEVIPLEVVSERLLWLAQIVRSEARHRVVEVWMAQGVNEINESKASHAWVAFDEVYGRDSWPPEGIHASDRVRRIANEVAGRALRSAYRQISLIEAVLPTILPQAVFETLDSSLRTPLPWPSDTTGTERRDVIRMIRRFERENGCLPESANQVVSCPSFGDYFLCPLDAADNQQVKLDGLELGLLLPTREKPRKQDWAWHKLTLTLPKFGQERYGQGKIHRPSLRITPTKNYFLVPIEAAVPALIKSDKIFAVDWGCRRLSTGAIISLDPQNPTGRAISTGRPYFFNSRQLQSKLNRQRAQTEILGVKITQQDKLLAGLYNQELFERRTTLATEKRCVETRSNNAREQLAYAHAQWAVNIALAEGAGTIAEEDLADLQSTDRGHLQNGKINIQPRGLTQEKLNDLAKLNGLRLIKGNPRGTSSFCSRCGRPSVFWHAPDRNSGDSNWLVCLCGRSDDRDYAGAESIGAVALDPPQANPKRSRKHNPTPGPASRRQIRVQRDKHRIAQATPYSYHTHMFDTNTDNNPPKPQRRTNKHTKTQHLPLRSGVYRQTTPRRVGRGSVVAQKVEQAERLSLDPTAHREARVVNPTLALDGLSSGYWHAVKFSRPRVLALTA

SEQ ID NO: 1519 - protein, 628 aa, unknown; identical to SEQ ID NO: 1518
  TnpB Polypeptide

SEQ ID NO: 1520 - protein, 419 aa, Gloeocapsa sp.
MKSRYNYRVYPTSQQKTLLSQLFGCTRVVWNDALNYCQQTKANGETYPGFNHLSKKFLTQAKKNEERNWLKDVSSIPLQQSLKDLDTAFHNFFSSCKGTKKGPKLKSPGFKKRKSNQSARFTKSGFKLRQNKVYLAKIGDLKVVWSRALPSTPSSVTLIKDAADRYFLSFVVEINPQKLPENTESVGIDLGILDFATLSTGEKIKAPKPLKARLKRLRKLQRKLSKKQKGSKRRERARKRVAKLHAKIKDIRTDFLHKFSTRLIRENQTVVLEDLNTAGMVKNRKLSGAISDLGWRTFRNMLEAKAQMYGREFRVISRWEPTSQRCSNCGEIGGKKELSVREWTCLYCGAHHDRDINAAVNIKVAGGHWETLNGRGGKRKTKPNLAAPDEASTTLRTGSIEVVLKESPYLQVGEDVKSQ

SEQ ID NO: 1521 - protein, 379 aa, unknown
  TnpB Polypeptide
VVKVKRAYRYRFYPTPEQAELLCRTFGCVRYVYNRALAERSRAWTQDKKRVTFARSCRMLTQWKAEPERAWLREVSNVALQQGLQHLQAAFVNFRGRRAGYPQFKSKRKSRASATFTTSGFRYRDGKLWLAKMDAPLDIRWSRPLPEGAEPSTVTVSRDAAGRWFVPVLVEETIEPHPQTDAAVGIDAGITSLLALSTGEKIANPRHERRDRQRLAKAQRTLARKQKGSANREKARRKAARVHARIADRRADFLHKVTTRLVRENQALAVEDPAVRNMVKNRSPARAISDASWSEFRRMLEYKADWHGRTVIAVDRFYPSSKTCAACGAIAAKMPLSAREWECASCGAAHDRDVNAAKVILAAGLAVSACGDGVRPSRA

SEQ ID NO: 1522 - protein, 387 aa, unknown
  TnpB Polypeptide
MRKLLKSFKTEIHPTEEQKVRIHKTIGTCRFIYNFYLSHNKELYQNGEKFMSSSKFRVWLNHEYLPQHPEYLWIKEAYSKAVTQAVNHGQTAFKKFFDHESAFPKFKKKGRSDVKMYFVKNNPKDCRCERHRINIPSLGWVRIKEKGYIPTTKEGYTIKSGHVSMKAGRYYVSALIEIPDNKTADPSNEGIGIDLGLKDFAIVSNGKTYKNINKSARLKKLEKRLVREQRCLSRKYENLKKGESTQRANLQKQKRKVQKLHHKIDNIRTDYINKTIAEIVKTKPSYITIEDLNVSEMMKNKHLSRAVASQKFYEFRTKLQAKCREKGIELRVVDRWYPSSKTCHCCGAVKKDLKLSDRIFKCSCGYVEDRDFNAALNLRDVTTYEIA

SEQ ID NO: 1523 - protein, 397 aa, unknown
  TnpB Polypeptide
MKVVKIMIKTIRVMLLPNNKQRTKLFQYANTARFAYNWALGREQENYKNGGKFISDGDSRKKFTQLKKTDEYSWLNEISNNVTKQAIKDACNAYKRFFKGYSKFPKFKSRKHSTSSFYQDNVNVQFTDTHVKVEGFSSSKKKNKQKLNWIRLVEHGHIPADCKYTNPRIRYDGINWWITVGVEYEESTNLPLNDGIGIDLGIKDLAICSDNNTYQNINKTQKVKKLEKRKRRLQRSISRKYEKNKKGVSYCKTSNIIKSEKELLKLNHRLLNIRQNYLHQTTSEIVKREPSFICIEDLNVSGMMKNKHLSKAVQQQGFYEFRRQIEYKSKWNNISVIVAERFYPSSKLCSCCGNIKKDLKLSDRIYKCECGNVIDRDYQAALNLKRYGKNVLRQSVA

SEQ ID NO: 1524 - protein, 418 aa, unknown
  TnpB Polypeptide
MLLTHETTIVLNKNDANIVGHMCYAAYKLWNVCNYERTNYKNLGLEKYPDWYYQKSKHKDDLWFKSLPSQTAQEICKLLDKSWKSFYRLKESGGIENPGTPRYKKDKMPITYMQNGIQHENGSYNVRLSLPKKLKEYMAHTYDIRAAYLYLKNPVFSNMDIIKQIKIYPPANDGTSRILVIYEVKDVLPEEDNGHYLSIDLGLHNLMTCYDNVGKTFIIGREYLSLSYFYNKEIARVQSQWGRIQAVREMEDLKTSKHLQKLYRKKNDCIKDYIHKMTRYITNYCVKNDIHTVVIGDIKGIRKERNLGRKTNQKLHSLPYARIYMQLEYKLKMKGICPIRQEESYSSQCPPQSEEVSHIYAEKRNRKKRGIYIVDTVIYNADAVGAYNILRKYHAVSGKEIDMPVTGLSSTKTIKVAV

SEQ ID NO: 1525 - protein, 432 aa, Moorea sp.
MIVREAKLLNGSKEQYQAIDSAIRTAQFIRNKAVRLWRDEPSVNKARLSLLCKELAHDREYPWVKRLNSMARQASAERAWNSISSFYRRCKEGVKKKGYPQFKKHSRNGFADAARTVEYKTSGWKLSEDCLTINFTDGLKAGRFSLFCNHETREDLFRLKINRVRLVRRADGYYAQFCFDANRQETGNYTGNVIGIDLGLKYFYKDQNDNAATYPKYLRRAEKRIKKLQRQLSKKFVKRAKSQSNNYHKARIRLGKAHLKVQRQRKDWAVKLARCVVHSNDVVVYEDLKIQNMVKNHDLAKSISDASWYQFTQWLDYFGKVWDKTVIAVAPKYTSQDCSNCGHRVKKSLSTRTHQCPKCKTEICRDTNAALNVLKKGMNILGVELNSTQGHWETAGKPGTLEESSTTVDERKLESISCLDESRINSVKNPAL

SEQ ID NO: 1526 - protein, 397 aa, Gammaproteobacteria sp.
MFKATKVRLYPTAEQKAALAFQFGAVRWAYNYALDWRSKAWKENGEGVTRRMTLDKLVELKREKATAWLKEADSQTLQQSLMHLDTAFERFFNKQARYPKHKNKRGKQSISYPQRVKVVTSNSLYLPKVGNVKAVLRREITGKIKTVTVSRSLTGKYYASVLCDDGEPMPKAISDMDEESVIGVDMGLSHLLITSEGYKEGNPRFLEQAEANLRRKQRSLSRKVKGSANRNKARILVAKVHERVTNARNDFQHKLSKRLIDDNQAVCVETLKVKNMLKNRKLARHIADASWSELIRKLDYKAVWTGKHLVQVDQWFASSKKCSVCGTIAEAMPLDVRVWECKSCGHEHDRDINAARNIRQQGILKLKAAGLSVSACGGLHKTGVFPAAAWEAGSFTL

SEQ ID NO: 1527 - protein, 387 aa, unknown
  TnpB Polypeptide
MKAITKTCKVKLDISEERKQDILETFKQYNLALNFAVEQAWKPERKIINKSILHKLTYYPLREKTNLPANFICSARNKACDIIRGNIIKWYNHKKATKPIFKPFSAIQFDKRTLTIKNRYCTFSTVKGRVKANYFLGDYQKQILDDPNYEFRTATLTYKNGNFFLNMTIVKPALIKKPETVMGIDLGIKNIAVTSTGKFFKSGLLNDSRRQFREKRAKLQSKGTRSCKKVLQRLSGRETSFNNWVLHNISRQIVNEAINHDVQVIVFEKLTDIRESVKQWRKEERVKVNLWAFSKLQQYVQYKALEVGINTVFVEAEYTSQRCSKCGHMEAANRNGFNFVCKGCPYSLNADFNASKNIAIKVLSGKSPDWIGLPSKLALKTKHFAYV

SEQ ID NO: 1528 - protein, 375 aa, Clostridiales sp.
MIKSFKIRLEPNNIQKSKLFQSAGTARWAYNWTLAKQEQNYKNGGKFIKDGDLRKELTVLKQTQELKWFNNYSNNITKQAIKDACDAYCKFFKGLSKKPKFKSKKKSQPKFYQDTEKIKFKDGKVRLEKIGWVRLSEKDKIPENCKYTNPRVTFDGVHWYISVGIETEQQSVELTGASIGIDVGIKDLAVCSNIDTPYKNINKTKRIKKLEKKLRRLQRKVSNKYEKNKEGGSYVKTGNIIKLERNIKKLHKHLDNIRTDYRHKVTTEIVKTKPSQIVMESLNISGMIKNKHLSKAIQQQGLYEFSRLIQYNAERQGTKYVEADKWYPSSKTCSECGFVKTKLSLSEREFKCECCGAVLDRDKNASINLSRYKAS

SEQ ID NO: 1529 - protein, 689 aa, Natronorubrum sp.
MSDQPQRTNEHTAEPTSERYRQCLFEWLAAHAPLWNQITYRRRQEYFADDGDVWGAEYTDLYDEYAPVLGKAACQQVTRKNSEAWRSHFRLLGNYHNDSDSTVTEKPGPPGYWGNREDGYELHGLVRNDLYEFDWDEDRSTLEFGVGEALEEKYDFEYQERITLEVRGNPHWEGDDSRLELVYDEAAAKLRVKHPVRIRPDNIREQRLDAFTHTLDPENTMQSAAIDVGANNTLAIVTTTGETAVYHTRPEFKRFQVLSDLIAELQSTLPDGQYTSKRIQRAYNERGGKRDHSRDTAVKHAADWLLERNVDTVYVGDLTDILDTHWSAEVNEKTHAFWSHRQLIDRLELTLGDIGISVEQVSEAHSSSECPSVEARMRQEMVIRSGATTASWTRTVTPSERGICYKMRLGRWRGPPPWLLDAAGTYLPMGRTGSGMDTTGNPRFLGNSRVRLTKPASANPQVHSRGNLLAGLPTEESHDFSRVEDVKRDPNRRKGSRRDNRPSDDVRLHSVRRVHAGRRVNRHATPARCRGDRSGEDHDAGLDNRLVRILLADRADEEPVRPGARSGWLEQRHRRGRRREPGSGRHRNGLWWVDPCPRVVRQPRRVPRDPWPDQSRRRQSISLTAGHGRTNDTDGPRHRDVARRPRRLRRSGRPYRENGTQPAARVVYEPSPPGRVGRLADRRPPRWVR

SEQ ID NO: 1530 - protein, 235 aa, Natronorubrum sp.
VNNLAITSTGAFWAGDEFDHWRREYEKRRGSFQQCCTRWAHENIQSVGRKEESRFKLTLHRISNELVAETRENGCSVIAFEDLTDIRERTGTSWRHKWAFNRLCEYVEYKAEGHGIEIKQVDHENTLRRCSHCGFTHPDNRDNEDFKCGYENHTGYNAAKNIGLWYLHRHQNSKGSDWLENRIAIFERNQTRGDTGAPLGVRLNSGTLNVNGGYSPGSPEARTGVYTESHDSSRG

SEQ ID NO: 1531 - protein, 558 aa, Candidate divison MSBL1 archaeon
MSKQILSTLIKLPEEHQESFKFLEELTCRVANQILEKYWTEEHLIKIGEYVGKAWKYFDEEEAFNVIDIYLPSRFERCVLQKVGETLRSQTGKLKVFRRIEPFLSEGVVGESDKRRIKEKVCKSKEFINLVEVERLIEQTNNRYREHGRHPDSYFDLQERPRYGKGVLPYSADDGPEKGQMVRYSHDDTFHSAVKVPETVSPESRSDWEWVDVSSDAYDYFHCLAESGTLKAPEFLPKQKKTGAQMYFLDFSVKVEGLDRDQETGKILSVDLGIKKLATCVVLSENDEQLSKPRFIRSSEVEKMRRLYHERNDLNSKLGALRRKGMDHTDKFRHLQSEYKKVQSKLNHKREQLQHSATNQILALAIHHDVDTIVLENLKGLKSRKNRGIGSWSLSTWARGMLKDKLEYRANLAGIGLKLVPPWNTSRTCPRCGEKGKTVKAPDQREEKKSGGHFVCEGCGYQADRDYVGALNVGRMYFGNGNLKEAKLVAYTETGNTPGDRSLGVRAVPFKAKKREEPSRHPSQIVPSPGTLINGGDEPRLEGKPKGIVQHVVNTESY

SEQ ID NO: 1532 - protein, 410 aa, unknown
  TnpB Polypeptide
VKVRYRFRLYPTPEQAHVLARTFGAVRYVYNWGLHLRKDAYEAGGKIGYVLSDSMLTDLKDQPGQEWMSEISSVPMQQALRHLQTAYVNFFDGRSDYPSWKSKRGDQAAEYTRSAFTWHGPSRSLIVAKVGRLKVRWSRTFASTPSSVTIAKHADGRYFVTLVLDETIKPLPKTGRSVGIDLGISALATLSTGERVENPRHLDRRARQLAHAQRVLARRRKGSGRWRRQKRVVARLYSRVADARADFLHKATTDVVRRFDLICMEDLAVRNMVRNRHLARAMHDAGLGTFDLFVGYKSRWYGKEQRHIGQWFPSSKRCSVCGWLNESLTLADREWTCPICGTHHDRDQNAAKNIELEGLALSAAGHAVVARGGSVRRTSASAEGRGARRAVNRLSCRRAPHDATSGIPRL

SEQ ID NO: 1533 - protein, 231 aa, Pseudonocardia sp.
VSLDPAGRWHVSLRCEVTVHDGPATDSVVGLDAGSTSLVTLSTGEKVTNPRHERTDRARLARAQRQLARTQKGSNNRAKAHRRVARVHARITDRRRDHLHKLTTRLVRDNQAVVIENLSVRNMLGHHSLARAISDAAWAQMRGMLEYKCQWYGRDLVVVDRWFPSSKLCSVGGAGQDKMPLGVREWTCPCGAVHDRDVNAARNVRAAGLAVLACGDGVRPARAEAPAGSRR

SEQ ID NO: 1534 - protein, 428 aa, unknown
  TnpB Polypeptide
MANTISNKALKLKLNPSQKQYSQFLQSFGCERFVYNFYLAEKNNFYEKEIKPLGNDKKARNAIWKTFEETPLADLKKKYSFLKEADSQGVANAYMNLRTAYQKFYSGLVKLPKFHSKKSKNSYKNSMMKQNCLNWNEHFIEVPKIGKVQFYQNKAPKWYKNRTKICSLTFSKTSANDIYVSILFEVKVKSQKKEFNDENQAIGLDFDCDDMYINSNGKSALKDFGFTKFKQLNAKKLSKLQRQFLRKVKTSKNKEKARIKLAKFEEHIANCRKDWIEKETNRLVNNYQLIGVENLSIQGMMKGSRNAKNYQDIAWSTFVSKLEQKAQFKNCQLIKVNKFFASSQLCNCCGFKNPDVQKFHLQNWICPKCGIEHQRDENAVLNIKDEAIRVLREPEERKEKSSSKEKMSKDTSSVLSVEELANLALGLG

SEQ ID NO: 1535 - protein, 370 aa, unknown
  TnpB Polypeptide
MRKAQKFKLQNQSNIVKIGNMIDDMWQIHLHIMLWQRRYYRMFGKNLSASRINKHIAKLKKRTKPHWADLPSQVVQDVVLRYGKSQDAFFQNIEDRKAGLTTRKVGRPKIKPRHKYTSMTFTQAGYTLENNRIKINCIDTWFSFHKHREINGTIKTITLKRDRCGDYWICFSCENVDDSEPKPKTGKSAGFDYGNKTFLTSDEGNKIESPQFFKRSLKTLQSLSKAVSRKVKGSNNSYRACRALARHHRKVARQREDWQWKLADELCTEFDTLCFETLNLDGMKRLWGRKVSDHAFYQFLQILEQKCAKHGKKLVKISQWTATTKPCSDCGYPNKELSLSDRQWTCPECGSHHDRDVNAAINIKRAGLAA

SEQ ID NO: 1536 - protein, 418 aa, Streptomyces sp.
VHLRYSFRIYPTVGQRASLARTFGCARVVYNDALALRKAAWKTDRSRIPTGALAKAVVTDAKRTEARSWLGSVSVDALQSSLRDLDTAYRNYFDSKSGKRAGRPVGLPVFKSKRDARQSLRFSRNGFRIRGNGKLNLAKIGDVRVKWSRSLPADPSSVTVVLDAAGRYHASFVVDVEPEHLPEVDAEVGIDLGLTTYAVMSDGSVIDNPRFLRKAEKRLKAAQRELSRKAKGSKNRAKARRKVAKAHAKVADTRMDWLHKQTTRIIRETQAVYLEDLNVRGLARGRLAKSVHDAGWATFRRLLEEKAARYGRHVGIVPRAFPSSQLCSACEHRDGPKPLRVREWACGACGVLHDRDLNAARNILAAGQADRLNACGGPVRPGVAIPRRARPVETGTHRNAGGTGRKPRAAGAAGIPVL

SEQ ID NO: 1537 - protein, 407 aa, unknown
  TnpB Polypeptide
MLISKKIRLEVSEQDAAPLECMQGKCRGLYNWWVMHLRDGEKWPGWKEAKKTLQASKEHDPELKWVYGKLLQEVYFRLDGAMTAFFRRVKNGEKPGFPRVRPRRNFFTLCYPAMYIKIEDKQITLPTGGKGKNKRYPDVVAKLTEDAPTGYKEVAISRDGQGHYYASFGHDVTEETHEHDGVLAIDLGIKTLATGVNEQGRFYHIGGFKGSHYSNKQLDKIRSKRDRCKKGSKRSRHLSQVYQRVSEQKRNKQQDCLHKASHLIAHKLVERTVVIGDLSQRQMVMKEHRERNKRLNRAVFNDWGLYTFVQMLLYKCMLYGKELVILDERDTSKTCSTCGHKQPMPLWKRTYRCTNTGCRFVIDRDENSAVNILKRYLARLGPHMERISMRCADVFTAIDDVNTFEHI

SEQ ID NO: 1538 - protein, 422 aa, unknown
  TnpB Polypeptide
MQLAEKHVIKTTDEHFGEVDELAFKSKNLYNAANYVIRQNFIFGWGYLNYNKMDQLMKSHAAYKALPAKVSQQVLMLVDKNWKSYFEAVQAYKIEPLKFTGSPKIPKYKDKVKGRNVLIYTIQAISKRQLKKGILKLSGTNIQVRTQVTPEKICQARIVCKCDCYVIEVIYDEPESTQLQNKSVASIDLGLNNLAALTSNLPGFIPLLINGRPLKSINQFYNKARAQLQQRLKGNRQTSARIQRLTRCRNQKVDNYLHTSSRFIINQLVTAGISTLVIGLNAQWKNEINLGKRSNQNFVNIPHTRLIEMLEYKAELVGIKVIVHEESYTSQSSFLNLDPIPVYGDPGASKVVFSGKRIKRGLYKTNDGWLINADVNGSYNSMRKAIPDAFSQGIESCVVQPRRVNPLKVKAKGEGLMLPKAA

SEQ ID NO: 1539 - protein, 408 aa, Okeania sp.
MRLVERHIIQKNHRFYPEIDRLCFLSKNLYNYSNYLVRQSWIFENTNLSYYDLQKTLSTQPDYKAMPAKVSQQILMILDRNWKSFLAANEIYKQNPLKFKSRPRIPGYKNKITGRNVLVYTTQAISKRQLKQGIINLSKTGISLKTLVPTSQIKQVRLVPRLNHYVIEVIYEATEKQYDLEKNRCASIDIGLNNLATLTFNQAGIKPLLINGRPLKSINQYYNKVKSFLQSQLRENKSSQRLKKLMLKREFKINDYLHKSSRLIINTLINQKIGTLIIGHNEEWKQKINLGKINNQNFVSVPYNKLIEMLSYKAKMVGIDVIITEESYTSASSFIDNDLIPVYKKGEKNQVTFSGKRIKRGLYRTASKRLINADVNGSLNIMKKAVPNVFDYGIEGVVVHPVRITPAK

SEQ ID NO: 1540 - protein, 336 aa, Hydrocoleum sp.
  misc_feature (205)..(205): Xaa can be any naturally occurring amino acid
VDFLSLRKKGKKIVSPREGSIKILQGNYIKLPRIGIVKTYEILPSVPVKNVTIASFRGASLTKKANNWYISFKYDDGLTRTAEEGDIIGVDVGINALATCSDGTTYPNVKPYKQAKKRLTRYQRRVIKKEPGSKNRAKALKRLSGLHKKADATPRRKTAQGNAHQAVADIRADALHKLTTWLAKNHGTIVIEDLNVSGMLKNHKXRKTAQGNAHQAVADIRADALHKLTTWLAKNHGTIVIEDLNVSGMLKNHKLASAIADCGFYEFKRQLTYKCEWYGSQLVIADRFYPSSQLCSHCGHQQKMPLNVRRYECANCGFQADRDFNAAVNLANYVYQ

SEQ ID NO: 1541 - protein, 372 aa, unknown
  TnpB Polypeptide
MCMLITYKYRMYPNKEQKKLFFQHFGACRFIYNWGLENKLQTYASDGKSISRFTLNKMLPDLKSEHIWLKEVNSQSLQGATLNLDNAFTHFFREKKGFPKFKSRKNPVQSFSVPQHYNVNFETHRIKLPKIGWVKAKLHREYEGIEKTATVSVTPTGKFYISILVEDGQEQPVAQHFDENTTVGVDVGIKDFAILSNGEKIDNPRNLKKSIFRMKVLQRRLSRKQKGSNNRNKAKKPVAKLHEKIHNQRNDFQHKLSFRLVCENQAIALETLNVAGMLKNHRLAQHISDASWSSFVTKLEYKAQRYGKTIIRIGRFEPSSRICSKCGYYNRDLTLADRDWICPDCGAHHDRDINAAINIKKFALDKQNLIGI

SEQ ID NO: 1542 - protein, 441 aa, unknown
  TnpB Polypeptide
LKVYKTAKLEILGNHVIEPTIRIYREALSFVIDVCYKEKAGWLALGGKNRNNFIEKLIHTTSDNPNPKYAEFNKKFYKMPCYFRRSIVSQAIGIVNSYLSLYDRYIEDKTKALQEGKKFTDKPPRLSYDHDSFPALYKYNMFDNFGIDGTCRIKLFIDNDWKFVNIAFDKRALSSSKTFRFDGYTMDSPSLVFKSKRFYLYVPFYKNVELSKEQDIVVGVDLGITNSAVVSAVMKDGTVIDRLFINQPKEKDHLKYQLDRLNKANRMSGSKNKKPNIWRKINNLITAIATQTANDIVDFAKKNNAKVIVFEHLHFKRRKGDKKKKLRSKSQYWTKIRIQEMVKNKAHSMGIRFSRVDARNTSALAFDGSGYVRRNTKGDIATFTTGKIYHADLNASYNIAARYFLRELERAKVPVRIDRTSQTLDTLINLAMMPHHPSKVA

SEQ ID NO: 1543 - protein, 465 aa, unknown
  TnpB Polypeptide
MRGKTTYPAWVVPRGAHMVTLKARGILIEGSINELREELYLTRREIQNIVDALWELDKIPNISQTHQMLYWNLRRKGFRPHQAKQIYKYARALILAVISQFRENFYRETLEWCFELLPKKKQSLRKRVYEVAEEIANIVYEELLRNRQARNANLRKPTLRKLMARLDKYDARIDLEEQVIVLKLRNSVFKIKLLHRKEYLEKFIGKKWYEVMVSVDRKGRIWISIPFRWKYKPYKPKGLVSLDINLKKIVVFNGRSIRRINTRFMDALSLKIRAERIQKKYPRMWRYSKRILGRIRKLHRRSRNIVADWSRKFAKYMVLKARRTRSAIVLEDLEKLWFNTFRKSSSLANKLPRFAYRKLQLAIITKAIEYNVLIIFVNPRNTSTTCPRCGAKLSYNYRLAMCRKCGFIADRDTIGAMNIHLRAHRRMYPSLGSRANAPPMNDEARGKGRTIHEPMIVHIKSYTNI

SEQ ID NO: 1544 - protein, 374 aa, Cyanobacteria sp.
MQRTIRIQLQPDIETAKVLSQTIEQYTWSFNAVCRHGWETGIGNGVELHKATYYDHRAMTGLPAQLVCAARVKATEALRSARSLEKKGKTVSCPTSKRCPIRYDARSYTVWFDRQQVSILSINGRVKLSFEVAEYYRQYLNWKNTSADLLQDRKGRWWLHIVVEIETPETGATNEVVGVDLGIASPAVDSRGSKYGSVPWKGVEDRTFELRRRLQSKGTKSAKRHLKKLSGRQRCFRKDCDHVLSKRLVRSVEKGATLVFEDLTNIRGRAKMRKAQRRRLHGWSFNQFQAFVTYKAEARGVNVGFVDPRYTSQKCSQCGHIERGNRPSQAEFRCKKCGYECHADYNAAINIREDFLKLGAAVNQPIVVCPEMGT

SEQ ID NO: 1545 - protein, 311 aa, Pseudanabaena sp.
MAALEYICSESNKLHNCVVYYGRQIYFKTKKYVTGFDLINEMRISGNRHFQAINSDAAAQTCLSVGESIRSFSELLKMWFAGKLENKPKFPNYRKPGYQLVTYPARRLKSVDRQIKFSFGKQVKAWFGVDAFYLPMPSNLNFADIKEVRILPRNRCFYAEFVYNAEVLKPELDASKVLGIDHGIDNWLTCLNNVGTSFIVDGRHLKSLNQWFNKQVATIKEGNPQGFWSNRLSAITEKRNRTMRDAVNKAARKVVNHCVENRIGTIVFGWNQGQKDGADMGKKTNQKFVQIPTANSKPEFINCLNSMVFAS

SEQ ID NO: 1546 - protein, 376 aa, Anaerolineae sp.
MKTFKYRLKPSRSQRTQLNRTLELCRWVFNETLATRKNTWEQEKKNLSLYDTNKLLTLWKREHPEWVSVHSQVLQNVQERVDLAFKAFFRRAKAGEKPGYPRFRGSGTYNSFTFKQSGFELRDHDLLISRIGAVRIVLHRPIEGNVKTLTVQKDAVGNWYACFACEVEPEPMPLCELAVGIDVGLESFATLTNGMKIENPRFFRQDEKELAKVQRRLSKAEKGTSQRARRRKAVQHVHQRIANRRRDFAHKKSREWVNAFGFIAFEDLRIKNMLRNHRLAKSISDAAWRQLIQYTTYKAENAGRVVVMVDPRNTSRMCSRCGTLVVKSLSVRVHQCPNPGCGLVMDRDENAANNILRLGLESLGIALEAPAFRRGE

SEQ ID NO: 1547 - protein, 409 aa, unknown
  TnpB Polypeptide
MRSITRSYRIRAYPNGAQRRLLERWFGATRWLWNTALAIRLEAYRVFGLNLTGADLSRWLTQWKRTAGHEWLAAVPATCLTQCLRDQDAAFRNFFARRARYPKFKRRSAVASLRFQDVGAGWAQGVMRLPKLGSLKLAESLPKVERPDLVTLSRDAAGHYYVSFCAQVETSLLRITHRVVGVDLGLTHLATLSTGEKIPNPKRYHARLKYLRQQQRCLARRQKGSRRREKQRLRVARAHARVRQERQCALHALTTRLVREFDLICIEDLNVKGMARGLHARAIHDVAFGEVRRQLTYKSSWYGKILVTVDRWYASSKKCSECQYILDELRLDERQRTCPRCGICHDRDINAARNILAEGLRQLAGCDGRDLRVDARGACPDEDILVQVLADEARSGQRNQACQEQARFS

SEQ ID NO: 1548 - protein, 357 aa, unknown
  TnpB Polypeptide
MLTLRLKVKRESYGWLERAAAEVNQVWNWANATSIDASDRNRRANARWLSGFDLNRLSTGAAEHFDRITADVIQRVNGEYAAKRRQAKLTRLRWRVSRGPRRSLGWIPFKAVNLKRRDRVLRFAGKTFRVFEIERLIGVRWQQGCFAQDACGDWWLCLPVGRSAEESVAPREAVGIDLGLKAVATTSDGDTLEAGRWTHGIADRLAMAQRRGHKRQAKRLHRKAARRRADALHKFSRRIVDQYQKIVIGDVSSAKLAKTRMAKSVLDSGWGTLKAQLQYKGQQAGRSVEIISERNTTRACSGCGALTGPAGLDSLVVRRWTCVECGDAHDRDVNAARNILRRAEVSASVSGNGRIAA

SEQ ID NO: 1549 - protein, 517 aa, unknown
  TnpB Polypeptide
MAKNQTYRAFAARPTRVLDLDGEPLNGSIVMDGLASEIRDISGYATFVVRNDSVLGERLESIAVSQPAEAGRQAGITLPGFMVAGSGRSRKEKLLQYNVVTAYRSYQGRVKVANGQSSKYVSQGWKRTVDASPPSYGEDYVNLGAVDRAYAVIENSPFADGKIIMRMVIQGAWYRLIFDFDNKRFTEGKVTLPIIKVQDGAPVFIFTVVTDNPVVQFSSDYTIGVDVGINSYATVVVRDTKTGRVAHETTLSQRVHSLWNSVRASEQQVRHLWKKAATLLHDRQARMSALDEAKLHREAASRKKRELAILAAQEIAYLSHVWGNAVVAVEDLSWVVNTMRRGRWNRGALVQWLTHYVSQNGGWVVAVDPSNTSQQCYKCGSKVTHPTHEVSVCAEHGAMDRDVNAAANIAARAVPRVTKARATRAKNRKLRPQTPLRTPTARASLKYPGRDRAKNSPTPKRKKHRIAKEVNLPVCPARVQAHSLDARVLADQGTRGTLGTVQAALKQGCVTYKCMLL

SEQ ID NO: 1550 - protein, 440 aa, Okeania sp.
LKARYKYRIYPNHVQITKFNQLFGCCRYVWNQSLAYCNQLYSNSIKKPSYTDLTKQFITQAKKDLLWLKEVASTPLQQSLKDLERAYKNFFNSCTGKRKGIKVKPPKFQSRKSRQTARFVGANYQINQDNIYLPKVGKIKIVWSRPLANQPTSVTIIRDSANRYFASFVVETNPEFLPKTDNSIGIDLGISTFATLSNGEKILAPKPLKRNLKKLATFQRKFVKTEPGSKRREKRRLRIAKLHGKIKDIRTDFLHKLSTDLVRKYDTIVLEDLFAKHSEGNVSGLTRNRKLAKAISDLGWRQFRTLTEAKCEKYGKEFRVINRWEPTSQKCSCCGFKGGKKELNVREWTCLNCGTFHDRDINAAINILEVVQPTTKVKTIETKVLDNPVQLSLFNVVAEGQPETEQKRTRRKRQTSCKKEADFSDVSTRPESFVQLGLFD

SEQ ID NO: 1551 - protein, 388 aa, unknown
  TnpB Polypeptide
MLTLLKSFKTEINPTAEQIIKINKTIGVCRFIYNFYIAHNKELYEKGEKFMSGRRFSVWLNNEYLPNNPDKIWIKEVSTKSVKKSMEDAYTSFNRFFKNKSNFPRFKKKNSSDVKMYFLREYNNGCLVERHRIKVPTLGWVRLKEKGYIPTSKDGFIVRSGTISHKAGRYYISVLVDIQKQDTEISNNFGIGIDLGLKSLAICSDGSTYQNINKTYNIRKVEKSLKREQRKLSRKVISIRRGESTQKNFVKQKLKVQKLYQRLTNIRTDYLNKTIHSIVKIKPAFIVIEDLNISGMMRNRHLSKAVAQQKFFEFKTKLISKCKEYNIELRVVDRWYPSSKLCHDCGHIKRDLKLSDRTYRCSECGYTEDRDINASLNLRDAKTYTIIQ

SEQ ID NO: 1552 - protein, 403 aa, Streptomyces sp.
VTLEIGTNDLNQGYQASTASARLKSLIDQITADVPDATVLVASLIVSTSSTEEPYRSAYNQAIPGIVSNEQAAGKHVGYVDMSTLNVGDLADFLHPNRSARPAPRRRATSSGRSADALRLSSRPGLPPDIPRCAGRARTPVPHTAAAFTDFADAVARAPCTRPPRQWDCPRGEAESKPISFREDAAQPFDDRMLTWNLDDRTVSIWTVAGRIKGIPFVCSPEALKLLAHRRGESDLVHRDGQWFLIATIDLTDPPLSEPTGWIGVDLGIVNATTSDGRIMSGRRADRYRKRMRATVAKLQAKRTKSAKRRLKALRRRESRFATDTNHCISKTIVTTAERTSRGIALEDLKGIRQRVTARKEQRYRLHSWAFAQLGSFVEYKARRAGVAVVRVDPSPSTVRRHA

SEQ ID NO: 1553 - protein, 354 aa, unknown
  TnpB Polypeptide
LRRTDKAFTAFRKRCKNGEAKKGYPRHKMRVRSLTWSLRKYTKVVRESAKANPDKQTIRVRENPIIETNYRHNRLKVPKLGAVKIRMHRPLQGDPKEVTIVKKASGWYAHISCEIPDTPKVEPTDALAVDVGTTHYLTTSEGGKEENPRWYRQAEGLLRKHSKTLSRKKKGSNRRKKQQHTLALHHERTTNKRKDFISKLVYKLYHHYENNVLVAEDLGISNMVKNKHLSKSISDASWSEFFQWCGNRAERDGFHFHQVNPKDTSQTCSACGQKSPKKLSLAIRTFDCSFCGTSLDRDHNAAINILFRAACAHRGERWVTNLTETRNTNEARDAGLENARQLLLFDGLLTSPRL

SEQ ID NO: 1554 - protein, 225 aa, Actinomadura sp.
RRDAREAGLPFPTAAALSAAMTAAKKTPERCWLGEVSSVVLQQSLRDLEAAYRAFFEGLAGRRPKVGAPRFKSRKDNRQSVRFTANARSSITPGGKLALPKVGEVKVRWSRRLPAIPSTVTVVKDAAGRFFASFVVESSDEPLPEPGTETGVDLGLEHFAVLSDGRKIASPRFLRRAEKKLRKAQQALCRKQKGSSNRDKARTKAARAHARVADARREFHHRLST

SEQ ID NO: 1555 - protein, 442 aa, Acidimicrobiaceae sp.
VSKEVFADGVRGAVDGYWRWQKSRSGEIAGRPVGFPHFKKRGRDRDRCTFTTGAMRLEPDRRHLTLPTLGSIRTHENTRKIERLVALDRAKVLSVTLSRRGEHVIAAVKVAVARPQQAGVSQAESVVGIDLGVRRLATVASTETVTDEVENPKVLEHRLPELRRLQRQCARRTSGSSRYRETSTKITRLHAEVAHVRSFHIHLFTTKLAKTHGTIVVEGMDVAGMMQQKGLDGARARRRGMQDASMGEIRRQLRYKCPWYGSTLIEADRFFPSSKTCHDCGHVQHIGWSEYWVCEECCSSHQRDDNAAINLARWASLGSVGAPVKRGAEHQTESHSAAGEDTRKGCPTSVERNNSVRSAERVDSPELTRLQRLLPSNGALVGAAKFAEIDLAHGEHCLGGCSCAIRVRSAQVLTHLWRRDLPGDTKLVLQPAALAGFSTFTD

SEQ ID NO: 1556 - protein, 546 aa, unknown
  TnpB Polypeptide
MIIQSKCTKVFNSKDMTRLKYDELYGLAVLIRNHKNIVSQYVNDNILHFLEYNNFQFMREMRGCFKNVIPSSFDAQLYTQVFTCYKSKFETIQKRLRFETKTFKGFEFYKRNTQKHKKGDLKIVIIDRKQTSLTNCLTYLARYGNEQTICYIKANIDKCDNKKREFYTNILRCCNKFGFDRVYKLALSKRERAVKRYSEKPIEFKSLSFSGRCRKKKIIDYNSRFGSKIKSFISLSGIGRKSFDVPVTFNKGWHGNMRDYRKKNPDYEYTLTFDEKKHQVKVNLCKDGEKYIPNPKGKTVGIDVNCKHNLFSLSDETTYDYNRKLVNDFCRLSIEIDKRKADKLYTVGKRKQRKLNVMKSKMVKSEQQLIANMCKTLQTQGVGHIVMEDLDNSFGRCYIKDKEKGGINYNRKVKFLGLGSLKKHVQHIARKYDIAVSTVQASYTSKMCPNCGCIEDENRQSQETFKCVDCGYKDNADFNAAKNIRNRVIVTVLRDALLKQLDNGAFEPKKLKREKVKEVLLSFRRNLLKTARSECMESSLTTFDYI

SEQ ID NO: 1557 - protein, 401 aa, unknown
  TnpB Polypeptide
MSKIYRTYRFRLYPNKVQTDLLSKHFGCVRFVYNYFLNQRIEQYKLTGRSDKYYAQSKCLTELKKQETTTWLKEVSAQTLQSAIRCLEAAYTNFYQKRAKFPKFKSKRSKNSFTVPQFASIANNRLFICKFKEGIKCRVHREIKGKIGKVTVSKTPSGKYFVSVNTEEEYTTPLKKTNKSVGLDLGLKDLVVTSDGETFNNNRYTRKYEHKLAIAQRHLSRKKKGSKGFENQRLKVARLYEKISNSRADYLHKCSISLVRRYDTICIEDLNIKGMVKNHRLAKSISDASWGSFVAMLTYKAEWNGKKVVKVGRYFPSSQTCSACGYINKQVKDLSIRDWECPVCHTHHNRDVNAAINILNFGFNNISAGTVDYTDGEEVRTNLSKGHSSMKSEIHESSACG

SEQ ID NO: 1558 - protein, 413 aa, Micromonosporaceae sp.
VDGKVVHVRRSYKFRLRPTVKQVQALTAMLADHRDLYNAALQERCDAYRKRGVTISYGQQSGQLKDIRRELTEQARWSFSSQQATLRRLNLAMQAFFRRARAGQRPGYPRFKGQGWFDTVIWPSDGDGCRWDSTSDKIATRVYLQGAGHVRVQQHRPIQGAVKTISLKREGAAWYVILSCDDVPDQPLAPTGQQTGLDVGVNEFAALSDGTLIPNPRWAMAGADQLAGVQRRHSARYPKHAPRSKRKIRSAQLIAKIHRKIGRKRADFHHKQALQLVQRFDLIAHEQLNIAGMTRSPKPRADPGQPGSFLANGSTAKAGLNKSILDAGWGQFLTILAAKAECAGRLVIAVNPRYSSQTCFECAHIDAANRNGTEFRCVRCGHEDHADINAARNLLRAGLALAQDEKLVGSRSH

SEQ ID NO: 1559 - protein, 322 aa, Chloroflexi sp.
MTGRKEASSVKLVEQHVISKHDLRYAAIDAAAFASKNLYNAALYEYRQAFIYEGKYLNYNEVQRRMQSHEAYKALPAKVSQQILMLLDKNWKSFKEGGEAYEEDPSKFTGRPCLPKYKDKSEGRNILVYTIQAISKRGLKRGLVEPSMLPITVKTQQKDIDQVRIIPRKGFYVVEVVYEQAVKQAPVNPAYYAGIDIGMNNLVALTSNKPAFQAVVVNGRPVKSTNQFYNKRRAELQEKLGHPGTTRRMESMTNKRNRRIEHYMHTASKRIIDVLVEEGIGVLCIGKNDGWKQEANMGKRNNQQFVHRQDHGRVLHLTGKFS

SEQ ID NO: 1560 - protein, 463 aa, unknown
  TnpB Polypeptide
MRELGSHRTLRRTRKSAFHAQQPRFYRTDPGDRSPHGPPAPVSGRRRDGHPADGHRRGLPLRLEPPAGRPGAVLSPVAGIQDWPQARSDLLHSGSAVHRTAQRPGPCLAAGLSVCLCALQPEVSGRRVQAVPQGSPDRGQAPVQGPARHRAGVHHSRGRQEGRGPPARAEGRLAEIVRQRPVRGVPAADRPHSDGRHGTARHPKWYAYVCYAVPAEQVRQGAPDGALGLDRNVGQATDSDGTVYAMPNTERLDAQIARKQRELGRKQGWGPKDKRPKSNRGRRVNGQLNKLHRKRRRQRDDSTHQASRKLADTAHTVVVEDLNTKGMTASAKGTVEAPGRNVKQKAGLNRGILASGWGQLERKLAYKAGQVVKVDPAYTSQTCSRCGHVSKANRPSQTVFACGVCGFQANADHNAAINILARAGLPSVPVPARGTGASARRGAIPWGTPTTRERDTHGVHYCV

SEQ ID NO: 1561 - protein, 367 aa, unknown
  TnpB Polypeptide
MLKAYKYRIYPNNEQKVQIAKTFGCCRFVYNQTLAYRKENYEKEKKSVSKTDCNNYCNRELKKKYEWLKEVDKFALTNAIYNMDSAYQKFFKKHAGYPKFKSKHDNHKSYTTNFTNGNIAVDFKGKKIKLPKLKEVRARLHRKFDGQIKSATLSQVPSGKYYVSILVEIEQIELPYTNQNTGIDLGIKDLCITSAGKKYENPKVIRKYEKKLAKLQRQLVHKEKRSRNYYKTKEKIALCHEKITNVRKDYLHKISHEIISENQVIVSENLQIKNMIKNHHLAKFISDVSWYELTRQLEYKAKWNGRKYVKIDTFYASSQLCSICGYKNTETKNLSIREWVCPVCGTKHDRDINAAKNILAEGLRQMA

SEQ ID NO: 1562 - protein, 409 aa, Hippea sp.
LQKTILRAYKYRIYPNKEQVKFLENHFGACRFVYNCFWGKYKDTKLPNKTLLQKELKELKKNENYSWLNQINSQSLQVSIHNLIKAYKRAFSKEVVKERKIALARANTPKQKAKALKLGFPKFKSKKNNYQSFNIPQNVKIKENKVYIPKLKEGIKVKFHRPLSQNGKIKQATISRKNGKYFISILIEEVIKIAKKPFKAIGIDMGLEHFIILSNGEKISNPRWFRKTEQRLKILQKRLSRKVLHSRNWYKLKAKISKFHEKILNQRNDFLHKVSIAIAKQYLLIAIENLSVKNMQKNHYLAKSISDVSWSKFVEFLKYKSEWYGAKLIQIDKFFPSSKTCNICGYKIDKLPLSKRKWTCPYCNTTHDRDINASINILKTALSGMEQPVEPVEVCQKATVEAGSPDYNL

SEQ ID NO: 1563 - protein, 418 aa, Hespellia sp.
MLLSHKTSIRLNATESNIVGHMCYAAYKLWNVCNYERRNYKELGMEKYPDWYDQKSRLKDNLWFKSLPSQTAQEVCKLLDKSWKSFYALVKSQRILNPNPPRFKQKGMAITYMQNAIVHDSKSSRVRLSLPKQLKDYLCQTYDICEKYLYLENKVFQNTDNVKQIKIYPPDHKGVCQIIIIYEIKDTEIKSDNGHYLSIDLGLHNLITCYDSIGKSFILGRKYLEINQKYDKEIARLQHQWGRAQAAKGIKYPKPSHHLCRVYEKKKNCIHDYLHKVTRVVADYCEENHIHTVIIGDIKNIRRNKKLGKITNQKLHALPYDKIYAMLGYKLAMYGIALKKQTEEYTSQCSPYAPKVSKQYAEKSNRKNRGLYKDQFHVFNADVVGAYNIMRKYNTVSGVEKKMSVSGLSSPEIIKVAV

SEQ ID NO: 1564 - protein, 492 aa, unknown
  TnpB Polypeptide
MVQQKKYDISPIYVPNKELNLTDWLPPISRNTTKIKTNSWFTIEKCSNKNSNTIKKYSKITPIIPPESIKQQNKSIRLIKARNPKSTKKPEFICSKKVRIYPLNGQHLVLQNWFDLFTKMYNITTEYIRSLIYKGSKLITIREARKVLNFNAVRKILYNQKITLASSYKNNIPVHILDEAIKLSISNHKTCLTNLAEKNIKKFRVRCWPKNHNKKILIIEANFFKESTFCSTTFDNIVSSELFNDIDRTVILQYNQDTRKYILMVQHSIKEKTLKKNKLSCGGDLGVRSFLTVYSEDHTLNICPDIKLNKDIVKWHKKIDKIHKIMNFSNPNQKIMVGTKINGNKVHYIKNKRVRRSKLRRALRKYHKKINNKVRNMHFKVSHHLVNSFDNINIGKFNTKQILSRHNQKITPTTKRMIGVLQPYRFRQVLKYMGNKYATTVTEESEYLTTKTCSHCGKVNEIGASETYYCPKCKLETGRDENAAKNILKSRI

SEQ ID NO: 1565 - protein, 141 aa, Streptomyces sp.
VNHVISKEIVSVAQRTGRGIAVEELDGIRERVRLRRDQRATLSSWPFHQLGQHLAYKARRAGVPFLEVDPAYTSQRCPRCGHTERANRPTRDRFCCRRCGLAGPADVVAGVNVRDRARSAWVFVTMPVPPPVQPEGGRCDP

SEQ ID NO: 1566 - protein, 184 aa, Oscillatoriales sp.
MIERAWLSKVISIPLVQSLQDVHLAFRHFFKSLKGTRKEHQAGFPKFKKKQSAQSIHFTNNVKPNSVYLAKISCVRVKWSWDLPSHPSSVTIIKDAANRYFASFVCEVDPVTLKAINDGVGIDLGLTTFATLSTGEKVLSPKPLAKFLKRLRRAQKRLDLLRESASSPSSPNPCSQDGRRGART

SEQ ID NO: 1567 - protein, 392 aa, unknown
  TnpB Polypeptide
MIQIRSYKLKLKPNKHQLQKLNNYFYEAKCLYNYVLSQEDVFKFDTKIKNITKLDKDRNKVEVILNNIPAKLRQNIVHRLQDNIKNLSKSKKKGNKVGRLKFKSEINCIDLDNQCFKIIINKLQILGFSKSKIKLKGLNQLKDIIKTRNAWLIKEANNYYISICCDVEVKSHIKTNKHIGIDMGIKDNVTLSNGEKFNCSIGESERIKKFQRKLAKSKKGSKNRYKIKLKLRKAYRKITNQKKDFVNKLVHRLDQEFDLIVWQDELINKWHKGWFGKQVQYSCLGMFKQKLEQRMKEETNRFIELDSKYPTTKLCPSCGCLNNISLADRIYKCDCGYTEDRDIHSAKNMILIGQGLSDFKLVENKTSTSKKFLEASYDSKKQEGIHLNFYIK

SEQ ID NO: 1568 - protein, 344 aa, unknown
  TnpB Polypeptide
MIRSYKYKLRPNKAFLASCNLTLDCCRDLYNAALSQRIGYFKQGRSIGLAEQSRQLTEVREMPEVHAILRSFQFNALRRLDRAYQAFFRRVKNGSGEAGFPRFKGHERYNSFNTADARAFRLEGDKLTVWRLGSCRVRLSRPVPGRPKTLTIRREFDGWYAVIGCDSVEQTPLPATGVSVGLDLGLESFATLSNGATVDNPRHYRRSEAALASAQQRVSRKIRGSQSRKRARRLVARAYAKISRQREWFQWQLARELVQKYDLIAVENLHIKGLAQSNLAKSVNDAGWTLFINKLFVKAEEAGRAVMKVSARFTSQDCSGCGKRGKKDLVSPLASMPMWHKPLS

SEQ ID NO: 1569 - protein, 466 aa, unknown
  TnpB Polypeptide
MLVVIVFLLQLAHTCEYNLLVVDPAYLRLVLQLAHIYKCNFIRESPSKRSVRWRVSKERKYIVKVNRVEQHLIKKSDGIYKIIDDLCFKSKNVYNYANYIVRQEFIKNNRWIRYNELASIMKDTEPYRDLGSNVGQQTLRLLDKNWKSYFKSIKDWSKNKDKYLGRPKLPKYKDKEKGRCILIIDNIKCKIKDGYLRFSWKPLKPLNNKFKTNVTGKLMQVRFIPRKNSYVMEIVYEIDVSETKEESHRIIGIDIGVDNLATVANNVGLKPFIINGRPLKSINQYYNKIKAEKQSDLKKKHNKDWSNKLQKLTDKRNNKINDYIHKASKHIIDWCVQNQIDTIVIGRNKNWKQESVMSKKVNQNFVEIPHGLFIEKIKYKAENKGIKVIETEESYTSCTSFLDGEEPCEENKNKKRRIHRGLFKSNKGVMINADLNGAYQIIKKVFPNAFADGIEGVGLHPARVNL

SEQ ID NO: 1570 - protein, 487 aa, unknown
  TnpB Polypeptide
MSLLASEVCNLSAYATYTVRNDTKLKDELSQVTATAPAEAGRQAGVTIPDFLVYGRGRSRKERLFRYNVVTSYRSWQERINAANGESSKYVSQGWKRTVDASAPSYGEDTVNLGAVDKQYAVIENNPVVDGEIVLKMTIQGKWYRLIFSFDNARFTEGKVTLPLIKIQGGVPVFIFTVITDNPIVQFSGDYVIGVDVGINDYAAVVVRNSATGRVVYETTLSQRIHSLWNSVRASERQVKQLNKKAEKLIYQRQAHMCAIDEAQLHREAASRKKRELAILTAQEIAYLAHFWDNAVVAVEDLGWLVNTMQNGRWNRGAFTQWLTHYVSQNGGWVVAVNAANTSQVCHLCNEQVTHPEHKVSICPEHGAMDRDVNAAANIAARAVSKVEKARRARSKNRKLQSQVHLKTPVARETLKYPGRDRTKNAPTPKRKNQRRTVREVTLPLSPARVNLTSVLADWDAYGILETNQAAINQSNVTCKCKLCSLN

SEQ ID NO: 1571 - protein, 327 aa, unknown
  TnpB Polypeptide
  misc_feature (11)..(34): Xaa can be any naturally occurring amino acid
  misc_feature (240)..(313): Xaa can be any naturally occurring amino acid
MEIIRKSSCSXXXXXXXXXXXXXXXXXXXXXXXXNDIFEEYKWLVNYFIGLLWTKIDVFGSFATKEETNSVDTWMTIRMKQCAAKQAISIIKSQRKKHRKTMPIFKGDSIELDSRFVDIQKGENSFDIWLKLSSIGNKIKILIPIKQHKHFNKFNDDSGWEMSKSVRLRRSRYIDFFFKREVELKNEGEDVGADIGINKMLTLSNKVVVGKDVKEKINKLNNKEQKSKAWYRALNELHNXXXXXXXXXXXXXXXXXXXXXXXXXXXXXXXXXXXXXXXXXXXXXXXXXXXXXXXXXXXXXXXXXXXXXXXXXXKNVALLVMQMIWQV

SEQ ID NO: 1572 - protein, 421 aa, Lachnospiraceae sp.
MRACSEMPYHIGVLLKLHLSEARQRLVAVNDGAQRSVYNHLVACNNEIYHLKKTADFVPADRDRIAYLKSVTCNAAAIKNALPYLYGKDVDCQTVENGIRNYRTAWKNMKERHTGVPALHKKSAEQTWQTNCHYNAQSTGFSDGTVRFVDRHHIMLPKLGKVRCDGSPKIMDMLLSHNEDTRIGTVTIRRDAVGEYWVSLQISSETPFKQTLPKTGKQCGIDLNLLDLANDSDGNAIENKRFRKVSEHRIEKQQRSLSRKAEAARRNGKKLADAKNYQKQRRKLAKTQRHIARQRDEYLNVISKRMVENQDLIAAENLKVRNLLKNHCLAKSISDAGWRTLLSLLQQKADMYGKTVILVSPQYTTQTYSHCGHVLKGKYMLPLSAREWTCPVCGTHHLRDQNAAQNILAKAFIVTAGTVLT

SEQ ID NO: 1573 - protein, 403 aa, Escherichia sp.
VKRLQAFKFQLRPGGQQECEMRRFAGACRFVFNRALALQNENHEAGNKYIPYGKMASRLVEWKNATETQWLKDSPSQPLQQSLKDLERAYKKLLPEAGCFSPIQKKRGQNDAFRYPQGVKLDQENSRIFLPKLGWMRYRNSRQVTGVVKNVTVSQSCGKWYISIQTESEVSTPVHPSASMVGLDAGVAKLATLSDGTVFEPVNSFQKNQKKLARLQRQLSRRVKFSNNWQKQKRKIQRLHSRIANIRRDYLHKVTTTVSKNHAMIVIEDLKVSNMSKSAAGTVSQPGRNVRAKSGLNRSILDQGWYEMRRQLEYKQLWRGGQVLAVPPAYTSQRCACCGHTAKENRLSQSKFRCQVCGYTANADVNGARNILAAGHAVLACGEMVQSGRSLKQEPTEMIQATA

SEQ ID NO: 1574 - protein, 336 aa, unknown
  TnpB Polypeptide
MLKAYKYRIYPNNEQKIQIAKTFGCCRFVYNQTLAYRKEVYEEREKTVSKTDCNNYCNRQLKKEYEWLKEVDKFALTNAIYNMDAAYQKFFKEHAGYPKFKSKHNNHKSYTTNFTNGNITVDFGCNRVKLPKLKGIKAKLHRNFYRTDKIGNDITSSEWKVLCINFSGNRTRGTATYKNKNTGIDLGIKELCITSAGKKYENPKIIRKYEKKLVKLQRQLAHKEKRSQNYYKTKKKIAICHEKITNTRKDYLHKMSHEIISENQVIVSEDLQIKNMVKNHRLSKSISDVSWYELTRQLEYKAKWNGRKYVKIDTFYASSQLCSVCGYQNTETKIYQ

SEQ ID NO: 1575 - protein, 396 aa, Oscillatoriales sp.
MTLKAFSYRFYPTPEQESLLRRTIGCVRLVYNRALAAKTQAWYEEQKRVAYTETSSMLTSWKKTLELEFLNEVSSVPLQQCLRHLQTAYNNFFDGRAKYPNFKKKRNGGSAQFAASAFKFKDGQVYLAKSVDPLPIRWSRTLPDGCRPSTITVKLAPSGRWSVSLLVNVEIETLPDESDNQIGIDLGITSLLALSTGEKIVNPKGFKAKYRQLRRAQKALSRKQKGSNNRHKARLKVGRVHQEIADARKDNLHKLTTRLVRENQTIAVENLAVKNMVKNRKLALAISDASWGELVRQLEYKCNWYGRTLIKIDRWFPSSKRCFECGYIVEKLPLNVREWKCPNCGSHHDRDINASKNILAAGLAVTVCGATVRPEQSKSVKAGAKNRSGRKQKPKS

SEQ ID NO: 1576 - protein, 396 aa, Microcoleus sp.
MFALKRALKLNKNEATLMVKHAGFRRVVFNMGLSLRTQMYGEGKFSDSKVINEIKKILTDRVKKQLGFAGMNQLSSRVYQNALIDLKDAFISYRLGESGHPTFASRRWGQSFTVDSSKGKVVLDAGYTIKIPTLGTFRLHKPLDCGLVSQTFTISKEGSRWFVSFCVDAERLPVQQPKKILGVDRGRKSFATLSEAEGSNHQVFEAPKPLKQTKTKLATVQRQASRQARASNNQRKTYARISRLHAAISCVRKDFLNKLTTYLAKSFKLIKIEDLKVKGMMANHKLAQGISDIGFYEFKRQLTYNCLRYMATRVLLDRGFPSSLTCSNCGQKQDRQLGIITYNCQSGGVSIDRDLNASINILKREPSAARGIADSLDYVGSNSVASERQLALAKFE

SEQ ID NO: 1577 - protein, 403 aa, unknown
  TnpB Polypeptide
VTRTEQHVISKSDLIWKTVDDYCFRSKNVYNYANYIIRQEFINNRKWIRANDLQKMCQSADCYKELGSQAAQKTIQLLDKNWKSFFVAIKDWGKNPAKYLGRPKLPKYKDKEKGRQILIFKNIQCSLKDELFRIGFKPFGGYSVRTNIPNGSKLIQCRFVPRGSSYVMEIVYEIDVPEVQTDSNHICSIDLGIDNFATITNNIGIKPIAIKGNVIKSMNQYYNKKKASIQSELMLVNKKHNSKRLNQLTTKRNNKVKDWMHKASKYVIDYCVLYGIDTLVCGYNAGWKQESDMGKKVNQKFVTIPFDMFVHQLEYKCENVGIRFIQTEESYTSGTSFLDNEEPIKANYDKSRRIHRGLFKSNNGTLINSDINGSYQIMKKVFPNAFANGIEGVGCHPTAIKVA

SEQ ID NO: 1578 - protein, 381 aa, unknown
  TnpB Polypeptide
MLKSYKTEIKPTDEQKIKIKRTIGTGRFVYNFYLSYSQEVYEKDKAFVSANDFSKWLNNEFIPNNEEFNWIKDVSSKSIKQSLINAEKAYKRFFKHQSKFPCFKKKKNNNVKMYFVKTDNKNIIHCERHRIKIPTLGWVRLKEYGYIPTTEIIKSGTVSCKAGRYYVSVLIDLPELTKYNNTGEGIGIDLGVKDFAILSNGTVYKNINKSDELIKLNKKLKREQRKFSRKYEINKNKNIDRQNLNKQILVVQKLHQRIADIHENYHNQIISDLVKLKPNYITIEDLNVRGMMKNRYLAKSIQEQGFNSFIVKLIAKAHENNIEIRKVDRFYPSSKICHACGQVKSNLKLSDRVYVCDCGYIKDRDLNAAMNLRDAIEYKIA

SEQ ID NO: 1579 - protein, 694 aa, unknown
  TnpB Polypeptide
MLAVVAEQEKTSEPTCNTQFSKSSVSTGDLIESRVFFCRESLNDTDVISVIRFTGTLDSILSVFKKVCSIDLDSSFMGSGDSSLISADLSYVVSNSGCKILEDTNGSASAFDYLCDSYTEHRYPFLVVTRKTPATAYKNYTNKFTYTLGTPVTNDNTEFTRSGVLGILDNMSADDLVSFFCEEAHRMSSKTIVSRTYPRVPYAAFDKDGKPLNLDDVLNGVKADAELVAHYALQEMTEQNLALVTYFDRLKPSGAGYMMGLKLPIEVKKQFKSGSSRLERMFREQVVSNLRSWAARVEVMTQTYPKYVSAGWKRTASKSKPTSMSPRLDLSATDKGYYYKNFSVTPERISLDMVVRGSWVTLHFPTPPQLLESGCEPGVPDIWINKSDRVMFGFCGKTDPGRPEFSERYVVGVDLGVTNPAAYVVWDTEKKEVVERSLLGQRARSLNNKIKRTKTQVASLQKKNRSEEAVSHREHLSNRRRELSILIAQELADASFKYDNAIVSFEDLSHIKNTMKHGRWFRGEVYRRTRDMVEADGGRVMKVNAAYTSQRCHVCQSDLDMSDYSQPRCTTCGITHHRDLNAAANIAQRANVKKACETRKKHATKIKRVRRSKFHIKPLKHPGTKNRPTPKAPQNQKKTHTLTRAKEVSVRMCPADTSVSVVDHDTWFQTISGTTNPKDNLSTANTVDVVYLKE

SEQ ID NO: 1580 - protein, 320 aa, Bacillus sp.
VKLVPQTITVKVKLLPTKQQIMLLEQSSHEYIKVINALVSEMVESKKSTKKSTKDIEANIPSAVKNQAIKDAKSVFSTKVKKSKYKIVPILKRPVCVWNNQNYSFDFTHISIPFMVNGKSTRIKVRALLIDKYNRNFELLKHKLGTLRITKKSAKWIAQISVTIPTNEKTGTKILGVDLGLKVPAVAITDDDKVRFFGNGRQNKFMKRKFRSVRKKLGEAKKLNALRQLDDKEQRWMQDQDHKVSRVIVDFATDNNISVIRLEQLTNIRQTARTSRKTKKSTHLVIPSFSTIHRVQSDISWHKGRICEPFLYKSNMSEMF

SEQ ID NO: 1581 - protein, 409 aa, Zetaproteobacteria sp.
  misc_feature (126)..(126): Xaa can be any naturally occurring amino acid
  misc_feature (178)..(178): Xaa can be any naturally occurring amino acid
  misc_feature (202)..(202): Xaa can be any naturally occurring amino acid
  misc_feature (268)..(268): Xaa can be any naturally occurring amino acid
  misc_feature (345)..(345): Xaa can be any naturally occurring amino acid
MKEVINKAYKFRIYPTDEQKVFFAKHFGCVRFVYNHLLAVRSNAYKQDGISMRGFDCQKLIPKLKKQDEYIWLKEINAQSLQGASHQLENAYKRFFNKSLKTGYPAFKKKGIRESFIVPQHFKVDXQHNQIFIPKLKTGIKTVFHRSLKQVEKLCSITISMRPSGKYHASIAVEATIXHRKPVSKVVEGIKTVGIDLGIKDXLIESNGNKINAPKFLRASERQLKRSQRRLSRKQKGSLNRKNQRICVAKLHEKVANQRKNFLHKESXRIVNENQVIYLETLNVKGMMKNRHLSKTISDCGWSEFVRQLKYKAHWHGSMIVQIGQWEPSSKLCSTIGCDYKHDAXKLSDREWTCPQCKATHDRDINAAKNIEHIGLEAPEFTPVKKTTSVFSIKKIQAASVKQESLASV

SEQ ID NO: 1582 - protein, 431 aa, Burkholderia sp.
MTELRTNTLRMTPSREEETVLRTLGERVSRLWNAANYLCRRAFVAGKPIPSYATLCARLPVEYEADYRALPSDIAQEVLKKIAEAWASFRALRREWKAGRLKHKPGLPKYRKDPKRKTERRPFDFIPIKSARTYDVADTFSLTLPADLRTKGRLLMTYVGCERYRGARKRAELIWDTARRRWYLKYTVEVPDKVVVGHNRGAALDLGVRIAASLSIEGVAQARHFSAREMLKDWDYWGRQIAAHMQELAGRGKRTSRRLQRLYAQRAARWRHAWQALAREVATTCRRQCVGTVYLGWPKGIRGSKVYSAKWAGRIHNFWGFDAASRILQTALERQGMLVKRVGERGSSSTCPSCGSKGVVRKPRHVLACRDCGDRIHSDQAGSRNILSFNHPGTSWDAVKTTVRPDTRRWNQQRWVDASNCCAMPARRLAA

SEQ ID NO: 1583 - protein, 391 aa, Sporolactobacillus sp.
MPLKGLKVRIYPSQTQKLKIKLSFGSTRFVWNQMLNMMMERYKNNPKAKFLSTYDLNYLLPALKREYPWLKDAESTSLQSTNHDLIEAYKKFFKTHHGFPKFKSKKFSKQSYQTKCVHQNIKQIASHYIKLPKLGLVQFKTGQQIPGKIKSATVKRSPTGKYYAVLLVECERQVFDKTNQQMGIDLGVSDLMIYSNGIKIPTIRFDKILASKKHYWEKRLARRRLIAQKAIAWDQHHKALNPRQLADFKNYQKAKLMVAKLNEKIANQRKNYLHKLTTRLVKENDVIVIEDLKTKNLLHNHSLARAMANQSWREIRRMLEYKCEWYGKKLIVVNPCKTSQICSHCGYDDGKHTLDIREWTCPKCHAHHDRDINAAKNILSIGLEQASVKES

SEQ ID NO: 1584 - protein, 418 aa, unknown
  TnpB Polypeptide
MQLVEKHIIRRSDPRYTAIDAECFASKNLYNAALYEIRQAFIHQHRYLNYQAMDKRMQQHEAYKVLPAKVAQQVLRLLEKNWKSYFAALAAYEAAPSKFRARPKLPSYKDKTKGRNVLIYTMQAVSRSKRTLGRKIIQLSGLDLTVKTRQDPQSIAQVRLVPKSGFYVVEVIYEQEEKQIAVDLKLVAGVDLGVNNLVALTSNKAGFVPVIVNGRGLKSTNQFYNKRRAELQQALRRKGSTRRLEKLTHQRNRRIEHDLHTVSRFVIDLLVAEGIDTLIIGKSDGWKQEINLGKRTNQQFVQIPHAQLIQMLTYKAELVGIRLLLTEESYTSKASFLDADLLPVYAPDQTTVPCFSGKRIKRGLYQASDGRLINADCNGSYNIIRKVAPDAFGLEGVEDGERRVHLPVVHPVRLSFPH

SEQ ID NO: 1585 - protein, 409 aa, unknown
  TnpB Polypeptide
MNRSNLFSLAPTRKQHHILEELAVNCAKLWNEVNYLHRQQYENYLQLDRNPQGYKKYVLLVGSATAQQVVRKNNEAWRAFLVLKHMEKNGKLPSTIKRVNPPGYWKRDGRYLLRILFRCDSYRVRNNRVELPRHLSIPFKGELKWIGKQGRLEVAWDTLSEKWRVFQSVHVKPIITPLGSKTCYIDMGVRNLATVWLPEWRQPVAYQSGRLLADWWYWTNRIARHQQRLLTVNGRRRSKQLSRLYRARRKRFRHAVATFARQLIRDLYAKGVSTIVIGELTGIRSNSDHGRRGNAMVHNYWSHKYVADRLRWTAEEYGMKIRTVSEAYTSQTCPRCHSRHSVRVLRGFQCLDCGLEAHRDAVGVLNMAARCGGYAVRPMAWPMLLRWDGCGWNRNNGMPTQAKRSRVEA

SEQ ID NO: 1586 - protein, 118 aa, Fusobacterium sp.
MSYNECSKKLTVLKKDKEWLKDVDKFSLQNSLKDLDKAYKNFFSGKGYPKFKSKKDNRKSYRTNYTNNNIEFLDKWIKVPKLGKLKIRDKIKPQGRIINATITQVPSGKYYISLCCQM

SEQ ID NO: 1587 - protein, 231 aa, unknown
  TnpB Polypeptide
VILYSKKVTGKGDRYYVSVLVEIPDVKIANNSNGGIGIDLGLKDLAIVSNGKTYKNINKSTRIKKLEKKLRREQRCLSRKYENLKKGESTQKNIQKQKLKVQRLHHKIDNIRTDYINKSIAEIVKTKPSYITIENLNVSGMMKNRHLSKAVASQKFYEFRTKLKAKCDENGIELRVVDRWYPSSKICHCCGAIKKDLKLSDRIYRCDCGYAEDRDFNAALNLRDALTYEVA

SEQ ID NO: 1588 - protein, 429 aa, Enterococcus sp.
  misc_feature (277)..(310): Xaa can be any naturally occurring amino acid
MEQLKAYKFRIYPTEEQEIFFAKSFGCVRKVYNLMLDDRKKAYEEVKNDSSKKMTFPTPAKYKKEFPFLKEIDSLALANAQLNLDKAYKNFFRDKSVGFPRFKSKKNPVQSYTTNNQNGTVALIDSKFIKVPKLKSLVRIKLHRQPKGIIKSATISRHSSGKYYISLLCKEEIIELPKTNSTIGIDLGIMDFAILSDGQKIDNNKFTSKMEKKLKREQRKLSRRALLAKNKGTNLFEAKNYQKQKRKVARLHEKVMNQRTDFLNKLSTEMIKNHDIXXXXXXXXXXXXXXXXXXXXXXXXXXXXXXXXXXNKLSTEMIKNHDIICIEDLNTKGMLRNHKLAKSISDVSWSKFVTKLQYKADWYGRKIIKVDKWFPSSQICSECGHKDGKKSLEIREWTCPVCHTHHDRDINASINILTEGLRLHSMGLA

SEQ ID NO: 1589 - protein, 383 aa, unknown
  TnpB Polypeptide
MSKANKSNKAIKYRLYPNNEQKVMFAKTFGCCRFVYNQLLALQKQRYKDGESHLSKLKSNEFATRILKKDYDFLKEIDKFAVSNAVFHLADAYDRFFKKQNHFPKFKSKRKSKKSYTTNFTNNNILIGKNVIKLPKVGMVKAVIHKLPKDDWKLKSVTVSQDSVGNYFASVLFEYEQEDIPSVSKSSTNAIGLDYKSDGLYMDSNGNKAGVHKYYRESHKKLAKEQRRLSRKAGSKKNETKSSNYFKQMRKVNRIYRKIANQRLDSLHKKSTEIANQYDIVCVEDLDMKAIGNKGFGNGKATFDNGYGMFLNMLEYKLKERGKYFVKVDKWYPSSQICHCCGSVKKLDLKDRVYTCDCGYTGDRDHNAAINILTEGLRILQSL

SEQ ID NO: 1590 - protein, 529 aa, unknown
  TnpB Polypeptide
MTRTDMFEVRPRSHRDEILLLELLDASAACNNEVNYDRRQTLFDIQDNADNRVPVNELRSTVKHAVTQEEYRQQYIQTLSSSTPQQLVQKNWDAWKSFFENLSNYRDPDDDTVTDRPSPPGYWKEDGTRTLHTVIRNDQYTLELGDRSRLEIPVGMDLKEKYGLGHNERLRLEVAGDPRWTGDQGRLEVTYDRDTESFTAHRTLQNDEDSTPRRRDTDADSPHVLAATDGGDPVVAAVDIGANNLAAITTSNGYHRLYHGRPLFNRFHSHTERIAELQSILPAGVWSSTLIRGKYMLRSDQRDHAMDALIRNLGEWLAAIGVSELIVGNLDDVRENHWTAEVNEKTDLFWAHGRFRERLHDVLEFEYGITVTEEDEASTSSRCPACGSDDVHRAGDLLQCVDCEREGHADVAASANFLEKHASSSIDIESDGSMARPAAARENTTADGHESFVPCLEWDDHEWTVERSGHPLATKEEPANQSTIKQDGNVAVGGHQSRGVAAGPNTAESESESTTGSDCPRVGNGSPRR

SEQ ID NO: 1591 - protein, 458 aa, Erysipelotrichaceae sp.
MYACIYGIITAGDTALYTITSYAVDLRHNKELVHLYKQTLSIYRCAFSWCLAITEVYWDSIRNIPHINTQMREIDKHIHANKNHQDPEYDFDTAFPNMPVYFRRAVIVDAIGAYSSYLANHANWENNGRKGREPQSGTVRNVYPTFYRGNMYDANDNEDAAKLKLFNGRTWDWYEVRLKHTDMQYLRNHWLAYGSLSAPTLEKHYGVYRLRFAVRKSSKLSDVPVKKQKICAVDLGINTDATCSVMTSDGTVLARKFINFASDKAEVWHYLNKVKQFQHRHGSHDVGSLWRYVRNLNSQHAYKVANAIADFAMISECDCIVFEHLNMSGRKIKGSKRQKLAMWKKNTVQILCESIAHRHGIRISHICAWQTSKLAYDGSGKTERSINGNYSICRFQNGRIYNCDLSASYNIGARYFIRELQKTMSESSWSRIKAEVPDAEKRTKCTLSTLWQLNAAVA

SEQ ID NO: 1592 - protein, 220 aa, unknown
  TnpB Polypeptide
VTVSREPSGKYFASLLFCCENQTVEKRPAEKFIGIDFAMQGMCVFSTGKRAEYPMFYRNTEKKLAREQRKLSRCQKGSQNYKKQKKRVALCHEKIRNQRKDFQHKLSASLAESFDAVCVEDLNLKGMAGGLHLGKGVHDNGYGLFLSMLEYKLEERGKYLIKVDRYFASSKICSVCGKKKEELSLSDRIYYCECGNRMDRDVNAAVNIMNEGKRIFAECA

SEQ ID NO: 1593 - protein, 348 aa, unknown
  TnpB Polypeptide
LRWLIPLVITSLNLRGRKRLFASFLSTSLPIMMLAVNFRLLPRLLFAVYRKSRMLIKQIGRVNEFLNHMGQSLLTIAFSAGISAAPKSLFWTINGRMRIPFVCGERQLELLKSQRGESDLVFVNGQFYLFTSCDVEEPTPLDVEDVLGVDLGIVNLAADSDGEIFSGKAVEENRRKYEHRRRSLQRKNTKSAKRKLKRLSGKQARFQSNVNHIISKRLVKKAQDTRRGIALENLKGIREAAVRRKQRSRHANWSFYQLRSCIEYKARRAGVPIVLIDPRNTSRTCPVCGCVDKANRRTQVLFSCVSCGFSAPADTAAARNIRARAVVNLPMVSNPVGSGTSWALADSS

SEQ ID NO: 1594 - protein, 416 aa, unknown
  TnpB Polypeptide
MIITRRVTFRLYPNRQQSEQLHYWRRLHANLYNAAVANRITQWKRFKHSVDYLEQQNCLPEFKKVWPEYVECGSHALQATLKRVDFAFQRFFKGLGGYPKFKASRRYSGWTYPCISGWKTETDGSNGYLNLSNLGKIQMRGSARTWGTPTTCTILCRNGKWYASITVQCQPTRPTGDGAVGIDLGCKDAITLSTGEKVAKPDFIKKGQLLVKVASKKLRRKRAPNRNKRVKGSRRWKRERKVVSKLQRKVASQRENWLHQTTSKIVSGNSLVAGEHLFVKGMTAKAKKGKRKRQKAGLNRSILEVGFATIGSLLNYKLAEAGGFYLESPTRELKPTQRCVKCWELTPKTLTDRIHLCSNPNCRHIEDRDVNAAQVNLTWARGQELASLDAESSSSTSCGSMRQLGAKKRRKPRPNS

SEQ ID NO: 1595 - protein, 394 aa, unknown
  TnpB Polypeptide
MKTVLDSLCDYRRYCWNQGLELWNTMYEARLIGLPVELRAKIKASLTDKTIEFSEEERALRALFPVPYERKVRDELVAQRAEWQFELSPRVLQQAIKDLARAWNLFFKNPKTAGKPRFKSRKKPKQGFKTDQARIKDGLLVLDRPQRYKGEWMGIRFKGAAIPDGKLKLCTITRTKGKYIATITMDVEPITLPKTGKKTAVDANVDHFDTMDGQTSLKPELLDPLYARVRTYQRQLARKRKVNKNYQHSQGYQTTRAKLQATYERIRNVQNDLLHKFTTDLYQENDIVVIEDLDVKGMQMKKKAKNLHRSLFGRFRQFMEYKAEKFGKMLILADRFYPSTQRCSNCGHVKTGDEKITLSGNQKHGTRHHEYVCYHCGYEDDRDHNAVLNLLALA

SEQ ID NO: 1596 - protein, 385 aa, unknown
  TnpB Polypeptide
MLKTFKYRLYPSKAQAELINKHCGCARFIYNFGLNAKIETYQKEKKSLTCIDIGNLLPDLKKQNIWLKEVNSQSLQMSLRNLDNAYQKFFREKKGFPKFKSKKDNKQSFQIPQHSNIDFSNNLLFIPKFKKGIKIVLHRKFEGKIKTITISKTCTNKYFASILVDTTDIIPNKTPISENKAIGIDLGIKHFATLSNGIKIENPKHLKKSLTRLKTLQQRLSKKVKGSNNRNKARLKVAKQYEKVTNQRNDFLHKLSTSLLNQYDTLCLETLSVKDLIERKELSQAISDCSWSNFNSMLEYKANWYGKNILRLGRFEPSSKICSCGIINNELTLSDRKWTCKACGLTHDRDILASCNILKYCFHKQNIIGLEQPEFMPSVMTFSHS

SEQ ID NO: 1597 - protein, 381 aa, unknown
  TnpB Polypeptide
MIIRKTYKQKLYKCFKKTKHLDNLLIIAKQIYNHCIALHKRYYRLYHKSLNIYQLQKHITKIKHTYKKNWSVLNSQSIQDITERIDKSYSLFFKERKKGNKKISLPTFKSISKYKSITYKTSGYKYNQDFVSIQGKKYKLFKDRQINGKIKTLTVKKDNIGNWYICISVQEEIKPTFKRTGKTVGLDFGLKTFITTSDCDKIPSPEFLKSDIKKLRKLSKKLSKKVKGSNNRKSAKFSLSKFHIKITNKRDDWQWKLAHQLVAKYDIISVETLNIKTMQQLWGRKISDLAIYSFYSKLEYLCLIQNKSFVKIDKWYPSSKECHVCHYVLDELSLSQRTWICPNCQTKHDRDENAAKNIEMVGTSTIRLADVRPQLNEAICA

SEQ ID NO: 1598 - protein, 369 aa, unknown
  TnpB Polypeptide
MLKAYKYRIYPTNKQKILLTKTFGCVRYFWNKQVEIFNSYNKETNPTPIFKTSTEYRKEIEWLKEVSAAAIQQKEIDFKEYKKQRFSKIRKKAILHPKFKNKSNKQSYRLPNQKFKIVDNRIQLEKIGKLKIVIDKPIPKESKLMSVTISKNTSGQYFASVLVEQEIKHLPLTNKNVGIDVGLKEFLTQSDNITIANPRYFRDSQMKLAKMQRCHSKKKKGSNRRKKLRLKIAKLHQQITNQRDWFLHNETMRIVRDYDKICIENLNVAEMVKNHKLAKSISDASWSKFFSMLDYKCKWYGKELIKIDRFYPSSKTCGCGAINNDLKLSDRVWTCSNCGAVNQRDLLAAQNIKALGIANAIQTQSAKVA

SEQ ID NO: 1599 - protein, 427 aa, Escherichia sp.
MHQENTMLPRRISVSLFTDQSIIWPVKRLQAFKFQLRPGGQQEREMRRFAGACRFVFNRALALQNENHEAGNKYIPYGKMASWLVEWKNATETQWLKDSPSQPLQQSLKDLERAYKNFFQNRAAFPRFKKRGQNDAFRYPQGVKLDQENSRIFLPKLGWMRYRNSRQVTGVVKNVTVSQSCGKWYISIQTESEVSTPVHPSASMVGLDAGVAKLATLSDGTVFEPVNSFQKNQKTLARLQRQLSRKVKFSNNWQKQKRKIQRLHSCIANIRRDYLHKVTTTVSKNHAMIVIEDLKVSNMSKSAAGTVSQPGRNVRAKSGLNRSILDQGWYEMRRQLAYKQLWRGGQVLAVPPAYTSQRCACCGHTAKENRLSQSKFRCQVCGYTANADVNGARNILAAGHAVLACGGMVQSGRPLKQEPTEMIQATA

SEQ ID NO: 1600 - protein, 419 aa, Synechococcus sp.
MLLTYQYKLKPTEAQAAVMEVWGERLRRHWNYALGERLDAFYRSRCQIDRCSIVAEPIGDIPKEVNYYTQASALKETKRLFPDYKGIYADCQQQNLMRLDRAWKRWRKPDQNGKRGGRPRFKKRSDICSFTFPRVNNPKAGAHLTGNVLQLSKIGEIELILHRPIPEGFVLKQATLVRKADGWYVSFSMADETVPEALPVERVKTACGIDVGLEKFLVTSEGEAVSMPQFFRQSQQRLARQQKKLARMQKGSENYKRQTNEVARLHLHVSRQRREFHYQVAHWLCDLYDLISFEGLNIRGLARTRLAKSILDAAWGSFLQILQAVAVKRGKRTVEVNPRGTSIECCGCGERVKKTLSERVHRCGCGVVIDRDWNAGINIKVRGLRAVGLPLWRLWRLIRWDACETATLTRESEKLPLDP

SEQ ID NO: 1601 - protein, 417 aa, Synechococcus sp.
MITLTYEYKLKPTKQQAEQIDHDLEVCRRVWNYALRERKDWVASRKCPVNVCSLCGEYIIPADAPYPGFKVQCQRLTEAKRLNADLASVNAQALQQVLRRLDQAFDRRKKLGAGFPRFKKSGRMRSFSFPQLGKAPLRDGAVKLPGLGWMAIRHSRPYPEGFTVKQARVVKRASGYYVMLTFRADIVIPEPPLVGHVVGVDVGLEYFLSTSDGLQLERPRFFVDLQRKLKLLQRRLKRKQPGSANWKKAQAKVARLHERIADTRKDFHFKAAHQLCDAADVIVVEDLNLIGLSRGMLGKHMLDSGHGQFLNSVLPWIGLKRGKVVVKEKAAGTSQECPDCDEAVRKTLATRWHKCTCGCSIPRDVASGLVLRNRFKKRCRADSAENAPGEVLAGSVLHSSQDSVNGESPAIREVLAG

SEQ ID NO: 1602 - protein, 445 aa, unknown
  TnpB Polypeptide
VRLRLKPTNAQAAMFLRAAGARRFAFNWALAQIKANQDQWAAEGTYDIPKAARTRPFSHFDLIDRWDATKNTVAPWHGEQSVWTFRYGIHAAQEAHSRFLKGKSRFPKFKARRRDRSRFTVLGKGLQLQPGRLRVAKYGWVKLSAPCRAQAKLRRLLVRGRARMLNVTVSRDAGGAWYASVCFERTTTADPDSYNRPAGVAVGVDVGLKTAAVVATSNRTPGTPLEASRALRDALAHIKHLQRNLCRTQKGSANRAKARLRLGRAHARVAAARNTRLHQFTAPLAKAHQLIVVESIATANLMRNHHLAQAIGDQGWGELARQLSYKTPRAGGILLPAPRFFPSSKMCSACGAVKSKLPLSVRTYRCEHCGLVVDRDINAAANLAAWGERKLGITPVAESQVGDRHPGGPSVQDLGHACGGSNEPVKTTAGAFGEAGTSRPRASVA

SEQ ID NO: 1603 - protein, 504 aa, unknown
  TnpB Polypeptide
MDLEGELLDSDTVMPLLASEVQGIADYATYVVRNDTALESRMALTVASSPAEAGRQAGVTLPDFLVTGKSGRSRKEKLIQYNMVAAYRSWAERVKAVNNTSSKYVSQGWARTMNASAPSYGEAYINLGAVDRNYAVIENNPTIDGEIVLKMVIQGKWYRLVFNFDNSRFREGKVTLPLVKVENNQPVFIFTVVTDNPIVQFSGDYVIGVDVGINNYATVVVRNSQTEKIVYQMTLSQRVHSLWNSVRASERQVKQLRKKADKLLYDRQDRMAALDEAQLHREAASRKKRELAILAAQEISYLSYIYDNAVVAVEDLGWITNTMQNGRWNRGSFTQWLTHYVSQNGGWVVAANSKNTSQVCHICDSKVSHPVHEISVCPEHGVLDRDVNAAANIAARAVPKVEKARKTRTKNRKLQSQAPLKTPVARGSLKYPGRDRTKNKPTPKRKKRVVREVILPSCPARVQALSLVTRVLADCDTHGVSETNTAALKQGTNMTYKYKLCNPI

SEQ ID NO: 1604 - protein, 311 aa, unknown
  TnpB Polypeptide
VALWGDYLLSSFSKGQNKFPHFKSRKYAQSYNSKCVNHNIKVIDNHHIKLPKLGVVYFRSGRLPQGKIKNVTVRLTVANQYYITVLTECENQTLAKTGKRVGGDLGLKSLLNLSDGYKEPIHHFEDKYRKKLHHWEKLRSRRYLLAKQAIAWDYHNKVLAPRQLDDFKNYQKARVMVAKYRQKIANQRLDQLQKFTTKLVKQYDIIVLEKLNIKGMLKNHKLARAITNASWSKLVSILQYKCDWYGKKLIQVNPAYTSQICINCGENNHRLGLDKSEWLDVREWDCPNCGTRLDRDINAAQVILKKGLATQ

SEQ ID NO: 1605 - protein, 363 aa, unknown
  TnpB Polypeptide
LYPDRAQERELEATLETCRFVYNSMVNDRKFQYDTAKVSVGYFTQKAYLPAWKKDHPELKAVYSQVLQDVVHCVELAFKAFFDRVAKGETPGFPRLKGDGQYDSITYTQNDSFKVGDSSIRLAKIGQVKAKLHRKPWGELKTCTVRRINNKWFACLCQEIEAEYLPPSDEAVGIDIGLKTFAAFSNGEFIENPRFFRRDEKALAKAQRKLSKQKRGSRERKKARKVVSRIHERIRNRRHDFCHQNARRIVNRFGIIAVEKLSVKNMLGNHCLAKSIADASWSQFRSVLTSKAESAMRKVIAVNPAYTSQDCSGCGYRPDGLEGRTKKKLSDRWHLCPMCGLSVDRDTNAAVNILAIGQYSLAT

SEQ ID NO: 1606 - protein, 211 aa, unknown
  TnpB Polypeptide
VTGTFAVTSTGGVHRLSGLPHPQTRRYERRRGRLNRQGLVLRTSRFSPSAVASRTGHWTGCTTVRTTSSREARDADVDGIIFEKLDHIRENIANGSKFQQWAYAKFVELVEYKVESTALFVDTVTPAYTSQRCSHCGFTHEDNRDDKQFACQDCGYEVNADYNAAKNIAVRYCGYIHRGQKSRGGWSTSQLALKSGTLNMNGDYTPTELLG

SEQ ID NO: 1607 - protein, 259 aa, Micromonospora sp.
MRSSRRPCGARMIGVDKGYTEALTDSEGEHHGTRLGTLLAAESDRGKERNRRRAKLRSIANNAARRGDHAKAHRITVNNLGQVKRDRQAARHRAQVRTEIFTAVHRVVDKAATVVAEDLTKSFAGRKRLGKNVNRRLAAWTKAITAEALANVSERRGSAFVHVNAAYTAQACHRCGRLGRRDGDRLHRTVCGVVWQADVNAAINIPRRAGDPDIALHTPHQRVRQILQDRTDRHRTRLPVQDSRPAPPSGERIIPTAQH

SEQ ID NO: 1608 - protein, 482 aa, Thermus sp.
LQTTALFAIIHISSGALPLGPQARHGLPHRLAVAQGRDPHLRLRAALRKAVAQAPGQKDFGGHVRVNQAFRFELSPNEGQRKALAQHIGAARFAYNWGLERSRKALEEGERLPSAAELHREWNRWKRENAPWWTEVSKCAPQEAFRDLEKALKNWQKRKSCFPRFKRKKLAPDNGARFTGAIKVFSRHIQLPRIGRVRSKEPTDKLLKLLEEGKAKILSATISREADRWYMSLTCEVERPDPKPKEVRSEDDVVGVDLGLSSFAVLSDGTRIEAPKPLAKRLRLLKRRSKQLSRKEKGSNKEKKAALRLARLHRKIKNLRRDFLHKQTTWLARTKPVIVVEDLNIKGLSRSPLSRSVADVGWGTFLRMLEYKANWYGATLIVAQRSFPSTRLCSRCGHLNGKMPLFQRVFRCEACSLERDRDLNAALNLRAYGLAHLTGPTASSAGSDAPGDSSGGGTALLGWSTSHGSLKGEAARRQPLGG

SEQ ID NO: 1609 - protein, 479 aa, unknown
  TnpB Polypeptide
MRKQRRKRAKKGEPQRITKAVTHIRLAETNPGKLAALDQLAHAFLPLVQQYVTLFCTDAIPDAFSAPCFPTELSERWHRVAIQQAAGIAQSWHTNRANAYQEYLDELAEYQELQASGECEDGAEEPTWREWDVPTLHETCIQGNCNVLKLEPPTDSMFDYWLKVSTLDKGHPLPVPVKLADYHIEALTNSKTKQRHPINSSVTLNRRDNAWWLTLSYDEIVEVETKPDAKVVGIDVGIANFVTASDGKQYGTFNGKLRKRQKRDREKRRRKAKLRACLKKKGVPEEQLPSTSNATGQRLMRHVKQSINRAVNLCFEEHEGCQFAYEQLSVASMRFKARAQNAYLRASQLGQIPKQIEWNATKRGVQATRVKSAYSSQQCHVCWYVDRKNRPNQGTFLCQVCGHITHADHNASENIAVRLHDEELRTCQSRAEVKALLLRRHEQWKQKFRLAVVQPPVQLGLWACPQASADVGEGEKRDE

SEQ ID NO: 1610 - protein, 339 aa, unknown
  TnpB Polypeptide
VVQSFFASLKSWYKRRKTDPNAKPPKRRRRYFKVIWKSSAIRVRGGKLVLSNGKTNPPVVISWAWETPVQVEIGWDGKQYELRACYDLSKRQAERKEEETPKAGEVAGVDLGEVHLAVAHDGKETFIANGRLLRSQRRYQNKLKGKLSRLMARKKRDSRRWKRLVRSKQRQLARLAKQMADILHKQTTRLVSTLQARGVQTVVIGDIRDIRRSAQYNKVANQKIHQMLSGQVRRMLTYKAEQLGMRVVLQEERYTSQKCPRCNMLHKPSGREYHCRACGFRFHRDGVGAVNLRRKYLGQFDVPVVGVMASPIGLRFRPHARCSSGSRSYPATRERILAL

SEQ ID NO: 1611 - protein, 402 aa, Actinomadura sp.
MGRQVRRAFKFRFYPTGEQAAELSRTFGCVRLVYNKALEERTRAWYGEQRRISYVQSSALLTQWKKTQELAFLAEVSCVPLQQALRHLQTAFANFFAKRAAYPRFKSRKRSRCSAEYTRSAFTWRDGRLTLAKMTTPLDIRWSRPLPDGAEPTTVTVSRDGAGRWFVSLLCQDTIPAAPATEAAVGVDAGITSLVALSTGEKITNPRHERRDHARLAEAQRNLARKAPGSANRDKARRKVARVHARIADRRRDLLHKLSSRLVRENQTVVIEDLAVGNLLKNRTLARAISDAAWRELRFMLEYKCAWYGRDLVVLDRWFPSSKLCAACGTIRGKLPLDVREWTCECGAVHDRDVNAARNLLAAGLAVTACGDGVRPQRDTPRTGHSSMKQETQRATAGIPHL

SEQ ID NO: 1612 - protein, 247 aa, Actinomadura sp.
MRTAYKCRAYPDPDQAALFNNFAVTSDGERIANPRHLENKQRNLARYQRRMARKRPGSSNRRKAKIKIARACRKVRDARTDFLHRTSTALVGRADVIVIEDLAVANMVRNRKLAKAISDCGWGEFRRQLEYKAERAGRTLVVIDRWYPSSKTCSACGHLLAELSPSTRRWTCPGCRTRHDRDINAAKNILAAGRAAARGDPGDVCGADVRRQGPSPSAVGCEAETPTARAVGPPSHPGGEEVKGAVR

SEQ ID NO: 1613 - protein, 487 aa, Actinomadura sp.
MRASALVFRPGVKARAGRAAEARAVHVPHDRSIRARYRSANTSCRNLATKTKRTCIATTRSLSVLLPSGSVMDRYGAGVQLRYNYRLYPTPGQQIELARAFGCARVVFNDGLRLRQEAREQGLPYVSDAELSKRIITQAKATPERAWLGEVSSVVLQQALADLNTAYRNFFASLSGKRKGRKVAPPRYRSRKDNRQAIRFTRNSRFKVLGNGRLRLPKIGDLAVRWSRALPSAPSSVAVIKDAAGRYFASFVVQVADEPLPTVESEVGIDLGLVHFAVLSDGTKVAAPKFLRRAARKLKRLQQALARKQRGSQNRRKAVVRVARAHARVADTRRDWQHKLSTQIIRENQAVYVEDLCVTGLGRTRLAKSVHDAGWAGFTGMLEYKAARYGRTFGRADRFLPSTRMCSACGRITEKMALNVRTWDCPCGSHHDRDVNAARNIRAAGQADLNARGAHVRPGLVPAARNEAGTHPDAARSTRSVEGISVL

SEQ ID NO: 1614 - protein, 408 aa, Planktothrix sp.
VIVYEFKLKGKDWQYKAVDEAIRTSQFIRNKCLRYWMDNKGTDKYDLNKYTTRLAKEFSFVNELNSTARQASSERCWSGIARFFDNCKKKIKGKKGFPRFKKNQRSVEYKKSGWKLSPDKKTITFTDKKGMGIFKLVGTYDLHFYPVDQIQRVRLVKRADGYYCQFCISVDIKQTLEPTGKTLGLDVGLAHFYTDSNGEKVDNPRYLRKSERQLKRLQGLVSKKVKGSNNRKKAINRLGRKHLQVSRQRKDFAVKLARCVVMSNDIVAYEDLKVRNMVKNRHLAKSISDASWSQFREWLQYFAIKFGRVAVPVPPHYTSQNCSNCGETVRKSLSVRTHICKCGVILDRDENAARNILIKALQILGYISNTVGHTEINACGEMTLYLNLETVLKQGRSVNQESPRHSVA

SEQ ID NO: 1615 - protein, 399 aa, Lactobacillus sp.
VLKGIKLRLYPNKTQKDQLWQMFGNDRFIWNQMLAMMNERYKNNKDLPFLSKFKLNYLLKPLKKEYPFLRNSDSSSLQVVNEFLNQAWKNFFDDKTGKLGKPRFHSRKFLRLSYTGKSIVQVAGKRYLKMPKLGYIKTSKTDILKDTKIKRYTVTLEPTGKYYLSLQVETELVEAFKPTGKKVGIDVGVADLVILSNGFKCPSFDSSYYEKIARNWQKKYSRRRHLAQMLCLQDKQRKVLSPRSLDSFSNWKKAQKIKAVYQAKVAAQRKDYLHKLTTHLVKQYDVIVIEDLKVKNLQKNYYLAQSVANASWSMFRQMLEYKCDWYGKKLIAVDPKNTSRICSKCSYNSGEKPLNIREWTCPKCQTHHDRDINAAINILNKAKLNGREPRHGKQLSSVS

SEQ ID NO: 1616 - protein, 371 aa, unknown
  TnpB Polypeptide
MYKSIKYRIYPNKKQLEIISQTFGCCRKIWNLILEDKIKSYETNQTFSSKLLSDFAKEYAYLNDVDYSALYNTQKNLLTLIKTDFKKNGFPKFKSFNYGRKSYTTNNSNNRIELKDKYITLPIVGDVKSKIHTLPREDAVIRFATISKDSDGRYYCSVTFKCTFEPLKQIIDTNNAIGLDYCSNGLYIDDKGNIGTNHKYFKESEKKLAKLQRRLAKKQGAKKGETKSNNYLKQLQKVNKVYRHIKNQRNDNLHKISNEITNRYDVVCVEDLNMVSMSQKPKLGKSTMDNGYGCFIRYLEYKLNNRGKKLIKVGKYFPSSQICSNCGKLNFEIRDINIREWECPVCGAKLNRDINAAINIKNEGLRLLSLQ

SEQ ID NO: 1617 - protein, 280 aa, Natronomonas sp.
MEVRRTVPVALEVDSNDAALLEDTVDTFLWSAQYAVDHAFQGEYVTTSKTTLDDETYDDVREKTNDFNSGLVQAARNKAAEACKSVVARWQNGKKASKPTFTSPHVVYDHRTATFHDDYVSLATTDGRIEGNYVLPDEDSDTPHSEYLFSDEYETTGAELHCQDGNWVLHIHCKKEVESDTPEQARPENGAVLGIDLGVNNLVVTSTGTFWTGNEFDHWRREYEKRRGSLQQCGTRWAHQNIQSVGRKEEGRFNLMMHRIANELVSEARKNECKSSRSRT

SEQ ID NO: 1618 - protein, 415 aa, Natronomonas sp.
MYYAYKYRLKPSDAHREELDRHRDICRQLYNHTLYRLNEYQNEHGELPSMTTLRSNLPDLKTWWDDLSDVYSKVLQTVVERLFDNLKGLSALKENGYGVGQLKWKPPREFRSFTYSQSGFKLDKKGGQTVLSLSKLGDIPIRLHRAIPDDATMKQVTVKKEPTGEWFATFGVEMDREPPEPPENPERCVGIDVGILKYAHDTDGFAVGSLDLSGERERLECEQRSLSQKQHGSNNYEKQRRRVAECHADLKRKRRDFLHKLSNYYAREYDLVAVEDLNVKGMMESPSNSRNTASAAWRTFISMLEYKCGREGTHFVAVNPRGTTKECASCGVETVKPLWVREHSCPACGFEADRDANAAWNVLSRGLEDVGVVHSEQTPVETALPTGTDSVPAQRVVEAGSPALKERPKGANRVG

SEQ ID NO: 1619 - protein, 430 aa, unknown
  TnpB Polypeptide
VSKVARTVVVKSVPLPRRVFRVFVELEGICRNIVEQLTMFAVGNSITSFAKLKALKYRELRALYPQLPLHYAYTACQDASTRAKSFLRLKKRGFAEKDYPEVKSVSIWLDDHLWRLSSLTSVEIATHKGWIKIELESHKRYWKYVNSGWMFFSETKVKLDKKSRRVLIYLTFKKSVELYKPKGFTPVDVNENHVAVLVDGKAYLFETGFRDIVLGYYYRRKRIQEKYDETFGVNCRIKKKVFRKLKEKKRKDNLKWKLASIVVGIAKEKQYAIVLERLGKNPAKEMINHIGDSQLRHRIYQASFKGVQRAIEEKAREHGVPVVYVNPKNTSRLCPIHSAEIVYNGSRVGKCPTGEELWHRDIVACVNLLIQARLGDGSFAPSLGELSVDGGCVPFSPTAAHEPTPIAREVWARRKSLDATNKHKLMRMSI

SEQ ID NO: 1620 - protein, 308 aa, Domibacillus sp.
MNGSKKWTALRFNRLSNTWRMPFHVFSKNKIRLPDSNPRKIGSSRTQPNTQTTTLPLKGTGSNCQSSVLSATVRRNPTGKYFVSILTETDVKPLPKTGSSVGVDVGLKDFAILSDGTVYKNPRFFRSLEKKLANEQRILARRKQGAIQRKKPLLEAKNYQKQKRKVARIHEKIANTRVDYLHKISTNIVKNHDIIGMEDLQVVNMLKNRNLAKAISEVSWAQFRTMLEYKAAWYGKQVVVVSKTFASSQLCSSCGHKHKDVKNLALREWTCPQCGIHHDRDLNAGLNLKQEAERLIASSTAGTAGVAY

SEQ ID NO: 1621 - protein, 389 aa, Kurthia sp.
MTNKEVFAMIYKAYPFCLYPNKDQQAMIHQTHGHCRFVYNHFLELWNTTYKEEGKGLNRSSMSKLLTKLKKQDETAWLRNVDSVALQTSCEHLMDAFGRFFKKQNNYPRFKSKKNLVQSYTTKNTNDNIAIVGNKIKLPKLGRVKFKQTRALEGRMMRATIHFHASGRFSVSIMCEVPKFQPLPKTHEAIGIDLGITDFVILSDGRKVDNQRFTAKMEQKLKREQRKLSRRYEQAKKDNRALRDCMNYQKQRRKVARLREKVAFWREDFLHKFTTAFIRQYDVICVEDLNTKGMLKNHKLAKAISDVSWSSFVQKLTYKAKWYGRELVKINRFFPSSQLCHVCGHHDGKKALEIREWVCPACHTTLDRDVNASRNILIEGLRLFETTKP

SEQ ID NO: 1622 - protein, 381 aa, Kurthia sp.
MPHKAYKFRIYPTKDQQALIHQTHGHCRFVYNHFLERWNTSYKEEGKGLNRSIMSKMLTKMKKQDDTAWLRNVDSVALQASYENLMDAFKRFFKGQNKYPRFKSKKNLVQSYTTKNSHNCIAIIGNTIKLPKLGLMKFAKSRDIEGRILRVTIKYNASGTFYVSVLCEIPDFKTLPQTKQAVGIDLGITDFAIFSNGRKVDNQRFTTKMEQKLKREQRKLSRRYEQAKKDKRDLRECMNYQKQRRKVARLRERVAFQREDFLNKLSTELVRQYDVICLEDLNIKGMLKNHKLAKAISDVSWSSFVQKLKYKAKWYGRAVMKINRFFPSSQLCHVCGHRDGKKTLAIREWVCPACHTTLDRDVNASRNILAEGLRLFEATKP

SEQ ID NO: 1623 - protein, 378 aa, Kurthia sp.
MPHKAYKFRIYPNKDQQALIHQTHGHCRFVYNHFLERWNTSYEEEGKGLNRSIMSKMLTKMKKQDDTAWLRNVDSVALQASYENLMDAFKRFFKGQNKYPRFKSKKNLVQSYTTKNSHNCIAIIGNTIKLPKLGLMKFAKSRDIEGRILKATIKYNASGKFYVSLLCEVPDFKPLPKTNQSVGIDLGITDFAILSDGRKVDNQRFTAKMEQKLKREQRKLSRRYEQAKKEGRDLRACMNYQKQRRRVARLRERVAFQREDFLNKLSTELIRHYDVICLEDLNTKGMMKNHKLAKAIADVSWSEFVTKLKYKAQWLDRKIVEIDRFYPSSQICHVCGHRDGKKTLDIRQWTCPSCGTLLDRDINASKNILTGGLRILRQ

SEQ ID NO: 1624 - protein, 416 aa, Spirochaetales sp.
MLRSFSFRLYPTAEQQRLLTKSFGSVRFVYNRLLEYRNKAYERRKESRNYYDCNTFLQKLKGIHPWLRDVNSQSLQMTNRNLDTAFNNFFKNPGKTGYPTFKKRSARQSFQCPQNVKVDYQVAAVYLPKSGWINCVFHRRFKGDIKTATVVLEPSGKYHVRILVEKGIGNVKSDKRLPVKLEDVLGIDMGAKTLAVCSDGTEFENNKYLLNSERKLKSLQRRVSRKEKGSSNKKKAVKKLARCHEKIKNQRKDTIEKTTTDIVNKNHVAVCVENLNTKGMIKNHKLAKTISDASFCQFLVRLEQKCIEHGILFVKVPRFYASSKICSNCGYIYKDLRLSERKWKCPVCNVVHDRDRNASVNIQKKGYEMITIPVDGGKSTPVETNMVDDRANAPKKPNVKEAGIVLENTTQEAPCL

SEQ ID NO: 1625 - protein, 373 aa, unknown
  TnpB Polypeptide
MSNKLKAYKFRLYPNRTQEVLLNKTFGCVRYAWNQNVAQFNTYDKETNPKPEFKTSTELRNEIEWMKEVSASAIQQKEIDFKEFKKQLFNTKRKTKLGFPKFKKKSNRQSYRLPNQKFKIINDRIQLEKIGKIKFVKDREFPKFFKFLSVTISKNPSGEFYISVLVEQEISHKPKTNKEVGCDVGIKSLSVQSDGIEVDNPRYFSKNQAKLKRLQQHFSRKKKGSKRRDKCRIKIAKLHQKITNQRDWFLHNYSTYLIENYDRIFIEDLDVKGLLEKKQLSKEISDVSWSKFFQMLQYKADWYGKEVIKVNRYYASSKTCSCGVKNENLKLSDRVWTCNSCGTENSRDHLASQNILKEGRRSLGELALANSEA

SEQ ID NO: 1626 - protein, 210 aa, Lactobacillus sp.
KRYTVVLEPTGKYYLSLQAEIPEPEKYSLTDKQVGIDVGVADLAILSNGLKYPSFDSSYFEKKAKVWQRKYARRRHLVKLLVLQDRNKRVLCPRSLESFTNWQKAQKSKAKCQAKAANQCRDYLHKLTTHLVKQYDVIAIEDLKTKNLQKNHHLAKSIANASWRMFRQMLEYKCEWYGKKLIAVDPKNTSRICSKCGYNSGAKPLEIREW

SEQ ID NO: 1627 - protein, 593 aa, unknown
  TnpB Polypeptide
MVQSQGQSFRFYNASLKWMYDCCPLQVRSAVPLDARKAHHFDRAFTRNCDDASSGFLQRDRRPYYPPPDDHDLRFVSQPFRRPLPEWRPSDRGVDGAPAAKSARKRERVGAYRQYRVRMLPTPEQKRELKRCFAATRHAYNWFVDRVENHGEAPKEFARKKDFRAGDRPGWVTKVASQIVMGGMADAANAYKSNFSKRRLNPGQPGTFKVGYRSHRKTLTESIHIEGDGDYQMKHSSLLAFKPLPFANNPALRSECAVFFGNNLSGLGERYWDEETSEERADRLARGREEGRATRARNPQWRTLKGADGIRLQDKPRVIARLLAEGRNGDGNGVVAGCKIHWDKRKDSFHLLYTYELPPLADPDPEFDAKRLVATDPGVREFMTWYDPATGNHGELFKGGEDQIQRRCARIDALTSQMVLRARNYKTATPSRSRRQRRQRFRQMRRTLARERCRLHDYVGAGHYAAANHLLRHHDVVIAPKLAASRMVPRDGRVFGSKVARAMLTWSHGLFTDRLHSAAYRHAGRHVLSDTGEPGTSKTCGDCGHWNARLGADKTYTCTVCGTIVSRDLNGARNNYFAALGAAKGIGWDGVHR

SEQ ID NO: 1628 - protein, 378 aa, Calothrix sp.
MLLSFKTALIPNDKQQTAFKKACGVARHAYNWANAHIKEVLELRKDDKSIKIPSAIDLHKKLIETVKSVNEWYYETNKNVPQKALADLRQAWDRCFKKVSKQPRFKKKGQRDSFYLEAGTKAKPLIKNDGKRVKLPSIGWVRLAEPLPVTAIHNCVISRQADRWFIAIKYEMEQPTLNVKRPTVGVDIGVKELAVTSTGKVFPNPKAYRRMSKRLKLAQRRVSKKVKGSKNRAKAIKKLAKLHAKVSNIRKDSIHKLTHYLAKNHSVIKIEDLHVKAFLKNHKLAGAIGDCGMYEFRRQLEYKTEKFSSKLILVNRIFPSSQICSNCGNHRHKMPLKNRVYVCPDCGHIEDRDLNAAKNIERWFDGIYIPKCSDVVSQ

SEQ ID NO: 1629 - protein, 526 aa, unknown
  TnpB Polypeptide
VITGSAALAATREGIFFLDWPGGRGMSYLPGMMLARDRAGTSPGSVSRCRRGACCRVRLDPGVMVARFAVPDGWTVQAFAFALDCTPEQAACVSRQFGGRRYARNWAVRTLKEDLDRYRAAGEETEKPSLASLRKRWNRAKDTECLDRKTGEAWWPEISKEAFADGIRAAVDGYWNWQQSRAGNRSGKKIGFPRFARKGRDRDRVTFTTGAIRVGPDRRHVTLPRVGTVRTWENTRRLERLLAKGRARILAVTVSRKGTRLTAAFRVLVQRPQQAGVASPGSRIGVDVGVRVLATVANSRGEAIDRVPNPRPLEAALKELRHLCRERSRRTRGSRRYRETQQKITRLQRRVAGIRAHHVHVLTTGLAKTHGTIVVEGLDVAGMLRQKGLIGARARRRGLSDSALGETRRQLGYKAGWYGSSLVIADRFFPSSRTCHVCGHVQDIGWAGHWACAQCGSRHQRDDNAAVNLARYEPPRPGDSAVGPVGAAVKRRADRKTGPRPAGGDEARKGPGPTRAGKQPRDGVPA

SEQ ID NO: 1630 - protein, 424 aa, unknown
  TnpB Polypeptide
MQRRKVVKNNMVRTLKLKLLTDQRESALLDEVSRLYNEVCNAVSAYIFEYNFPLNFMMLQKDIYDILRKQFGLNSQMTISALKTVTARYKTVKEQLRANPMKFRDKYTDELHIVPRTLDWLTKPLIFKADQANFVRARNYRLTKGKLSLSTQSGTILVDFQADPKFHKLLGSGWFCGTATLIRRKQTWYLCVPMKSPEEEKDALSNIDRSKINKIVGIDRGIINLLCAADSSGKTTFSSGRAIQKKRDNFTRLRHELQAKNTHSARKKLKRIGQRENRWMTDVNHVLSKALVERYGDGALFVIEDLEGISFSEKNLRRKSAKSKRSLRSWTFFQFEQFLVYKAEERGSYVLKVPTKYTSQRCPKCGVIDKTQRCHDKHEYRCRCGFRTNDDRVGALNLLELGHRYLAGEDKPKFVKSKTLSIAT

SEQ ID NO: 1631 - protein, 530 aa, Persephonella sp.
MLLVNRTLSIRISGKQKRERISNLLFSLAQFRNLLIIFNKIYQKTYNKWILNESYLYSILSDRPYTPRGKDKERKLNEFNEILQNIEKSQELKYFLKQLKQQKEKIKNNYILQNLIKQLVKDYKSFFKSMEKYKKQLNKFKGKPKPPKAKKLKDIPSFTAELNTNTFERIDKTHLLITLTFDKEKQYLKVKLPKDFNYEIKSVRLKFIANDIYVDIIYNKEIEQVNREEKKHLAGIDIGLDNLLTILSTNEELQTLIINGKEIKSINQWYNKEKGKLQSQIDLLQNKISKLKEDNPSIENLEKERRKLLNNRRELSGYRNRWITDIFHKITRKIADFLMETGHKEVYIGKGATESKNEINLGKRTNQNFVSIPFRKLINQLKYKLEGYGIKVKEITEEFTSKTSPFASMEEVIKRWKEYLKEKKEGDKRREKEIKKELKENYGGRRIKRGLFKCYITGKVFNADAVGSYNILRKEAEPLIEREILIDKLSRPVRVKINQLLKATCEFLLGITGRKTSWAYCKIAEVGNFL

SEQ ID NO: 1632 - protein, 364 aa, unknown
  TnpB Polypeptide
MYEFRIYPTRKQRIRLFNQFDICSKVYNTLLGEARAAYKEKGKADTRKFTLINAIKAIKSKDPTTNQVYSQSLQNVADRLSKAYANFFRRIKERKAGKKVKAGFPRFKKHFRSITYPQSGFHFVSDNRLFCSKIGNIPIVLHRVPKGKIKTLTIKRNQAGQWFAIFACEVDIKAVPNIGRAIGVDVGLENFATLSDGIVIENPKFLRKSEIRINLLQRRVSRKVKGSKNRKKAKHRLAKLHLKVLNRRKDFCHKLSRQLVANYSKISVEKLSVSNMLRNHHLAKSISDASWHDFIAKLHYKALSAGSEVVEVCARNTSQRCSNCGEIVKKSLGIRQHTCPNCGFSVHRDLNAAINISTAGLAGT

SEQ ID NO: 1633 - protein, 204 aa, unknown
  TnpB Polypeptide
MGTFDAFQRLVWSPQFKQNCFPHRSKMGVLKSFLKRAEKKLKKAQRAFSRKQKGSKNREKARKRLARLHRKVKRRRSDFLHKTSRRLVNDNQALIFETLKIQGMMKNHHLAKAIADAGWAEFMRQCEYKAKHEGRIFAKIGTFFPSSKTCSACGHKLKELSLATRSWTCPHCGAQHDRDLNASLNIKQEGIRMLKAAGLTVLRS

SEQ ID NO: 1634 - protein, 475 aa, unknown
  TnpB Polypeptide
MKITRGYRTELDLNNKQITTCKKHAGASRYAYNWGLKRKQEVYQQTGKSISAMELHRELNQLKHTEIPWMYEVSKAAPQEALRDLDKAFTNFFKRVRLKKEGKWRGPAGYPSFKTKRQGLGSFRLTGSLHVYENALDLPRLGRLRLKECGYIPTSGVHVLSATVSEEAGRWFVSVQVEEDVPDPPAGMSEPIGIDVGINRLAQCSDGRVVENPKALRCELKRLKRLHRRLSRKEKGSKNRVKARVKLACTYARIAHVRRNALHKGTSLLTRAALSSEEHAARKAEIAASLPAPKTKVKARKGKRFQLAEVPPLPEHIARKVKQKQVNKLLRQATITDAPVRPLLVILEDLNVDGMKRNRKLALSISDVGLAEFKRQMAYKTAWQGETLLLADRWFPSTKLCSRCGNVKADMDLSERIYVCENPVCGLVIDRDLNAALNLVALAKSGNQPGPYREFLGKGETPVEREALADPSQDG

SEQ ID NO: 1635 - protein, 403 aa, Chitinophagales sp.
MKSIKVRLELNNEKRSLAAQHAGTARYAYNWGLAKSQKAHQAGLKRPTAVDLHKEWVVFKHTEATWAQSVSKCAPQEAFRHLNNAYQRAFQMEHVRLPKFKKKGQKDSFYLEGSIHLKGNRIKLPKFGWVQCSEMLPQGVVVKNVTVSRQAQHWFVSFKIPYSKTLQKAANQSIIGVDLGIKTLATLSDGQTVAHQRPYRQQKRKLRLAQRQASKKYIRGKSDQNQSQNYKKAQAQVAKIHYKIACVRKDALHQVTTRLAKNHSEVVIEDLNVKGMSRNHKLASAILDGGFYEFRRQLTYKCGWYGSKLTVVDRFYPSSKTCSGCQKVQKELSLKERTYCCEHCGLEIDRDLNAAINLRNQAVSYTASACGVFKPPNDSLVRDTLKQETDCKIENVQDCVSSV

SEQ ID NO: 1636 - protein, 385 aa, unknown
  TnpB Polypeptide
VYKAYEYRIYLSPKQETYIAKMLGLKRLYWNLNVANKQSNTNYKLLTYHKTFEQYAPEALIWLKEVDVVPLNAAYMDIHQAYQNFYNSCKKIRKGKFIQPPKFKSRKNKLEAIRYNNCKFRDGKLFITRKLGLINGNFSSQFCEGKIRNTTLRRTATGKWFVKICVYKKEEKKCDNGKIIGIDWNCKDDSFISMSDGTKVKCPHFLKRKQNRLAKYQRRVSKLFKENQVQSKNYEKAKLKVAKLYEKVAWQRKDWLHKLSRDLANKYEFVGVEDINLQVMASNLGHGKVVGDQGFGMLRSFIAYKTNLIKVSAAYTSQTCSSCGYKYNEKDFKNIKWNLSIREWKCPICSSEHDRDINAARNILRKTIEQLSRQGTSRNLMPVEC

SEQ ID NO: 1637 - protein, 396 aa, unknown
  TnpB Polypeptide
MYYGAEWSLIAYRFRLYPTRIQTRIMSETIETCRLLYNDLLDDRIKNGTNCFAQKKVVSTVRNENKFLKAVHSQVVQDVVFRLDKSYARFSVGLSRKPRFKRRGRYNSFTYPQLGGFKIVDGRLRLSKIGLVKARFHRLIEGIPKTCTIVRDVDRWFACISAHTEKSGNAESKFEAPAVGVDLGILNLATLSDSKTFENPRYLRNSITRIKLLQRQLSRKRKGSSHREKARIMLAKAWRKVRNQRSDVAHKISGNLATGYSTIVFEELHIPDMVKNHNLASAIMDASWGKLRQLTAYKAEKRGGRVILVNPRGTSQKCSGCGEMVPKALSERIHTCPRCGLVVDRDVNAARNILRAGLERARVKEQPLPVQRRRAGKLVPTKQEAHSMKREGFSRV

SEQ ID NO: 1638 - protein, 380 aa, unknown
  TnpB Polypeptide
MRAVKAIQQHYTAGPEILQMLDQFRQMLNECVRIGLAENVTSLKSLSTKAYNQLATYDVMSYYKLCAISKATGILRNYRKAKRKNAKTKEPYAHQLQLTTCYGFKIKTIEKAISLPFKPEEPLSIPLNAHVLRVLSEPNIQTRSITLTDRQLSISYAKEAEPIQPRGLIAIDRNLDNLTVADSDGQMRRQNLAKATEIKARYREIRSHMQRNDVRIRQRVTGKYGRKQRDKVKKILHHASKQIVMRAKEKKFGVVMENLTGIRKLYRKGNGQGRMYRGRMNSWSYAELQRQIEYKARWEGIPLIYVNPHGTSLKCSICGSKMKPEENRTLKCRSCGFTVDRDVNAARNILARGMRFVPIASASEAMVAVQRRPVDADELT

SEQ ID NO: 1639 - protein, 331 aa, Chloroflexi sp.
MWIRKAYKFRLYPNTTQQQALAVQFGHSRYIYNHFLAVRREHNTQTKAGLSYADTTGQLAILKRHPAHLWLQEADSQVLQQKLKDLDRAFKNFFEGRARYPRFRSRRHRQSIRYPQRVKVDLAARRSYLPKVGWVKTVFHRSLEGRIKNVTISRTKGNRYYASFQVELELPDPEYKGKAVGVGLGLRSFLACSDGQKIANPRHLVRAEGRLRRLQRSLSRRQKGSAGWERQRLKLSRRLVEEYRLIAVETLHIKGMVRNRRLAKHILDAGWGSSCGRWNIKGRGMAVKWWRQIADIPPARPARPVVLKWSPCRCMYVSGTVQNATQCMTEM

SEQ ID NO: 1640 - protein, 401 aa, Chloroflexi sp.
MLIRKAFKFRLYPDRSQQQALAVQFGHAHFVYNYFLAVRREHYAQTGAGLSYADTTGQLSVLKRHPDHLWLQEADSQVLQQKLKDLDRAYKNFFEGRARYPRFRSRRHRQSIRYPQRVKVDLAAGRSYLPRVGWVRTVFHRPLEGVLKNVTVSKTKSGRYYASFQVELEIPAPQFKGSTVGIDLGLRSFLARSDGQKVANPRPLVQAERRLRRLQRSLSRRRKGSRGWERQRLKVARQHEKVANQRYDFQHKLSHRLVEEHRLIGIESLNIKGMVCNRRLARHISDAGWGQFVRMLAYKGAWYGCHVVAAERWFPSSKTCSMCGAEMEIMPLQVRDWDCPSCGSHHDRDVNAAKNILKHTTADRTTAGAAESHADGVHVRPASYPRQAGTQKSEANYFNSW

SEQ ID NO: 1641 - protein, 363 aa, unknown
  TnpB Polypeptide
MKLKGDFKALETSIELYRKALRMLIPVINDGWNSISECRYINQKYNLIEKWIHNTRTNQALFDFDEQFPKFPTYLRRSAIAKAFGIVSSYHSNLENWERERKGQAPKLSLTHFTYPAYYKGGLFRNFDPIRQTIELKVFKNGDWVYEVYQLKASDCTYYQRYLTGKKQNVPIIQKKGRRFYATFSYEEETTLIPEESIGKICSVDLGLGTDATCSIMDKDGTVYARKFISFSKEHDRLCTQLGCIKRNQKRGSRHNKTLWRKVAGISQDIADRTAKAILDFGNEHGVDAYVLEHLDFKGKNTFKRAHFWRYKRIYKVLCHKAHRHGLRVARVNARNTSRLAFDGSGWSKRGREITPDMPYTLM

SEQ ID NO: 1642 - protein, 533 aa, unknown
  TnpB Polypeptide
MKLAYKIAFPENLIETYEFLQGEFNRVLSDEDMRAAILSIDNSLQPGHYWPQLRDRIGNETQKKWAADKRFPSPSWYFCAFAEQVRQVHKAQREQTALYDALQMFDNQDSVAFYQYCADQNIPFSKTKVKNLQRCDERPGLPRSATFVLDFAFINIQAAKMVNNTFHYTVLNERHKPTWCQLPIILHQSSKYQPGMRISKPKFLKDKYGNYYGVIAFDFEERLASGVNIAAIDLGKVNLYTFAYICPDGTYSDHYSIHSKMIERLKQKLETLYEERRILMKKNELADKLFVNAQYIPEASLQKWILRQGKLERLATKITNIKKAITNEMSAEIVELCQKHRCSTLFMENLSWLESQGGKWNHSAQQSAIELACLQNGISVYKVNAKNTSKEHPVTRELGKELGRNVVWSTGDIMDRDFVSCLNQVQREGKRRISNRRVEKKQGIRLTSLRDKHQATPKRTKRQNSRRRENLERLELLRNKNTSRTAQMVVVLPRTSEEYPATWSCVEKTSIQESNNCMRGINVYKQSCMYPCN

SEQ ID NO: 1643 - protein, 397 aa, unknown
  TnpB Polypeptide
MIKAHKIRLHPTPEQANYFARAAGTARFTFNWAVAQWQREYEAGGKPSALALRTKFNALKKEQFPWVYEVTKCAVEGAFMDVAAAFKHFFEGIKAGRKIGYPKFKSKKRSRASFYLANDKFTVGDHWIDVPKLGRVNMAEKLRFSGKILSARISKTAAWWFVSITVEMPDDLPLNNYPPVGIDVGLNRLATLSDGRQYENQRPLVHQLKKLRRLNKELARRTKYGKNWLKTKDKLSRAHYEIACIRLDWLHKLTTEIATTSGIVAVEDLHVKGLIRNRCLSRSFSDAAVGKLLDLLENKVAAQGSMLLKVDRFFPSSQLCHCCGARKTDLQLADRVFVCPNPDCGYIGDRDENASRNIVLEALRMFGLNLNMPSAIVATARRKTAWGLGVRPKSLWG

SEQ ID NO: 1644 - protein, 419 aa, Streptomyces sp.
VEWIRTISDMQLRYAFRLYPEPGQQGALARAFGCARVVFNDAVRARRDAHAAKEPYPTFKTLSRSLITRGKLHRDRYWLGEVSSVVLQQALRDADNAYGNFFASLKGERQGPPVGEPQFRSRKDSRQAIRFTANARWKIIGTGRLLLPKIGEVKVKWSRTLPAVPSSVTVIKDSAGRFFASFVIDTDPDTDATTLPDTAPDSSVGIDLGLTHFAVLDDGTKIDSPRFLRRAEKKLKKAQRELSRKEKGSKNRAKARLKVARAHAKVADARKEFCHQLSTRIVRENQVVVVEDLAVSGLARTRLAKSVHDAGWSMFVTMLRYKCERYGRAFVQIGRFEPTSQVCSACGHRDGPKPLHVREWTCPACDTVHDRDTNAARNIRAAGLAASACGAQVSPRPSRGGAPRDEAGSHGIPPTACAA

SEQ ID NO: 1645 - protein, 368 aa, unknown
  TnpB Polypeptide
MIRKKAYKFRLCPNLKQRIFFEKTFGCARFIWNQMLADRIAHYEKTKTSLNNTPAQYKKEYPWLKEVDSLALANVQLNLNAAYKSFFQSGFGFPNFKSKKTAQSYKTNNQKGRIALLDGKVKLPKIGWVKVKLHRQVKGVIKSVTISKTATGKYFISILCEEEVTPLPKTDSNLGIDLGLENFAIFSTGEKIENPRCLVSLSKKLAKEQKILSRRGLLAKEMGVKLSDSSNYQKQKQKVARLHEKVANQRKDFLHKLSTNLIKSHDVICIEDLASRNLMKNHHLARAIGDASWSEFVRQLHYKADWYGKEIVTISRWFPSSQLCSSCGENSGKKALSIREWTCESCGTHHDRDINASLNILKEGLSLA

SEQ ID NO: 1646 - protein, 357 aa, Limnoraphis sp.
  misc_feature (66)..(66): Xaa can be any naturally occurring amino acid
LGFPDLRIVTGCGLLFILSLKARSSTATELSYLNSDGLRFSSLGKFLTDSNPSKPELFGGHPATSXFGFPRFKNRYRMRSFIYPQLKGEIVNGNRIKLPQLGWVKVFKSREIPDGFKPKQARIVRRASGYFVMLSLQSDVSVPNVPFHGHPLGIDLGLEKFLATSDGELINRPRFLNRFHRKLKSLQRRLKHKQKGSNNRHKLNQKIARLHQRIQETRKDWHFKLAHHLCDRGQSIFIEDIDFRSWGRGMLSKHCLDAGFGQFVTILKWVGWKRGVFVGEVNKDYSSQICPNCGATTGKKLLSERVHNCPECRYITHRDVAAAQVIRNRGIDALGQSVSENACGDLLAGGFGSSARV

SEQ ID NO: 1647 - protein, 425 aa, Acidimicrobiaceae sp.
  misc_feature (297)..(297): Xaa can be any naturally occurring amino acid
MLVHQAFRFELDPSNATRSALSSHCGASRYAFNWGLRLVNDQLEATRKLTVLAIRQGAGVEEATTWARKVTGPVPCSLPALRRAWNATKHEVAPWWAENSKEAYSSGLDGLARALENWSKGRRGERAGHTGFPTRKKKEHRRSCRLTTGSIGVVDDRHVKLPRIGRVRTKEQATKLRELLDDGRARICSATISEEAGRWFVSFTCEVERHDVHGRLPDAVVGVDVGVKHLAVLSTGEVVENPKALGSYARRMARLSRELARRELGSKRCRRTKAKLARCHAKVANTRRDAIHELTSXRQAPEGRAEPGDPRRLSRRGAPSACLQARLARRNARRRRPVLCLIEALLVVRCSESQTAPRRAHLLLRALRSRHRPRPERSAEPCRLRASSAVRRREWPGDSKRAWRGTPPAPVGRPGEARRRHRGTG

SEQ ID NO: 1648 - protein, 379 aa, Actinomadura sp.
MQLRYVFRVYPTAGQRQSLAQAFGCARVVFNDALRAREDARAAGLPYPKAAELSAAMTAAKRTPERAWLGEVSAVVLQQSLRDLEAAYRNFFDGLAGKRPRMGAPRFKSRKDARQSIRFTANARWQITPGGKLALPKIGDVAVRWSRRLPCTPSTVTLVRDAAGRFFASFVVETGDVQDPPDTTAEVGIDLGLEHFAVTSDGRKITSPRFLRRAENKLRKAQQALSRKQKGSANRAKARLKVTRAHAKVADARREFHHQLSTMLVRDHQAVYVETLNVKGLARTRLAKSVHDAGWSAFTAMLEYKPARYGRRFARVGRAFPSSQLCSHCGHRDGPKPLHIRAWTCTECGAEHDRDVNAARNILHEGRRITPEGRRITPG

SEQ ID NO: 1649 - protein, 395 aa, Klebsiella sp.
MHRATKVRIYPTQEQTELLEKQFGAVRFAYNKALYIRSHWYKKHGVSLNNAKHIQPLLPIAKKSRRYSWLKAADSNALQVSLQNLDRAFQNFFEKRAKYPKFKRKHGPQSSYHCSSLKITADTIKIPKISPIRANIHREIVGKVKSITISRAPTGKYYASILADDGQEAPAKPTYITQLTGYDIGLKDYLIRDDGKKTPNPRHLVNAYRRLRRDSKALSRKQKGSANRRKARIRLAAQHDRVANARNDFQHKLSRNIIVENQAVIVETLKTANMMKNKRLARHIGDAAWSGFVAKLAYKAEASGVHLVKLDQWFASSKTCHCCGHKMAEMPLKVREWQCPVCLTHHNRDINAAMNIRLKGITELMAAGHVVKAHGGLRKSVITTVAAYEVGSPAL

SEQ ID NO: 1650 - protein, 265 aa, unknown
  TnpB Polypeptide
MGRGRKPIVLYATNLPKGDIKEIELCYDRRLYLSISFDDGIEPLTPTGTQDAGVDMGEIHSFACITENGQSIVVSGRKLRSIHRFRNQKLKELQRLMSKCKKGSRQWKKYNRAKQYILSKSERQLQEASHKNTKALIDWCVEQSVHMLYVGDARAVGKNTKKKKRLNKQNRQKLSNWNIGQLLTYLQYKAEAKGIAVKLVDEAYTTQTCPVCQRKKKPQGRNYHCHCGYKQHRDLHSAGNILTKSKHKKMLPVESSGQPMYLRVA

SEQ ID NO: 1651 - protein, 395 aa, unknown
  TnpB Polypeptide
MQRTIRFPLLPTPEQESVLLETIQQYRACFNTVAAYGWEKGEKNGVELHKATYYPLRADYPRLPAQLVISARAKAAEAVKSASTWKVKREREYPKKVAKALARGKPVPAFKPVRCPQSTNCSIRYDQRSYTMFGDYVTLATIQGRQVLALHLYPYAVRLLEQSIDFDSADLIYRKGRFWLHVVVTLPDVEFVPNGNVAGVDFGITRPAVASHNSFFGERSWKAVERRYFRLKRALQSKGSDSAKRHLKKLAHKVSRFRSNCDHVVSRQLIESVTPGTTIVIENLMDIRSNTKQRSKPQKRAMHQWSFNRLRDLLTYKTEAHSCMVVGVDPHHTSQRCSRCGHVHRSNRHSQSRFKCRNCGFELNADLNGSRNIAEKFLASVGIADAGGLLSTSLL

SEQ ID NO: 1652 - protein, 426 aa, unknown
  TnpB Polypeptide
MKLTFRNPVYPTKTQETTLFKWLDHLCELQNAARNNRKYTYEEEGRFVSQGEQEKLLTAAREKYDDFRAVPQDFQVSVLKRVDKAFDAFRRRCKEGAAKKGYPRYKTRVRSLTWCLRKHKIKDKSTGGFKRVRQNPIIETDFRHNRLKVPKLGEVKIRMHRPLQGDPKEVTIVKKASGWYTYIVCEIPNTPKVEPTDALAVDVGTTHYLTTSEGEKEDNPRWYRQAEGLLRKHSKTLSRKKKGSNRRKKQHHKLALHHERTANKRKDFIGKLVYKLYHHKEKNVLVAEDLSVSNMVKNKYLSKSISDASWATFFEWCGNIAERDGFHFHQVDPKNTSQTCSCCGRKSPKKLSLAIRTFNCSFCDTSLDRDHNAAINILLRAACAHCGERWVTNLYETRNTNKAQDAGLENAKQLLLFDGLLTSPSL

SEQ ID NO: 1653 - protein, 367 aa, unknown
  TnpB Polypeptide
MLLAHKVELRPTTEQRDYFEKACGHRRHCFNHILAWFSQRDSDGNLIFKWSKVAAYQFFMKVLRVEFPWYSEVSSVITRNVIDDLDNAYKHFFRRVKNGEKPGYPKPKRKGIKESFAIRDVAKFDVKNKTLRIEKLKTRIDLRQPIRFSGKFKQVTISKKAGRYFASFLIDTDEYNPNDVDRQSSVGVDFGINSLAVLSNGEVYENYKLLKSNLRKLQKLQKDLSRKVKGSNGYAKAKLKIQKLHFLIARQRAAIAHQLSNYLTKTFDRIVIEDLNVKGIIKNGKLSQAIADVGWGMIRQFIEYKAKLRNCIVVIADRFFPSSKTCSNCGEVKKNLTLQDRTYECDFCGFEIDRDLNAAINLNNYAV

SEQ ID NO: 1654 - protein, 309 aa, Bacillus sp.
  misc_feature (300)..(303): Xaa can be any naturally occurring amino acid
MKKEFVWLKEVDSIAIQSSVRNLADAYTRFFKKQTSAPRFKSKKNNVQSYTTKQTNKNIAIIGNKMKLPKLGLVRFAKSREVKGRILNATVRRNPSGRYFVSLLVETEVQELPKTQSYIGMDVGLKDFAILSNGTTYKNPKFFRSLEEKLAKAQRVLSRRMKGSSRWNKQRVKVARIHEYISNARKDYLDKISTDIIKNHDVIGIEDLQVSNMLKNHKLAKAISEVSWSQFRSMLEYKAKWYGKQVIVVSKTFPSSQLCSCCGYQNKDVKNLKLREWDCPSCRTHHDRDINASINLKNEXXXXGSSILN

SEQ ID NO: 1655 - protein, 360 aa, unknown
  TnpB Polypeptide
MILSRKVRILPTEEQRILINKSFGCKRYIYNWGIDQMEDYYKANSQRLSNGDLRKSMTQLKHSLIWLKEVGSNVLKHSLIDLDKAYDKFLKKQAGRPKYKKKRISESFYVNYESCKVGNYEVRCEKLGWIKTSEQLPFTKISNPHISFDGKYYYFSAGFKTEKVKQKLTNTILGIDLGIKNTAVLSNGKTYKNINKTKTCKNINKKIKRVDRRITKSVKNSKNQAKLKRQRVLLYRRLSNIRKNFRHQMTTEIVKMKPKRIVVEGLKVSNMLKNKYLAKYISPQGFYEIRKMLEYKCEKFGIKFIVANTFYPSSKLCSNCGHKKEKLHLFERTYLCSNCNFKCDRDLNASYNLANYTIKK

SEQ ID NO: 1656 - protein, 456 aa, unknown
  TnpB Polypeptide
LKALKTYSLNHDKAEEVYPLLEAYRDAVNRTLQELWDQLEWEQRKTPGKKQFRLLPKFKADVHSNEYRRQLRDRILANWPFAAHWADSAIKTGYSIFKSWRKNYVRGDRKRRRPVARRLFARVKQTLVKLEGDKLRLTLKPGEYVYLDLSHRYFKLPSKVSSTGLGEPIITAEKVHLPVHFEGGAQIEGKPQVAWDFNLLSLDGYSPETGWVRIDTSRLASVHISTFEKRSSVQRKTSRSKKARRILAKYSGRERNRARKHQIEVARVITSVSSAVGLEELSKQGMYTRSRVWNRRITRSDWRSVARILEEKLGEDKVAELDPYNSSTFCSRCGWYNNRDLNGAEVFECGGGCGLRIDRQLNAAINLYMRMKFGYTVSWVDGRKHIELRMGGLPRGSGGTALCFPPTLLPQPGGCVPTGAEPKGIDEPVSSLYEAVKPKLYYAYDAEEDKYLPAST

SEQ ID NO: 1657 - protein, 506 aa, unknown
  TnpB Polypeptide
MTPPSGQLIEDEEREPTSTPAIPEGGAYEVEFENRRTNVVRLLPNGHQHRKLLKLADNSAKLYNEINYERRQQFFKEEKVDLVGTYKKYYEKYKGILSVNAQGVLNKNNEAWSSFFSLLKLKKKGKLPPHMAHVSPPRYWKDRENKKRKKILVVRQDRYEVDEEKKVLGLKDFKLEIPFTGRLKWYGKQGRLEIIYDEDTNRWYAHIPVDVGVETTRTGKASKFIVHGERKSIQLHASKGNRVASIDLGINLMASVIVDDGTWLLYKGVRTKEDYFYFEKRIAEVQSLADRAKNVGEYEAYEELEREKRKLFKKLQRRFLHIYRNLASGLIEKLYESGVSTIFIGYPYNIGQNKGNKYTVNVWSYRKLINAIELKAHEYGMKVYEVVEYNTSRFCAYHDVEVQRKPRGVITCPMGHKMHSDLNEALNIMKKATSKIVQNVKKPLSFIVGHNRIAPVKGCNASDLGGTPALQGGEEVRPLLGTTSLSISYDPAGTLAVVKAAVVLSI

SEQ ID NO: 1658 - protein, 182 aa, unknown
  TnpB Polypeptide
VKLYPSGRIYAVFVVDEAEAGRGQPATREPEEVVGVDVGIMRLATLSDGRFLVNPRSLERSLERVRLLQKSLSRKGFLSKNWLETKSRLAVEYEHVKDFRRDLFFKFGALLALDYDLLVLGDLDVRGLVHKGGTRRRLRLHGSAFLGLGRILEWGFAKRGKVVVVVPEFNSSRECFRCGEIS

SEQ ID NO: 1659 - protein, 369 aa, Lactobacillus sp.
MKQQLKDLCDYRRYCWNEGLALWNDMYDESVLLGNKKLRPNERKVRNELVTNKQDWQYLYSSRCLQLAISDLGKAWENFFNKAQSDWGIPKFKSKKAPKQGFKTDRAKIVNGKLRLDKPRGIKEWSDIKIAGVKSLDGDLKVVSIYRENGKYWASLPFEVTIKHKPKTERKTAIDVNVGHFNTPGGQITIIPKRLDRLYKRIKHYQRQLAKKRIVNGKQAYQSNNYVKTRAKLQRDYRKVTNIQRDIIQKFTTRLVSENDKIVIEDLVVKNMQMSHVASKGLQRSLFGYFRQVLTYKCEWYGKELILANQHYPSTQRCSQCGYIKTGEDKITLAGNQKYHTKHNEYICYKCDAVMDRDENAVMNLLQLA

SEQ ID NO: 1660 - protein, 293 aa, Sarcina sp.
MCYGSKAMFDKQYRLAANGYKTHEKWHNDFVKARDKNVFYLGSTDESFGNQMCRLRYDATADIFSLDVRKEYKYCKSSKARDKYVSISGIDFKYMKDELVAILASYDTAGNGDYPLSYRFHKIGNRWYLQVIFEQSFAGDYNDGFIELSETDESGNLMHQKHYNLKYHGTGSRAEVEIRDVIADIVGYAKSRCKDIIIEDLDFKRAKAKQTASSKQKGKRYNRMLHIFDYHRYKQTLQNTGFNHRVNVVMVNPKNTSKIGKQKYYNSKKLNVHQAASYVIARRGQGYLDRLVV

SEQ ID NO: 1661 - protein, 525 aa, Chlamydiae sp.
VPKKIPDTYTATFQLRPKTNDRAEVILASFAELMNRVERTLFADISTGKSAAECKSAYIKEHKITARQFNSIRVQLEGKISSLKEAQKERVKTLKGQISALEAFLKKRKKKNTPFVTHQKKRRLSSLKGRLKRIENDISLGKARLCFGSKKLFRSQFDLSANGYTFHEGWKEEWKDSREKSFFLIGSKDEISGNQSVTALLQEDGDISLRIRLPDALGEYGKYLVIDNLHFAYGHEHIVAALTNKESPVAICYRFVQDKKGWRIFATLPIQKPSKVTRSGIGAIGVDINADHLAVVETDRSGNPIQHTRLELNTYGTSQGQAKALIGDTVKKLVDWSVKTQKPLVIEELSFRQKKCELREIGNPRYSRMLSSFAYNGISQFIKSRSARCGVDCNEVNPAYTSVIGRAKFSKRYGISIHESAALCIGRRYLGVSERLPRHIAHIADGKGGHVALTLPVRNRARHVWTSWRQVQKRLPAALVAHFRAAKKRSSSQSNLACCDTEKVLDFVGGTPIRESTAELLGCRI

SEQ ID NO: 1662 - protein, 399 aa, unknown
  TnpB Polypeptide
MNEEDKGGQERMLKSYKTEINPTMEQIHKINKTIGTCRFVYNFYLARNKEVYEKEKKFVSGMEFSKWLNNVYLKENPEYVWIKEVSTKSVKQSIMNSERSFKRFFKGQSGFPKFKKKGKSDVKMYFVKTNSQTIITCERHRIKIPTLGWVRLKEKGYIPWDSNTYIIKSGTVSCRAGRYYVSVLVEQPERERPQLQDFGLGIDLGVKNFAVISNGLVKKNINKTNKVKKLEKQLKREQRCLSRKYESLKKNNKKGESSRENIQKQILKVKRLYCRIDNIRTDYINKTIAEIVKTKPSYIAVEDLNVSGMMKNRHLSKAVASQKFYEFRVKLEAKCKEYGIELRIVDRWYPSSKLCHECGCIRKDLKLSDREYVCECGYHADRDYNASLNLRDATSYKVA

SEQ ID NO: 1663 - protein, 379 aa, unknown
  TnpB Polypeptide
MLRAIKIRLYPNKTQEQTLNKVLGSYRFVYNHILARKQEAYKADKTNLGLKKLSKYFHHELLKDEQYAWLKEQNTKVMKQSIRQMLTAYDKFFKEHKGFPKFKSKKDKQTVSFPYEAISKHNTFEARKITLTKKLKDIKFRCSDLYHKRLQKYKDNIRSATLSKTKSGNFFLSILIEMNDNELIKFRKTSRDVGIDLGVKDFVITSDEEVFDNKHFFKKDEKKLTKLQRQLSKKRKVSSNFHKQCKRIAKVFETISNKKENYIHSVVNYLLRKYDTIYMEDLNTSGMLKNHKLAKAIQEVGFFKFKTVLTNKALQNDKKVVLIGRYYPSSKTCSQCGYIHKDLKLKDRHWQCPNCGTSHDRDYNAALNILYEGRRVSVA

SEQ ID NO: 1664 - protein, 413 aa, Lactobacillus sp.
LDQSVVIKSQLLNIDDETAQAFSNTMCKYRDACNFISQYIFEHAFELKQSKLNKALYHDLRDKFELKSQMAQSAIKTVIARYKTVKTQLFQHPFRYDTGKKDGKGRGIWAQIYRDLTWLWQPISFKRPQLDLQRGRDWSYLSATNQLSLNTLNGRRKVDFVCKGFDQYLDQTKWKFGSLKLLKLRNKWYVHLSATASLPEYQVSQAEHVVGIDRGLRFLTACYDEKGKTLLYSGQQILRKRRKYKRLRAQLQAKGTKSAKRRLKKIGQRENRWMSDVNHRLTKTLVDHYGSNTIYALEDLTDVRFATEKSPKDQRYEIVSWAFYQFEQFLTYKANLNSSAVVKVPAKYTSQRCPKCGRIHKDNRDHELHLYTCDKCGYKSNDDRLAAMNIQFLGTLYRSGEEAPQFNKQASVE

SEQ ID NO: 1665 - protein, 402 aa, Escherichia sp.
VKRLQAFKFQLRPGGQQEREMRRFAGACRFVFNRALALQNENHEAGNKYIPYGKMASWLVEWKNATETQWLKDSPSQPLQQSLKGLERAYKNFFQKRAAFPRFKKRGQNDAFRYPQGVKLDQENSRIFLPKLGWMRYRNSRQVTGVVKNVTVSQSCGKWYISIQTESEVSTPVHPSASMIGLDAGVAKLATLSDGTVFEPVNSFQKNQKTLARLQRQLSRKVKFSNNWQKQKRKIQRLHSCIANIRRDYLHKVTTTVSKNHAMIVIEDLKVSNMSKSAAGTVSLPGRNVRAKSGLNRSILDQGWYEIRRQLEYKQLWSGGQVLAVPPAYTSQRCAYCGHTAKENRLSQSKFRCQVCGYTANADVNGARNILAAGHAVLACGEMVQSGRSLKQEPTEMIQATA

SEQ ID NO: 1666 - protein, 351 aa, unknown
  TnpB Polypeptide
LPYIPIAKARGFTAIFGNELSEYAFKNKVFNQFRLHKAKYYSIKSSFNLSAQMVVRCISKVSDSYKLDKKKQRVFKELGAITYDVRILSYNIERRIASIWSVNGRLKIPFIPYPEKYLPYIKGEADLIYRKEKFYLFQTCEVPEEDIKDVEEFLGVDFGQKDIAVCSDGTKFNSEQLNKVREKYFKTRKSLQSKCTKNSKRVLKRLSGRERTFAKIQNHTIAKQIVEKAKQSDKGIAIEDLSGIRQTAKIRKSQRRTMSNWSFYQLRQHLEYKAKLAGVPLIIVKPAYTSQTCSNCFHIGKRNGKEFRCINKNCSVDILDADYNASRNISILGGIVNCPDKSRIFSCALHS

SEQ ID NO: 1667 - protein, 378 aa, unknown
  TnpB Polypeptide
LLNYWECSFGNNQTIYRESKKRMIKTYSYKIKADNSFIEKFNQWLGTLRFLYNCALEMKIDAYKRCNKNISNYTIQKELTECKKEFDWLNQVHSQTLQAILDRLDKTYKSFFRRGYGFPKFASKKKWKSIPFKSCQFKEGNFVLPKWGIVKVFKDRLPEGEIKTASLIKKADGYYLHIQVEVPYSNTNESQVGIDMGISYFLVTSDGLYINNPEHFKKYERKLRIENRSLARKKKFSKQWYKQVKRLQLLYLKIQRARLDFLHKTSTSLSKQYGVVFMEDLNVAGMSKSNLSKHILDCSWTTFKNLLSYKSRVVLVDAKYTSQKCSNCGYIDKRNRISQSEFVCKNCGSIFNADFNASLNILSLGKTLVCEREALACA

SEQ ID NO: 1668 - protein, 461 aa, Kutzneria sp.
LRQERITYNATSALLTAWKKTEGLAHLSDVSSVPLQQTSRHLQTAFTDFFAQRGKYPRFKSKKKSRASAEYTRSAFRFHDGQLTLAKMSKPLPIVWSRPLPQGVSPSTVTVTRDSAGRWFVSSLCEDPDVRPLPTASSAVGINVGLNHLLTLSTGEKIANPRHERRDRQRLAAAQRALARKSPGSNNRDKARLRVARVHAQITARRRDHLHKLSTRLVRENQTLVIEDLTVRNMVKNRSLARAISDVAWREFRSMLEYKAAWYGRDLVVVNRWFPSSKLCSICGALRDRMPLHIRSWRCGCGSTHDRDVNAATNLLTAGLAVSACGADARPQRESPRLGRSAAKQEALRRKPQESLSFTSGQEVKSPRPPPQPRAARPGSPRPRARSSPRRRDPPARTRGPCRCRGTSRRRRPAPPSPRPRSSPASPAPRRPSCRARGRRAGSRWCRGTTHRRAPGAGCPR

SEQ ID NO: 1669 - protein, 377 aa, unknown
  TnpB Polypeptide
LNKSFKVRIYPTQEQRVLLEKTFGANRFVYNYFLNLKSKLYEFYKIRLSYTNSSKFLTELKKQKTWLREVDSVSLQQTLRDLDSAYQNFFNGRGKYPKFKRKDGKNSYRTTSCVKVDNSFISIPKVGLLRYRDNYNLEDKNILKIYNATISKDSVGHYYASISSEVYIPCFEKTNQNVGIDLGLKDFAIFSNGIKVNNPRILKHLEVKYRKLAKAVSRKVRGSANYQKARIKLARFHKYVANIRKDFLHKLSTSLVKAYDIICIENLNISGLMKNHKLAKSFQDVAQSEFVRQLEYKCLWYGKTLSKIDRFYPSSQICSSCGYKNKDVKNLSIREWVCPKCGTIHDRDINSAINILSEGLRILEIYLRTVGHTGIAY

SEQ ID NO: 1670 - protein, 377 aa, Alicyclobacillus sp.
MLKTFKVELKPNNKQRSRLYQSAGTARWAYNWALAKSKEHYIQTGKFLFDGELRRQLTQLKKTPEFAWLYEYSNNVTKQAIKDCSIALKNFFKHNAQFPVFKSKRRTKPSFYHDPIKLKVTKTHVQLEKIGRVRLKEHGRIPVGVSHQNPRITCDNGRWYISVAADVECTNDVEISEPIGIDLGVKELAVVSDGQAFKNINKTRRLKQLEKRKKRLQRRASRHYERMVKTRCKKSRGLLNLEKQIRSVNKKIRDQHTNHIHQMTTRLVKAKPEFIVIEDLNVNGMLKNHRLAKAIQDNRLAEVRRQLEYKCNWYGVKLIVTDRFYPSSKLCSDCGHKRTDLKLSDRTYRCSECGMTMDRDLNAAINLMQYGMRELSA

SEQ ID NO: 1671 - protein, 379 aa, unknown
  TnpB Polypeptide
VKIVNKAYKIRIYPNKTQSKLIDRTIGSSRFVYNYFLNERINKYKKEKELLTYNICSSMLTILKKEEDYIWLKEVDKFALQASLKDLDSAYSNFFKGVKNGNASKGFPKFKSKHKSKLSYKTTFSNKNIEIKDNKIKLPKLKWIKFRDDRDLSNISKIFNVTISKTRTNKYYASVCVEDIVQEKESTGTIIGIDLGLKEYLTTSDNEIISNPRWLRQSEEKLKKLQRNHSRKKKGSNNREKARLKLAKQHEKIYNQRRYFQQVLSTRLINENQVICLETLKSSNLVKNHKLAKSISDASWYEFVRQLEYKGVWNNRNIVKINQSYPSSQLCSNCGEKNIQTKNLNYRIYECNNCGLTIDRDLNASYNIREEGLRILNIS

SEQ ID NO: 1672 - protein, 400 aa, unknown
  TnpB Polypeptide
MAYRYRLYPTAQQSVFMAERHCADARFVWNLAVEQFNWGRAGRSAPGPADRMHQLAEARQEFEWLRRGSSAVQQQALRDFDWAVKEFFNGTRGRPTWRKKHRHEGFCVRDTKVRVHSRKWAQVAVPKLGWVRFQLSRALPAGALGMARITRDKAGRWHVSFPGRQPAVADAGRSGRSVGIDRGVATTVATSDGQMLRAPVMRERERRRLQRLQHTLARQAKCSGRREATKAAIAGLHQRVADRRRDWVEKITTKLAAHYEVIAVEALPVRNMVRRPKPKPDPDNPGQFLANGAAAKAGLNRSIHANCWGLIARRLEQKMSASETTLVVVPAYYSSQQCRKCGHTSPGNRKSQADFRCQSCGHCDHADTNAAAVILARATKPAPTPGPGATPSGVLAKART

SEQ ID NO: 1673 - protein, 602 aa, Nitrospiraceae sp.
MKKTIEFKLKASRSDQKFLLKLLDKGKNVYNLALSECRKRLNRIRADKEYQSLLPFRRDLKKAKCNTAVVDKLLEEIIAGRYFLTKTDIEKFVKDHIGYLSDKFNSQFAQVLADRAFEAIKKVLYGKAKKVRFKGKWDNILSSVHSKSTDTGFMFNHDAKAVTYGIGKKKITIPLILDYRKDDGYHNWYLQQIIDNFKNHEAVDVSYIRVIRRIIKGNDVFYVQFVIDIRPMGMTDERVEEENLRILQHNSELIHNAVSKGKPTNRLRLKHYVSNIIEFPKTSKVIEQIRYIGLYKQFHVAFDMGPRNMAVVLRNEDTVIAALQPVFNKIIEYQSDLRKLQRKLDRQRRANNPNNYNTDGTAKKRRGEWVFSEGYKQTRTAIREMHRLIAATRKTALNEFANILTALGCSFKTEDVSIRSWQKNYGRSVGYNAPSLVKNTIFAKAESAGDDTTLIPLKTALSQLCLCGKRQKKKLSQRVHECECGVKSQRDVLSAYLGLFYSPCASGVGGSLLLPLDHKADRQLLFASCWHYAKVANGQTSGFAVGLDRSPLSCSRIDEDRHLGENFDAQGLVCTDSLKGIIGELSLNRRSPVRLSSGIPRL

SEQ ID NO: 1674 - protein, 528 aa, Nitrospiraceae sp.
MNKKTDGTIIATITGIISPQSESDIADIYGLMSDSSSAKKMAFNRIVKDGVDDRGAIERYIRQRIPTFNTRYARDAIIEAQAIILSQKELLPMYLQNTQKKLKKSVAKLVDYVTEDKKPKTDLLVALKGLCNRIGKLKSRITELQSHINNGTIPNIVFGGKNNFKKLQKGLISRKQWKDLRTNSFYSRGDASKQGNLHTRLYYNEAEDSFRIRLSIPQDKGRCKYIYCPVSIASAKRHKSRRETLISAVQNNASYSVRIIRRNSNIEAHITLDEVIYGSFVKKIPESVTTIAGIDLNTDRLAVTLSDYKGNFIRHKTFYCHDLEHCRTGQRDFTINHVVKEMFEWLTTNHTEVVVIERLDFKQDMDTNAWLNRFRSNFTYSKLHKAITRKALRTGMFIKTVNPTYTSQIGTLKYAAQYGMARHEAAAYVIARRGLGYNERIPKRIIQNLPDIISTLIQKASGAKEAAKKKLTAHIKVLKQWKAYSPVSTIHKWKLWSLLYQSLPCPVFPMEGIAGVSGQAAPLTGAGP

SEQ ID NO: 1675 - protein, 411 aa, Halorussus sp.
MPPETVTYNVADTEYCRRTAVTGLSVSPTDAARLRELVDAWKRGCQLAVNEAWGVCHTRSEVQQLAYDRLREETDLGSQHAVLATHRAAEAIKRAREREGERPEFTTPTVAFDTRTMTVFDDHTVSLTTTGERVRCDLKLSDDGYQSRYLDDDEWEPAKSTLHYRDGEFTFHLGFRTPRPAIDSPTEGATVLGVDLGVENLAVTSTARFFGAGELNHRRDEFEEVRASLDATGTRSAARTLRQAGERIDRFVRQRLHEVANGIVAEAVEYDCELIAFGELSEAADLLPEAETYHEWLFERLLSFVEYRAAEEGVAVVEVNPEYTSQRCMECGFTHPQNRNLDESQFECLKCEASAHDDYNAAKNIAFRCVRRGPLSSRGLGAAACALQSGLVTPDDGFTPYAELSEAPRSD

SEQ ID NO: 1676 - protein, 418 aa, Bacteroidia sp.
MEFEYICNMLRAYKYRLYPTSGQAEFFAKSFGCCRVAYNRTLDYMSMFWIGGGNSVSRFAAQAQLVMLKEVYPWINDVNSQSLQYSIKQCADAFRNWWEHRADHPVPKRKDSRQSFHNPQHCSVDWKHGTISIPKCKDIKAVLHRPFYGTIKDITISKCSGDRYYASVLVDTAIRKLECDAVVDEKTSIGIDLNCGDIVCSDSRRYTNPKALFKVERRLRRQQRILSKKQVGSNNRARQKHIVSKCHAKVSNTRHDFLHKVTYELTHDSQVRTIFIEDLNVRGMQRNHHLAKSVSDAAFGEFVRQLTYKGQWYGVNVVKIDRWAPSSKTCSACGWVFRGLKLSQRDWTCVCCSTHHDRDYNASVNIKSFGLIALPPDRREVKPVDCPPVDERRSENALRSSDRMNQEKFRGVTDAPVL

SEQ ID NO: 1677 - protein, 612 aa, unknown
  TnpB Polypeptide
MSNFSSLKKLYQLSINSLLIKHNNIIGFSDFNTILTQYKTAKRHAKKDFSIFKDHNGLSKQDIKDMLVTLNKANHFNIATTTINQLSSRITQIYTYYALQQHTAWTTCFRNMPEKRIRKKISTPSFIHEFKLSLSDHSRRKYNIKFKALQELYNTILGEILKRHKAMLADLRHHEAIVLHRSDNTKKEAKLLFSKLQNAYGLSKNDLQKFAKLTKNNCYMKDHLDSDSIQVLSDRVFDTYMRSCCKQGGTPRFKSWKNGIKSIQGKQNVCLSLKKDIFSWAGIKSRIVLDRHDKYGVQEHALTSRIKYCRIVRRYIKGKAHFYCQLILEGTPKIKSNQLIGKGQNGIDIGVSTVASVGKEKALLAPFCQELNDIEAELIILQRKISMSLREENKANFEFDHFVKIDKYFKRKKGKSIKGKRVWVKSHHLLELESELKELHRKQANKRQYLHNVLANKVIENGNNIIIEANPYKAWQKGLFGKTIGKKAPSNFVQTLKRKALKADGTFEAVSTWTTKFSQYCHVCDGHHKKPLSQRTHACGENDIMQRDLYSAALMSHYNTQNKKVDRNAMLTHWQGIETILNGALSTLIKSQNLGKIPTCLISKEIEKRDLL

SEQ ID NO: 1678 - protein, 410 aa, unknown
  TnpB Polypeptide
MYQVRRVTIGKNAQLDELARASGNLYSQTVVFFWRTVRHKGIWLKPKHLMRLFTSDKLHAHTSDACVQAFFAGLKSWRERKKQGDPDAKPPRRRKWYFRIEYKRSAMVLKEGKLRLSNGKGNEPLVLNWPWELPQTVVIHWTGNQYEAIATYAKEQAYGPFPPGAVAGVDLGEIHMAVAHDGEQTHITNGRLLRSKVQYRNKLQAKLNSRIDGRMKKGSRRRKNLIRSKKRQLKKIEHQIKDIEHKSTTRLISTLHANGVQTVVIGDVRDIRQDNDVGHTNNQKIHQWSHGSVRHKLTYKAERLCMYVALQDEHYTSRTCPHCLYVRSKVKGRVFRCPKCGWTYHRDGVGAINIRQKYLGHGPVVGAMAPPISIRVVAGVARTEKVYVRENVCMGNCAEAAGLRDHAECH

SEQ ID NO: 1679 - protein, 414 aa, Tissierellia sp.
MKLSFKLYPKLRVEQLDIIEELSFHTTKLYNIVNYDLRNNKYKNYYHIEKEYKSNWRCKYLHSHTRQQCFKMIDNNWKSYFQSNKNYKKNSSKYLGKPKPPKFKNHNNRKNEIIFTRAGIRYKDDTLKLSLSKEMKCKFQVQSLNFVINPDKIPVNLDKVQQIKIQWDNSKKAWYLNIIYTKEIVDITKGFNNIISIDLGLDNLATITFRDTTKSYIIDGKYAKSKNSYYNKEIGRLTSIAMKQSKDSKKFKRTKQITKLQTKRNNFLKDYIHKASRKIIDLAINYQCKTIVIGDFSGIKQKNTSKSFVQIPQQQLIDKIKYKAKLLGIKVIIQNESYTSGCSAIDLEPINKKNYNKNRRIERGLFVSNEDIKINADINGSLNILRKYDKCIPRLINEARDNGFLDNPIRLRVA

SEQ ID NO: 1680 - protein, 356 aa, Tissierellia sp.
MLRAYKFRLYPNKEQKEYLVKCFGCTRFIYNKMLSDKIKHYEKTGKMLKNTPAKYKKEYPWLKEVDSLALANAQLNLEKAYRNFFRDKTVGFPKFKSRKSKQSYTTNNQNGTVYIENSHIKLPKLKSKIKIINHRKFQGKIKSCTISKTRSNRYYISILVEENIKPLPRTNKKVGIDLGIKNFAITSDGEIFENPKWLRKSEKRLRKLQKDLSRKKKGSKNREKARLKVAKQHERIVNQRKDYLNKLSSKIINENQVIVLEDLRISNMLKNHNLAKSIQEVSWHEFRRQLEYKAKWYDREIIIAPSNYASSQLCSNCGYKNKDVKDLALREWTCPKCNSHHDRDINASKNLLKLAI

SEQ ID NO: 1681 - protein, 398 aa, Lentzea sp.
MVNGQVKRAFRYRFYPSGAQAAELSRTFGCVRKVYNLALQARAEAWTLRGERVGYESTSALLTAWKRTEDLAFLAEVSSVPLQQALRHLQTGFRNFFARRARFPRFKSRKKSRASAEYTRSAFRWRDGELMLAKMAEPLDIRWSRPLPEGAKPSTVTVTRDSAGRWFVSLLCEDSGVRPLPATDAAVGIDVGLDHLLVLSTGEKIGNPRHERRDRTALAKAQRALCRKQKGSGNRVKARVKVARIHAWIADRRTDSLHKVTTRLVRETQTLVIEDLTVSNMVGNHRLARAINDAGWRQFRQQLQYKATWYGRDVIVVDRWFPSSKLCSVCGALAAEMPLHVRIWTCGCGATHDRDVNAARNILTAGLAASVCGAGVRPQRNPPGGQSATKQKTLWREL

SEQ ID NO: 1682 - protein, 131 aa, unknown
  TnpB Polypeptide
MHEHIYNQRNDFLHKLSTDIVKQNSIICIEDLDIQSMQNNQYIARDVADVSWSRFMSMLEYKSAWHGRTVVKIDRYFASSQTCHECGYKHADVKNLNIRRWTCPECGTVHDRDVNAAINILREGQRLLLLQ

SEQ ID NO: 1683 - protein, 416 aa, Streptomyces sp.
LFGISSVIVMQLRYAFRLYPDAGQRIALAKAFGCARVVFNDCVRAREDARKAGRPFPKAGELSKTLITQAKHTAERGWLGEVSAVVLQQSLRDAEAAYKNFFASLKGTRQSPKLGAPRFKSRKDARQSIRFTANARWNITDSGRLDLPKIGAVKVKWSRALPAAPTSVTVVKDSAGRFFASFVIDTDPAADASRMPATDQSIGIDLGLTHFTVLSTGEKIDSPRFLRRAEKKLKKAQKELSRKQKGSKNREKARLKLARAHAQVTDARREFHHQLSTRLISENQGIAVESLSVAGLVRTRLAKSVHDAGWSRFVAMLEYKAQRYGRTLVKTGRFEPTSQVCSTCGVKDGPKPLAVREWTCAACGAVHDRDHNAALSVQQAAGLAASACGAPVRPEPVLAQREETGSHGFPTGSRAA

SEQ ID NO: 1684 - protein, 458 aa, Moorea sp.
MYRTIPIRANFLDEEKAFWEFQCQQANNLFNSAVYYSRQKHFDCLKQQPETYTVYWRGDSLCQGWKTYKCSVKYAELCRELKENPNYKAMAAQSAQQTLKTIAESITSYNQLVGLYYKGQVDRPRLLRYRKKGGLAAVTFPRQALNYKEGLFYPSISKETQPELLTQVTLDPPDFIDPDWVKEVTIRPCYGQLWIDWVIDDGKQPLATNPNLDYSQALGIDHGVDNWLTCVSTLGKSFIIDGKKLKAMNQGYCRLVAKYKSGKSEKYWDSSLDRIQLRRNNQMRDAINKAARFIINRCLNNGIGNIAIGWNEGQKNRSNMGIKGNQKFVVIPTKRLIERLKQLCSEYGINLIITEESYTSKASFLDGDSLPTHGAKPNGWRSSGKRVRRGLYKTSSGMLINADTNGAANILKKVTTQSFDLTKVTRGALTLPHRYDLFKSLSRSYRNKGGAVRVYPTA

SEQ ID NO: 1685 - protein, 473 aa, unknown
  TnpB Polypeptide
VREIGKNVKKNFTVVKYIVKNTDMNAYFMRLAILSTNLTNTLLYYHRQWYFYTQNVYYTEHPNESFRPYRYNEEVIDELKRYMYEYNQNKILYGKRPTDFITFGLDAYFLHFYFKKICQSDYTNDDLPAQVAQQVTQKVSQSFKSFKQARKGFFKNPDKYDTCPQLPRYNKGSKISPLYFTNQATKIKNGVLKFPKTKLTLPFTYKPKGKYTRMEVIHSYGQFELRLVFEETENLKFRETDVVAAIDPGISNLIAITTNKGQSLLVKDKTVKYINQYANKEIARIKSAQMTTGGCDKVQMSKQLSKIYQKRQRRIEHLFYVLAKHVLAFCLENNVSKLALGKNKGWKHTYNKGKTNNQNFIQIPYTSLYRKIQDLLTKNGIEVIEQEESYTSKASAIDLDELPVFGEGDLNVSFTGIRFGTHSRLYKTGKGNTINADMNGALNILRKAFPDVEIELNDLQYLKNPKVLRNMQA

SEQ ID NO: 1686 - protein, 395 aa, unknown
  TnpB Polypeptide
MLRGMKIALDLTGEQEQQMWKSVGVARWSYNYAITRCKEQYLKHLKNPTLPKTLTAGEILKELTVLKRTTHPWLKEVGSNVVKQAVKDWNDARNRFFKGLGKAPNYKSKNNSKPSFYVNYETLRRVSGGFRGEKLGFIKTTQPLPKIPKGTHYKNPRISFDGKFWYLSVSYEVQEVSVELTDLVIGVDLGINTLATLSTGEFIGNINKSRRVKQLEKQLRREQRHLARQLQANTKGYLTTENGGRKPIYKRPLELCSNIQETKRKIKLLYRKLSSIRLNHIHQLTSYLVNQLPKGIVIEDLNVRGMMKNRHLAKHIQNAMFYEIRRQLEYKCLQYGIYLVVADRFYPSSKTCSYCGNIKSDLKLKDRVYKCGSCGLKKDRDLNAAENLAYYFYRG

SEQ ID NO: 1687 - protein, 454 aa, unknown
  TnpB Polypeptide
VKILSSYRIKLTGDLNALDNSIAIYREALHFIIPIVSTHWDEMKDFKYVNQRMSYIEKLIHSTKVSHSLYNFDKDFPKFPSYLRRAVIMKSVGIVSSYHSNLANWEEKKVELEVNGEKIPQRPRLETHHFDYPAYYKGNLFRNFNPITQTIDLKVFKRGDWVYETYTLKTSDCNYYQKNLANKKQNVPVITKRGRRFYATFSYEENVPLIAEDKIEKICAIDLGLTTDATCCIMGADGTVYARKFIQFSEEHDQLNTQLGRIKRNQKRGNKKNTRLWKRVSGISQNIADKTAQAIFEFGSQYGVDVFVLEFLDFKGKQTVKRAHFWRYKRIFSVLGMKAHRHGLRISRVCAYNTSRLAFDGSGFVKRGCKLSKETPYSIIQFASGKVYNADLNATYNIGARYWIRHLLKTVTVTQRLALEAKVPQVAKRNTCTLSHLISLRSELLALNVKRNQV

SEQ ID NO: 1688 - protein, 393 aa, unknown
  TnpB Polypeptide
MKQVLDSLCDYRRYCWNEALEVWNTLYEQRLIGLTEKERSAIQELVKSKQPLTDELQELNALYPSPSYYTVRNILTSQKEDWQYLLSSRVLQLAVKDLSDSWFRFYENSKEFGKPTYKSSKAPKQGFKTDRSRIINGKLVLDKPQPYKETWYPISFRGANLSDGKITLCSITRVNGKYYASLVVEIELLNLTKTDKVNAVDLNVDHFDTLDGRFNLQSKLLNKLYNRVKHYQKVLARKRLENPDYKNSKGYQATRVKLQATYERIRNIQDDLLHKFTTSLFVNYDTVVLEDLDVRKMQMKKQAKNLHRSLFGRFRQYMEYKAIKFDKKLIIADRFYPSTQRCSSCGFVKTGEDKITLEGNKKHGTKHHEYVCYGCGFTTDRDYNAVLNLLALA

SEQ ID NO: 1689 - protein, 444 aa, unknown
  TnpB Polypeptide
MRKRKYIVVTQLHEQNNKDLIEYVEVARHAYAKAVRETFYCIKNLEEFNKSSFNTYLQDSYSITKRTANSIISDAQGQINRLKGLKCYEKTQLERKIKQLETNVIPKLEQKRDDTSTMLRLGLAVSLVSQRNLRRKIVAKKQKLNRLKQKLANLTYQIETSSFKLCFGTKYLLQRDYTAFVEGRDSQMSFVGAKCETSCNHQLQLRYNSKNNQFELKMRKDFGGFKDLKGSGRFVLGKLYFRHHKDKIVRILKEKNSPLSFKIIKRNNRYYLYCTFEVQLDSDDFLTRSTYGTIGLDFNKGFITLSEINRYGHLVQTQFLPYRFKSGNRTRTDLQQIVANVVHLSLNEGKDLCIENLNFDRKRAKTETKQGKKYNDMIHSLAYSQFVDLVETIAYRNKVFIRKVNPAWTSWIAKQKYCPQMKLNVHVGASFVIARRGQGYKDTV

SEQ ID NO: 1690 - protein, 401 aa, unknown
  TnpB Polypeptide
MEQESLAWWYSKVSRNYWNLLVDIDKRNNKGEFDEILSRNGNKTYYSKFYDRDIYSLSQSDYLNLAKIVVAKNYDEDDEAWSWYYQPNQSFIYAFLVKELVKIKIQNKGRLKFRSIDKIRPSFNVRCDISADKKRSSRIYLKDNGKLQIPTLGDVNFGSTRKDFDLSGKKQVANISFDGKYWYLSYMVEIEVQVTDLPDYTDGVGVDLGIKTLATVSDGTIVPNIKTFRRVRILNKRLKRLQRKVSRKYLINKCNKHNKTKNIIKLEREIKLIHRSLRNIRINHIRKFVSELVKKQPQYIAIEDLNVKGMMKNKRLAKDIANCSFYTIREHLIRKAKERQIAVRLVDRFYPSSKTCSKCGSYKQDLKLSQRVYPCNNCQEKIDRDFNASINIARTDRYILA

SEQ ID NO: 1691 - protein, 414 aa, unknown
  TnpB Polypeptide
VKGVRKMEISLTSKLRIVFQSEDDRKSVFATLIAYRDACNFVSQYIFDHNFVLKQRELQATLYHELRNRFGLKSQMVLSVFRTVIAQYKTVQTQLRKQRVWDGYKKDNHGKDVPNYIKKDLTFLWKPIKFKRPQLDLVRNRDYSFKNDMLSMNTINGRVFVKVYYLEENPYFDGSWKLGTGKVVRSGKHWFFHVSATKEVSDFEMQNLKHVVGIDRGLRQVLTTYDEKGQTRFVNGAFISKKRKHYVQLRSCLQAKGTKSAKRRLRSLSGRESRWMSDVNHQLSKTLVETYGKQTLFILEDLTDVTFDTVHSRRKENRYEHHSWSFYDLEQKLRYKARLNESEVVLVGAHYTSQRCPKCGTIDKSNRDKNIHQYTCSNCGYSSNDDRVGAMNIYELGKWFVSGIEKPSFVISNE

SEQ ID NO: 1692 - protein, 482 aa, unknown
  TnpB Polypeptide
MEKGKQIFIYTRKLNANKSHKEQFAKRFHMAEDIYKKTLITLLKRYSKMKKDPLYKRAYKFPKGKERNAILKDLGVKYDLVGKFTAGKIANDYRNARNYSDYIPSDTAVRLGHRAWGAFSKVRFAKGADKVNLKGTLISFEGSRDIGISVKGNVFTISTRKKKVSCTIRNENDDFEEEVLRNTLKYNRLVRRFEFGEWNYYVQSIFEGTLPTKYTSELEGSVGIDIGISTIAVSSYYQTELEELAKDVTLDQQEVTRLSRKLDRQRRANNPHKYNEDGTIKCGVCQPWVDSKEYLKTKAELSELHRKSKEQRKLAHKTLANRIVRMGSTFVVEQISFKELQARTKETKINEHTGKFQSKKRFGKTILHKAPAMLIEQIRYKTMYQGKTFILANTREVKASQLNHLTEEYTKPSSSTRVKMIGDDLVQRNLYSAYLLQHVGLDGVTVDIKGCKSDFDTFLRNQEFTMSQLTTDLKSIGKEYFN

SEQ ID NO: 1693 - protein, 417 aa, unknown
  TnpB Polypeptide
MQLVEQHVIDRKDPRYAVIDAAAFKSKNLYNAALYEMRQAFFHDGTYLTYNEIQRRMQSHEAYKALPAKVSQQILLLLANNWESFKEAKKAYEENPSTFTGRPRIPKYKHKTEGRNILIYTLQALSGGRGKGALQQGIIKPSGLAITVKTQQKAIHQVRIIPRSGHYVVEVVYSKEPVQANVDPSFCVAIDLGVTNLAAITSNREGFIPRLVNGRTLKAMNQWYNKRMKELKRCLPKEDRERVTKQMERLTNKRNRQVNHYLHSASKRIIDFLVKEGVGTIIVGKNPLWKQEAGMGKRNNQNFVQIPHARFIDMLTYKAELVSIQVEVQEESYTSQASFLDLDPIPTYKPNDDTEYTFSGKRMGRRNRLYRTKDRRIICADVNGSYNILRKSKPDAFAHVDAKGIAAYVVQPSRLAV

SEQ ID NO: 1694 - protein, 402 aa, unknown
  TnpB Polypeptide
MKQTIKYKLNPTKEQEGHLHNLCSIATKLYNTDNYQRINAWKETGKIPSVYTQKKELKNNVWFKLLPSQTAQEVSFNLQRNYNSWFKLRKKDKTANPPRFRRKEMLSPITFYQQFKITDDKIKLSVSRKYKEERGIKSIEIGFDLWRENKGTAKMCQIIFNKGKWFAHIIYEIAEPEIKLNDKIMAVDLGIINTAVTRDNQGNSTIHSGKGILSVQHYFNSRKARVQGKLNLQFPKRHKSKTLNNLNRKQKRQINQMLHNISKNIIEEAKRNDVKTIVVGDITDIRKDKHFRKVTSQKLHSWSFSKLTQQIEYKAIQSGIRFVRVNEINTSKTCSCCGNIRKSNRITRGMYKCKFCGRITNADINGASNILKKYLQLFSKEDRSIGNVAMPLVSRIENVIPR

SEQ ID NO: 1695 - protein, 390 aa, Bacillus sp.
MLVKKGYKFRIFPNQRQMELINKTIGCSRFVFNFFLAKQKQKDAYWHIVEEMKQNGQLPSNNWKGDFFNKYDSIKAVRQLKEYYPFLKEVDSISLQKSVENLADSYQRYYKNQNKAPTFKSKKNKVQSYTTKQTNKNIAVLDKHIKLPKLGLVRFAKSREVDGRIINATIRRNPSGKYFVSILAEVEVVQLPKTNSQTGVDLGIKAFATLADGTIYRNNRYFKSLEQKLIKAQQILSRRVIGSSNWHKQRKKVARIHEKIKNARTDFLHKTSTDIIKNHDVIGIESLHVTNMMKNKKTAKSIADVSWYQFKTMLTYKAEWYGKTVVEVSKAFPSSQLCSNCGNKNKDVKDLNLREWTCKCGVHHQRDVNAGQNLRNEAIRLLTVGATGIA

SEQ ID NO: 1696 - protein, 419 aa, unknown
  TnpB Polypeptide
MSTVLTAKLKLHATPDQRHALRATQLAYRDALNYVGRYAFAHGKLSNAVALQDGTYQEIRARFGLPAQMACSVPRQVGATYKTLWTKVKANSATRAAGKTKKRYRGLDQAPKYVSPTLTYQLGHDYTFKTEPQVSLLTLNGRVIVPYTGYARPVALIQHSARIGAARLWRHKPRKQFYLLVSLEIDHPDPIPEHHQRVVGVDVGQRYLAVATDLQNHMAFFPGNETRAKADHYARLRKRWQHKGTRAATRRLVVICGRERRLKQERHHRISRRVVDAYPHSLIGLENLTHIRERARRKHGKKATVKQRRANQHAAQWAFAELHSYIAYKALLAGSVAVEVDAYHTSQACPRCGYTAGTLRVHCGAQPPREGAAVHLSGVPLHTPCRFDRRAHCGAEKAARPAGLGEHGCLVGTPRCVER

SEQ ID NO: 1697 - protein, 435 aa, Haloarcula sp.
VTELTKTLELKLVDPNTHKRQKLRETQDAYQQALQAAFAAGCDTQSAANDVVVEYDLSGYAKNALKQYVPQLCGNSYDANEIHDDHPVRFTNEGLQLDHQPQNAIEWYVKVPHHEDYHLWIPARANPEQRDWLEALDADDAEMGESRLFERDGTWYLHVTATRDVEDKSEASADERTPPDESGEPCLAGLDRTPIGVDIGEASLVTVCHRDGSGSPVRPRLWADDAKAVRRLRKTYFTAKRRLQQRGSERIADSFGDSLWDQIDDVFHRVTREVVEYADSVENPVLVLEDLTYIRENMDYGEYMNRRLHGWGFAKLHAQIRYKAAEKGIPVETVNPRNTSKAWHACGEHGSRPRQATFRCSNDDCWLGEYQADVNGAINIADRYRSGESHRRSDRSSRQKAGDDDSATDGASLTGPQDSHADAGTQQETRGTHAS

SEQ ID NO: 1698 - protein, 357 aa, unknown
  TnpB Polypeptide
MKTTLQVKLLPTSEQHTALLDTMRAFNAACTWIAAYAYHERCASKFMAQKALCYEIRQRFDLSAQLAIRAIAKTVEAYKRDKTQQVALRPDGAIVYDERILAFHALDEVSLMTLHGRTVVPMQMGDYQRVQFSRAKGQADLVFVKGTFFLLVTLDTPEEPPMEPTHFLGVNLGIVNVATDSDGNSYTGTPVEVVRHRCGRARQTFQATGTKSAKRRLKKMARNESRFRRDVNHTISKRLVAHAKDTKAALSLEDLTGIRDRMTVRQGQRNKHSSWSFKQLRQFVSYKAQRAGGPVVFVDPRNTSRTCSRCGFVDKRNRRSQAEFSCLRCGHHVHADHNAARNLATRGAVKRPDLVAP

SEQ ID NO: 1699 - protein, 391 aa, unknown
  TnpB Polypeptide
MLKAFKYKINPTKEQTTLLNKHIGASRFVYNLALECKQMAWAGNRVNLSCFALHSQLKGLKAECEWLKEINSQSLQQSITNLDKAYTAFFKGQNSFPNFKKKSNGGSFNIPQNVLLENGKLIIPKFKKGIDIVLHRPTKGEIRQATISRTPTGKYFVSILCETGEPIKPKTVVKENTTVGIDLGIKTFIVASDGKEFDNPKFLRKAQSRLKFVQRKYSKHKGKRTKHKLAKLHEKVANQRKDFLHKTSTQLIRDNQSVAIEDLAVSNMVKNHKFAQSISDAGWSTFVTMLEYKAEWYGKNILKIGRFEPSSKLHANCGHINKELTLSDREWTCPKCGEVVSRDLNASINIKSFALKNNLSVERRLKNRGELPTLVGVLIPEAQPIGSAVGW

SEQ ID NO: 1700 - protein, 404 aa, unknown
  TnpB Polypeptide
MKKTFEYRAYPTTKQRNTFTVWLALLRQLYNQALAWRIDTYKNTGASVKWTTQANALPDLKQESTSFAGLHSDVLQDTIRRLDKAYKAFFRRIKTGGEPGFPRFKGEGRYRSMTFSHLSSNLIRNVHRKFARIVVPKVGHLKIRYHRPLPDGKIKTLTISKKASGWHATIVVEVPDPIEVPAQTTLGIDVGLNAFVVDSDGEQIPNPRHFRKAEKKLARHQQILARRKKGSKRRSKQRDTVARCHEHVANQRKDFQFKAAHSILQRCDEVAVENLQIKNMLKNHYLAKSISDAGWGSFRLKLQSKAESAGKQFTKVKPHYTSQKCAGCGSIVKKVLSVRVHDCTDCGLILDRDHNAAINIKKAAVALRGGAVVTNTPETPERDGNAQPNKSQGRRQQASPFRVG

SEQ ID NO: 1701 - protein, 483 aa, Cohnella sp.
MTDFTYHTFQIWIKKGHRLYPYFEQMGVDAKGLYNVTNFYIRQIYTSCRQDKPLQPLQQEVMNTLHQYIEAMNERQLAAYQAKIDKAQLKPLLERREIRCNLFELPSKVRPLVGYNFLDCLFKVMKQKDYLALSIQSSQAVMRLVCQNWKAFFASIKDYGQHPQKYTGKPRIPGYCRAREKEMLFSNQDCVIQEGKYLKLPKTRVRLNIGKLGCTDGKLKQVRVVPKYGQYVVELVFERSIAVEARDKERFMAIDLGVDNLATLVTTTGSQPLLVKGKSIKAINQYYNKLKAHYTGILRQGKAPKEGPHTSKRLAQLHRNRQRRIKDLFHKASYQIVKQAIEQNIGTIVMGKNDGWKQAVSIGRRNNQSFCHIPHHMLIAMIRYKAAEQGIAVQLTEEAYTSKASFLDHDPVPAYEEGRTRSFSGRRIGRGLYRSAKGLINADVNGAANILRKVVPNARANGIAGLDGNQSVNVSTPQVLSIR

SEQ ID NO: 1702 - protein, 402 aa, Actinomadura sp.
MARQVKRAFKYRFQPTDEQAAELSRTFGCVRLVYNRALAQRTHAWYTERRRASYVDTSAWLTEWKKTQELGFLGEVSSVPLQQALRHLQAAFAAFFDKRAKYPRFKSRKKSRHSAEYTQSAFRWRDGELTLAKMPGPLDIVWSRPLPEGAEPSTVTVSRDAAGRWFVSILCNDTIRRLDPVDQAVGVDAGVTSLVTLSSGEKVTNPRHERRDREHLAKAHRELARKAKGSANRDKAKRKVARIHARITDRRRDFLHKLSTRLVRENQTVVIEDLNVRNMAQNHSLARAISDAAWRQLRTMLEYKADWYGRELVVIDRWFPSSKTCSLCGATTEKLPLNTREWKCSCGARHDRDVNAARNILAAGLAVSACGAVVRPQREPSRTGQSATKQETHGATRGLPRL

SEQ ID NO: 1703 - protein, 337 aa, unknown
  TnpB Polypeptide
  misc_feature (328)..(331): Xaa can be any naturally occurring amino acid
MRAVYKFYIRHNDELDKLFRTSNNLYNQALYLFRLRLDADGTWTWYNDMDKLIKGVTNLDGECNYKLLKSQCSQQILRVLDKNMKSYCKSIKDWKKHPEKYKGMPQIPHYRKRGGMFNLYYTNQSCSIKDGRIKFAKDLFVDIPQWNKYGSRLAKFNQVRLIPNDCNIKVEIVYDYKVQHADVDKSKCAAIDLGLDNLATMVTDDGCVIFSGKYLKSYNQYFNKTLSHLQSIKDQQGMKRSTRRIIRMYNKRDRYFEDAFHKVSRQIVDMLVEKKIGRLVVGYNAGWKQKSYIGKRNNQKFVQMPFARLVSCLQYKCEMVGIDFVKHXXXXSIVCSS

SEQ ID NO: 1704 - protein, 389 aa, unknown
  TnpB Polypeptide
MAHYTYKFRLYPNQDQERRLAGHFGCTRFIYNHFLSQKKDSYLSGGKSLNYYEQASELTKLKKDKTWLKDTNSQVLQFSLKCLHAAYNNFFSKRAKFPRFHAKRNKQSFTVPQHVKVENSKLFFPKFKEGIKVNLHRPIEGRIRHVTVSKNCAGQYFVCVLVERNIKQMPISGKVVGIDLGINALATCSDGKVYKNIRPYRTLERRLRALNKAFSRTKPNSKNREKARLKLARLYQKIANIRNDHLHKCSHQIVNENQVIVLEDLNVSGMMKNRCLAKSIADVSLAEFVRQVEYKAGWYGKTVIKVSRWFPSSKMCSSCNYVIETLPLSVRNWSCPKCATEHDRDKNAAINILNEGKITVGTTGLACGLDVRLRSNPEQSRAKQEITIF

SEQ ID NO: 1705 - protein, 308 aa, unknown
  TnpB Polypeptide
VNQILRAYKYALKPTLEEKLYFCKTFGCSRLIYNLILGDKVNYYKANKQTLYPKVSDYKTDYPFLKEVDSLALANARLHVETAYKNFFSKKSKFPKFKSKKTRQSYTTNNQRAGSHNSIKISNVNNVFYIRLPKLKAPVKMIYHRPLPEGAVIKSVTVSKTKSGKYFVSILVDTLEPEKLSCNDKKVGIDLGLKDFAVLSDQIVIKNPKFFRRSRDKIAKLQRKLSKKEPGSHRFEKARRRLARAYERISNQRQDFLHKLSTKIIRENQTIVLEDLRVSNMLQNHKLALSIQEASWFEFRHMIEYKAD

SEQ ID NO: 1706 - protein, 446 aa, unknown
  TnpB Polypeptide
MASNKTFSSEEARLAKNEQIAKSWAATRAKREQQDCRVYTLKLTLAKATRRQREALERVFLEAKWMRNSALAADDTLTYDWRSKTASVKVVTGVLEERELKHLGSQVRQSILEGLRRDMRSLAALKKRGKTIGKLKFAKQVNSIELKQHGTTYRIRGQKVSIQGLPGYYRIRGLDQLKDKDLANAKLIHKAGEYYLAVTTFQDKILEDKPEAMLGIDFGLKTHVTTSSGLEVNVLVQETERMRRLLRKLRRQISGSKNYTKTRLLIQREYGRLDQRKADQANKLVALLTSESIVCFQDDALSGWKTRRGFVRGGKTIQHSILGRVKAKLSGSANAIKLPRFLPTTKLCVCGVKNEALTLVDRVFECASCGYSRSRDLHAAENMIRFALISGQELPVAPVEGLSDWNKEAFELSYQQASMKQETDEAKKPENSRAPRGEASVSSAQM

SEQ ID NO: 1707 - protein, 446 aa, unknown; identical to SEQ ID NO: 1706
  TnpB Polypeptide

SEQ ID NO: 1708 - protein, 330 aa, unknown
  TnpB Polypeptide
MSILAHKIRLYPNNKQKTLLAKSCGTSRFAYNWALAEWKRQYESGDKPNEAKLRKDLNAIKKEQFPWMYEVSKCCPQQAIKDLGTAFKRFFKGFAKYPKFKKKFVNDSFYLDNLNFHVRNGKVHLARIGEVRLGEKLRYEGKLMAATISREANQWYISIQVETPEGKPLQQTGNTVGIDVGVRQYADNEGRFYEVPRSYRNSERKLRRLQQDLSRKQKGSKNRSKARSNVSRCHLRIKSIRQDWLHKLTTDIVRNNDVIGIEDLNVKGMVRNRHLAKSIADASFGEFRRQIEYKALLFLLCQIPLTCYFSMAYAIIFVYFYSVRWLLVFV

SEQ ID NO: 1709 - protein, 457 aa, Spirochaetales sp.
  misc_feature (7)..(33): Xaa can be any naturally occurring amino acid
  misc_feature (387)..(446): Xaa can be any naturally occurring amino acid
LYIDSSXXXXXXXXXXXXXXXXXXXXXXXXXXXYRAKIKDEFTCFLPTIRIYQDAVNFLINVCNENYALMKDFPSQKAMTVIERLIHSTSARKAVYPSFDKIFHKMPSYLRRQAINTAVGHAKTYRKNLELWESNGCKGKKPRLGRCGNRMPAFYKGNMFALCEDGSYQVRLKIFIRNDWIWQTFTLNKSDMDSIAVKKGFSFDKASSPVLKKRGRRFSLIFAFETEGRLPETTEKICSVDIGINHSAVCSVMDRTGTVAGRTFIKFPVEEDRFTKVLAYTRKAYSNGSKGCHKLWRWAENYNGCLAIKTATAIVEFAVKNNVDAIVMENLSGMGGKIHGSKKQRLALWRKREIARRVEEMAHRRGIRFSTVCAYSTSLLAYDGSGXXXXXXXXXXXXXXXXXXXXXXXXXXXXXXXXXXXXXXXXXXXXXXXXXXXXXXXXXXXXFLNFRYEPAAP

SEQ ID NO: 1710 - protein, 274 aa, unknown
  TnpB Polypeptide
LKEKRINPNKNNVISIVHKKLYNILKSFNLSSKIAQDCYRNAISIYKGWYNNPNKGRFPIIYKPTVWLTPKLSYTVNFNEMFVKISKIGEFKILGYPRNYKEYLSWKMRESRLVFRNGKAFIKITFEKFIQKIEPKDSIAVDINMQNITVGKDENNFVKIPTRINEIYHYKLLAENLQIKYSKRWKSNRNIKRRIMVFHIKAKNIAEDFAKKIGKRIINEAIKMNANVIKLENLRNLIKNVKRLHKKFRDKLYLMQYRKIFNIGLIGKQRNMVY

SEQ ID NO: 1711 - protein, 355 aa, Acinetobacter sp.
MKTLKLRIKDKHCKVLDQLASEVNFVWNYVNDLGFKHLKRKGEFLSAYDVAKYTKGASKECNLHSQTIQAVTEELITRRKQFKKAKLKWRVSNKKSARRSLGWIPFKKVAIKYADGYVQYGKHQFKLWDSYGLSKYSVRTGSFVEDSRGRWYVCLVVDSSKQNKPTATKAIGIDLGLKDVATCSDGTVISNPKFYRKYEQKLGIAQRAKNKKRVRALHAKIANCRKDYLHKASTMLVRENALIVVGDLSAGKLVKTKMAKSVLDTGFSAFKTMLKYKCENAGAMFEEVSERFTTQICSCCGEITSSSPKGRADLRIRVWECECGSSNNRDENAAKNILALGHKRLVVGITSVSGR

SEQ ID NO: 1712 - protein, 421 aa, unknown
  TnpB Polypeptide
MGTIHKALKVRLYPNSKQQEVLNKTLGSCRAIYNMMLFERIQTYETWKASGEDVRVLYEYEYKTEKEYKEEYEWLKDSVDSQALQQARINLSMAYQNFFKSLSGKRKGAKVGFPKFKKKRIGSSYRTMMTNNNIAIDFENHKVKLPKVGYVNFKDIRKEIEGTIKSATVSRSSTGKYFVSLLIEQELELQGVRLDSINESQVIGLDMSLEKLFVDDNGNSPAYERLYRKYEPLLKKAQRKMSKKKKGSKSWYKALHKVNLIHERITNKRKDFTHKLSTELVRNNDAIVVEHLSLKGMSQALNLGKSVMDLGYSEFVRQLSYKSLWNNKTFIQADKWFASSKTCSVCGYKNKDLQLSDREWECPNCGTAHDRDQNAGINLKNYGLKELELIGLGQPEIKPVETSMHKVESVKQEACCSLDNR

SEQ ID NO: 1713 - protein, 562 aa, unknown
  TnpB Polypeptide
MRHEKELLVGKKKKRINAGSLDKLTLTALRFRDPAKCRIHVEHDLKARFQNISQNELQECRDIAIAMWNSYLERGGSPPLHSTNMVPRKIPRNIFQGRFKLIHRQNSHIRYWLELRDSLDSVRQEKKIHDKLVIPLKMSPFHENQLSLGKAKSCRIVKDSRHKWWVVFAVSIPEQKETCSNPSEKPLAVLGIDLGISKAACTVLLKKDKSVRVRYFKSEKHRYIRKHDRRISSLQSEMNRRKNLGLPYDKVVKKLRDLKHKRAAVRDEWDKVLVSELVSYASELSTKYNLYVTIGNPKGIRNIALRGYSSSRTYRGMIHSWSFARIILNLEHQFSIMGWSTGKPGDRFLAVFEGRTSITCHQCGRKGIRPKQSLFVCHTCGYRDNADKNGAINIARRMILLTPALRVKDQGLECWLLPRELTRSKAARRTRSSKRKSKLPQGSSASSKRESAVVRSVQTELLSFGDSTKMNDEDPAVENAAETSSASVTLDSPRSDGHSLFVQRTEATFQQRGRASTKLDKAHVTPPGANQSEFSDDRHGSGRTQELVGDGIHSSDSDMLSM

SEQ ID NO: 1714 - protein, 530 aa, unknown
  TnpB Polypeptide
MNFPGTLPEVTISTSLPASNMDSISRDDWIISACPSRVFCIIESKSSSSYGTSTFIIVDNQPPYRKIILTLKMSDFTKRVCNSWRDLGQSWTIPRRSCDIFSITKWYELKRCTSHNLVMMVARAYRYELDPNNHQRTLLYKSAGTARFAYNWGLARRIEEYKSSGQALNAIELHRELNARKQTEFPWMYEVSKCAPQESLRDLDRAFTRFFERVKTGKRPYGFPRFKKRGGRDSFRLTGTIRVIRRSRVRASIQLPRLGRIRIKEKRRDSFYRGRILSATVTRRADKWFVSITVEEELADPDEKSHLPEVGVDLGLTVLATLSDGIRVENPRPLRRYLRRFRRLSKALSRKKRGSKNYEKAKMRLARLHLRIHYIRQDTLHKLTTRLAKNHSVVVIEDLGVSGMLKNRRLSRAIADVGWYEFRRQLEYKCSWYGTQLVIAPRTYPSSKRCSRCGHSKVTLELSDRTYRCEACGLVLDRDHNAARNLLQLIDDLAAVSCTEAQNACGERVRHHPSSARSDAFSRKQETDNR

SEQ ID NO: 1715 - protein, 432 aa, Calothrix sp.
MYRAIKVRIYPTDEQESYLAQCFGNTRWLWNYMLNATTTAYKETGKGLSKAAMDKLLPGLKKEFDWLGLAYSQVLQRVTFNLSSAFVNFFEGRAKYPNFKSKHGKQSIQYPQNVKLMPEDSVIKFPGNLGLMKAVFHRQHSHAKFTTVTISKHADGRYYASILFNQEDKPVVAVRDAIGVDLGLKNFAITSDGSKYDLPKKRLAKLEKNRKCKQRKLAKKTNKTTNKRHKAKRLVAKVSSKIARVREDFLHKLSRKIAYENQVICVEDLAVKNMVRNPNLAKAISDQGWGMFQTMLKYKAEKFGHTYLEINRFFPSSQLCSETLLPIPMLQNGYDSLKVRFVDCPHCQKQHDRDINAAINIRTEGLRILVSQYGLGETPSGVTGELVRALGTSASALGGDVRPKSSGRKKSTKTEAIPNELGSLHCTEGQCR

SEQ ID NO: 1716 - protein, 544 aa, unknown
  TnpB Polypeptide
MVMKTIVGITNELTESELSQLDSFVSLYNKISHKLYVDLFIKKLPVKDLSPAYQTKYSISKRHFDSIRKILEGKVSSILALNKNYIQDTKDKIKSIEKDLSKQIKTYNSYKDKLKKENQLSLIETNLKFKVHNKIKYNRIRLDRLNSKLKELEEIRDTGNVRLCFGSNKLFRQQFLINSSNNLTQFKSHEQWYKEFNYQRNKEFTLIGSKDKSAGNLNAQITYIKDNLFNLKLNINPHAEKITDKYINLTFKVDYEVNTLKQIINNNQSKNKELWQALTYKLIKQPNKSHNKDKYVVSISFEKHLIKQTYTSKDKGCLGVDINQDHLAVSNLDNKGNLLKIYTFNYDLNGNKHQNNNSISLAVKELMKLSVELNKPIVIEQLDFIAKKKSLKASNSQYIKNKNKQLSSFAYSKIIELIKSRAEDNYVEIREVNPAYTSMIGSIKYSSRSRIDVHHAAAVCIGRKGLFSSNYKEKRISSRNRQIKSLVLPVRNGLNSVVYWKELKENMVKDKQHEKESSSNVASKSTSLGNSDMPVMNASVGTKS

SEQ ID NO: 1717 - protein, 320 aa, Streptomyces sp.
  misc_feature (257)..(312): Xaa can be any naturally occurring amino acid
VSKARAPGFLRRRRSVSPTATASGMPRSLSSPTRSTSRARARSSALTGGVTITAALSDGRTLTCPQLTTRERAQVRKHQRRAARAPKGSERKTAAYAQVAKLRAREANRRKDWCEKTSTMLARTYDLVRFEKLSIKAMTAKAKAKPDPGQPGQCLSNGRAAKAGLNRGILAQGWGLLRQRTGDKAPGRVEDVPAPYTSLRCSACGWIDKNARKSQAEFVCSSCGFTCNADTNASINVAAGQGGIPRPRQSAGAGGGXXXXXXXXXXXXXXXXXXXXXXXXXXXXXXXXXXXXXXXXXXXXXXXXXXXXXXXXPSRHQRCV

SEQ ID NO: 1718 - protein, 406 aa, Marinobacter sp.
MDKRKTNYKLYPSQSQSERLLESLRLHQQLYNAALQERIDCYRKTGKSISYNDQQASLTQIRADHPEYKAIPVYITRMTLRRLDKAFKAFFERVKKGQAPGFPRFRSLSRFSSFEMCGGSGWAFIPEANGKHGRLSINGIGRIKARGKARTLGKVKTSQVIHKHGQWFLSVTVECEPVRACKGQKACGFDWGVEYLGTVTYENGEHYAIENPRYYRDSKESLLPMQQAVSRKKRGSNRWKRACKVLTQARAKVARQRHHDHHQLSHDLAKEYTLFATEKLTIRNMTRTAKGTLEKPGKMVKQKSGLNREILDTAPAKLLAMIHYKVEETGGEFVEIPTRKAKPSQRCPACWEVVKKTLSERTHQCDCGCTMPRDAASGLVAIKWALGLGGNSPNAGHSAKPLLSVA

SEQ ID NO: 1719 - protein, 347 aa, unknown
  TnpB Polypeptide
MGIIKSYLYELSQDSCDVSVLEHLMEVSSQVDTAFCEYPLRHLPLIKEIQNEIGASLHLASGSPEHQLADMEIEILHRECCLSGKYPYLKTNRIRFMHPAIHDGVLEIVSGFEVRLPYEDLASVVRGSIYSDRTGKYFLSVDVNQEVMSKHEYCLGITVIDIDQSPYLKDSDGTLYNNTVNYTNLVKRYLNLSKPSVSQGYANRSAELKDTEQRIVNIRMDAFHKLARAYANSGNLILLESRNRPSVKSFDLNKSMYCCNGFVKLLELKCKEKGTPFYTIPSSHVDSLICSQFNIPREGLDSFNQQYPWGRAQALYTLGIDLARKLNTEKKDETTGISKTDKFSELG

SEQ ID NO: 1720 - protein, 529 aa, Thermoproteus sp.
MENMGSVRRAVAVEIESPPPELSAVEEAYRRIVEEAAVYVAERGRLEGKKREELYRRFRELYPLPAQLVQQAMNQGVEVGKSFLEARRDGRVHKPRPEVRRVAIRFAKDSWSYRKTAASAAPVRLALSLPGGRREVWIKPHRRLWLYWWKALRGEAELASTLMVKRRRGRWYAIFAFDVQPRGEPPAEVVTFDVNENTVAVARVSLLATVDAVARWNRQYLDPAVYSIRTDFGRLAKRYEAVRGRKLEELRGKYPFAGRDGEERAQNVADAREFRRFAGRLRERRRKEGRVKQVAREVARSPAVIVTEELGKNPQEGMIGVEEKAKKGVRKKVEKGELRHRIKQTPFRKILRAVEDKAAEGGSAVFYASSFRNSKACPIHFAKLEDGGDWHTLRCPHGHAVDRDAAAVLNMLWKTTPTGWVKGVWWDLRDVKRRLERERGLVPKELAGRKNPLVPWPVVRAVWASLRSLKASPQWPAVLARPAPRPPPEGPMRAGRGRLPAGHPPSGRRSATFTVTQTWPIANNQAAVI

SEQ ID NO: 1721 - protein, 520 aa, Streptomyces sp.
MGLQAGGEPNPMVVTWGVADSGPAEPDTAVLRAAARSVGRAGPSEAGRCSYRPVFCCPMSCRPASIGLTRVSVNTPCRTSVTKTRSLYVTKAPCRPVSVSGTSSSARVRRVAVMRLRYRFRLYPDTGQQTALAKAFGCARVVFNDAVRAREDARKAGLPFPKAGELSTRLITDAKRTAQRSWLGEVSAVVLQQSLRDADTAYRNFFASLKGTRKGPRIGPPRFKSRKDNRYSIRFTANARWSITDSGRLNLPKVGAVKVKWSRALPTAPSSVTVIKDAAGRYFASFVIDTDPATDRARMPDTDQTVGIDLGLTHFAVLSDGTKIDSPRFLRRAEKKLKKAQRELSRKQKGSRNRAKARLKVARAHAKVANARREFHHQLSTKLISENQGIAVEDLAVAGLARTRLAKSVHDAGWASFLSMLEYKAARYGRTLVEIGRFEPTSQTCSTCGVKDGPKPLNVREWTCTACGTLHDRDHNAALNIKTAAGLAATACRAPIRPGAIPAQREETGSHGISTASRAA

SEQ ID NO: 1722 - protein, 428 aa, Bifidobacterium sp.
MLEAVKVALDPTPRQERLLEGHAGAARFAYNLMLSHVQSQLARGEKADWSMYAQRRWWNEWKSEIAPWWGEYSKEAYNTAFESLSAALRNFFDAKTGRRKGRRMGWPKYRSKRRGTPRFAYTTGSFGLIEGDPKRLKLPRVGHVHCMEDIARRVGDAKVVRMSVSKRAGRWYASLTVERDAPTVPVTPKGGVGVDLGVKTLATLSDGTMAPNPRHMNNSLRRLAHAQRTLSRREQGSKRWQKAETRVRRIYAHVAAQRRDGLHKLTDMLTRTYRDISIEDLNVAGMVTNHRLARAVSDCGFAELRRQLVYKSARTGAAIHIIDRWYPSSKTCSNCGTVKAKLSLNERTYCCDACGLRIDRDLNAAINIEKQHVAPSAEETLNARGGDIRHDRHAPAAQTPMNREPSSQNNGMRLRADLGNGVMQTTAN

SEQ ID NO: 1723 - protein, 551 aa, Acidimicrobiaceae sp.
  misc_feature (532)..(549): Xaa can be any naturally occurring amino acid
MATNDPDCFSVLRCRMMTDENSRRRLDVAFVAAGHLERALTRWALTNLESMRHTTRWRDAGALSTGLSASGEVNDATVRRTRNAALNTLRKEFCLTEYDFTKRILELRRDSRWIGEHVPSSSALVHATQVWESFAAHLFRGAGRPRVPRPWENRVLHGYVRDEGRAAATDEEVEKATAKEKKPPKARSAGWTGLSLRTSEDAGFALHLHPSRDRARHLVIPVVTQGGSDEREAWYLEDPTAWRQIKIVRREVRSHFVYEAHVLCAKESYRDPSRYGSAPDGVVGVDLGVSSLAAVGIGPDGALIDALLVRASAQELEQRRLVARQRRRTQRALERSRRATNPDAYGPDRYGRPGRGSRRPGIRLATSKAYRATRRALRDERRRERESRVITTNRTAIAILQRCGTNIVTEDVTVKAWQRTWGGSISYFAPSEMISALEREARLAGGSFTKVPCRLGLTQTCHCGAVEKKSLAERWHRCEACGSGCETAPVDRDLHSAYLAAFVTVTSSPIAATLDTDRALAAWSGAEAPLVXXXXXXXXXXXXXXXXXXSG

SEQ ID NO: 1724 - protein, 525 aa, Hydrogenivirga sp.
MSSGKRVLSIRVSGRERKRRVRTLLLDLAHFRNMLIILIREYYLLHREHLLNQSLLYGLVAKNYSCKYREELEKVLRNIEDSRELKEFLERLKAQKEKIDNPHYVQYVIRQVIKDFRSFFKSLECFRANPEKLREMPRLSKPKKLRYLINFSVEGNANTFKQEEDRLVIRLRNGKYLKVKLPKDFPYRVSSVRLKLFGDDLYVDVVYEQEVKGIEPKGDYRAGIDIGLDEMLSVVSENPEIKSFIVSGKEIKAFNQWFNKERAKLRSQMDYLKNEIRSGDYEDVSPLKKKLRELEIKEKVLSAQRKRWMENNLYKIARKLVDLLYKTGHKIIYIGKNAIESKNGIDLGKKTNREFVSIPFRRLVELIKYKAEELRMEVVEVDESYTSKTSPFADILKVQELGSQKFEEEDETKRKELEKEISELRKGSRSGNVFKDKVLGKVFHADLVGALNILRAGAKLLRLSFYENLRVLFTKLCNPVRFKLVDFLYLQVSPESLLGIGGSKQGVLIPAGWMEKQGYLDRFEI

SEQ ID NO: 1725 - protein, 280 aa, Hydrogenivirga sp.
MSRAREETKFLLTYRFRAYPSALLEYKMENWFHILCTLYNHALEERKRAWKKEKKSITYTYQQNALPRLKEKDPSLNLVHSQVLQDCLRRVDNAFQKFFRKEAKYPKKKKLSGYRSFTFPQVWMKQKGKLVEVVKLERQNSRFAYLYLPKLGKLKIRLHREIDWEKARTVTVKREPSGKWYVCITVEVELGQILREAEEKAVGIDLGVKNLATTSEGEFIEHPRFLQRLEKRLKREQKKLSRKEKGLNSWEKQRRKVAKVHEEFPRLWLRDSMSVPSVER

SEQ ID NO: 1726 - protein, 420 aa, unknown
  TnpB Polypeptide
MPRKREVGSAPVVCRSARIGVRASRAQARRLWALLVAGGDVWACVLALNALRRQRGDAPLVSYQGLCRELATSGPGTFGELDSVGARSVLRRYSDAWFAAARARRACNSLARFPRRRRRRMMPLHWYAGTFTLSGRRLRLPVAKGAPPLWVRLDREPPYPPGQIRSVTLCVDAGRLVIDVCAEVPVASYASGTGPDPNRVAGVDLGIIHPYAVAGPDGAGLHVSGRALRAESRLHLAERKARSRAVAARAPARGQRGSRRWRQFRARTRRLEARHRRRLAQARHEAARAVVDWALDQRVGTLVVGDPAGVLAHDSGPPQPARARLAAGAAQRRARRQGRGPRHRRGDRRRALHLFHVPGLCRWRGQAPRAALLLPALRPGRPPRSRRGDQHRRQAPRRRRAGLDSRDPGSPGQTHIARRA

SEQ ID NO: 1727 - protein, 367 aa, Clostridiales sp.
MKITKGYKYRIYPNAVQTEQISRTLGCCRYVYNHFLAARSDAWKFRKESFSYVQSARRLTSLKSDPEHLWLASADSMALQESLRNLDRAFQNFFEKRGRYPRFKNKHNHHQSYRTRNQSNNIRIEGDRIVLPKLGAVKAKISRLPSGRILNATVSKTPTGKCFVSLCVEEELVTKPNAGGVTGIDVGLSEFYTDSNGSIVDNPRTLRKYERKLRREQRRLSRKQNGSANRAKQRIKVAVVHEKIYNVRTDFLHKESTRLVSENQVIAIESLNVKGMVRNHHLAKTISDVSWGRFFSMLEYKGFEYGCEIRRIDTFYPSSQTCSCCGFKNPIVKKLSVREWVCPQCGAHHDRDANAAMNILNRGLGSA

SEQ ID NO: 1728 - protein, 229 aa, unknown
  TnpB Polypeptide
MQIQKKCKLNEQPLPPTGQCVAVDVGIHHLLAMSANAVTENPRWYRKSQAKFRILQRRVSRRKMDGSNRRKAVLALQRQHAHIVNSRKDFLNKVAHPLIARYDFIALEDLQIKGMVRNRHRSKSVLDAGWRYLKQRLMDKAVEAGRQVILINPSYTSKTCSSCDVLFERLSLADRWIECSCGLSVDRDVNAALNTLARARSASINRVGHTRCGKSTDKSLRLLQEATPL

SEQ ID NO: 1729 - protein, 419 aa, Firmicutes sp.
MKGGEFNIMKSNRVEQQVISKQHPMWKIIDEMCFKSKNLYNYANYIIRQEFINNGKYIDYRTMNKNLKTEIDYKNCMSQPANCTLRLLDKNWKSFFVAIKDWTKHKDKYLGKPKLPKYLKKDGRYIWMIPNNTCFLKEDGTIHFAIRKLQSVTWKTNVKGRLIQIRFIPRGCNYIMEIVYEIEIPDQQDFESSHIASIDLGVNNFVTLTNNIGKQPIIINGKGIKSINQMYNKQKAKLQSELMKRNGKHWSNALDKLTFKRSMRIKNFIHHASKYIINWCIENQIDTLVCGLNKTWKQECSMNKVSTQKFIYIPYDLLIKQLEYKCQNVKIKFITHEESYTSGTSFLDGEIPCKENYDKSRRVKRGLFQASNTLINSDVNGSLQILRKVFPNAFSYGIEGNLTPLVINVTKISQSSMIY

SEQ ID NO: 1730 - protein, 425 aa, unknown
  TnpB Polypeptide
MATVTQAYRFALDPTPRQRRALASHCGAARVAYNWGLALAKARLDQRQADPSVPVPWTLFDLRREWNRAKDQAAPWWGENSKEAYNSGLDALARALKNWSDSRRGCRKGRSVGFPRFKKKGRSRDSCRFTTGAIKVLPDRKHVQLPRIGILKTHESTRKLARRLEQGTARILAATITRQADRWYVSFTVEVERAVAPSSGKTSVVGVDVGIRHLAVLSTGAPPIPNPRALEGSLRTLRRVGREFARRKPGSRRRYHTRCRLARIHGRAANLRLDAMHKLTTSLATEHGIVVVEQLNMAGMLRNRRLARALADAGLAELRRQLGYKTTWYGSRLVVADRFFPSSKTCSTCGWVKAKLALAERTFACEACGLQIDRDLNAACNLAKLAQHVAQSGWETRNARGADISPGVFGQTATKREAGIGISSR

SEQ ID NO: 1731 - protein, 405 aa, Rugamonas sp.
MLRLQAFKFELMPTGAQAFNMRRFAGACRFVYNKALALQKANHEAGQKYIGYVPMAKHLTAWRNGTETPWLKDAPVHPLQHSLKDLDRAYANFFAKRAEFPRFKKKGQGDSFRYPDPKQFKLDQANGRIFLPKLGWIRYRSSRDVSGVPKNVTVSQACGRWYFAIQTEREIEAPFPRTGNAVGIDMGVVRFATLSDGSYLAPLASFRHHEAALRRAQRAMSRKQKFSNNWKKAKVRVQRIHSRIANARRDYLHKATTTISQNHAMVCIEDLQVRNMTRSAAGSVERPGKNVRAKSGLNKTILDQGWSEFRRQLDYKLAWSGGYLIAVPPQNTSRTCPCCGCVDARNRPSQAVFACVACGVEEHADVVGAINVLRAGHARLACEVSGEVMPPAAGAHRSELSALAA

SEQ ID NO: 1732 - protein, 410 aa, unknown
  TnpB Polypeptide
MPVFGQDDEFTCRIDVDYRIVRGVRGSGGYHDELQLLDDQVATLVVDSSNQLYTHFLQLSSPTPRGEPIRVPLHFHSRALRRYKGDIPKVGSLAVEITGTHVVVRVVFQKPKVENTLPIGPVVTVGVDPGFRNTAAVSAWHVPALKSDPEIQEILKFDKQAARAFLEEFEVPAGLVERACDPLVFSAEGFRRGVNALCTRIDKLSSRIDVLYHEIETQAETLRSHLSLAEEEWVPRDQSYPTQALTKTHRVFFQNLDRVASWKFERRKLYRRIGEKKKHWFGYVGNRIVDLIQKLQAEGHEVVYTPEKYTGTAIPKDDPSYRGRTFNRMLSQGALCKGLDRVLAKMVWNGIPHQPVPSYYGSSVCTHCWQLDQSARVGDWFACRSCGVESPADVNAAILYALYFCDTASH

SEQ ID NO: 1733 - protein, 444 aa, Geitlerinema sp.
MGREGLNSQMTLRAFRYRFYPTPEQESLLRRTLGCVRLVYNKALAARSQAWKERQEKVGYRETSKMLTQWKQEEALQFLTEVSAVPLQQGLRHLDKGYSHFFTGRAKYPRFKKKRNGGSAEFTKAAFRWRDGSLYLAKSQEPLNIRWSRQLPKGAEPSTVTVRLEPSGRWHVSILLDDDTIKPLPQSEKSIGVDVGIAHLAITSDGEKVENPRHLTKHYRRLRRAQKALSRKMKGSRNREKARRKVAKIHEQIRDARSDYLHKLTTRLVRENQTIAVEDLSVKGMVRNPKLAKHISDCAWGEFVNQLDYKCQWYGRTLVKVDKWFPSSKLCSSCGHKMDSMALDVREWTCPKCGTVHDRDINAARNLLAVGHTVTACEASVRRSLRSSRSLHPRERRLEGSRSGEQLRKTRKGRKQEPKSRGFAVSVSRTVWESPSFQGGEDVN

SEQ ID NO: 1734 - protein, 269 aa, Lactobacillus sp.
MKIPKLGYVKTSKTGVLQNTKIKRYTVLLEPTGKYYLSLQVEIPEPEKYSLTGKRVGIDVGVADLAILSNGLKYPSFNSSYFEKKAKVWQRKYARRRHLAKLLVLQDRNKKVLCPRSLESFTNWQKAQKSKAKYQAKAANQRRDYLHKLTTHLVKQYDVIAIEDLKTKNLQKNHHLAKSIANASWRMFRQMLEYKCEWYGKKLIAVDPKNTSRICSKCGYNSGAKPLEIREWTCSKCQTKHDRDINAAVNILHKGSTKLNGQGLAMVTS

SEQ ID NO: 1735 - protein, 357 aa, unknown
  TnpB Polypeptide
MKAQVKRFKRFKRVDLAFQAFFRHAGAGEEPGYPRFKTFNRFSGWGYKTHGDGWTLMPGEKGRHGKLRLSGVGNIRMRGGMRDEGTPKTCEILHRHGRWYVSVTINCKPVRQRGYGAIGFDWGIQHVLTVEHDDGECEEIGNPRWLRNNEAKLKDLYRSREIKIKGSRDWRFVNRQIAKLHGKIARQRKDWHHKLSARLVGRTGAIFTEKLKIKNMSKRPKPKPGEKPDEWLPNGASAKSGLNKSILDGAPAQFLSLVRYKAANAGITMGEAPTQKLKPSQRCRQCGKVEPKRLEQRWHLCACGSRTSRDRNSAGVCLDWGMEHFLVLWLAYLNTLGSGTVPEDFGSQNLHLESLAI

SEQ ID NO: 1736 - protein, 417 aa, unknown
  TnpB Polypeptide
VEESATYFKAFKFKLEPTPDQAVLLSKHFGCARFVYNHFLNEKQRHYKDNGTTMNFNNTCISLTNLKKQEELSWLSEVNSQCLQASLKNLENAYQKFFKKQAKFPRFKSKKLNTNSFHCPQNVEVKNNLVFLPKFKDGIKFLKHREIKGNIRSATISQVPSGKIYVSILCELPLEKPLTKTGKQVGVDLGLKDFTITSDGKRFKNPRFLKQFLKELKIQQKHFSRKKKDSNRKERQRLKVARLHEKITNSRSNMQHQISSFLIKNYDLIALESLNVKGMMANHKLAQSISDVAWSGFVSKLEYKAKWYGKEVIRIETFFPSSKTCSCCGHQKSNLTLKEREWTCSKCNTIHDRDVNAANNILQRGITIQSSGTDDYRHGAKIRPKKSVKTLKGISVEVSKKKGRKYYLEAERSSVVR

SEQ ID NO: 1737 - protein, 506 aa, Caldimicrobium sp.
MYVSLQFKLQLGPDNKKKLLELMRKQSSAIRSAYNMLKAKTPQTEIYKNLRQLYKDLPTRYIDSAIYKAKQYPTDKKVIFGGKILFEKLCKNRDKKSKARQKLKREWRERRQGNLISIGSRADKGNRLARFERINDELFLRITTGNREFIYAKVLREPSNEKDKWNTFLAMLFESWESKNYFPYTVELKLRGGEIYGSVSFEYPEPEIWLTKEYGVIGIDTNASPLHLAIAEVSTDGNLIGYQSISLHELIGLLKNKKEYQEWLIAHKVVEIAKEKGKAVAIEDLKKVKKGYRGDGKAKLRKRLHSWNFKSLLSKIERLARLNGIEVIKVNPAFTSVIGSLKYAPQLGIDKDIAGAFVIGRRALGFKEEIPENYLKLLSDKEYLEYALYCYEEKERELKEKLKEETNQYKQNAIKSELRKLQKEKSLLSERLQSLQDEPSWGKEANGRNSNSHYKAWQVLRVAILFPVLGRSFARDLSPLKQILVQGKWDWVRKRSVPLEVGGTSQ

SEQ ID NO: 1738 - protein, 369 aa, unknown
  TnpB Polypeptide
MTVTAKVQAYPTAEQSQLLTEAAKAYSTACNYVADVVFVTHNLNQAKLQKETYSTIRSQYGLPSQMACNVVRQVIGNYKTIRTNQGEWIKPKYRHSNYMLSWNRDYSLTQQCFSVNTLQGRIKLPYASQGMSQYFDGTWQFGAAKVVSKHGKWFLHIGMSKDFPQLAEADVANVVGVDLGINFLATTYDSKGKTKFYNGKHIKHKRARYKQLRKELQQRQTPSARRRLKAIGSRENRWMQCINHTVSKALVESQPAKTLFVIEDLTGIRSATERVRRKDRYVQVSWAFYDLRQKIEYKALMRHSKTVAVEPKHTSQTCPKCGHTAKANRSKCKHIFICKNCCYQSNDDRVAAMNLHRKGIEYLSAVTAE

SEQ ID NO: 1739 - protein, 230 aa, Lactobacillus sp.
VANIQKAPLLVNGRAIKSVNQYYNKERSRLKALQARYHQLESIVDTQQGKKPVYRETKAMRRITAWRNRKIRQFAHKASKRIVDYALSCGANTIVIGNNKSWKRSSDMGRKNNQNFIGIPHKVMIDMIQYKANLAGISVIRTNESYTSQTSALDHEKPCWENGNQSRKRQGKTPINRRIHRGLFQSNNGRLVNADINGALQIIRKVFPKFSLDEGIADAVLHPVKWSPLI

SEQ ID NO: 1740 - protein, 366 aa, unknown
  TnpB Polypeptide
MTILNPDRHWIQIKKASYNTVATITQQLQSTRADHLTCGPRGIATWRLSSSAEIEVLNDEQLTIDGQTVHAEVNHLPAHVYRALVQASPAFTQYQDIDHLYQQIRNGKQKWDTAQFTRSLEEIAQEGRRPDQVPHLVSTPRTYSATWHPEEVLLRVNKAGDWFAALTFTASFQRLSRSITPVTVGLDLGLNPLTVAYTSLGESHTFSPTDLSHLDQVAGSRLSPAAQKILQHLTYASGREDAEKIIGWLNHHASRVFAERLSHRAMNANFIQQARNLAIHDHHFSALSQYLYTSRIPFRRVASYSTSQLCACCFEKEGLEVRGELGFTTFTCPRCKTVRCRHENAAHNVMLRGLNLPPRCKKSQAG

SEQ ID NO: 1741 - protein, 467 aa, Halococcus sp.
  misc_feature (83)..(83): Xaa can be any naturally occurring amino acid
MSVMGGHCSSEADQHVRGSSDVRRGRGATSPRDGCDRFAVERTHLRAPSTVLRWRNRVGDRGLPQAVYRCSRFCIGSTSHPQXDYRKRYIGVLGSASAQQAIRKNDQAWNGFFDSDESDKGLPGYWGNEDEGRELRWYGRNDSYTIRWGERSRLEIPIGKDLKDEYDLTGRLRLEVRGDPRWDGEQGQLEIQYDEQRDQFRAYQPVEVDDSHPRLGTPLADESAALDIGANNLVACTTTTGKQYLYAGRDQFERFRATTQEIARLQSKLPEGRYTSKRIRRLYRQRTERRDHMQDALVRDLMERLHDEGVSKVYVGALKGILDTHWSVEVNAKTHNFWAFRAFIDRLETTAEEFGIEVAERSEAWTSQECPRCGSTDRTTRERDTLTCLCGFEGHVDLIASKTFLQRQTTVARPMARPVRYEWNDHEWSGISHPHESSKVVRTNPQVASVGEGANARRDPTGGIPRL

SEQ ID NO: 1742 - protein, 413 aa, Halococcus sp.
MNEVTKTLELKLVSPNAHKRRKLRETTDAYRAALHAAFDAGCSTQSAANDVVVEYDLSGYAKNALKQYVPQLCGGSYDADELHDEHPVRFTNEGVQLDHKPQNAVEWYVKVPHHDDYHLWVPTQPNPEQRPWVEAVFAEDADMGECRLFDRNGEWYLHMVATREVEQRSPDSVSDKTPIGVDIGDSALLTVCHRDERGAPTAPTLWNDEGKDVRRLRKTYFTATRRLQERGSNCITESFGDQLWRQIDHILHAVTDAVVEHAASVENPVLMLENLTYIRESMDYGSYMNRRLHGWGFAKMHAQLCYKAAERGIPVETVNPAHTSKTCHVCGEAGYRPEQAEFRCTNEECWVTSYQADVNAALNIADRYSSGESRSREHTDGNDSAGDGARLTAPQDSQADGEAHQQTLGTYAS

SEQ ID NO: 1743 - protein, 426 aa, Halococcus sp.
MTTRTIRTFEATIPNQQQVRDDLDELGWAASKLWNVGRYYAQGVWDDTGEIPDDGELKRELKGHERYTDLHSQSSQRVLEELAEAFNGWFTKRRNGDSRARPPGYRKRGDSHPRSTVSFKAAGFKHDAQYQRVRLSKGRNLKEHRSDFVLCEYETRPDMDLSEWDIQQVRAVHKRGEWRLQFVCRTTIDPDSPGDRTAGVDLGISNIAAVSFGDETMLFPGGWLKESKHYYKQVEYECEGENGISRRARNAKRTLKDRRRHFHHVLSKRIVAECVERNVGQLVVGDLGGIRSEDDGSGRDWGRHGNKMLHGWGFGLLTTMLEYKGEAAGIEVAVDSERNTSKTCSVCGHKNDSQRVERGLYHCQQCGRTANADANGAENIRQTLLPNPDAFDRLDRDNGCLAQPAVCSFDATDGRFHPQERAHCEP

SEQ ID NO: 1744 - protein, 289 aa, unknown
  TnpB Polypeptide
VLEKAYKYRIYPNKKQQELIQKTFGCARFVYNYYLNKRKEMYENDKTTFTYNMCSKDLTQLKKELEWLKEPDKDSLQKALKDLDMAYKKFFKEHTGYPKFKSKKNRYKSYRTSCSNNNIRFENKRIKLPKLGLVKTRDKQVPQGRILNATISQEPNGHYYCSLCCTDVEHEQLPNTNQNIGIDLGLVDFAIMSDGTKIENPRFYEKSEQKLVKLQRELSRKTIGSNRWNKARIKVANLQKHISNQRKDFLQKLTTDIVKTYDVISVEDLDVKSMKETDSTIRNKRVGDV

SEQ ID NO: 1745 - protein, 271 aa, unknown
  TnpB Polypeptide
MVKTVTVSMTPSGRYFASVLFDTAIQEIPVTPIQGDTAMGIDLGIKSLVVCSDGRTFDNPKNLQKSLDRLKLLQKRLSCKQKGSANRNKARSRVDRLQEHIANSRKDNLHKITHALTHDSQVRPICMENLNVKGMQRNHHLAQAVGDASFGTFLILLEYKCRWYGVNLIKIDRFAPSSKTCGKCGYVYKGLKLSERSWTCPECGTHHDRDFNAACNIKEFGLKALPTERGKVKPVDCPTVDERPRVLKSRGSKKQEKRGGIGISEAAKSLV

SEQ ID NO: 1746 - protein, 408 aa, unknown
  TnpB Polypeptide
MYLVEQHIISVNDKRYKDLDRICFLSKNLYNAALYTIKQEFLCTGKWIRAGELNKKMVAENNIDYRAMSGSSSQQVLMALDKNLKSYFSAIKSWKRDNKKFTGCPKFPRYKHKTKGRNVFSYSYAQFKHKGNFIFFPKKEGLPPLKTNCKEGSVKQVRFIPKADCYSIEVVYESSVKEQLPDNNRIMSIDLGVNNLASIVTNTNNKPVLIDGRKLKSINQYYNKKRSKIQQQLKKVNGKENSRRLMSLTRKRNNKVKDYLHKASKEIINTCLEDNITTLIVGHNDGWKQESNLGKRNNQNFVSIPFDMFISMLRYKSERQGLRFVEVNESHTSKCSSFDLESVEHHDTYVGKRIKRGLFRTKDGILLNADINGSYNIMRKVKGDAVMPPYTGFGYNPVKKFINKYVYR

SEQ ID NO: 1747 - protein, 417 aa, Streptomyces sp.
MLTGRKYRLALDAEQTEMCEEFGNICRAVWNTGLDQRRQYRRRGAWMNYVPQVAELADAKKEHPWLRAAPSHVLQQTLKDLDKACRDHGAFRVRWRSKARWSPSFRFPAGNLITVERLGRKWGRAKLPKLGWVTFRWSRPLGGEVRSATVSRRSGHWYLSFLVSTQETTPEQHAMPNTAVGMDRGVAVAATTSDGDFHDRQFVTEGEKTRYRRLQQQLARTKKGSANRRKVLARMNRIMGRVSDRRADFCAHLANRLTARNAVVVLEDLKTKNMTASASGTRQKPGKQVSQKRGLNRAILDKGWHRLELALANAARYTGTELVKVHPAYTSQRCSACGFATGENRESQSAFVCKAVGCGYRQNADVNAARNILKAAGAAVSACGDFGATRSVKQELPGPREAVPVRPAIPLVGIPRP

SEQ ID NO: 1748 - protein, 375 aa, unknown
  TnpB Polypeptide
MRKIQEGDHMANRAIIYRLYPTASQKLLLTKTFGCCRFVYNRLLSVQQERYKNGEKHLSRTHANNFCNRQLKPAYPFLREVDKFALTNAIYHLEDGYQRFFKHLGNFPKYKSKRKAAKAYTTNSTNGNIKIGEQYIKLPKLGYVKIRQSMEVGKINNVTIEHTTTGRYFAVLNVEFKPQPRPNNGGRIGIDVGIKEFYSDSNGNVVSNPKFLEQSMRKLIREQRRLSRKQKGSNNRNKQRVKVALVHEKITNQRNDFLQKQSTMLICENQTICIEDLKVKNMIRNHNLAQHIGSAAWSKFFAMLTYKSVWYGNDVIKVPTMYPSSQTCSCCGYKNPLVKNLTIRVWECPDCHTVHNRDTNASINILNQGLQMQSA

SEQ ID NO: 1749 - protein, 367 aa, unknown
  TnpB Polypeptide
MSFLNYTYRLYPTKKECIKINQIITLYKKICDRCFKYGILYFEKYKDYPSFKILYDLCNMKCSKEYDVIVKNYEIIKAAIYDVLKIYDSLKKGKTNDKHQEWQNREYFTFIAPCYEEILKFEKNRLIYSNVLVSKVKIHRNINGVINKMTIIKQGDKYYLIVLVRKNDIKPSETIKKIIGLDVGVHHFLTMSNGNIIDKDLEYKKDELRLKRLRRVMSKKIKGGSNWKKIVNKIGKLERKIRKRREDFLHKISKKLIEKYDLICTENLKVEKFIRRGKSYGKIWSDISFYKLTKMFEYKAKLYGKKYIKVSQFFPSSQLCSNCGFRNFELKNLSIRNWKCPVCLKEHDRDINAAKNIANQGLKILKV

SEQ ID NO: 1750 - protein, 357 aa, unknown
  TnpB Polypeptide
LELKINTYKETGKNLSQFDLNNFLVRLKQEHKSLKKVHSQALQNINQRISFAFNNFYNRLQKGEKPGFPRFKGRNRYDSITYPQSGFSLGKKLDVSKIGEMSIVQHRAIEGQIKTLTIKQTPTRKWFATFCVEPDKKEIVRNDLVIAGIDMGLNHFYADSFGNIADNPRCLRKLEQKLASVQKEHSRKKKGSKNGSKSRLEVALVHEKIANQREDFLHKESRKLAVLYSVIAVEKLSIKNMLQNRYLSKSIADAAWGKFLQMLAYKVEETGGKILEVNAKGTSQYCICGNEVKKTLAVRIHECNKCGIYIDRDIMSAMMIKKIAISGTTAGSAGSNAWEDEKQFSPMNQESLASNAI

SEQ ID NO: 1751 - protein, 372 aa, unknown
  TnpB Polypeptide
MANKAYKFRIYPNAEQAVLFAKTFGCVRLVYNHWLDRKIKQYEADKASVTYTTCAKEMAQLKKTSEFSFLQEVDSVSLQQSLRHLDTAFQNFFRQPKTGFPRFKSKKKNKNSYSTVCINGNIDIENGCIKLPKIGFVKLKQHRIIPADYTLKAVTISQTPSGKYYASVLFEYENQAQEKDLQSFLGLDFSMHELYIDSNGNGSEYPRYYRQAEKKLAKEQRKLSLMQKGSNNRNKQRIKVAKLHEKVANQRKDFLHKQSRQITNAYDCVCIEDLDMKAMSQSLNFGKSVSDNGWGMFTSFLKYKLEEQGKKLVKIDKFFASSQICSVCGYKNEETKKLFVRAWDCPQCATHHNRDVNAAINIRNEGMRLVTA

SEQ ID NO: 1752 - protein, 574 aa, unknown
  TnpB Polypeptide
VRLPDEAQADALRLLDASRTVVNQALTILWPHLDEFGSEHAGPAWKQVGKFIGSPLPHGDRQWRCESEVVGRLLRQQAERKKAFELVVPILTDGFIRPKTEKRPAGKNRPAIKEAISALQKSLDEDETSFVALQNVVEQCCNYYFQQDRFPASYEELQPVPLLKAGMLTYAGDDGREKGQAYRLALDLATGVARFRFRYPDEAGTWHWRKVDTSIPLPECLKERLPHGELMAPTLREERRADGERFAVLDFIIEVKKAELPAWENVERVLGADWGVHTLLTATAVDEHSEQVGRPFFLNTGGFDGRQARTRRQIDELKKKVAKYEQERETLPENHSKRAWYTKRLALYRREIDLCWRKYEQRNRALAHLASNALLLLSQVHGCSLLAMESLKTLKSTGRGKGVRGRWRNYCNNSTIRGEIWRLLRYKCHLIGLRFHTEQPRGTSHTCPHCGKAAKTYRSPSDRTQAVKWGRWMYCEACPYHGDRDYCASVNIARLGVAYLVQMKHTSKARSCSISDPRVKPVSYTGAGSVLLLPPTGLHARPSPSGKISYYPGWFASAFLQSSQPKAVFLRLCG

SEQ ID NO: 1753 - protein, 402 aa, Escherichia sp.
VKRLQAFKFQLRPGGQQECEMRRFAGACRFVFNRALARQNENHEAGNKYIPYGKMASWLVEWKNATETQWFNDSPSQPLQQSLKDLERAYKNFFRKRAAFPRFKKRGQNDAFRYPQGVKLDQENSRIFLPKLGWMRYRNSRQVTGVVKNVTVSQSCGKWYISIQTESEVSTPVHPSASMVGLDAGVAKLATLSDGTVFEPVNSFQKNQKTLARLQRQLSRKVKFSNNWQKQKRKIQRLHSRIANIRRDYLHKVTTTVSKNHAMIVIEDLKVSNMSKSAAGTVSQPGRNVRAKSGLNRSILDQGWYEMRRQLEYKQLWSGGQVLAVPPAYTSQRCACCGHTAKENRLSQSKFRCQVCGYTANADVNGARNILAAGHAVLACGEMVQSGRSLKQEPTEMIQATA

SEQ ID NO: 1754 - protein, 382 aa, unknown
  TnpB Polypeptide
MARRDNKAIRATVSMKIAVSEPLLALVNNYVKALRFTLFLLKENVPNPNEKGVLSKVHEELYTRLKGEYNLPSKVAEDCYRDALSIYKGWYNNPRRGRFPRVYKPTVWLTPKASYNVDFEAMTVGIASVGELPILGYPRNLKDYLSWRMREARLVIKDGKAFLKVVFEKEEENVELKESIAVDINIAEVVVGKDDKHYVRIPTRLEEVHHWKSLAENLQKKYPRRWRGNKRILHRIYSFHQKARRVMEDFARKVGKWVVDVAKRMGVNVIKLERLKNLIKNVDKLPKEFHDKFYLMQYHRLQYWISWQARKHGIIIEIVNPSYSSVSCPKCGQKMREVSHRWFKCSCGYENDRDVIAIMNLNGRGSLTLSTAPQMRDVNPNQ

SEQ ID NO: 1755 - protein, 402 aa, Persephonella sp.
IPANSRKISITSNKKKLPHRPVIYDKTGFKIEGNTIRLSISKELKQHLKEKHNIDIDYLRIKTGLDLSQLNILNIQITPYKAYGNITYRLNIVYEEQIEEIKIKTDIALAIDYGVSNFATVVIEKQPISYIVDGKGIQSILRKYLKKLAKWQKKRDNLLNKGLSTNRVDKILHRIQKRINNLIRDYAHKVSNLIVGLAKKYNVSTIVIGKLQDSKNKGSKLSSIIDQMLSLLPHGRVSKQIEYKASEYGIKVVLVDESYTCSRSFAQFKELSGVDSLKDVAVSKENYTPEARKHRGLFKSVKGFINADVNGARNILKKFKKSFHDNITGLKQTIRIRVFGKVKSSPKSVRVYGQIGVARCEVCFKSKMLNKDLKHTSGDHLSGIRLHQSSNLPEKPPTLVGV

SEQ ID NO: 1756 - protein, 517 aa, unknown
  TnpB Polypeptide
MFVSLQFKLELKREDKEKLIKLMRMQSSAIRVAYNMLKDLEKGKAKNPNAQIYHRLRQLFPEIPTKYIDSAIYKAKQYPRDKIVVFGGKRLFEKLCKNHLIGKVREGLKKQWKELRQGTLVSIGSKADKGNRLMRFEDLNGQLHLRITTGNREYIYAKVLREPSNSKDKWITFMAMFSESWQTQNYFAYTVELKLRNGEVYGSVSFEIPKPKVKYTKENGVIAIDTNASPIHLAIAEVSKTGELLSYQTISLHHLLGLSQNSKDHQEWMLAHQLLDLAVQKNKAIAIEKLKKLKIGMRGDGKATLRKRLHQWNAKKFLQKLKRVAMSKGVEIVEINPAYTSVIGMLKYAPQLSIDKDIAGAYVIGRRALGFKEDMPENYEKLLKDKAYLEFALKRYEKREEELRELIEKESNEYKRNALKSELRNVQNAKKLIVNLIQSLQSEPSGCEGANGRNSEQGETKKVSQSAWQVLKVALLFPILGKVLPRDLSPLKPVLVEGAWDRVRKGLVPLEAGGTPR

SEQ ID NO: 1757 - protein, 423 aa, unknown
  TnpB Polypeptide
MIRTQIVPCKLNKEICDSLNLASGRIYSGIVSRHWRLLKQKGLWLKESTLTRLSDIRPSVQAHAMHAHSIDAAQQGFFKACTTTRALRKAGIEANFPWRSKKFRTTIWKNTAIKLVNGVVRLSNGQGNQRIEIALPNNLSNILKVLEVRLVFDKKSRKYNWHLVVENGQQSKAAPGNNTVSVDLGEIHPAVIGDEHSATIITCRERRHEQQGHAKRLAKLSADLSKKKKGSRRYKKLVRAKSRMKAKHDRVAHDMEHKVSRSIVDEALARGASTIVLGDIKDIADGVDLGKKTNQKISSWNHGQIRKFVEYKAQAEGIAVVLQDERYTSQTCPACGNRHKPKGRNYRCPSCGFQSHRDVVGQVNILSAYKFGEPGKIPAPTIIKHRIPYNIRVMRRRPDTGQVVIPPVAQTNWLAAKQLSLFV

SEQ ID NO: 1758 - protein, 434 aa, unknown
  TnpB Polypeptide
LDQAAKNKKIKAALKKTRAKRKNQVCRSYELKIDSSHVNAETQRHLVRLFLEAKWFYNNLIAQGKANRDGLWNADYKVPKVMVKRKGVFEERDLLHLSSQMKQEIIGRAKDNIVGLSKLKKKGRRVGSLKFTGRVRSIPLNQYGITYWINGSKIHLQKLKQPLRVRGLRQIPKDAEYANATLIQRNGDYYVHVTTYQLKKAETFKQKSVGTDFGIRKQLVLSNGVEIEESVPITEKVRRSHREFSRKKDGKNRVKAQENLSRAYDALTRQRRDIRNKIAGKLTETFEIVCVQNDNVSGWQRLWGRRVLATGVGGLMSALNKAHTPAPVDRFYPSTKTCSRCGHVQNVDLNEKTFRCEECGLVIDRNLNAAINNEREGLRRIGVPVVRREFTPVDTKTAAELVRYFNSIPRVRASLVEEAGSRASARKPTTSVVR

SEQ ID NO: 1759 - protein, 418 aa, Okeania sp.
MPYAFEFKIKAKKNQYAAIDEAIRTGQFIRNKCIRLWMDERGTGKAKLYRYCRLLAKEFAFANKLNSQARQAMAERAWSSISRFYDNCHKKISGKKGYPKFKKHSRSIEYKNTGWKLSEDRKYITFTDKLDIGKLKLKGTWDLHFYQLEQIKRVRLIKRADGYYCQLLIQADINVETTPTQKTTGIDLGLNYFIADSSGNVVESPKYYRKSSKKLSRLNRRKSRKYRNPGKGKKGAKMVKVPKQRQSNNYHKARVRYARKHLKVSRQREEFVKRVANCVIQSNDLVAYEDLNVKGMVKNRHLAKSISDAGWSTFRRWLEHFGRKYGKVTVAVPPHNTSQNCSSCGQTVKKSLSTRTHICDHCGFVEDRDVNAALNILQKGLSTVGHTESNAWGDTPSSCVGEILHDYGESLNQESLSL

SEQ ID NO: 1760 - protein, 216 aa, unknown
  TnpB Polypeptide
VIHPNSFKKHQQRLARYQRRMSRKVKFSNNWKKEKTRVQKVHACIANTRKDFLHKTTTTISQNHALVCIEDLQVRNMSRSSKGNSEQHGKRVSQKSGLNRAMLDQGWGEFRRQLEYKMAWNGGILLAVPAHHTSQTCPCCGHIAKENRLKQAEFLCVDCGYAENADVVGAINVLERGQRWLACAEDGSGRGRKTTTKPASAKQEPTEATMQEVCHA

SEQ ID NO: 1761 - protein, 346 aa, Lachnospiraceae sp.
MAQQILKEVDGSFKSFFGLIKLAKQGKYAFKDCKLPHYLPKDGYTTLVIGFVRFNGNKLILPFSNGFKKTHKAVEITIPPILLDKKVKEIRIIPKAKARFFEIQYIYEAECSQRNLNTNNALALDLGVNNLVTAVSSTGKTFIIDGRRLKSINQWFNKENARLQSIKDKQHFGKRTTNRQKAIARDRNNKVNDYMNKTAHRIINYCVSNDIGTLVAGYNVTFQTNTYMGKQNNQNFVNIPYGQLRSKLEYLCELNGIIFVKQEESYTSKASFWDKDDIPVYNADNPKEYQFSGSRIHRGLYKTASGKTLNADVNGALNIMRKSNVVDLGILYARGEVDTPVRIRIA

SEQ ID NO: 1762 - protein, 418 aa, unknown
  TnpB Polypeptide
MLLSKKTSIKVSREYANLIGHMCYAASKLWNVCNYERQHYKETGMEQYPDWYYQKKAHKEDLWYKQLPSQTAQEVCRLLDKAWKSFYALKRSGGIETPRPPRFKQESIPITYMQMGIVHEQDTDRVRLSLPKTLKKYMEETYQIHENFLYLENKIFRGMDQIKQLRIYPPEKGSCKIIVVYEVPDQEELPQNGHELSIDLGLHNLMTCYDSENGKTFILGRKYLALERYFHKEIARVQAQWYGQQSGKGVKHPVTSKHIRKLYKRKQDSVTDYLHKVTRYLAEYCREQGITCVVAGDIRNIRREKDLGHRTNQKFHSLPYNRIYIMLEYKLKRYGIRFVKQEESYTSQCSPLSPEVGKRYAEPSKRKERGLYRDGNRTYNADAVGAYNILRKYHSVSGVKKELSVTGLKTPEIIKVAV

SEQ ID NO: 1763 - protein, 485 aa, unknown
  TnpB Polypeptide
VGTRFRREPSPNCGSFSARSKAVSKPQPKLWSASAKRRPEPLARNLNPVLRSQKRGRTMRPFTRHCPDNADQRFGERKPRSLVRGRGKMQLTFRYRIKDKHARRLNEQARAVNFVWNYCNEVQRLALKRNLKWPTGYDLWKLAAGCTKAGLDLHSHSAMRVCLQYEKSRRQHRRPWLRWRSKRSLGWIPFNTGHVQFRDSSFVFRGERYDVFLHRPLPESAKIGAGSFSQDTRGRWYINCPVEVAEATQAPLKRVGLDLGVKDLATLSTGEKIEMPSFYRKSEEKLAKSQCARKTKRVCAIHAKVANRRKDFLHKASNKLARKYGLVVVGDVSPSKLAQTDMAKSVLDAGWSRFKDMLSWKLRLRSGGMLLEVSERFTTQICSECGCVPPSRPKGIADLGIREWTCSVCGTRHDRDVNAARNILRVGLHTLVEGAHPSCLKFGSHRLQAGEQSLGGGAVSAQTVAGPQHLRVGFAYMIPAWSSRG

SEQ ID NO: 1764 - protein, 75 aa, Okeania sp.
ELVRQLEYKAKWYGRELIKIDRYFPSSKCCSNCGYVVEKLPLNIREWDCPECAAHHDRDINASVNILRMGTRGMR

SEQ ID NO: 1765 - protein, 469 aa, unknown
  TnpB Polypeptide
MKDIFFKNLIFKERGKIRKELFDMRIFSTYSAKIKNYNHIFKKTVSVYREAVDFMIQVCLQKWEDIRKEDYLCSPVIYVERLCHRTKRNPEVSYESFDRKFYKLPSYLRRSAINKAIGKVSSYKSNLKNWEEEDPNTRGRRPSFPRAGYICPCMYRKNMYQRTGAYEARIKVYIRNTWDWLDIKLRKSDMDYIDRRCSGRRKCAPVLQKRGKEWHLDFPFEEFLELCDVDVADRIICAVDLGINSAATISVMCSDGTILGRHFLKLPKEQDCLTHSINRIKKAQQHGNRKMPRLWAKVNGINHEISVKTAKFIMDIAVLYNADVIVFEYLEKKGKKRGSRKQRLHLWKSQEVQRVVTDKAHRLGMHIARICAWNTSRLAYDGSGRVLRGKQAGFSSYSVCQFQNGKVYNCDLSASYNIGARYFIREILKSLPEKERLLMEAKVPPCSKRSTCTWSTLISLNAELMSFVS

SEQ ID NO: 1766 - protein, 379 aa, unknown
  TnpB Polypeptide
MEQITITAKIQIVATETDKVLLDETMSVYRNACNYVSDYVFHTHDLKQFSLNKVLYSTLREKFGLKSQMAQSVLKTVIARYKTILENQNEWIKPSFKKPQYDLVWNRDYSLTQNRFSINTLNGRVKLSYFADGMSKYFDHTIYKFGTAKLVNKHGKYYLHIPVTYDVEESNISDICNVVGIDRGINFVVATYDSKHKSGFVSGKAIKQKRANYSKLRKELQMRRTASSRRRIKAIGGRENRWMRDINHQVSKALVKNNPKHTLFVLEDLSGIRNAAERVKTKDRYVSVSWSFYDLEQKLIYKAKQNQSSVIKVDPRYTSQCCPCCGHVEKSNRNKKIHLFTCKNCGYKSNDDRIGAMNLYRMGIDHLADSQVPDTVVTE

SEQ ID NO: 1767 - protein, 301 aa, unknown
  TnpB Polypeptide
MYALKRELNLNQVETSLMRGCAGFKRFVYNYCVDLLVASWRFEWIKAGDSKRIDAIKKVFTQVTMHKPEHAWMKNYPSTVYQSAFMDAKDALARWPKGLGGFPKKKSKKKGDSFTIYKTSGVYPEKGKPALAFTNRVLINPGKQIKLPGLKQFRLKERINFICSSQTFTVSRTADKWFVSFILDAQKIPPVVHQYQKMRVDLGVKCLSYCSDGSVYQMPVTTSKAKTKLSKIQWRNRNKVLGNKKLGVKTSNNARKFYADLAKLSASISNLRRDTIHKMTTDLSRKAYVIRIEALNVSGMI

SEQ ID NO: 1768 - protein, 363 aa, unknown
  TnpB Polypeptide
MKRRMKLIAQIKVEPEDAQELLLIMVRFNNACNYLSEIAFNEKLFHWLPLQRRAYHEIRQVFDITAAETTIAIRKVAYAYRDRARRNRKAVFRVSGSIPLFKHLYREEAVQFYSFTAPIIVRDGVILPKHPKEGILLYRNGKFMIHQAVEIEAPQLYEARNYLGCDLGVKNILVDSDGKIYPSDHLNGLRKRHLRLRAKLQSKGTRSARKLLNKRRNKESAFARDVNHQISKSVVEKALTATFGIALEDLKGIREHVRVRKADRRQHNAWGFNQLRQFVTYKAELKGVPLVLVDPKNTSRTCPECGHVDKKNRKSQSDFLCIKCGFGQHADIVAARNIASRAAGNQPDAPSQGDVQIPLDITA

SEQ ID NO: 1769 - protein, 602 aa, Paracoccus sp.
MKRCDHLPLLDANPGKIRALLAIMKAFRDCAPAVAVQQWRLFFETGRFNKYTPAAADKAAPALMAAKAVLGAQRLQMLRFQVVGQLDGFMGNRANEFKDTVLGSSLDETTRHQLLTINCAGAWFSREPVSMMSGPLQGQVIPDEIRKLARTIMRAVLARHRRPRFSRMNPNIDARQASVETAQSARHGDLWISVATLAPLDGPTARWLSVQDEARATRQGREPEAFRAGSHRMIHLPVRSHGRFESRGGDLAKTVQLIERPASPRAVKLGRWTHRLADGRPGELVIGLVSDMKAAFRESRKAYAPRCEEICVDFGLRTMLATDRGDLLGRDWMDRLMWHDARISGLAARLQAQGIRPNRSPRYRAMVESLRGFIETSVGRALNRLVEIRAPAHLVLERLDFRGADLSRRMNRLLANCGRSVLRAKLKDLKERFGITSVEVNPAYSSQTCSCCGYVSRTNRKAQDKFVCGACGRTIHADINGSRNLGGGRSAFDRTARMTKAESLQATVIRHLERLGAAREGVVLDPALWPPRTRDRVIPERSVYVSNRYFGEALGSVIPDWGKRPEKQAPRARRLKSRDDPSGPEKVTAPPAQDLVADVSTG

SEQ ID NO: 1770 - protein, 363 aa, unknown
  TnpB Polypeptide
MLGYLHYASIAKHLSPWRNDASTPWLKEAPFHAQQQALKDLDRAYSNFFKGLSDFPKPKRKGVHESFRFPGSKQIEFDQDNSRIRLPKLGWIRYRNSRKVLGELRNVTISQSAGKWFMSIQTQREVSQPTLTATTAIGVDVGVANFAALSSGIFIEPLASFKKYEKGLAKYQRRMSYKVKFSNNWKKEKARVNQIHSDIANARKDFLHKTTTTICKNHALVCIEDLQIRNMSKSSKGTIENPGKNVKAKSGLNKAILDQGWGEFRRQLEYKMAWSGGMLIAVPPQYTSQTCPNFQCGHIAKENRKTQSHFKCVSCGYENHADTVGAINILERGQRLLVCGDPMPLDRSVKQEPTETTFDALAA

SEQ ID NO: 1771 - protein, 432 aa, Streptomyces sp.
MARFRMYPTSEQVSIMLDHCAHARYVWNLAVEQHSHWSKGRRAAPGFAEQCRQLTEARRENEWLRAGNADVQQQALKDFAKAKNARFTSGFGEPTWRRKYVHEGFRVIGTDRVAEFETDGSPKLNAKGKQVMGRFVVVQKLNRRWAQVKVPGCGWVRFRLSRKGKGACLPAAKTFRVTFRNGQWHIAFAVLPEPIDVPGAGEVIGIDRGVKITAALSDGRKLNCPQLTVRERAQIRKHQRRAARAPKGSEAKTAEYAKVARLKAREADRRKDWCEKTSTMLARAYGLVRFEKLNIKNMTCSAKGTVEQPGKRVRQKAGLNRVILAQSWGLLRQRTEDKAPGRVEDVPAPFTSLRCSACGWIEKKSRKSQADFVCVSCGFTCNADENAANNVAAGQGGFPRPRRSAGAGGVTAATGRSSAREPQPTWVGIPLF

SEQ ID NO: 1772 - protein, 460 aa, unknown
  TnpB Polypeptide
LRRYEPACSRCCGDRWGCFHCEIRHCYRTTLVFDWTRGVLFGRLGLNQPRPETSMLMAHKIALDPNDKQATYFAKAAGVARFAYNWALAEWKRQYEVWRADNSLPKPSEAALRRQLNAIKRQAFPWMLEVTKCAPQMAIIQLGEAFKNFFAGRTRYPQFRKKGVNDRFTLTNDQVSVQGSRIRIPNLGWVRVRESLRFNGKIMSATVSRVADRWFVSITVDTDDPPKRPAENQGAVGVDLGISALASLSMGEKIAGAKPHTALIRRLRQLSRSLSRKKKGSANRAKARAMLARLHARIANIRLDALHKLTSDLTRRFHTLTIEDLNVRGMVKNRHLARSIADMGFGEFRRQLEYKAAIRGGLVIVADRFYASSKTCSACGHVLESLPLSVRQWICPDCGASHDRDQNAAKNLLALGLAALSGPTASSVGCEACGEEGAGLGRKAQVKPASMKQEVSFVPV

SEQ ID NO: 1773 - protein, 405 aa, unknown
  TnpB Polypeptide
MPGYVVRTYKVPVPEELYPLCAELNKTAARIYNKTMSLVKKIKRKKGIWLSSNNAQKYILRWACGINVHTHSKQAMVQQYFQALDSYFNAVKAKPDLRPPYKKKRFMPFIWKDAAIKLLPDGKLRLSMGNNQKPVVIQTTLPADTKIRQAKLVYEDGKYYLHLATEVKNEVQKQQGKKVMAVDLGILRPITCFDGIEVISYHGGILNSLIRYRNKELAKFQQMLSRCKKGSKRYRKLVKAKKKMLRRIRHQIKDILHKITSNFLKMCLQKGIKTIAVGDITNIRERVQGNDNANQKLHQWCFRKMIDMLTYKVHPLGIDVKLVPENYTSQTCPACGSRNHPTDRNYECQNCGFKYHRDGVGAINIYARYLGKKSQVVAGLAPVRGVRYKPHLCGHGVRNAPWKAA

SEQ ID NO: 1774 - protein, 476 aa, unknown
  TnpB Polypeptide
MKAILINVEDEQKQVIDLLMTVFCSAVRYSFNRVNEGLKIGDIEKDVALKYRLNIRQAKDAVENARQTIVSQKELLKMNYENYTKKVKAIKKQLDNGKLSENKIRKLLSKLKKRERKQAYFKVFIDNNTIPPVTFGTKELFIKRCKGLITREEWRNARANRIYSRGDKTKKGNPNLRLIVNNDVSYLEISTLEKTEMNRAVKIQVPIYLPQKLSKKTGEVNGIPYKKLFLEYLETRGAYQVEMIKKDGKYYCHITFERPEIELECTTHNGVIGIDTNPNGFALTVIDNQGNYKEHTYLKQHELLYSRSGRRKNLCGELCQRVVSFAKERGLGIAIEDLKFKDDKDVSSKFARIKHQFIYSLLLVMLKSACLREGIEFISVKPQYTSKIGLYKYCHQYGMTVHNGAAMVIGRRSYKLKEKIPKILKDKFIKYDTSFNKHNEWKKWGILNNYIKGKEVKIPDYWIENRKKLLGLDVSA

SEQ ID NO: 1775 - protein, 358 aa, unknown
  TnpB Polypeptide
MKETEQYRALPAKVSSTVLLMVQKNFKSYFKALASFYKNKERFKGRPAMPKYLDTVDGRFFASYTNQAISQKIFRKSGMVKFSGISLEVKTKLTEFEQIDCARIIPKDGYYVVEVVHSENCEDKLEDNERYLGIDLGVNNFATITSNAKGITPFIINGRPLKSMNQFYNKQMAHYTSILEKTNGKKTSRKTKKLNLKRKNKIENYMHKASKKIVSFCIENNINSIVVGQNIGWKQDVNTGRQNNQAFVNIPHSRFIEMLSYKCELKGISFTANEESYTSKASFLNLDPIPTYVKGENKGYEFSGYRKHRGLYKIKGQNKTINADVNGSYNILRKAFPTAFTANGIEDVGVRPKMVNLS

SEQ ID NO: 1776 - protein, 391 aa, unknown
  TnpB Polypeptide
MIKSIKVRLNPNNKQLTKLFQYADCARFAYNWAISREQDNYKQGNKFLSDSELRKEFTQLKKQSEYQWLNEISNNVTKQAIKDACNTYKRFFKGQCKYPKFKSKKHSTPSFYQDNIKIQFTDTHVKVESFSMSKKQNKRKLNWIKLCEKGRIPTDCKYMNPRFTYDGLYWHVSVGIEVDDNIAFPSNDGIGIDLGIKDLAICSDNSTYKNINKTQTVKKLEKRKRRLQRSVSRRYEKNKKGTSYCKTSNIIKREKELLKVIKQLTNIRQNYLHQITSEIVKTKPSYICMEDLNVSGMMKNKHLSKAVQQQGFYEFRRQIEYKAKWNNIPVVIADRFFPSSKLCSCCGSIKKDLKLSDRIYKCECGNIIDRDYQAALNLKMYGENVLKQSVS

SEQ ID NO: 1777 - protein, 371 aa, Caldilineaceae sp.
LRKSATRCGIWATPTKSFTGNGLRRRPAAKPCPDERGTANPSTSPRFKGKGRTDAAFTIPSSPQMDGDRLRIPKVGWVRLHGSGQYPGCKAKQVRIRREGSDDHPKWYAHVFYEVPADQVGPPAPDGALGVDRNCGQATDSDGEVHPLPDTAKLDANIKRKQRKAAKARERSRAFGQPLSHRARRICGQLRKMQRKKKRRREDAAHRHSRRMADSAHTVVLEDLNTKDMTRSAKGTDGNPGRQVKQKAGLNRGILASNWGRLERHLDYKAGRVIKVNPAYTSQTCAVCGHVDKENRRTQAHFQCTACGHTANADHNAALNILERGMALLPTAHGAGASARREAIPLGTSTTREQGIPPPAGAPVPAGYTGI

SEQ ID NO: 1778 - protein, 398 aa, Microbispora sp.
VQLRYNYRLSPTPGQRQALARAFGCARVVFNDALRARTDAREQGLPYVSDGELSKRVITQAKQTPERSWLGEVSAVVLQQALADLNTAYRNFFDSMSGKRHGAKVAPPRFRSRKDNRQAIRFTRNARFQVTAGGKLRLPKIGDVPVRWSRDLPAGPSSVTVVKDAAGRYFASFVIEVAEQPLPSVEPEAGIDLGLSAFAVVSNGRKITAPRFLRRAEKKLKRLQRALSRKVKGSNNRAKARLAVARQHAKVADARREFHHQLSTRIVRDNQAIYVEDLAVKGLARTRLAKSVHDAGWSAFVGMLEYKARLYGRTFHRIDRWFPSSKLCSECGVVAESMRLNVREWTCPCGAVHDRDVNAAKNILAAGRAERLNACGAQVRPGPGLAQREEAGSLRGAA

SEQ ID NO: 1779 - protein, 460 aa, Nonomuraea sp.
MRVVQAYRFALDPTARQAAALASHCGAVRVAFNWGLAQVKANLAQREAERSYGIPDDQLTPALSWSMPALRKRWNQVKHEIAPWWAGNSKESYACGLGRLADALSNWRDSQSGKRQGPKVGFPRFKTKRRAARSVRFTTGTIRLDGHTHVILPVLGQIKTCEPVGKLARLLTEGARIASATVRWQEGRWHVSFTVHTERPPAAPTRPDAVIGVDLGITTLAVFSDDRPPIANPRHVTTALRKLRRLSRAASRKQGPDRRTRQQPSQRWRRANAARNRAEHRVAALRRDGIHQLTTSLARTYGTIVVEDLNVAGMIRNRRLAQAVSDAGFGEIRRQLTYKTTWHGGRLLVAGRWFPSSKTCSSCGAVKAKLPLRVRTYVCEGCGLSMDRDENAALNLASVVEGTVAGSGPETRNGRGADRKTPPGGAGGREASTSHRASAARIRRGPSPTPGESLTILETQ

SEQ ID NO: 1780 - protein, 427 aa, Nonomuraea sp.
LGPGAGKGEPGAAGGRALLRHPRRPAHPRPVLVDVQPAQTLEPGQARDRAVVGGQLQRSLRLRADPPGRRPRELARLPAGHAQRPDDGLPPLQDQTPRGPVGALHHRHDPAGRPHHVVLPVLGRIKTHERVTKIARLLTEGARIASATVRWQEGRWHVSFTVHTERPPATPARPVAVIGVDLGIKTLAVFSDGRPPIANPRHLNNAMRKLRRLSRAVSRKHGPDRRTGQKPSQRWRRANAARNRAEHRVAALRRDGIHQLTTSLARTYGTIVVEDLNVAGMIRNRRLAQAISDAGFGEIRRQLAYKTGWHGGRLLVASRWFPSSKTCSSCGVVKAKLPLRVRTYVCEGCGLSMDRDENAAHNLASLVERTVAGSGPETINGRGADHKTPPGGAGGRETSTPHRAPAARIRRGPSPTTGESLRILETQ

SEQ ID NO: 1781 - protein, 399 aa, unknown
  TnpB Polypeptide
MLKTYKYRLYPTKKQITKLEETLETCRLVYNSALSDRRDYYKETGKSLSRIAQQECLKCYKKDRPFLQNVHSQVLQNVLFRAERAFDNFFRRVKEKKGKPGYPRFKGKDRYDSFVYPQQSGFQITQQGLHLSKIGTIKFKLHRSIPVTIKTCTIKREIDKWYVTFVAEYTHTVQDIPVNPVGIDVGIKAFAVMSSGDIIENPKHLQKSENQLAKKQRRVSKKKKGSANRIKARIILAKQHRKIRNQRSNFHHKLSRQIVNHYNPIVVEALNIKGMVKNHHLAKSICDAGWGQFLRYLISKAVEAGSRIEKVAPHYTSINCSNCGNQVPKTLSERIHKCPFCNIVLDRDHNAAINILKKSTVGTTGSHAWGDPTTTLSTGALQVRSLNQEAPSELPVQEG

SEQ ID NO: 1782 - protein, 476 aa, unknown
  TnpB Polypeptide
VQRRHWYEAYSHIPLPLSSPLIIYKGFGEGFILCRDDDGGMAKKTKTATKAVKFQLLPITKAKKDRLQVVADNFREIYAVAAYRLPSLEKTSQYGSRRALNRLRIELHPITIVAAQIAQEAIEYARANYETMQTQKSKIRKTIERLEYEIGRIDEKIEKPGKRERVRKKLARKIRRKRRGLRTPYPILTHNIIRIHNQSWSFVHKNDRIYVVLPVEKIGTRYRKIWLPLKESEHYRHLISNTNKWGVGQLDLDTDTFITSITVKREDVRYEPETFIGIDLGLNNIATLAVVQDGKVVEVRMWSGKEVEHTRRRFREYRRTVSKIGRVDLLNANRGREQRWMAYTNHVVSKQIAEIVLAYPKPLVVFEELYRFVDRVPWNFYQIRQMIEYKVVPVRTLGIHPARTSVICNRCGGDDPDNRHGVHFHCTKCGYRVHADVNAAINIAKKGEWVLQQAKKKESAKNLSTTTTQSHNGDVP

SEQ ID NO: 1783 - protein, 381 aa, unknown
  TnpB Polypeptide
VQTLCLKYRIFPTKAQERKLADTLETCRQVYNSLLNDRKFQYELRGKSPSRYDQQKMFPQWSKDFPEVKAVHSQVLQNVAVRVDLAHRAFFRRLEAGETPGFPRRKGDGYGSFCYPQSGFKVGNSTVSLSLFGKQEKVKAKLHRPVTGKVKTCCIHRAGRKWFACFSVEQEDAFLPKSEDTIGLDAGLNSFLALSNGDFIDNPCFFRRDEKALAKVGRKQAKTKKGSKERRKVNKALSRIHERIRNRRHDFVHQTARRIVNRFGVIAVEKLNVKGMVTPINPKNHCLAKSISDASWSMFRTILTSKAESAGREVIAVNPAYTSQDCSVCGYRPDGFEGRTKKKLGDRWHHCPMCTASLDRDINAAINILNLATAVGQHSVG

SEQ ID NO: 1784 - protein, 334 aa, Trichocoleus sp.
MWGKHLNCNKLKAHIAKLRKRNPFWQLVGSQAVQDICERIEKAYQLFFKHHKKGVKPPGFKKVKKYKSFTLKQAGYKFLSGNRVKIGNRVFQYWNSRAIEGTVKTLTIKRTPLGELFMMVVVDDAMEPEVEFATDKLAGFDFGLHVFLTCSDGTKIESPQFFKQGLNAIRRANKQLSRKQKGSKSREQARKHLCRQHEKIANQRRDWFWKLAHELTNRFDVLCFETLNLKGMQRLWGRKIQDLALGEFLQILEWVAKKKHKLVVFIDQWYPSSKTCHQCGHVLESLDLSVRQWRCPSCQSINGRDDNASKNIQTVGASMVGLGSVRQALPATAV

SEQ ID NO: 1785 - protein, 529 aa, Mycobacteroides sp.
VNALARTKFGLRPITDPFIVASPKGVRTRTRVHLTPQEEAVLEQIGVCLGRHYRATLVDRIALGAATRREQGVWRQVRKQALTASTSSRWAGAITRTAIDSYDLGMRALNAHVDSLTAAVSTLSARLAAPIHGKSREPNRPHAKQIRGYASEAERFSKSRRKAHLEARLAQARARQEEGRPHVVVGGGRLWRNRQHLAETSMTLAQWEKRWTDERMFLTADGESGKRFGNETIRVTDEGVLMLKVPGALVAEHGTRLTIAAPVSLNTHRGGEWADRITADRAVRYDLHRDPRGRWYLDASWGYEQAHAVPLSSLRTQRTLGVDLNDGHVDAAVVDPHGNVIGLPQRLDFALTGSTTGRDAQVRHVITRLLHLAAQHGCASISIENLGFEQARNTGRETMGRGRRGKRFRRTVAGIPTATFRNRLAGMAATAGLSVIAVDPAYTSRWGRQHWLPGLQTSDPTIDGHRAAAVVIGRRSLGHRARRKPVGPVTRQRTRDGQPARPATRRSQPSRSRVTATPRAHDAAGPPDR

SEQ ID NO: 1786 - protein, 405 aa, unknown
  TnpB Polypeptide
MLTINYTYRINPTSEQQELMLGWMETCRCLYNRCLRDLKAWLNSRKCSLYSCSINREYIMSPDIPFPSYLEQKRQLTQWKKTNPWYKEVHSQVTQDCVKRLHNTWERFKSKKFGFPRYKKFGRYQSFLFPQFKDNPIKDGFIKLPKIGQVCINLHRPIPDGFKVKGVRIASRVRGTVWYAVVTIQCDVKVPDPLPFGRGIGADIGLESYLVTSDNFRVEPARFFRDLQSRLKVLQRKASRKKKRSKNWEKAQLKVAKLHHQIANTRKNFHFQTSHQLCDQADMIFVEDINFKMTARGFLGKEMLDGGFGQFRDLLSWVCWKRGKYFAQIDHKYTSQICPECNAHTGKKELSQRHHNCPECGYSTTRDHASGRVILNRGLESIVPTDCRERKLSTESVLPGIAISR

SEQ ID NO: 1787 - protein, 544 aa, Okeania sp.
MKESLTVLELQETSDDSALMKNIPKVSQLSLMQESLVMDNEMTLSDKLSFYAQSTPTLNLFVKLEVDSILNGVNSSKYWNEYVKVISQHLSSLTPIEPSDLDSHLLNGYVSKMGSNSWFSTRETYLQKQNSLKISCPSDLASVQGFTDCASIKSKSAKRFKTKPRNQTVKLTPNSVRKLRVFPSDALHKVWKRWLSAYRWIYNWTIAQLQGGSKVSAYDLQKLARDAQRPDWVKELPGHQLQEAVADAVDAQKQAMANGGVAKFKSCRQPSQVIKFKVGNYKNNHWYPTKVKGLIYRSPEGFPAECSYGTQLVFERGKWYGIFPEYKQPIPTSRSKVIALDPGVRTFLTGFDSEKIVEFGNGDMGKIQRLCSYLDNLMSRIDLSVVKRQRRAMRKASYRIREKIQSLVKDLHNKVAQFLVNHYKIIFLPTFSTSEMVVKSGRKLNKRTARNMLSWSHYKFQQHLIQMAQRHNVLVVLCNESYTSKTCPECGHVHKQLGGNKKFQCPKCDYTAHRDWNGARNIMLRALQATAITLIGDAIQIQGE

SEQ ID NO: 1788 - protein, 193 aa, Ruminococcus sp.
MCYAASKLWNVCNYERQHYKETGMEQYPDWYYQKKAHKEELWYKQLPSQTAQEVCRLLDKAWKSFYALKRSGGIETPRPPRFKQESIPITYMQMGIVHERDTDRVRLSLPKTLKKYMEETYQIHENFLYLENKIFRGMDQIKQLRIYPPEKGSCKIIVVYEVPDQEELPQNGHELSIDLGLHNLMTCYDSGNG

SEQ ID NO: 1789 - protein, 231 aa, Okeania sp.
LPVHPLLDEREYETFGIDVGVKQFASIANQKKGENEILSLPDSIKLEQLKIAKFQWRNRNKQLGGFGKPPSKNAIKYYKKLAKYHGRVTNVRRDFIEKTTTKLVGKVKHVCLESLNVKGMMKNGKLAASIARQGFSQFRERLTTKIVASGGTIVLADQWFPSSKTCHSCGKIHQELKLKDCTFNCPHCGMRIDRDLNAALVLSQYGEVNQKNRVGCTRIYACELDEGGLPG

SEQ ID NO: 1790 - protein, 343 aa, unknown
  TnpB Polypeptide
VIYLSHKDTKTSHLKGEINMSKKQIKKIIFMGVGCALLLIVGTIYSLLYNDGRWVKNMDMSEYVFSYGIHDKFLYLENKIFRNMDHIKQLRIYPPENGKCDLIVIYEMEEPEQLSQNGHYLSIDPGLHNLMTCYDSGNGRAFILGRKYLSLERYFHKEIARVQSVWYAQQSERGIKYPKSSKHIQRLYRKKQNAVKDYLHKTTRWIAEYCRKEDIRCVVVGDIRNIRKEKDMGHKTNQKLHSLPYNRLYIMLEYKLKLYGIQLIKQEESYTSQCSPLSPEVSKRYAEASNRKEWGMYVTDGVRYNADAVGAFNILRKYLSVSGKQKELSVTGLKNPEIIKVAV

SEQ ID NO: 1791 - protein, 426 aa, unknown
  TnpB Polypeptide
MKTIKLKIMNPIDLDYELRTYNSVVHFAYNRFHDDSSAKEKDVRSQVNQLFKGKLNSWLLQCAIKEGKSIQERNESKKVIFGGKSLYKRYLRGFICKEEFDKQRQLPISSQGEMLQNGNRMFDFHLDNQSLIFKVSRDKHIDIQLGHIHRNLQKELNKLNELCYDKKATVSIKLNNEYIWITYDEKLLCNSVKFNRLKDNRILGLDLNPNYIGLSVIEFDKEDDFKVLHKQVFDLKELTDKNISKNKRQYEIIKICHTINNLVNYWKCKKLSIEDLNISSSDKGQGRNFNRLCNNVWDRTLITNKLLMLSNIYGYELVEVNPVYSSFIGNLVYGDETTPDMVAASIEIARRGYKKYEKNWFYPVFNVDCLDERWKQTLTGVRNWKDAFLQIKNSKVKYRVLLNDIVQNAVFSKFNRKSKVTIYSFL

SEQ ID NO: 1792 - protein, 350 aa, unknown
  TnpB Polypeptide
LDHHRDTCRQLYNHALNEFKQIPKSAGTLNQRVRQVRDQLTSLKDWWDELNDVYSTVAQAAVMRIEDSIKALSVEAERLQRGQSQLEGPKDFRSFTYIQSGFEFDSKNSQPVLLSLSKLADIPLIKHRAIPDAETVKEITIKKESTGEWFASFTVGDKDSEKPTDPDRCVGIDVGILKYAHDTDGTAVESLDLSDERERLERAQHDLSQKERGSANWERQRQVVAERHADLKRKRRDFLHKLSNYYATEYDLVAVEGLDAKELVELPGNSRNRAGAAWGTFLRMLEYKCEREGTHFAEVDPGNTTKRARLAASRRTNRCGFVNTRVPRVGLRRTGTRTQRGTFFLAVLKI

SEQ ID NO: 1793 - protein, 400 aa, unknown
  TnpB Polypeptide
MYKAYKFRIYPTNEQQIALAKSFGCCRWFWNSALNLCQETYKVSGKGLSRNAIQGLLPNLKKEYLWLTDAYSQCLQYVALNLSNAYKNFFEKRAEFPRFKSKHGRQSISYPSNVKLDGDYIKLPGKIGSVYCKQDRNITGQIKTVTVSLNPDGKYFASILVDDKKENPQASTDGKAIGIDLGLSHFAITSDGSKFDNPRHPQKHARNLKKKQQSLARKQKGSNTRGKAKKLVAKVHSKIKRVREDFLHKLSRKIVNENQVIAVENLKVKGMVRNHNLAKAISDCGWGQFCTMLKYKSEWVGKTYIEVDRFFASSKTCNVCLNKVDSLSLDVRSWTCNKCQTHHDRDINAAINIRNEALRILSLGTSDTANGGNVRQPGKTEVLLDAVPDEIGNPILLEVG

SEQ ID NO: 1794 - protein, 276 aa, unknown
  TnpB Polypeptide
MKITSSYGVELRKQNIPIRQTLDVYRSAVSYLVEIYAQVWEELEGILEAKKRFNEAEHLIHTTKKNQARFDFDIRFQKMPSYLRRAAIQHALGSVSSYKTRLGLWEKTGQRESKPKLVYENHAMPVFYRDVMYREDKEGKDAAYLKLYDGHDWKWFHVRLRHTDMEYLRKNWSGKKASAPTLEKRHRKYFLRFSYTEDVILTKAPVEEQIICGVDLGINTDAVCTIMRSDGTVLGRKFIDFPSEKDRMYRVLGRIRRFQREHGSAQAKSRWLMQNA

SEQ ID NO: 1795 - protein, 469 aa, Blautia sp.
  misc_feature (93)..(96): Xaa can be any naturally occurring amino acid
VRKINRAVKIRIYPNAEQRVQIEKTIGCSRFIYNCMLADKIEHYKKEKKMLRNTPASYKKEYPWLKEVDSLALANVQMHLESAFHKFFREPSXXXXICRNKVRKINRAVKIRIYPNAEQRVQIEKTIGCSRFIYNCMLADKIEHYKKEKKMLRNTPASYKKEYPWLKEVDSLALANVQMHLESAFRKFFREPSVGFPRFKSKKSARKSYTTNVVNGNIFLEGKYLKLPKMAAVRIKLHRPISEKWKLKSVTVRREPSGKYFASLLFYCENQTAEKGPAEKFIGIDFAMQGMCVFSTNERAKYPMFYRHAEKKLAREQRKLSRCQKGSQNYKKQKKRVALCHEKIRNQRKDFQHKLSTSLAESYDAVCVEDLNLKGMAGGFHFGKGVHDNGYGLFLSMLEYKLEERGKYLIKVDCYFASSKICSVCGKKKEELSLSDRIYCCECGNRMDRDVNAAVNIMNEGKRIFAECA

SEQ ID NO: 1796 - protein, 474 aa, Aquifex sp.
MPKSLRCLTISLTDIPEEYKLVLGYLTYHSGKLFNQALYLVKTKQAKVNTFDLYNRLKDNSLHLKGLQSRSAQIVLDELVRAFKNAFNKNAKFPKFRPKNKPHRTITYDKTGFKVVGTKIRLSLSKALKQWLKEKHGIELKYLWLDTGLELDEKLIKNVQIVPKANAKEFELHIIYEKPQNKTKPIKCERVMVLDPNSTNFFAIVIEGIPQPYLIDGKGLKSLIRKYLKKIARLQSRLEGAKKKGFLTNLLEERISRLWLKVKRLLRHFAHTVSNLILELALKYGVKKIYIGDAVKNKNKGSNLNSTVDQMWSLLPHGKVKEYLEYKAKEYGIEVEYISESYTSGVDSSQRGAVSKENYTSEGRIKRGLFRTRFLGFLNADVNACRNFLKKLGKFDLISGILKPKRLRVFFKLRESSSTIPLYRGIGRGRGGVNPPVVVRHPKEGADPPEAPPTQVGQFTPRLQPVALSCQSQL

SEQ ID NO: 1797 - protein, 422 aa, Desulfurococcales sp.
MKVVETLKVMGLPKEGDELLKFLRTFRDYTQYIVDQIWDERNIPSLKSLHKRFYYELRSRGFRAHHVKQIYCCARSIVKASKKAHGSKPVLRKLSARIDKYDYKLSLEGQELVVKVLNGKEVKVKLIASKERFMKYMDWKNYELTVKYDGLRFWICIEFRREIKQYNARSILAVDVNFDNVTIAIRKGKRIIKIKRFAFPLRKALTHKIWIERIQRRYPKQWRYIKGIREAIKKHGKRIRDIINDLCHKVAEEITNIALEHRSLIIVENLKNLRVNGRKNNRFNKKLSLWAYCKLLSYIKYECMEKEIPLMKVNPRKTSSLCPRCNSKLVAFNSRILKCSKCEFIGDRDVIACFNLISRCGVLGVALNAPDQMQTQEGMKENKNEGMTLDIKCHKTRTPILLRNSLAAATAVFLSSEGMLLS

SEQ ID NO: 1798 - protein, 396 aa, unknown
  TnpB Polypeptide
VKQRFYPDKRVLRLMDSFRQMTNICVRIGLENGVYSMKRLCTLSYGQLEDFGLPSYYKPCAISKTAGILSARKKSLKRGYRSKDPYLKKSFLTLSYGFKIVEETLRFPVGRREFVRIPLSQHTVCILTDPKLTVRCFTLTPESLSISVNKDVEPIQGLNGVVGVDRNLKNLCVGNSAAVAYYDMSKVTEIADTTRQISRSFKRNDARIRARVVRKYGKRKKNRVAQILHSVSKAVVESAFRNREGIVFEEIREIRRLYRKGNWQGRSYRSRMNDWPFHEIRRQIEYKAAWVGIPVITLTKAETRGTSHVCPRCGERLQSSKHLSRKLWCQRCREMFDRDLVAVLNISRRGRLRFERSEGVGIEAMVQEPNAGIQMPKVILTVDPPTLTKQGQKPKS

SEQ ID NO: 1799 - protein, 508 aa, unknown
  TnpB Polypeptide
MSKLVKSVRFHIGESNQQKLNLVDQTFVDYRNLVNEHIKVYFENEYFYEDLYYNNTYSKKINIKIDYFDSHYNQQARSRAVVIISKFYHDIYDKIDFNKEKKLNKHLLRWINCYDELRISLNFNKKEEFFEALKEQKFKDEEIVNVIKYCEENYAELQETFHKYYKESKAKFKEIPEYKANTIQLDARIVEMQKSKDSCFDYWFELKTSKILKKTKKLQFHKIIYLPFKINDYVKDKLKLAKSFILGKDCYSNYYFQGVYEVETKENNSNNEIGIDLGYKRLINTTDGYQSSKLYNSKMNKLDKVISLLKKSLDYQKLHTSKKLQHLEDKRKQLQKCFMGAEVNKVLDNKMIVIEKLDFTKKKRDKKVKRKMSRTMIRRLNIWRKKYIINLLKRRSEEYNIKLIEVNPAYTSRLCPICGCIEEANRKKQWLFECVNCGYKANADINASGNILRRSKDSELLNCVGKDEIKSVLMRRFEINQGSNNNPLDSEIRQLGSLESIKSESEMV

SEQ ID NO: 1800 - protein, 304 aa, unknown
  TnpB Polypeptide
VEKAFKYRIYPNKKQKELIQKTFGCTRFVYNYYLNKRKEMYENDKTTFTYNMCSKDLTQLKKELEWLKEPDKDSLQKALKDLDMAYQKFFKEHTGFPKFKSKKNRYKSYRTSYTKTSAGGNIMFINKHIKLPKLGLVKTKDRQIPQGRILNATISQEPNGHYYCSLCCTNLDFPQYQKTNQNIGIDLGLVDFAIISDGIKIENPRFYEKSEKKLARLQRELSRKTIGGSNWNKVRIKVANLQKHVANQRNDFLQKLTTRIIRQNDIICIENLDVKSMKETNSTIRNKRVGDVSWSEFRRLLTYK

SEQ ID NO: 1801 - protein, 426 aa, unknown
  TnpB Polypeptide
VITLTDDKRLQKNEKIRSSGKATREKRKSQICRVFKVKVDVSRLSAKQKEHLKMIFTEAKWLYNDILQYSENNDINTYNTKTKFVNILNKNKEVETRELKYISARMKQSVLAGIQSSIKSLSRLKKNGRKVGRLKYISDYRSIDLMQYGWTYKIHGKNRIKIQNVPGRVIVNGLEQFIDTPNIEIANAKLLNTPSGYYIAITTYTPKEDIKPREYIDKEIGVDMGIKNHITLSNGEKFSASVGETERLKRLQRKLSRQVKGSNNRRKTLRLIQREYQKLTNRKNDIANKLVAYILSYEKIYMQDEQLSNWQKGLFGKQIQYSILGKVKAKLINNPRVEVLDRSVPTTKFCPVCQDTNNDIQLGDDIYTCPTCGYTEDRDIHAARNMIIMCKIVKNNLPRGPREVKPAETVKSTVVETGRLQPVSCG

SEQ ID NO: 1802 - protein, 470 aa, Kribbella sp.
VSHKQGIRVELAPDADQSVLMGRHCGLSRVVENFCLETVRKKWAQRKAEESYGITGDDLTTVPWSAPALEKEWRAAHIVRFPWFTENKLSSRVPKEACRVRAAGFSNYLKSKKGERRGARMGFPSWRKRKHGSRFRYDADRAKPRDARTVRLPAVGDVATREDMSWLTDRMATGQARILGATVREQAGRWWISFQIEVDRDDLNKRRQVDAEAPACGIDLGLKTFAVIKNSDGTTEEVHAPKPLKAAQRALKRANRKLARSADDSKNRAKARKRVGRLHLRVADRRRDFLHKTTTRLTRTKSAIAVETLHVKGMVRNRRLARSIADAGFGEFVRQLDYKADWYGSRIWRADRWFPSSKTCGDCGRINRALVLADRAWMCPGCGVLHDRDENAAGNLLAAMLADRTSTTSPGSCPESRNACGDHVRPHSPESAAVSEAGRAEARTSPRLTQRFDLPAECRSRCWRSSARSC

SEQ ID NO: 1803 - protein, 423 aa, Staphylothermus sp.
VLKNQPGSLERTVVLVSPELTSRKLTALSYVYEAYGEILREALDYMYSKNVVSWVKAKKELYRYFREKYPELSSHYIHEAIRDASTRLKSFLKLKKKGLAYTDKPEVKQWSVGCDNQLWKLTLQGVSLATHIGWVNIPLLLHKQFYRYYNTGWVLRSSCRWKLENGKLKLYVVFSKSAKQKGNYSKAIGVDVNENNVTLFILLDNKAVTVVTNHSRIVLGYAYRRRAIQLRYRNNSRTLRKALMKLREADVKKDLRNKVASFVVKIASAENAVVVLEKLPKRFQDRALEKNGLKSLDAHRLKQSAIRGIQKQIVEKALEHGVRVELVDPRGTSRLCPVCGSSLAPVTGNAQRRGWSPRFMKCTKCGFTHDRDVIGAWNIALKLNVSPVPLGSKGVHDLHVEWLVATMKRGEETQPVPEKPTET

SEQ ID NO: 1804 - protein, 275 aa, Tolypothrix sp.
MAVLHLEFGLHLQSKSVLLFTNVRRADGYYAQFAIDIDLKVETQPTGQVVGIDLGLKYFIADDKGNVEQSPQFYRKSEKQLNRANRKKSKKYDPKKKKAKVPQSKNYHKARNRYARKHLRVSRQRKEYCKRLAYSVIQSNDLVAYEDLNIKGLVRNRHLAKSISDAGWSTFRSWLEYFGHKYGKVTVAVPPDNTSQNCSNCGEKVKKSLSTRTHVCPHCGYVEDRDVNAAMNILQKGLSTVGHTGTYAWGDLPSWAVGASLPSNGESMNQESPRQ

SEQ ID NO: 1805 - protein, 408 aa, Hapalosiphon sp.
VLAQHFGCARWWWNYGLNQCIETYKATGKGLSQSGLNSLLPGLKKAEETEWLGECYSQVLQSVSLNLSRAYQNFFEGRAQYPRFKSKHDRQSIQYPQKVKQVEDALKFPGKLGIVKAKIHRLLDGVIKTVTVSKCPSGKYYASVLMEYEGDYPASSSEGKVIAVDLGIKDFAITYDGEKTSKYPNPRHLSKYEKKLSVKQRIAARKQKGSNRRRKAHKIVARVYEQVSNVRQDYLHKLSRKIVDNNQVVVVENLNVKGMVPFGNAKGERNHKLAKAMSDTGWGTFVNFLSYKLERSGGKLVEINRWFPSSKLCSNCHYQIAELPLDVRTWICPSCGTHHDRDGNAAVNIRTEGIRMLALSAAEMLSSSGTGEANANGEDVRPIRGRKSKMRQSSVKLEAHTDLTVQCG

SEQ ID NO: 1806 - protein, 485 aa, Micromonospora sp.
VGRFTAFRFTVDPSPSQVVVLARHAGASRFAFNQCLALVKEALDAKRRDGSVVVPWSGFDLINAFNSWKTSAQAGRRFVVDRSGSTEMVATGLSWRTQVCQQVCEEAAVDLGRGLSAWTDSRGGKRPGRRVGFPTFKRKSRSRASFRIRCTTKAGRASIRVGDPTAGPRSVCLPKIGILRVREDTRRLRRMIRTGRAGIRYATVSCRAGRWTVTVTVEAADLHPAHRHSPRPDADGSGWVGVDRGLAALVVAADTTGRQVLRVDDPPRPLRTALPRLRRLSRQVSRRQPGSRNRAEAAARLGRAHLRVANVRRHFLHTVANRLVKTHDRLALEDLHTAGLLRNRRLAAAISDAGWADLARIIGYKQRWRGGQATPAPRWYPSTRMCSACRTTGPALPLSVRVFGCDECGHTADRDVNAAVNLAVWAEQQHVQTRDPEARGPVTNAPREAGSGQRPRAGETSLDDGGTPPPRTPVTAGTPEKGGVS

SEQ ID NO: 1807 - protein, 475 aa, Micromonospora sp.
VSYRVVIVLGVAGRERLGVVQAYRFALDLTPRQERAVLAHAGAARVAHNWALARVKAVMDQRAVERTYGTPDEQLTPTIGWSLPALRRAWNAAKADVAPWWTECSKEAFNTGLDALARGLKNWSDSRTGKRAGHPVGFPRFKSRRRSTPSVRFTTGAIRVEPDRRHVVLPRLGRLKLHESARKLARRLEAGTARIVSATVRRDGGRWYVAFCVDVDRAARTPNQPEVVVGVDLGVKHLAVLSTGEVEPNPRHLHTAARRMRRLARRASRRVGPDRRTGRRGSRRWERASVRLGRAHARVAHLRRDGLHKLTTRLAREYGTVVVEDLNVAGMLANRRLARHIADAGFAELRRQLAYKTSWGGGRLVVADRWYPSSKTCSGCGTVKTKLALSERTYTCTTCGLVLDRDVNAARNLAALAVTVAGSGPETRNGRGADRKTPLAGLVAVKRQPGTAKAGNTGTVPPQGRTSNHELTHAS

SEQ ID NO: 1808 - protein, 500 aa, unknown
  TnpB Polypeptide
LVHDAGAHEPHCPVLDGVGVDLALLLQQVGAGIAGGHAESPVPGRVEQAMVRPVTGGRDRAIAQLGGSRRVIDVDPQLAHGLQTPGAEGIRFQPSDECVLSSYKKASIIVAMKINRAYRFRIYPNRGQQAALTKQFGASRFVYNHFLRARIDYYAAHSNDKGKKGLTYHDTAAILTQLKREPEYAWLQEANAQALQQALRNLDSAYNNFFNKRARFPCFKSKRARQSFRVPQGFGIKGSKLHLPKLPPIRMVIHRSIEGIVKHIVISKTPAGYYYASLCCESEVPKPEYRGNVIGIDLGIKDFLVTSNGEHIPAPKYLRQAERRLRRTQRHLSRCKRGSRGREKARLAVARQHEYVANQRVDFLHKLSRRMVDENQAICAETLNVKGMLANHCIAKSIADCGWGEYLRQLRYKGAWYGCDLLQCDRFFPSSKRCHDCGFILDLLPLSIREWTCPECGIIHDRDENAARNIKTFCTAGTAETHTPGESRGSDSLNPETACL

SEQ ID NO: 1809 - protein, 376 aa, Bacillus sp.
MILAKKVRLIPTPEQEKVLRNHAGAARFAYNYCKRMSDRYYKLFGKSVSQLALQKRFTKIKKRKRYEWLRDINAQVPKQASKDFDTARKHSFKKYKNGYHTSYKSKKDVIQGFYANYERLAIGKKVVHIQSIGEVKTSQQLPRNKKPSNPRVTFDGRHWWISVGFQEDFESQELTNESIGVDVGLKKLFVASNGMKERNINKDAKVKKLLKRKKSAQRDMSRRFKKGVKIQSAGYEKAKAEHLRLSRKIMNIRNNHIHQATAKLVKTKPMRIVVEDLSISNLLKNKKLSKAFSCQKLNFFFQCLSYKCEKYGIAYVKADKWFASSKICSCCGVKYDHSVQPEGQWSLKIREWCCTSCNSHHDRDVNASINLSRWVK

SEQ ID NO: 1810 - protein, 367 aa, unknown
  TnpB Polypeptide
MEYSYKFRIYPNTEQQMLIQKTFGCARFVYNHFLSQRISEYKATGKSSTRFQQDKSLTVLKQEIEWLREPDKCALQNALKDLDTAYKNFFRSVKSGGKVGFPQFKSKRNRHKSYRTNSNIAVFDSYVRLPKLGLVKCRISKEIRGRILSATVSQNPSGKYFVALCCTDVDIELIPSTGATVGLDMGIKFFAVTSDGLEYPNHKFLTKSLRKLARLQRQLSRKSKGSKRREKARVKVARLQEHISNQRQDTLHKLSTQLLQDYDLIAIEDLAPKNMVKNHSLARSISDVSWGEFRRQLEYKAKWYGKQVVTVDRFFPSSQLCSTCGAQWPGTKDLAVREWVCPVCGAHHLRDINAAKNILNEGLRLLA

SEQ ID NO: 1811 - protein, 224 aa, unknown
  TnpB Polypeptide
  misc_feature (155)..(160): Xaa can be any naturally occurring amino acid
LDKQDIPVGKIKCVRLVKRASGWYMCLFIDAEPNVIERVGYGEIGIDPGFKNLLTTSDGEIIEHPRELEASANRLAQAQRGNNKQLSSRIQERIANQRKDRNHKLSHRLVAENVVISWSKDNTKGVANKFGKSVASSAHAQLRAMLSYKSPKSGXXXXXXVASKNSTRTCSECGCLSGPTGLAGLSVRSWVCKECGTPHDRDINAAINTLKTGAGYAHERYAYA

SEQ ID NO: 1812 - protein, 515 aa, Bacillus sp.
MFKTYQTKIKNKAIVLKNKESTPLYQFLEETARTFGMIERRLFVDMYVRKMPENELKVSYCAKHQITARQFNSIKKQLKGRIYSKNELKNLYIEETKIKIQNTSDIIKKKVEQKDKAHISLLKMIGNEKTFLKKVRSYRKLRKTLHQKKRKLYALTHKLEKLESDLEQQVVRICFGSKDWFHKQFNLKENNLTFQEWKKEWQARRADQFTFVGSKDETYGNQSCTYDLNNDLRIRVYTKDEPLYGNYVVIPNVMFPYGQEQIDKAKIATIGYTKGGNKAKYYKATTWKFIRKCDTWYVNASVDVESPQKTTLDHIGSVGIDFNAGFLSITDVDRFGNYLQSFNVPYANQHTPSEQIEQSLSEALKVAVNYAKEKQKPIGHENLNFNKKKLALKQLSPEQAKFLSGFAYSTYQSLLKDKCEAEGVRLIGVSPAFTSQIGHHKFMKKYGLSSHVSAAMVIARRSLKFNKIESMPVKHLLTGNPCKIVQISRWKQWKELTKQWKKYTFKSKIYLLNQL

SEQ ID NO: 1813 - protein, 169 aa, Escherichia sp.
MKRAYKYRFYPTTEQAELLAQTFGCVRFVYNSILRWRTDAYYERKEKIGYLQANARLTALKKEPEYIWLNDVSCVPLQQSLRHQQAAFANFFAGRAAYPAFKSKRHKQVAEFTASAFKHRDGELYIAKSKSPLDVRWSRELPSAPSTVTISRDSAGRYFVSCLCEFEPV

SEQ ID NO: 1814 - protein, 362 aa, Bacillus sp.
MIRTFKFRIEPTEKQRQKIGETLMYCRRLYNACLEERIAAYKKYGVSLTFYSQKKELPELKQECPEYKSVHSQVLQNVVERLDNAYQSFFQRLEKGENAGFPRFKGANRYRSFTYPQSGFSLEGKYINLSKIGKVRIKLHRQVKGNIKTCTVIEKNGKYFVSLSCEMNKQANLSTNKKVGVDLGVRHLAVTSDGQFFDSPKYLLKSERQLKRLQRMVFKRKKGSQRRKKAVALLAKKHEYIANQRRNNAHQVSRILVNQYDLIAFENLNITNMVKNHRLAKRISDAGWNQLITFTTYKAESAGKCVVLVDPRNTSQQCSNCNEMVKKTLADRVHHCPSCGLECDRDVNASINILHRAIEAVS

SEQ ID NO: 1815 - protein, 539 aa, unknown
  TnpB Polypeptide
MKRAKTPSHILALPLICEPWQRDYLDKLFRVGGNIYNNLVADRFGALKQLERTKAWKSIQARLSALYAQRKKELTGKEDHDKLVYEKYKPLFVPLFKERDELLLAHGFTEHSFQARVQKWRGHHRKLVNTHVAQKIASTVWQKFRAYLYGNGDEIHFMPWADFRSIEGKSNESGIVFRDRAVVIARRKFPVKTAKAPKEGFQPSEGFQPSPSYAYEQEALAHRVKYCRITRRWYPSGWKYFVQLVLEGEPPVKVNPKTGEVLHPMGKGRVGYDIGTQTLAFSSGSHVGLVELVPEAQDIQNELRRINRAMDRSRRVMNPKMFNPDGTVIDTPSLPPECLTKRGKRNWQNSKRYERLASQRRYLYSKQARLRIQQHQERANQLLGLGDDHYIEEMAFRALVKKAKPQEPAPGEKFKRRKRFGKSIANKAPAAFVNILEKKVLQNDGSFQRINTWEAKASQYNHLNHQYNKKKLSQRWNIMPDGRNIQRDLYSAFLIQHTNSTLDGFIQELCDKDYPAFVVLHDTVISVLRGTKQPSSAGI

SEQ ID NO: 1816 - protein, 460 aa, unknown
  TnpB Polypeptide
MSRPSGNISKNQQIKTTLLATRERRKHMICKTYELKIVNHHLPKYALLHLHQLFLEAKWFSNAIIGSKDIFSFDSKIESVSVICPDTIDERPLTHLSSQMKQSLVKQVQRDIISLKKQKEKGHLVGKLIFKKCVETIPLKQHGNTYTVKRPNKSHIQGLKGYFKVRGLHQVPKDAELAEAKLRYISGDFYLLVTCYLPITSTSKKTITNEQQKQQKRVEIAKQVLGIDGGIANQLTLSNGIQITYNIQIPEKLSQLCKRLSKKKYASKKYVKTKIKLQKRYKKWTNRKIDTTNKIISRITNNYAYVAFQDDSITNWQRLWGTRLLNTALGRLFTTLERRVVSSCVIDKWEPTSKRCSDCGYILLKQVPLDERVFQCLNPECRLELERDWNASIVDKKLSIGELASINSEINHRFPQELRKKMPLETSTSIQELCQSLDRLPFVSAQVLSMKREALSFRLG

SEQ ID NO: 1817 - protein, 296 aa, Burkholderia sp.
MAGMILVYRHRVKSLNGLLNQQSRAVNYVWNFRNDTQKHALKWGKKWPTGFDLNVLTAGSSKALGIHSGTVNATCEQYAKSRSQHRRPYLRYRGKKSLRWVPLKGRDLKREGDAFRFAGNTFRVFNSRPLPEGKIKDGTTFAQDARGNWFLNIVIEMPDVAARPIRSGVGIDLGLKDFATLSTGEKLPNDRFGRRAADKLAKVQRARKHKRHIAKLHAKVANARADFQHKLALDLVRRFDYIAVGNMSAARLGIAGLRIREWACSECGVVHDRDTNAALNILRCGRASPVVGIARL

SEQ ID NO: 1818 - protein, 279 aa, Salmonella sp.
MRTTSKRKKSGICKPTLALRRSKKSLNTPGLTMFPAFPSNSRCATNRRPLLTFSPDAQHTRHSTAEFTASAFKYRDGKLYMAKSKAPLDVRWSRPLPSVPSTVTISKDTAGRYFVSCLCEFEPASLPITASMVGIDVGLKDLFVTDTGFKSGNPRHTAKYAKRLALLQRRLSRKKKGSNNRAKAHSKVARLHAKIADCRMDNLHKLSRKLINENQVVCVESLKVNNMIRNPSLSKAIADASWGEFVRQLQYKGEWAGRSVVAIDQFSRPQNAVAVAVSR

SEQ ID NO: 1819 - protein, 395 aa, Vulcanisaeta sp.
VQKPYPEVKAVSIRFTEMAWSYGKFINSTAPVRLELSLPGGRTEVWLRPHKRFWLYWWRVLNGEARLASTLIVKRKVNKWYAIFVFELKPREEEPKSIVAFDINENTVAVSRVDLPSTVDKVASWNRRYTTPELYTIRTDFGRLAKRYGRIRNAIIEKLKPGFALPSGKYVNITNTREFRKCVKHLRERGRKVGRVRHVANELTRIPAIIVTEELGSNPQESMINGIEKDELRHRIKQTPFKALERAVEGKALERGSRIFRVPAYRNSKTCPVHFTKLKSTNDWHTLQCPLGHYVDRDYASVMNMAWKITPEPWTKGVWWDLRKNMNWRKHESESNPLIPHPIVKYLHVTLKEFTASEEWPAVLARGDPMNPTGEANEGGGEETSHALSRQGGGQ

SEQ ID NO: 1820 - protein, 400 aa, unknown
  TnpB Polypeptide
MLIAHKIALDLNNVQATYMARASGTARFAYNWALSEWSRQYEAWKADNSLIKPSQMSLRRQLNALKREQFPWMLEVTKCAPQLAIIQLGQAFQNFFAGRARYPQFRKKGVHDRFSLSNDQFRIDGSRIRIPNLGWVCMREALRFSGKIMSANISRVADRWFVSITVDVPDSSHLPEAKNQGVVGIDLGVSALATLSTGEPPVAGPKAHKALLGRLRRVSRSLSRKQKGSANRNKEKHKLARLHARIANIRSDAMHKFTSDVTRRFHTLGIEDLNVRGMIKNRYLARSIADMSFFELRRQLEYKSGMRGGLVIVADRFYPSSKLCSDCGYKLDKLPLSVRYWKCPACGEEHNRDENAASNLKNYAVSSTVSVCGEEGSDSGRKTRVKPSSAKQEVSARFDQ

SEQ ID NO: 1821 - protein, 425 aa, unknown
  TnpB Polypeptide
MTSITLVTESKLYVKDNASLYTYFDDYSKLFGFLVRRCVHHLRHQLNGEPESWYRTNLMLEFNVTNRMAKAVIKTAKNQLRLLKESAYYQFKNLYKRKRSLFKKITKLKAILSSNSTSLKQRKLAKLRLFWTQMKLNKVNQLIANGLRLHLTFGTKRLLKTNKAKFLAKRDNQVVYIGDKNETYGNQQFQISFNPKHNRFDYKLRLENQWVSGSDKYIFGSFVLKNKEAKTDVLKTLSHKKSNPLTVRIIKRDDGLYLQIMYRKETAEVTRSHFGVLGVDFNKGFISVSEINSDGKLRSLTRYTYLHQGKTTKTKTSMLALVSQLVAQAVSVGKDIVIEDLVSLDSNKKQEKTTSKDYNRMINSLKFGLFKRCLLSKATKEGVSIQFVNPYITSKIARASYTDRMKLNVHDAASYVIARRFYQYD

SEQ ID NO: 1822 - protein, 423 aa, unknown
  TnpB Polypeptide
VRLRYNFRLYPEPSQCEALARAFGCARVVFNDGLRARRHARAEGLPYLSDGELSKRVTAAKATPERAWLGEVSAVVLQQALADLNVGYRNFFASITGKRKGPRVAPPRFRSRKDSRQAIRFTRNARFAVLGNGRLRLPKIGDVPVRWSRDLPAEPSSVTIIKEADGRYFASFVVHTTDEPLPEVESEVGIDLGLTHFAVLSDGTKIAAPKFLRRAARRLRRLQQALSRKTMGSNRRRKAAVKVARAHARVADTRRDWQHKLSTAIIRDNQAVYVEDLCVVGLGRTRLAKSVHDAGWASFTGMLEYKAARYGRMFARVDRFFPSTRMCSDCGRITETMALDVRSWDCPCGSTHDRDVNAARNIKAAGQADFNDRGVRVRPAAMPAPRGEAVTHPDAACSTRGVEGIAVPWAERMSTGHPLQRVL

SEQ ID NO: 1823 - protein, 435 aa, Streptomyces sp.
VQEKRRFGHRARLALTPAQTRLIDDQAHAARTLWNCLHDWWTMLAKEKRSLAAADDAIRQARKEIDWFGALPAQAAQAVLKTYFQAWKNCWDGRAGEPNFKARFRTVMSVDIPQGRDLNITRVHRRWGMVNIPRIGRVRFRWTKDLPVGKRANTENRITGARLVKDALGWHIAFRVQTLEPKPELHQGPEVGIDAGVNLPLALSDGNHRDHGRPPRLPGGKADRDKWLNPDEKAKLLHLERRAAQRKQHRGRGEKTSRRLQHTYDQIKQLRARATRRAVDWQHKTTTAIARHYGTVVVEQLNIKDMVKSAQGTIEEPGKNVAQKSGLNRSISQEAWGRTVTMLTYKTARCGGALHQVPAPGTSLRCSSCGCTTPGSREDQATFVCKNSDCGWSGNADWNAARNVLHQYWMGHALIPAAGRAVVRRPRGVKPATAR

SEQ ID NO: 1824 - protein, 555 aa, unknown
  TnpB Polypeptide
MVSTINQETIKDLNLNVSLASADVQLVKQIPITDVNDVFCCLLLSNVAKKLYNSALYLFKKQYKENQTTLTYETLDKLMKNEELYPNFARLYQDLPAKVSQQVLKLFSQNINSFFALKQSEKLTDEQKKKVNLPRYYSKNGLVPIYYTNQALSKTAFEEDGVLHFSKTDLKIKLDLATLPEISHFGQINQVRIVPTTKNKKNKKLSDLLEEYCSGNNDQTTPLFTLEIVYTAPLTLQRSQNQSLNLRYETKIIKKVSKRTQKPYEIKKVELVEVNYTEEFLQSVAGIDQNLNQLAVGVVTPEETTAFNYDIKYLKSVNQHWNKEKAKLQEEISKQEKLLEELKDDKIISSQSDNVKKIEEDLKDLKDLKDKKVLIKQLKNQIKRITTRRNRKIDNYTHQLSRKLINHLSELGVKNIIYGKNVNFKQEINLGKVNNQNFVNIPFNQIIDRLKYKALLAGINFMTVEESYTSKTSFLDKEKLYCYKGQGNKAPKDYTFLGSRFTRSLFRSKDGHVIHADINASFNIIRKVSGDDIYNFVNIGSIKVSSPKRWKINLQ

SEQ ID NO: 1825 - protein, 353 aa, unknown
  TnpB Polypeptide
MQIISSYGVELRKQNIPIRQTLEIYRSAVSYLIGIYVQVWEELAEIPDAKRRFNAAEHLVHTTKKNHACFDFDIRFPKMPSYLRRSAIQHALGTVSSYKTRLDLWEKTDGKSGKPKLVYENHAMPVFYRDVMYREGAEGKDEAYLKLYDGHDWKWSCVRLDHTDMEYLRKCWSGKKASAPTLEKRHRKYFLRFSYKEEVTLTKTPVKEQIICSVDLGINTDAVCTIMRADGTVLGRKFIDHPSEKDRMYRTLGRIRRFQREHGSAQTQGRWAYTKRLNTELGKKIAGAIVRYAEENHADVIVFEYLEMQGKISGKKKQISLVPILPLDYERKVRTTEHRRLKNEKEKGTIEDD

SEQ ID NO: 1826 - protein, 402 aa, Thiothrix sp.
MIISHKIRLDPNNKQATYFAKAAGTARFAYNWALAEWQSQYAAWKDDNSQPKPNQMALRRQLNAIKREQFPWMLEVTKNAPQMAIIQLGQAFTNFFAGRAKYPRFNKKGKSRDSFTLTNDQFTFDGCRIRIPSLGLVRMRETLRFPGKILSATISRTADQWFASITVDTQDHNHLPPAENQGVVVGVDLGVSALATLSTGEVVVGAKPHKALLSRLKRLSRSLSRKTKGSANRAKAQAKLARLHARIANIRQASLHPLTTDLTRRFHTLGIEDLNVSGMVKNRHLSRAISDMGFFEFRRQLEYKAAMRGAVVVVADRFFASSKTCSACGEKVDKLPLSIRSWECPCCGASHDRDVNAAINLAHYAVSYTVSACGEDGSGLARKRPAKPAPVKQVFNTQPTFS

SEQ ID NO: 1827 - protein, 392 aa, unknown
  TnpB Polypeptide
MYRTLKTRFRAKKEVIQKLFECNRISAEVWNECLRLAKEHHLETGKWITKTELQKATKGRFSIHSQSIQAVVHKYIFARDGAKEARKKGEKIKYPYKKKKHFNTKWAKDGFVLHEDGTLELSLGIWNRKRQSPLVVKIDKEKLPNGKVKEIELVYDRGLWLCLSYEDGKKPKENPCKNRVAIDPGEIHTIAAICENGESLIITGRKIRSIHRLRNKKLKELQKLMSRCKKGSKQWKKYNRAKQYVLSKSEAQLKDALHKTTRQFVRWCLENQVKEVVIGDIEGIQRNTKKKRNKKTNQKLSNWSFGKLFDYLKYKLNAEGIQIEKKDESYTSQTCPVCGKKNKSSSRNYTCQCGYKRHRDIHGAMNLFAKVYYGEIRPLEFTVKPFTYRRIA

SEQ ID NO: 1828 - protein, 420 aa, unknown
  TnpB Polypeptide
MGGEKNVFLYQTTAKWFDQRRILDSSRTVPYCQEHVQRRIVQCQTILFEHKEFLNYEKNYHLAKTNENYKLLNSNMAQQILKKVNEAFKSFFGLISLAKQGKYDHKAISIPKYLKKDGFHSLIIGQIRIDGNKFTIPYSRLFKKTHKPITITIPPVLLDKKIKQIEIIPKHHARFFEIQYKYEMPEDQRELNDQKALAIDLGLNNLATCVTSDGRSFIIDGRRLKSINQWFNKENARLQSIKDKQKIKGTTRKQALLAMNRNNKVNDYINKTCRYIINYCIENQIGKLVIGYAETWKRNMNLGKKTNQNFVNIPLGNIKEKLEYLCKFYGIEFLKQEESYTSQASFFDGDEIPEYNADNPKEYKFSGKRIKRGLYRTKSGKLINADVNGALNILKKSKAVDLSVLCSSGEVDTPQRIRIA

SEQ ID NO: 1829 - protein, 181 aa, unknown
  TnpB Polypeptide
MSTLYVDSEGKRANYPRFYRKALETLAKEQRKLSRKKKGSNRWHKQRLKVAKLHEKIANQRKDFLHKESHKLAKRYDCVVIEDLNMKGMSQALHFGQRVHDNGWGMFITFLRYKLAEQGKKLIKIDKWFPSSKTCSCCGRVKESLSLSERTFRCECGFESDRDVNAAINIKHEGMKRLAIV

SEQ ID NO: 1830 - protein, 416 aa, Mycolicibacterium sp.
MKLVVQLRLEADAAQLDVLARTLIACNETANLVSTIAHRQAVFRRRDLRAITYALARQHAGLGAQVAQPCIRKVADAYTTLRSNLGSGRYGVPGSTRRQKVQANPIRFQSLAAQPFDGRCLSWSHDADTDTGGMVSIWTVDGRLKNLRFTGEPDQIALLRTSRSGETDLVLRRRRRGALTAFLIATVEVPEPLACTGAHLQSSDGWIGVDMGVENIAVTSDRPLARELLATYGAGASDGAAGRGSVKDRRTRNRELRQKLQRKNTKSAKRLLRKRARREARFAADVNHQISKRIVTEAERTGRGIAVEELTGIRERVRLRKPQRATHASWAFAQLGVFLTYKAARAGVPIVQVDPAYTSQRCTACGHIDRRNRTSQAEFVCRDCGFTAEHADILGADNIAHRAPTTWAQSTAPSAA

SEQ ID NO: 1831 - protein, 504 aa, Methylococcus sp.
MPKSSTPSFIIELPLVVKPASDRVLLARLEAGRRLYNVVLQDALKRLDRMRQSKAWQAVRAMPKGKARSEAFRAAQIPFGFSDYALQAEATKHKNAAGFADRLGAHETQKLATRVWKAVSEYAFGERGRPRFKGQARPLHSLEGKNNEAGIRWKADAGCVEWNKQVLPALLPSKHQDAWTHAGLKSRTKYSRVLWRNVRGQRHWYVQLVQEGEAPAKYDFLAQGERVGLDIGPSSIAITGEGVAGLVKFAPSVDQPWAKIRGLQRAQDRSRRATNPDNFDEKGRALKGRRTWKKSERYKARQARLADIERRLAAARKRDHGELANVVLGLGNVIQTESLSYRSFQRNFGRSSKTRGPGMFIQHLKRKAESAGGTVVELNTRTLRMSQYDHVTGQCVKKPLNQRWHRLGDTRAWVQRDIYSAFLARNVEAGVHNPTRLKADWAAQEPVLRRAGLCVNESASGRPPAVPTVAVPSERIARRKRLERGLGPDAVAQARAGQPPVVRL

SEQ ID NO: 1832 - protein, 385 aa, Streptomyces sp.
VKIVMQVKLMPEADQAAALRSTLRTVNEAANWVSGVAFERGVPREYELRKHTYAELKAQGLGAQAAQHVIKKTRDAYTTLKANIKAGNLGKPGSKRRRKAESKPITFRPEAAQPYDDRCLSWQYDQQTVSIWTTAGRLKNIRFVCSPDALKILREHRKGESDLIERDGVFCLIAVCDIPEPQVFEPAGFVGVDLGIVNIATTSTGYRAAGRGLNRHRKRQLDLRKKLQAKGTKSAKRLLKKRSRKEARHTANVNHIISKTIVTTAERTGYGIVLEDLTGIRSRVRLRKDQRASLHSWSFHQLASFVEYKAKRAGVPLVYVDPAYTSQQCSECGHIDRKNRIDQAAFACRSCGALMHADDNASHNLARKGATAWTAGRESRAPATP

SEQ ID NO: 1833 - protein, 363 aa, unknown
  TnpB Polypeptide
VYQDIYNFYIAHNKEIYEKEGKFVSGMDFSKWLNNEYIPSNPDMKWIKEVSSKSIKQAIMNGDTAFKDFFKKIKGFPKFKKKKNQDIKAYFPKNNKTDWTIERHRVKIPTLGWMRLKEFGYIPTDAMVKSGTVSQKADRYYVSILVEEDSIEVYNPTNKGIGIDLGIKEFAICSDGNTFKNINKTYTVRKVEKKLKREQRKLSRKYESFKIRNLNIKEGRATSQNIQKQVVKVQKLHQRLTNIRTDYINKTVSSIIEQKPSYITIEDLSVSNLMKNKHLSKSIASQKFFEFKTKLTSKCNQNNIELRVVDRFYPSSKTCSKCGEIKKDLKLSDRVYKCSCGLTIDRDLNASINLKNAKEYKTA

SEQ ID NO: 1834 - protein, 384 aa, unknown
  TnpB Polypeptide
MKTFEYRLRPTKMQDETLWAVLIGSRHLYNQLLEECITHYTETGKHLNIYEQDKRHGITEHPGLPAVVDTTLKRVHQSFKNFFEGRKEGRRVGFPRFKGANRWNSFAFRDSINHLDGRYFVAGKHLEGRIRAVVHRPLEGTFKFARIVRRTSGWYLQCVCETVSHPLPVLDTAIGLDMGITYLVADGTGQMVRNPKNLQKSAGRLTQAQRVLCRRQKGSHRRKKAGRCVARIHETITNQRKDTLHKVSRHYVNGYQTIAIENLHPANMVQNHSLARAISDASWGTLRWYLTYKAEDAGREIVAVPPHYTSQRCSRCREHVQKSLSVRTHVCPFCGYVADRDVNAAVNILQAAQKGSDGAVGDQGKEVGFGRWVSPGKNREAAPL

SEQ ID NO: 1835 - protein, 396 aa, Frankia sp.
MSRYRLSPTPGQGVGLEEHCGHARYVWNLAVEQRSWWTRYRGKPPTHLERCRQLTDARAGFDWLKAGSQTIQQQALRDFDQAVRNFFGGSHRRPTFRKRGQSEGFQVVGKNARVEKLNRRWSRCWVPKTGWVKFRVSRKVPDVRSYRVTRDRAGRWHVAFAAVPMPVDPPGTGEVVGVDRGVAVSAALSTGELRTCPGPLPTETERLHRWQRRLARATRGSNRRGRIQGRIARLKAREADRRKDWVETISTDLARRFDVIRVEDLRVKNMTRSARGTVEKPGKQVRQKAGLNRAILANGWGLFVRRLEQKAPGRVERIPAALTSQRCSTCGQVASGNRESQAVFRCVACGHTANADVNAARNIAAGRAVTARGGTGSPEPVNREPQHRAPPHLTGV

SEQ ID NO: 1836 - protein, 369 aa, unknown
  TnpB Polypeptide
MKTYKYKFGHQSNCIRLGNLLDDMWQVHEYFHKWQRQRYKEGLPYANYNAMAAHLTECKRTTHPDWQALPSQALQEELRRIDAAYVRFFKKLGGKPHIKPRHKFKSFTLKHSGWKLKENRITITLRKWCNGNQWKRDPVPYTFFKHREFHGNIRHITIKRDACGDYWLCITTDFQDAAPLPTTGENVGADFGMKDAYLTLSTGEKIQHPQPLKSNLKKLRSLNKSLSRKQKGSNGWWRCVRDLARLYRKVSNQRLDFQWKLAAALCRRFDSIVLETLNLDGMKRLWGRKVSDLAFYEFVEILRYKCQKHKRLFVQISQWTATTKPCSTCGFHNEALTLSDRQWTCLECGSYHDRDINAAINILQAGIAA

SEQ ID NO: 1837 - protein, 151 aa, Clostridioides sp.
  misc_feature (96)..(135): Xaa can be any naturally occurring amino acid
MYPNKNDKETFTYKQCSSDLTNLKKELKWLKEPDKFSLQNALKDLDNAYKKFFKEKAGFPKFKSKKINRFSYKTNFTNGNIMYFGQHIKLPKLGMXXXXXXXXXXXXXXXXXXXXXXXXXXXXXXXXXXXXXXXXNLLNYKENYREKQSVV

SEQ ID NO: 1838 - protein, 419 aa, unknown
  TnpB Polypeptide
MEYSYKFRLYPTDAQRNQIARNFGCCRYVFNHFLAQRQEHYKETGKAPTRFQQDKALTSMKQELQWLKEADSTSLQAALQDLDAAFQNFFRRVKRGEKPGYPRFKSRKDRRQSYKSKCVGTNIKVLEKAVRLPKLGLVKCRVSNEVRGRILSATVSCSPSGKYFVALCCTDVDIETLPSTGAVVGLDMGLKSFAVTSNGVEYPNHKFLTKSIRKLARLQRQLSRKSKGSKRREKVRLKVARLQEHISNQRQDTLHKLSTQLVQGYDLISIEDLAPKNMVKNHKLARSISDASWGEFRRQLEYKAAWYGKQLVTVDRFFPSSQLCSVCGAQWPGTKDLSVREWTCPSCGAAHNRDTNAAKNILNEGLRLLAQQKHTVGRDTPKPIRSGRPYKSSHVAGCGQRTENPPALAVGSVKFATKS

SEQ ID NO: 1839 - protein, 338 aa, unknown
  TnpB Polypeptide
LGNQAVYIQRQKIFAKEAWLNRTGLDQAVRSGNTELYRSMPSAASAQRQTQIVHEQFVSWHAAKTAYLADPSKFKAMPRLPGYSKKYRTFVVGRNGYKVVEGNLILTDKNDVGFPPLKIRSCDNQPFNAKKKETIIGDVRIVPHGNAFFIELTYEVTCSTAVLLDGNRACLVDIGLRNIVTLASTASGIRPVVVKGGILKSINAMYNKDVASLQSHGKKTHRRSKVMKRTCRIDDKMHKVSRFVVQFCLRNDLGTIIIGHNEDWKQNINLGRVNNQNFVNIPFNRLIHMICYKAEEYGIKGSSSKALFNFAPRELLSITQAKFLCKRLFRVLLKSFPR

SEQ ID NO: 1840 - protein, 701 aa, Nonomuraea sp.
VVEATGEVVAGPVLAERVAWLTALAQALTAGIVAERWNARDLDLLAAGVGVDERVLPVKGWMAIRRLGWGCAAGIPGGGIIGGGVSGGGVYVSDRVRRCAEEQAARMLRAALHRRGVVAAILAAWPADPRRRSEVEWKALRAALPQGVTAAEIRNRTRQIRAALEREGALPGDITEVEEPPRVAAQAVLAAADKQLVTLTRTGDTGALLRVQLPLNASPASREDWAWHAITFTLPPTVSDEAKLCTPTVRITDGKVRIDLPFQTPIPSAPASGHTVALGLDWGVNTLFTGTIARLREGRVCADGRMLRYDATVISAKLHRLRGQREHLAAKRDHCAALLSGLGTADACDAPDVCDGSDARRGALERRHQVLAVEHERVCARIRRLDHALSWSAARWAVDQALALGAGVIYLEDLATLEARGVRRGNAALSGQVRGTVIEAIRHLAAKDGIAVVTVPARGTSHSCPRCGDGTSVLRHVPAPDRLGERGWKWAYCPACGLSCDRDHAAAERIAARGLLAQSHTRTEAATGVRSITVVAEGNVARARRRTRPTRAARRARRTRTDVHPRPPARARNKTRPTPKRRQVSRPASRPATTSRTTSSRVPDRRTVPAPAPDAPGTGQRPAGQAPQASHPPAGRTGPARDPRHRTGFHRVTATPVLPLGAYGDGPPRATPARNAGNPQANTENRRRFRTPATAHSGAPR

SEQ ID NO: 1841 - protein, 400 aa, unknown
  TnpB Polypeptide
MQTVRIYRLKDLDRRTRERLKAAQLEAARVWRYCLQRHQSARLARTLWPDRDDLQRETKGGQYALHSQSIQLVCQQFLANVETISHLRSSNQRHRYPYHSKKYRTVSWPAQAVCRCGKRLILPMGRGRKSFSFRLSDLPGHVGAVSLVWRGGYELHLVVPAAPEGERSAPSEQAAQATADLGEIHQAAVTTSTGKGLIVTGRGMRTLKRQHKQLLGQISRLQARCSKGSKRWRRLQYAKERESGKSKRRVRDLRHKGTRQVVDFCRAERVQTLYVGDPQGVRNENKGRHHNQRMAQWEFGKDKQYLQQKCERVGIVCFSGSERGTSSHCPRCGWRKKPRGRNWTCRRCGFRGHRDIVGSMNMHPIAFGSRIAYPSSLTYRRPGPLRDRRQDKELPLSGTS

SEQ ID NO: 1842 - protein, 516 aa, Clostridium sp.
MLKQFCFSNGYCISKVFSDVASGISFEKRREFFNMLDDIISGKVERVVITYKDRLSRVGFELFYHLLKKYNCEIVVMSEIGSKKLVSEEIFEEIVSLLHCYSMKLYSKRKEQLDYLKDINAKVDKFNELRKANFEKARVKTLKDNKEFKKKLKTIKYFDKDNKYPCYDFIEFLVKDDIDYKSLMAQVSQQILKLLDKNWLSFFEGVKKWSKDKTGFSGRPKLPKYLNKNGKNIVIFTNQNCKQENNKIIFPTCFNQYELNTSIGDNKLQQVRVLPRNKYFVLEVVYSMSKPKLKEDNNKHISIDIGLDNLATITNNCNITPIIISGRKLKSINKYYNKQLSHYREIAKRMNNLDWTNRMNRLTIKRNNMVMDLIHKASKSVIDYAFSCGVNTIIIGNNKDWKRESSMSKKVNQSFVGIPHQLFIEKIQYKAENIGIKVIVIEESYTSGTSFLDNEEPIKENYNKSRRVYRGLFISNTGRKINSDINGSLQIMKKVFPNVIDHGIEDFGLNPIRVGL

SEQ ID NO: 1843 - protein, 403 aa, unknown
  TnpB Polypeptide
MIVNRVEQHRIKKTDPMWKIVDDLCFKSKNVYNCANYIIRQEFISNHNYISSNDLDKIMQKQECYSILGSQAAQKTLQLLDKNWKSFFVAIKDWGKHPEKYFGRPRIPKYKNVQNGRNILMLKNIQCKIKDGYLTFSWKPFRKFRIPTKVKGKLMQVRFVPKSGYYTMEIVYQINAPEITIESKNIVGIDIGIDNFATISNNIGTTPIIINGRIVKSFNQYYNKKKAELQADLKVRHKMDWSNKLQKLTDKRNNKISNFLHNASKIIIDWCVFYEIDTIVIGKNDNWKQESKMIKKVNQNFVQIPHALFIDKLKYKAENKGIKVICTEESYTSGTSFLDSELPIKENYNKGRRIKRGLFKSNTGKLINADLNGAYQIIKKVFPNVFTNGIEGAGSHPIRLNII

SEQ ID NO: 1844 - protein, 418 aa, Kitasatospora sp.
VHLRYSYRLYPTAGQRQALARTFGCARVVYNDALAARKQARKDGLPYPRSADLQKLVITGAKRTAERAWLASVGVDPLIQSLRDLDTAYRNFFDSVSGKRAGRQVGLPRFKSKRDNRQSLRFTRNGFRIRGNGKLNLAKIGDVRVKWSRALPADPSSVTVVLDPSGRYHASFVVDVEPQHLAPLDTEVGIDLGLTTYAVLSDGTVIDNPRFLRKAEKKLKAAQRALSRKARGSKNRAKARRKVAKAHAKVADTRMDWAQKQTTRIIRETQAVYLEDLNVRGLARTRLAKSVHDAGWSTFRRLLEEKAARYGRHVGIIGRYEPTSQVCSTCGVLDGPKPLSVRTWTCGACGTCHDRDLNAARNILAAGRADRLNACGGPVRPGVAIPRRAHPVETGTHRNADRTGRKPRAAGAAGIPVL

SEQ ID NO: 1845 - protein, 422 aa, Chroococcidiopsis sp.
MRKAYQYQLLPTTEQKTTMERWLDMLRLQYNWLLAERFRWWEENRCDINACPLICHLPELRDNPDYYSQKRSVVPLKSNRPWYKEIYSQVLQDCVTRVKLAFDRFVKGDSKGNRSGRPRFKGKNRYRSLTYPQIDISDIKNNRIHLSKIGWIKLVLHRPIPDGFKAKTAIVTKKSDGWYVTITLVAESVPTSSVEIIPTDDNSIALDLGLEKFAALDTGEFVDIPQHFRHSEEKLAKLQRKVTARKKGSRARKLLNRRVGRLHQRIARARKQFHFETAKQILQKAPVVFVEDLAVKNMSKRCKPKQDEQSNYVANGQSRKSGLNKSIADAGWAQFIEILSFKAESAGGKVVKVNPKNTSQVCSNCLNIVPKTLKERWHDCNRCNLSIDRDTNSAILIKKVGLGVSLTIKRSRVKPREAHAVA

SEQ ID NO: 1846 - protein, 406 aa, Dolichospermum sp.
MQLTERHIIKKTHKHYREIDRLCFLSKNLYNVANYLIRQSFFKTGEILNYNQTQKLLQSQFDYKNLPAKVSQQILMILDKNWKAFFQAQKAYQENPSKFLGKPKLPKYKHKENGRNLLVYTIQALSKPFLCKGLIKLSQTEIVFPTQAKKIAQVRIIPKLNHYVIEVIYHQEEKPKQVDNKRIASIDLGLNNLATVTFNQAGLIPFLPFLINGRPLKSINHFFNKKKAELQAILKTTTSKRLQNLCIKRNFKVDDYLHKASRYLINKLVELNIGTLVIGKNEGWKQELNIGSKNNQNFTQIPHTRFIEQLTYKAELEGISVIITEESYTSKSSFLDQDVLPTYKKGENHSFSGKRIKRGLYKSAQGILVNADVNGSLNILRKAIPNAFADGIKGIVVSPVKVTLSK

SEQ ID NO: 1847 - protein, 408 aa, unknown
  TnpB Polypeptide
MLIYEYKLDGNQQQYAAIDEAIRVVQFIRNKCLRKWMDGRGVSKNDLQCYCAVLAQEYSFAARLNSQARQASADRAWTAIARFYENYKNHKPGKKGYPRFQHDNRSVEYKTTGWKLEPGGKHITFTDGCGIGRLRLVGNKKQAVATFPLKQLKRVRIVKRADGYYGQFAVQAVRKIEHLSTGEAIGIDVGLKSYYTDSDGNTVTNPRYSRKAEKRLKRLHRRLSRKKKGSANRKKASKHVARAYLKVSRQREDFARKTASALVSSHDFLAYEDLQIRNLVRNRHLAKSISDASWGTFLQWVKYYATVHTIPVIAVPPQFTSQDCSACGTRVKKSLSVRTHICPTCGIVLDRDENAALNILHAGLCIHFLMVFAGTLGHRETSEDSENASGQFASTHRSPRRKTGKRAG

SEQ ID NO: 1848 - protein, 418 aa, unknown
  TnpB Polypeptide
MKVNRVEKHRIKKSDKFYRLIDELAIKSKNLYNEGNYLIRQTYFESVKLKEEGLRDTAEWIRFNELCKRFKTEEVFKTYGSAAGQATLRRLDLTWKSFFASVKDYGKHPEKYLGRPKMPGYLDKDNGRYVVVVNNQVSKILNGVVYFSWKPLTPLNGFFKTNIPEDAKLMHIRFVPKNKEYNMEIVYEIDVPDTEHIIPERIASIDLGVNNLLTITTNCGLEPVIINGKPLKSINQYYNKTISQMQSDLKNRNNQDYSNRMRKLTEKRNRKVADYTNKATKWFVNYCKINKIDTVICGYSKNWKQGLDLGNVENQKIAYIPMLDIVKKLSYKLENEGILFKEQQEEYSSGTSFLDKEEVNAKNYNIERRIHRGLFISDTGIPINADVNSSYQIMLTAYPGAIKDIENTPIKPIIINLQ

SEQ ID NO: 1849 - protein, 375 aa, Klebsiella sp.
MLILKAYKFRLEPTEEQSQRLRQLCGCARSVWNHGLEETTRILESGGKLPSAFELNRMLTVWKKTPELAYLQEAYTDNLQQKLKDLHGAWKRCFDKKLAAKKPVWKRKNDGRDSIRFVNFEKYCRLENRRVKLPSGLGWIKFRQSQDVNGKIKNATISQSAGKWYVSFQVEIETDKPKHESTSMVGLDAGVTKLATLSDGTVYQPVNSFKASQRKLAVLQRQLSRKVKFSANWQKQKQKIQRQHLHIANLRRDYLHKITTTISNNHAMIVIEDLKVSNMSKSAKGTAERHGRNVRAKSGLNRSILDQAGTKCAVSLSISSSGVEVRFWRYLRHTPASVVPAVVIQRKRTVCHKVNSSVKYVATPRTPISTVHVIF

SEQ ID NO: 1850 - protein, 417 aa, Methanosarcina sp.
MHLTKKIKINPTEEQVDVLWQLSEQCRCLYNFALAERKDAWKTEQRSVKYVEQQNQLPALKEKFPQYNMVYSKVLQSVLKKLDANYKSFFSLWKNGDKSARSPKFRSGKYFMTLVYNQSGFKINNGKLSFSHKVNEIPLSFEIGNAFDLLEIKQIEIYNDDPYKGRGKFFVSITYEEIPITEYIDNDLYQAIDLGITKIVTAVNTQGKFFEVKTPRADQYWNTKIDTIKSRRDHCKKGSRKWIRLHRTYRKMEAKKSNQIKDFQHKLSKTMIENTRANTVIVGDLNLKSMAQSKKVTGKRKRSQNRSTQNQGYLSRFTEFLTYKAELAGKKVIRIDESYTSKECCVCGKRHDMPLWERTMNCDCGNVIDRDRNSAINIMKRFLSQNALWTSYQKFSDNLRQTGLQMDTCITANIQMT

SEQ ID NO: 1851 - protein, 385 aa, unknown
  TnpB Polypeptide
MPRKSKTPCEDDRITQFSTIKVRLYPDTTQAELFEKTFGCCRYIWNQMLSDQQRFYAETGAHFIPTPAKYKNGAPFLKEVDNQALIQEHNKLSQAFRVFFKSPESFGYPNFKRKKDDRDSFTACNHVFESGPTIYTTRDGIRMTKAGIVRAKFHRRPQAWWKLKRITVEKTRTGKYYCYILYEHTAKPAEPVVPTPETTIALKYSMRHFYVTDNGVKADPPRWLKQSQEKLARIQKKLNRMEPGSRNYQEAVQKYRLLHERVANQRRDFLHKESSRIANGWDAVCMRADEMQNLSKLTTRGNVMESGFGTFREMLRYKLERQGKPLILVDRYAATTRTCSVCGQVQSEVSRKLRTWSCTKCGTAHYREVNAAKNIKKEGLARLSA

SEQ ID NO: 1852 - protein, 373 aa, Bacillus sp.
MLVNKAYKFRIYPNKEQTTLINKTIGCSRFVFNHFLSLWNNTYKETGKGLTYGACSSQLPAMKKELVWLKEVDSIAIQSSVRNLADAYTRFFKKQNAAPCFKSKKNNVQSYTTKQTNENIAIMDNKIKLPKLGLVRFAKSREVDGRILNATVRRNPSGKYFVSLLVETEVEELPKYGFYVGVDVGLKDFAILSNGVRYENQKFFRTLEEKLAKAQRILSRRTKGSSNWNKQRIKVAKIHEHITNARKDYLDKVSTEIIKNHDVIGIENLQVSNMLKNHKLAKAISEVSWSQFRTMLEYKAKWYGKQVIAVSKTFASSQLCSSCGYQNKDVKNLNLREWDCPACKIHHDRDINASINLKNEAIRILTVGTTEIA

SEQ ID NO: 1853 - protein, 381 aa, unknown
  TnpB Polypeptide
MPVQKLNRAIMYRAYPTPEQQVLLSKTFGCVRFVWNHMLMDAQRFLEEAGAFFIPTPAKYKTEFSFLKEVDSLALANAQLDLKNANKRHREDPKAVGSPRLKSKRKSKMSYTTNNQKMRRKDGAIKNTIYVVGNLVHLPKIGDVKINKHREPEANWVLKGATVSCTRSGKYFVSLLYEFEKDIQPIKPTKETSLGLDYSSHDFYVNSNGDVANYPRFYRRSEAKLARAQRRLSRMQFGSHHYDKQLYKVRVLQEHIANQRKNFCHTVSTAIAKQYDAVFVEDINLRGLAGSLKLGKSTNDNGFGMFRTMLEYKLTSQGKTFAKIDKWYPSSKTCSVCGFIKDDLTLADRVWTCSACGTTHNRDHNAAINIRNVGLLGLYPA

SEQ ID NO: 1854 - protein, 219 aa, unknown
  TnpB Polypeptide
VRQPPTTVTVPERRSPASVASISGTIGRIAAILLSRTARTTRRGRERVGYITVSRQKDIEAGGYRQVEKRAVLKAGILVRKAHRTITNQRKDTQHKAARRIVQTYGTVAVEGLNIAGMVQNHSLAKSISDAAWGQFISILRSKAASAWVVVVTVNPSGTSQMCSGCEAKPERPKMLTDRWHECAACGLSIQRDVNAARNIFTRAGLARCAAGAQESHAL

SEQ ID NO: 1855 - protein, 267 aa, Caldicellulosiruptor sp.
MRYAYKRLLEGHKRDELKRELQKVFALNSRYVDDAIMKAESVIKSCKKKGENPRKVIFGSKELFEKLKRRHISGRAYKKLQHQWQEKRKGNLYSRGDKSKKGNLNTRIEIDENATLLRINVGKKQYVYARIQAGWKIKNKTYIDRNQLLQAMSTSGKPLAKEKQKAIVIESLSIQDRGRRGDFSGRKSRRIRHYFGYRSLLEKVKLLAKREGIEVIEVDPAYTSVIGMLKYAPQYMVSKDIAAAYVIARRGLGLRERIPHKLYVASW

SEQ ID NO: 1856 - protein, 355 aa, Caldicellulosiruptor sp.
MRYAYKRLLEGHKRDELKRELQGIFNLNSRYVDDAIMKAKSILTSCKERGENPEKVIFGGRQLFEKLRRRHINGKVYRKLQRKWQEKRKGNLYSRGDRSKKGNLNTRIETGEDCARLRISVGERDYVYATIQPGWKMKDGTYIDRNQLLEAISISGQPYSAELKLKSGVVYAYFTVEEEFPKAKITKVNGVIGIDTNAYPKNVAWVETDEHGQLLGYGRIPLEKLESGSSSKREYYRWQYAHMIVQMAKEKQKAIVIESLSIQDRGRRGDFSGRKSRRIRHYFGSRSLLEKVKLLAKREGIEVIEVDPAYTSVIGMLKYAPQYMVSKDIAAGYVIARRGLGLRERIPHKLYAASW

SEQ ID NO: 1857 - protein, 412 aa, Aeromonas sp.
MLRGVQCRLYPTAEQREFFARSFGCVRFVYNEALAYCQAEREAQRKHPNAIDLQKRLVSLKGQYPWLADVDSQALKESCRDLDKAFAAFFRRVKAGQTPGYPRFKSRNDRANSYTATQRLHADFCDRRIKLPKCGWVKCRGLRKFDGKIKSITVRQSASGRYTASLLIEDGHAEPLPTALPAGVAVTGIDMGCKTEGDRQQLATLSTGQVIMMPAYLKGALKRLARAQRKLARKTKGSNNRRKQRQLVARLHERVANQRRDFLHQTTHRLTRENQALAVEDLNVKGMMASPRPKQDEQGGYLPNGRAAKRGLARSLTNVGLGEFARQLRYKALWRGVALLECGRFEPSSKTCSGCGHRLAELPLAVRAWVCPECGAEHDRDVNAAINIRNFAIMAVGAGSPELKLPERGTAA

SEQ ID NO: 1858 - protein, 387 aa, unknown
  TnpB Polypeptide
LYPNPQQQKRLQNNLDVCRWVYNKFVEHVQNGFVSRNDLNYMLTELKQQESWLYNYHAKMLQMISTKLDAAQKSIIELNKKGYKVGKIGFVKYDQYRTFTYNQSGYKFEKHGSVNLLWLSKIGYIEIRKHREINGHIKQVIVSKSKSGKWHTCVTCDVDVVLPEIHLSESVGIDVGIKNFVYDSDGFVTPNPLNLKKMLKPLARIQRKIARRKIGSQNRKKAIKFYQIIHERIRNRRKDFLHKLSTKYAKKYDVVFVERLQKLNMVKNHFLVRKILDSGWGTFTNMLDYKCMLIEVTAKNTTVDCSRCGNAVPKSLAVRIHKCNICGLMLDRDHNASINILKKGLEICGADLNSNCLNIPQELREVTSVEILRVSRKQKNTIGFIRR

SEQ ID NO: 1859 - protein, 432 aa, Mycobacterium sp.
LSSCARTGSRWTSPRPRRLPSRNTPAPHAGPTTTPWPPNSPHSTSATPPSPWRWTPVRTELTQPSGRRKCLANPTFRRRSTRRRATTAAARTDSALVAHRQHLHLPIRLRRRRPRLEELARLTHRKTERPPGRPASVQDQTPQPRQLPHSPQRQEPPQHPTRHRLPKNHHPPPRLLARALIDQTASPRSRPRSRHPVSDDRPRRPPLVRQHPHQATSHRGHLHAPSTPSRHRRRRPRVHTLAALSTGETIDNPRHLDAARTRLTKAQRALSRTQKGSNRRRRAARLVGRRHHEVAERRATTLHALTKTLATQWSTIAIEDLNVAGMTRSARGTVDHPRPKRPGENRTQPRHSRCRPPENCAANSSTRRTGTAAASRSSAGSFRPVERVQRAERKPSSHSLIAYTDALHADSPQTETSMQPSTSPPRRPSPSA

SEQ ID NO: 1860 - protein, 229 aa, unknown
  TnpB Polypeptide
LPGRIINATISECSNGKYYVSVLVKVNHIVPKIISRRIVGIDLGIKDVVITSDGEKIKNEKIIEKYEKRIKRKQRELARREKGSGNYYKTKKKLAILFQKLKNARKYFIHQITKKLVLENDIIVSETLKVKKMLEEKKYSKFLSDVSLSKICSLLKYKANYYGKRYIQIDPYYPSSQECSRCGYKNEKVKDLTVRDWICPECGSYHDSDINASQNILFEGIKKYTKELI

SEQ ID NO: 1861 - protein, 404 aa, Beggiatoa sp.
MKVTRIIKSKNLNKGKYEQLEVQAKQLGNIRSLVWHDFGSINGVSAKSDRKIRDQWLKEKRQFKVSANAWKETLRDSFADIKAYREAAKEKVRKVIYRQITDGNEKTKFYKFLSSEKWPTDNYLRCLMRKHWKHGRNHTYNQIVVRSDNYTTFQLGGQAWIKIPSLQKGKRIPIPLNTNIAPSGTLRLILVDGIVEIHYTIDIQISKNCGARTVGIDKGYTEVFIDSDGKEYGNGLGKILTIQSDNLKKKYQKRNKIKAIISKKQDKKQKIIENNLGRKKLNRQSVKHKSQVKNVVYQSVHQLVDKAEFIAAEDLTSPIASKKFGKNVTRRLSAWTKGVIATALDTVSRRRCSSVILVNSAYTSQMDSRYGILLGKRSGDSLFQAKVSEKLLPGILFRRGGVTS

SEQ ID NO: 1862 - protein, 374 aa, unknown
  TnpB Polypeptide
MVKSLKYRLRPTKKQEQILLAHIDQCRILYNQLLCARIQAWKNENQSLSQYDQTKTIPLLKQQHAAFKQVYSQVLQQVSQRVDLAFKGFFRRLKEKSETGAKAGFPRYKSENRYDSITYPQFANGCRLDDKGFRLGSIGCIRIVQHRSLEGIPKSCTITRTATGKWFVSISCDIGDTPEKKDAGSAIGIDVGLNSFAVTSDGQKIENQRFFRKEEKSLARAQRKWDKVKKRPKTDAVREKRRKVIGRVHERIRNKRQNFAHQESRKMVNRHSFIAIEKLDVKEMQKNKRLAKSIADVAWSLFRHCLEYKAEEAGIGFKAVKPDYTSQDCSACGHREKKTLSERVHHCKACGYKTDRDHNAAINILTLGLQRQAD

SEQ ID NO: 1863 - protein, 456 aa, Escherichia sp.
VKRLQAFKFQLRPGGQQECEMRRFAGACRFVFNRALALQNENHEAGNKYIPYGKMASWLVEWKNATETQWLKDAPSQPLQQSLKDLERAYKNFFQKRAAFPRFKKRGQNDAFRYPQGVKLDQENSRIFLPKLGWMRYRNSRQVTGVVKNVTVSQSCGKWYISIQTENEVSTPVHPSASMVGLDAGVAKLATLSDGTVFEPVNSFQKNQKTLARLQRQLSRKVKFSNNWQKQKRKIQRLHSRIANIRRDYLHKGPVNSFQKNQKTLARLQRQLSRKVKFSNNWQKQKCKIQRLHSRIANIRRDYLHKVTTTVSKNHAMIVIEDLKVSNMSKSAAGTVSQPGRNVRAKSGLNRTILDQGWYEMRRQLEYKQLWSGGQVLAVPPAYTSQRCACCGHTAKENRLSQSKFRCQVCGYTANADVNGARNILAAGHAVLACGGMVQSGRPLKQEPTEMIQATA

SEQ ID NO: 1864 - protein, 379 aa, unknown
  TnpB Polypeptide
LELPEDGRLSRPVRLALSLSGGRREVWIKPHRRFWLYWWKALRGEAELASTLTVKRRRGRWYAVFVFDVKPKRKPPAEAAAFDVNENSVAVARVSLLATVDTVVRWNRRYVDPAVYSVRTDFGRLAKRYEAVRNKKLEELKRRYPFAGRDGEERAQNVADAREFRRFAGRLRERRRKEGRVKQVAREVARSPAVIITEDLGKNPQEEMIGVKGKKAKKGVKKVKRKELRHRIKQIPFRKLIRAVEDKAREDGSVVVYVSPYRNSKVCPIHFAPLRDDGDWHTLYCPRGHAVDRDAAAVLNMLWKITPEGAVKGVWWEVKEVRRMLRKGVIPKARWEEESACPVAGHVCRLGFAQVIEGQPPVARNAGPGRLHEPRPRGR

SEQ ID NO: 1865 - protein, 311 aa, unknown
  TnpB Polypeptide
MPLQTITCTFKFELMPDKDQRAALSLNAGCRRFAYNKMLELLNERKEADEHIPNYSEMSHILTGWKKEPDTAFLREAIAQSLQQGIYDLSVAVKNYFRKPDDPAKKGWPRFHEKNVHDGFRLPQPKSSDVDEINGRVNIPKIGWIRYRQSRLMRMKECDGREVEGKLLQIRINKDVDKWYVGFVMEFHLEQPDPNELEIAIDIGIVHAVTTNEGHFFDLDVDRIRELEEKIQKNQRKLSLNANSRKKLVALGKAAPIDKHKPSRTRRELQEKIQKLHRKIRNIRADSARSWRTRSRRSTAACTPRICGCGT

SEQ ID NO: 1866 - protein, 374 aa, unknown
  TnpB Polypeptide
MAYKAIVYRIYPDKEQNIQCQKTFGCCRFVYNRMLTVQQDRYKNGEKHLSKTDANNYCNQTLKPDSPFLREVDKFALTNAIYHLEDGYARFFKRLSKFPKYKSKHRSKKSYTTNFTNGNIEVGDGYVKLPKLGRVKAKTHRLPGEGWKIRSATVTQNRDDTFQVSVLFEYGEEARDAPITEASTVGLDYKSDGLYVSSDGKTCGMPHFFRRSADRLAKAQRKLKHKTVGNHNYNKQQKKVAKIHRHIANQRKDFLHKESTAIAKQYSCVCVEDLNMKAMSNRGFGNGKATMDNGYGMFLDMLEYKLRDRGGRLVKVDRFYPSSQLCSCCGFQNPALKDLSIRRWDCPNCGTANIDRDINAAKNIRQEGLRLLTA

SEQ ID NO: 1867 - protein, 366 aa, unknown
  TnpB Polypeptide
MKQTMLLKLTPTEEQHHALLDTMHAFNKAADYVASVAFAEKSANKFALQKLVYGELRTTYKLAAQLAIRCISKASEAYKRDKSIQPHFRLEGAVTYDERVMSFKGLMTVSLLTISGRVLIPFLVGGYQQARMDAIKGQADLIYRNGTFYLAVTIDAPEPPPNTPDGTLGVDLGIVNLATDSEGETFSGEAVEKNRKRHHALRQRLQKHGTRSAKRHLKKLSGNEARFKRNTNHVISKRIVQKAKSNGQGIAIEELRHIRKRTDSTVRRSQRNRHTSWSFGQLRFFLSYKAALAGVPLHLVNPRNTSRTCHMCGHCAKENRKSQASFVCVQCSFACNADINAAINISRASVMVPIASGRAQVQALAL

SEQ ID NO: 1868 - protein, 398 aa, Sphaerochaeta sp.
MLIAHKIGLDPTNKQATYFARASGVARFAYNWALAEWKRLYEECKRDPDKSKPSQMSLRRHLNAIKREHFPWMLEVTKNAPQMAIMHLGVAFKNFFAGRARFPQFRKKGVHDRFSISNDQFSVKDNRIRIPGLGWVRMHERVRFAGKIMSGTVSRVADRWFVSITVDTPDLSHLPKAENQGAVGVDLGVSSLATLSTGEKVEGPKAHKRLLKRLRRLSRSVSRKKHGSCNREKAKRKLSRLHARISYIRNDALHKVTTDLTKRFHTVCIEDLNVKGMMCNRHLARSVADMGFFEFRRQLEYKANMRGGMIVVVDRFFPSSKRCSACGHKVEELPLSVREWTCPLCGARHDRDVNAAINVRDYAVSSTVSACGEDGSGCVSNRTVKPASAKQEVGSTSV

SEQ ID NO: 1869 - protein, 434 aa, unknown
  TnpB Polypeptide
MEQGKIGYSTTTYRLRLYQKHREWLKMTKDIYNEVVKYYYDILLLEDELWNLTNQQMMRKLELMTIGARYQKEEVKYPFPYGKIPLYFRRAAIHAAIGAGKGFIFRWKLYKEGEIEEIPKKAKEFHASPVFYAGMYRNRTENSIQLKVYNGVKWVWDKYRFHDMGRKLSEDCQMKSPSLKITERGAWLHVPVVTPVEDIRTVNERMKEEQEICVVYFPNNNNLAVCARMDLEGNVREYYLIKGGNKRKNIQKKWQQQLKKSRKSRQSEKRRENIKEEQKQEGKENQKYYKKISQLNEHYAHKVSREILNYCMEREIRLIVVPKYENVISFQNKGYLKTDGYDWIGRRIIRDLKYKSYQNGIVTTTIRPYHISDTCHICDGKIKRYNQGHRASKNYYGGQLYICENGHRGNAAKNSAENIGRYFLKHYQKEKDKV

SEQ ID NO: 1870 - protein, 394 aa, unknown
  TnpB Polypeptide
VKIRRASKTRFYPTVKQQLKHKQHFNNTRYVYNYYLDLKTKQYKETKKSYSFKETAKDLTNHKKEKPWLNNSSRQAYTNKLKDLDTAFKNFFKKKAKYPKFKSKHHKQSYRISYPFFKIKPEGIWIIKIGLICCNLNLPKQIKPLSITISKDTLNRYYISCSYETEISEPIIDATKPIVGCDYGLRTFMTTWNGINEAKIQHPLPYKKSEKRLKRLSRRLSRRKKGSRRRRTAKHSLAILHAKIASLRNDFLHKLSSRMVRENQAIIIEDLNTKGIITRWGKKASDQGWAEFIRQLTYKGTWYGCNIIKTPRFYPSSKTCSNCGVINDGLTLKDRSWTCPVCSVDHDRDVNAACNIFNYGRADRKLRTGTGGLVETLVEPSRQKEAEPLSLCFV

SEQ ID NO: 1871 - protein, 367 aa, unknown
  TnpB Polypeptide
MLKAYKYRIYPNNEQKIQIAKTFGCCRFVYNQTLAYRKEVYEKEKKSVSKTDCNNYCNRQLKKEYEWLKEVDKFALTNAIYNMDAAYQKFFKEHAGYPKFKSKHDNHKSYTTNFTNGNIAVDFEDNRVKLPKLKNVKAKLHRNFIGQIKSATISQVPSGKYYVSILVETEHVELPHINQNTGIDLGIKELCITSAGKKYENPKIIRKYEKKLVKLQRQLAHKEKRSQNYYKTKKKIALCHEKITNTRKDYLHKMSHEIISENQVIVSEDLQIKNMVKNHRLAKSISDVSWYELTRQLEYKAKWNGRKYVKIDTFYASSQLCSACGYQNTETKNLSVREWTCPVCGTNHDRDINAAKNILEEGLRQIA

SEQ ID NO: 1872 - protein, 288 aa, Thermococcus sp.
MLDDHLFKLDLEAGVIKLSAPGGRIPLKFYPAKYHEKFKSWRVGQAWLVKTPKGVFINVVFSKEVEVGEPETFVGVDLNENNVTLSLPNGGFVQIITHEREIRTGYFVKRRRIQKKMRAGRKRKELLEKYGERERNRLNDLYHKLANKIVELAEKYGGIALEDLTEIRDSIRYSAEMNGRLHRWSFRKLQSIIEYKAKLRGIKVVFVNPAFTSSLCPICGEKLSPNGCRVLKCKCGFEADRDVVGSWNIRLKALKMWGVSVPPESQPMKLGGWKPARYEINTLHTLYG

SEQ ID NO: 1873 - protein, 417 aa, Thermococcus sp.
MTKVVLTYKMPHNWNVDSFLKEYQKLLQRAIDEIWESTTWKEKRVKHRYSIGDRKHHYYETTRLIPYFPQSNEFKRKLRNELLREWPFAKHYVDSAIKTAYSILKSWRQNYLKGKRRRAKPVVKRKFVRVKTTLMKVEDSTIRITIKPREEYLELDFSKEWFYERIKEWKVGELIIREKDVLLTFSKEVEFSGRIKIGIDSNLTSLDIFHPERGWIRVDLSKLHRIAETYDRIIDGLKSVQRKAPKRIGVLLKKYWTRRRNRIDDYLNKLAVQLSREFPDAVFVFEDLDKFKMLQNGSRKFNRKLSRAIWKKIVGKLSYRVLIEFVNPAYTSSTCPVCGKRLESRNGLVECPNCGFEANRQFVGAFNVWVRGLGVALSGAERDGLLLDEPRGELNVMRPKSVVRVDLNGRRFTHIPP

SEQ ID NO: 1874 - protein, 437 aa, Thermococcus sp.
VKLTRTVILESLPLTGKKFEAIKEIYDEYSEILTFLTNYAVENKVKSHLKLRKIFYKKLKEEHNLPTHYYYTVCQDAVTRAKSFFELKKKGKAKTGKPVIKRVSLWLDDVLWDYKRFPRFNVLKNGRKILIIGFTTKRGRIKLPLKPHKLFFRYLDEGWKVKAGVKLRVVEEERKVLAYFIFEKEFTELEPTERFLSVDYNVDNVSFGTREFLIQVKTDLGRMTRFYSDVRKQVQKTHSVGWKRKLPSKRGRNLLKKFGRRKMNRRVDLQRKLAMRLADLAGKLNATLVLEAVPKNFNQRIVRKRRKSEARLRDTLHNIGMNGFQRFVFEKAVEYGVSVVFVNPAYSSQVCPHCGAFRVKPGDDALRRRVFECPVCGFSMDRDFVAVLNLLGLFPFSPKACEPSAEGSVSPVMLVVEANLLHCKNSLMIISQGLQQK

SEQ ID NO: 1875 - protein, 398 aa, unknown
  TnpB Polypeptide
MEVTRTIRLKINAPPKTFLPTIQAYTKAYNFVCQTAWNNDKSTDGVFLHHQTYKTVREYLSADLAISARVKATESVKSVKKLQVKENARAKRKGREPKIYRCPRSKQMSIRYNDKTFSIWFDKNKLSLQTIDGRLKFPIDLPKYYQQYIIWKRCSAELIVRENKVFLNIVFSKSVTDPVSNGKFIGIDRGVKRIAVTSDKRFFGGGHVKQVARRYQRLRSVLQSKGHSGKRHLVKIKNKENRFRRDINHCIAKQIVSTLKPGTTIVLEDLTNINKNTVKRFKKTDTINRSRQRDRMSWSFYQLELFLSYKSFDRGCLIEFVKAANTSRRCSECGHISADSRQCQSVFRCVSCGYQVNADLNASFNIVHKHLKAICYSDEGLINTPNGSVAANAPGCFG

SEQ ID NO: 1876 - protein, 417 aa, Lachnospiraceae sp.
MLLTCKTTVKLNNNSENIIGHMCYAAYKLWNVCNYERIHHKELALPVNYPDWYYQKKAHKNDLWYKQLPSQTAQEVCKLLDKSWKSFYTLEKTHGIENPKPPRFKHDPLAITYMQNGIAHSSGEEIVRLSLPKQLKLYMADCYDIHDNYLFLKNRIFKDINVIKQIKIYPPAKGECSILIIYETKDTELLADNGKYLSIDLGIHNFFTCYASDTGETFIIGRKYLSICHYYNKEIARVQSQWSSVQFGKGVKYPKTSKHIGRLHQKKNNAIRDYLHKMTRYLVNYCLEKDIHTIVIGDITNIRNGKNFGNITNQKLHALPYKKVYSLLEYKLRQAGVRLVMQNEAYSSQTSPLKPAVSKDNAEAQNRKRRGLYVDGNNQWNADCVGAFNIMRLFLANTDSKVVLADMKEPNVIKVAV

SEQ ID NO: 1877 - protein, 412 aa, unknown
  TnpB Polypeptide
MFRGRKIRLLPTKEQELLFWKSAGTARWAYNYFLAENEAAYRAYLKRGKTGPRRISADDVRKHINNNLKKTTHQWLKEVSNNVMKMAVKKADYAVKKFLKGLAGKPKFKTKHRTKPSFYVNYASLARKNGGFHGERLGFIRTAEPLPRLPKGKRYSDPWISFDGKYWYLGLSYEVPTSEAEELSGDTIGIDLGIKTLATCYVSGTKKKMTFQNINRTKKVRRLEKKLRREQRKQSRKLVANTARHKLIQREGKKIGRKPIWKRPLHECRNLKKQRRKIALIHRCLANIRQNHVHQTTATIVKTKPSRVVLENLNVKGLMKNKHLAKAISGAKFYEFRRQMIYKCEEHGIQVIIADRFYPSSKTCSYCGYLKKDLRLNDRVYVCPACGKSIDRDLNAAINLANYFQSDTACTA

SEQ ID NO: 1878 - protein, 400 aa, unknown
  TnpB Polypeptide
VLAVKSVWQHYVSSSDVLGLLGTFRKMVNESLGIGIANDMSSLRKLSLLSYNQLAQYDSPSYYKLCAISRAAGILAARKKSIRRGHATKTPYTFRQQLVSCYGFKIKNGALDIPISRGKRLSIPLTKHVLEVISQPGVEVRSFTLTTRRLNLCIARDTPRIECASTVGVDRNLRNLTVGNDQQTHYYDLSKCVRIAKTTVRIVASFTRNDDRMRTGLASRYGQRRTARVGHLLHTATKTIVGVAVRRREAIVLENIEGIRSLYRKGNGQGRKYRGRMNGWSFSEAQRQIEYKARWVGLPVIRLSRRETRGSSIACPRCGERLQSDKRLKRKLWCIKCRVVMDRDMVAAVNLSRRGRVRFARSRPPIDEAQGGAGEAMKGNPTPTVIPGVDAPKLTQPTKS

SEQ ID NO: 1879 - protein, 389 aa, Bifidobacterium sp.
MAGIPSAILASTNRIENTEWFAGLKRKKTSGGRTPGFKSRRRGLGFVCWRNASKTGNAIFRKTGRKSGVVVITGMNPTRWRKPGEKLHWRIVIHVRVSQPIRPYTSVHVDWTHRSLVFVNTPSPLPRMGSDMVGIDRGCVHTLASSDRTFRDMPKPSKAELKRLKYLQRRMARQDRVNEARGGRTAKLTSKRRRRTLSEFNTLNSRIIRRRNDWIEKTTTSLAKANILIAMEDLDVKAMTRRPKPRPGPANPGQYLHNGAKAKAGLNRSILSNNWSRLMKRLKDKMDANGGNLVIVPAAYTSQTCHECGHVAKENRESQAVFHCVECGYMANADTNAAMNILDRALRKTGGDTASDVEEPQWRSREASTPSTQAGSSFGVRAVKGIPRL

SEQ ID NO: 1880 - protein, 416 aa, unknown
  TnpB Polypeptide
LKLRKAYKYRLKSKPEQERLFRKHAGCCRFVWNKALALQKQRLDAGEKILRYVDVAKLLTGWKREEETEFLAEAPSHPLQQTLRFLDRAIKEAFDKKNPKRFPRFKKKSRHTDSFRHPASFKLDGDRVFLPKIGWVRFRKSREIEGTPRNVTVSRRGEHWYVSIQTEREIADPVHPSATAVGIDLGITRFATLSDGSFLRPLNSFRKLEQKLAREQRKLARKVKFSANWQKQKSKITRLHIRIADTRNDYLHKASGTISKNYAVVVLEDLQIRNMSASAKGTIEQPGRNVRAKAGLNRAILDQGWYEFRRQLEYKELWLGGRVVAAPPQYTSQTCPDCGHVSADNRRSQACFVCQECGFEENADLVGAMNILAAGFSGREGGQQKGRAVCHNVSLQCSVEGGSRGLKAICREGASI

SEQ ID NO: 1881 - protein, 363 aa, Actinoplanes sp.
MVVSRAVKRAFRYRFYPTAGQPAELARTFGWVRKVDNLARSARTEVWTLRQERVPHNATSALLTSWTKFAKRARCPRFKSRKRSPKSAECTTSAFRYRDGRLIIAKMAASLDIVWSRPLPEGASPSTVTVGQDAAGRWLVSLLRDDVIPESAAIGAVGIDAGLDHLLTLSTGEKISNPRHERADRGRLARAQRSLSCEERGSANRAKARLKVARVHARIADRRRDHPHKLTTRLVRENQTIVIEDPAVRDMVENRGPARAIGDAAWREFHKAEWQGRVVVAADRWCPSSKPCSACGALAETMPLTVREWACRCGIVRDRDVNAARNILAEGLSVSACGGGVRPQRESSRTGQSPVKQETRRVE

SEQ ID NO: 1882 - protein, 521 aa, Actinoplanes sp.
MVVSRAVKRAFRYRFYPTAGQPAELARTFGWVRKVDNLARSARTEVWTLRQERVPHNATSALLTSWTKFAKRARCPRFKSRKRSPKSAECTTSAFRYRDGRLIIAKMAASLDIVWSRPLPEGASPSTVTVGQDAAGRWLVSLLRDDVIPESAAIGAVGIDAGLDHLLTLSTGEKISNPRHERADRGRLARAQRSLSCEERGSANRAKARLKVARVHARIADRRRDHPHKLTTRLVRENQTIVIEDPAVRDMVENRGPARAIGDAAWREFHKAEWQGRVVVAADRWCPSSKPCSACGALAETMPLTVREWACRCGIVRDRDVNAARNILAEGLSVSACGGGVRPQRESSRTGQSPVKQETRRVEEVNSEHSPSARVVSTRGDTTRHPSPTTDPPHLRPVDATPVPCGTSRPATQRSAPAEMAGQRAAGPPGPQGRENPPVRRPRRRVRQGIESVNRAARRGRRRRPRGGGPRRRWWSAGTSAPCCGTGSAGHPGSSGTCAGSPPARRRRWRPRRCRCAVPGW

SEQ ID NO: 1883 - protein, 633 aa, unknown
  TnpB Polypeptide
MGVRFHGSKETRRLLEIEANSRIARLQTEQEDFIFDDNAHEIALSIVNQKLDIPPKFAPREIQKSTKKYSNIADSAYYWLYLASKSTAIREEKVKKMLSLFKIWGYQAVEWILFGRSPRVEKRLYLDWQVRRIFVINLLHSTRRKFDKICPKELKLSSKIPTISEKELEQNIKRCSTSITKEIVSSQQQITDKSYAFMDKLHLLEQNSKITASLLHKWITEVTSSRWKSLKNCANSLSEVLGKPKGSLFSAMRTIVAFALYPKIGQTVSKVISQVLLEEIVPKPFERKRKGKLPIILLMKKNYVVVRPGNSAEMTNLAKIHGRFQIGFTQQGKKRINGTLIFPKRVQTMLKQGAKIKVLQIRSGCAPNYKLNVSVTLEGSPWVFFGLTNVKSLGEKIKCPSNLVIGLDINRLGKYTVALSNEVPLPKIILKLINRYHLLTRKIIPDLNRSLKFSGKRKDNLSYTKLKGELSRVYRRRSNILREIKHQITCFIASTIVRSNCKALCVEDLEFNPIGLKGALAKIFFSFPDEINIYEKAISLASYFLGYKVQLIPVNPSNTSKYHYNCGGRIERTNRFYDNAKCEKCNEMVNTHINAARNIKDKGIKKLSELQSLSAYEGKDFSLQASQLTYSND

SEQ ID NO: 1884 - protein, 433 aa, unknown
  TnpB Polypeptide
MYGCQQALIKADSETLAILEYLCSEANKLTNCGIYYARQMLLKAGHYVSKAELDKKLKTNIHFKAMRSCCSQQVLHGVYESFKSYRKLKKKWDKGKLPNKPQFPKYRKKGGMTVVTYPASRVKQISNRRIRFSLGKQVKAWFGISYFELKAPSNLDFSNVREIRILPRNGCFYVEYVYKCSDRKAKVDTNNALGIDSGLNNWLTCVSTTGKSFIIDGRKVKSQNQWYNKCVAKLKKGKPHAYWDWELADLTEKRNRQMRDAVNKSARFVVNWCLANNVGTIVFGWNKRNKDGVRLGKKNNQEFVQIPTAKLKNRIAQLCEQYGLRFIETEESYTSKASFLDNDFLPNYGGKPEQWKPSGKRTKRGEYKTNKKRSMNADCNGASNILKKVSTQLGLDLTKVSRAVLTLPQRYRLDDLSKLYRSRCENACLQTAS

SEQ ID NO: 1885 - protein, 422 aa, unknown
  TnpB Polypeptide
MEYTNFGNTYEIQVSLDVLMSYVKSQMEMNEVIISYKYRIYPEKVAERKLDEALDTCRWLYNRLLEEISKSKENGVQLKTYDTQNMIPSLKLENPDLRNVYSKVLQMVNYTLWSNIKGLYALKENGRKVGKFRFKGRGWYKTLNYNQSGFKIDQDHSILKLSKIGDVKIKLHRLIDGKIIKKSGNKWYAIVQVEQEPEQQISDAKSVGIDLGLKAFAVDSASYVIENPRFAEKSSDKLKKIQKKLSRAKKGSNNRRKIFAKLNKAYEKINNQRNDFLHKLSRLYVDSYDTICVEDLDVKGLKEKGNCKGLHRNIHDASWSKFLFMLSYKAESAGKKLIKVDPRGTSQKCSCCGSVVKKDLSDRTHECPFCGFVCDRDYNASRNILISGMGLPLEPAEPEPLHRISVMQVLVMNQEVPPFRAG

SEQ ID NO: 1886 - protein, 424 aa, Streptomyces sp.
MAQQVKRAFRYRFYPTDEQAAELSRTFGCVRFVYNTALEERTRAWYGEQRRISYVESSAALTEWKKTEELAFLTEVSSVPLQQVLRHLQTAFGNFFARRAKYPRFKSRKKSRASAEYTRSAFKWRDGKLTLAKMAEALDIRWSRPLPEGAEPSTVTVSRDSAGRWFASLLVEDVIAPAPATNAVVGLDAGITSLVTLSTGEKIANPKHERRDRTRLARAQRELSRKVKGSENREKARRKVARVHARITDRRRDFLHKLTTRLVRENQTVVIEDLTVRNLLKNGRLARAISEASWTELRTMLEYKCAWYGRELVVIDRFFPSSKLCGNCGAVREKLPLNLREWTCDNCGVVHDRDANAARNILAAGLAASACGDGVRPQRESSRTGRSSVKQETQRATAGIPRRQAGEEANAAPDRRTGEGVRAV

SEQ ID NO: 1887 - protein, 485 aa, Sulfobacillus sp.
MLTGYRFRLYPTKAQQQILLRWIGCQRLIYNAKVQEDRYYRAFQRRFVGTAGMTIPVDQEYARFISEETAFLREVPSQVLRNGTVRFRQAYQRFFQKRGGRPKLKKKSGRQAVWLTSELFQFIPLTDKATGEVNGYQLHVGTTKFPVGMIPYVAHRPHAVPASIYIAVEGGQWWLSFAADDSTVAIPGNGADVATERIADDLRHLSAEQLTERTLGGDRGVAKPLMTSDGHIFDLQPVQKARIAKHRRQRQKWQRRAARRKKGSKNQQKAYRKVARYQRYEKNVRQDYAHQTSHRLVVNNAYDLYVFEDLKIAHMTKRPKAKKDVQGRFLPNGRQAKAALHRAILSSAWGEVVAFTRYKALRRGKLVITVPPQSSSQECAVCTFTSPDNRRSQAEFVCQRCGHRDNADHNAACVIAKRGIHTLLSGIPLTKEHKRMRIFRKLGPERSEVTPGEIRVRRLPPMAEPQGSQNQEPPGAIPETPASAS

SEQ ID NO: 1888 - protein, 523 aa, Sulfobacillus sp.
LATAVKTLILPLLDANPGKREALTATETLFTQMVQFYLDILLNQPSFWDKVVEGDIQTGAILSEQIPTNKDILTRLEFATISTATHPIPPHPLSGLPGAEAAPVLFRRAAINRAIGLAKSYRATRRRWETRAAHRRGKAPTIPTVRSMPVTLYQGMSLLVREETRSFLRVKVWNGEVWRFEAYPVAIAPYQRSLLSVAEAEQARMDKVRAEARTLQKAGREEEAQTLLKTEGKQQKGVPVMASGTLFHDGSHWRFHVPLFTPIRVKRAQDQLAENPNLPIATVDLGVNNLAVAVAFQGAKVTGTRFIPGRPHEQRRFRRLKAIAVRQHKTGGRAKRGANHPIWKHLKHREDAVAQQVARQIVDFAQANGSKVIVFEALSHMRSPQRIGWMKRQNVRRSYWMRGKIMHWVRHMALHAGILTVTRDAQFTSQACPRCGHLGARFREATRHRRRGQDVFHCYACGWSGNADLVGALNLRKKWLRIFPAIAKLRHEQKLREAQGQRTNRRRSETVPTMKTGPNRSGV

SEQ ID NO: 1889 - protein, 504 aa, Sulfobacillus sp.
VCEVPLCVTRRQERTLDKRFEAGRQLYNALLGEAKNRLVLVRQSIWYTKAKKSTDKKERQAHFSAARQAHGFSLYALEAVADKMRRTTWLGDHLDSHVAQKLAKRAFEAVYKVALGKAKAVRFKGERGLHSLEGKSNAACIRWRDDRIMWNGLELPMAKGAQRDPVIRHGLASRVKYVRLVRRDVRGKTRYYAQLVCEGVPYVKVNEKGERIHPIGQETVGLDIGPSTIAIVGDTQALLTPFADAVVRDHQKIRRLQRKQDRQRRANNPDCYDDKGRAIKGKRPTQKSRHQLETEAVLRERHRREAAHRKTLHGQLANQVIAIGPHIKTEKLSYKAFQKMYGRSISVRAPKLFLSILTRKAESAGGAVEEFSTYHTALSQACLCGQKHKKRLSERIHACDCGIVMQRDLFSAYLAKHVENECLQVANANEHWPGAEPLLRTAWQQATNQPASGQPGHNRTWPSSFGTYRSQSGSSEKDSLPEHEAQDVVAMVQATVRACESAKV

SEQ ID NO: 1890 - protein, 394 aa, Khelaifiella sp.
LLRAYKTEIHPTEEQKKKINQSIGVCRWLYNQYLAKNQELYKQFKEDLISKKEAMLSANNFDKYINNEVKVLEEYNWINLCGSKARKKAICNAETAYKRFFTGKSKFPRLKKKNKSDVKLYFPKNNLTDWKIERHRINIPTLKWIRIKEFGYIPINSKVVSGTVSKKADRYFVSVIVEEKLTIENKSYTEGIGIDLGLKEFAVISNGIHKKNINKTANVKEIEKKLKREQRKLSRKYESLKLRNKKEKGEATRQNIQKQIVKVQRVHQRLSNIRTDYINKTINEIVKQKPSYITIEDLNVRGMIKNKHLSKAVAQQKFYEFRVKLEYKCKLNEIELRIVDRFYPSSKTCSCCGAYKKDLKLSDRIYKCSNCNASIDRDYNASINLENAKIYEVA

SEQ ID NO: 1891 - protein, 335 aa, Khelaifiella sp.
LSASIKDYKENLHKYKGLPKPPKFKNMEDKKNEIVFTNLAIRFKENILKLSLSKAIQKIFEVDSLNFEVSNKLQSLINWNELQQVRIKWDNSLKQWYLIVIYNKQELEPVNNTNIMAIDLGLDNLATLTFKDGNETYLFCGKKLKGINAFANKKIAYYQGIEMNKYGSDKFKNTKMINSLRRYRNNYVNDYLHKISKNIIDKAIKHKVKKIVIGKIKGIKQDMNCNKSFVQIPVQRLAELIKYKAELQGIEVKFKEESYTSGCSAFDLEPINKKHYDKTRRVVRGLFKSSFGLVNSDVNGSLNILIKEEKCIPEIVETMRDKGSVSSPLRVRVAC

SEQ ID NO: 1892 - protein, 259 aa, Khelaifiella sp.
LLIIKKFTKKKNQDVKAYIPVNSIVKSGTVSQKADRYFVSILVEEAINLDNKPYSEGIGVDLGLKNFAICNNGLSKKNINKTKTVKKAEKKLKREQRKLSRKYESLKLRNKKEKGEATRQNIQKQIVKVQKLHQRLTNIRTDYINKTVNELIKQKPSFITIEDLNVSGMMKNRHLAKAVAGQKFYEFRIKLISKAKQNGIEIRIVDRFYPSSKMCSCCGAYKKDLKLSDRVYKCSCGLSIDRDLNASINLVNAKEYKIA

SEQ ID NO: 1893 - protein, 296 aa, Khelaifiella sp.
  misc_feature (60)..(60): Xaa can be any naturally occurring amino acid
MDFSKWLNNEYIPNNTDKIWIKEVSSKATKQAIMNGEKAFKKFFDGKASFPKFKKKKNQXIVKSGTVSEKSDRYFVSILVEEAINLDNKPYSEGIGVDLGLKNFAICNNGLSKKNINKTKTVKKAEKKLKREQRKLSRKYESLKLRNKKEKGEATRQIIQKQIVKVQKLHQRLTNIRTDYINKTVNELIKQKPSFITIEDLNVSGMMKNRHLAKAVAGQKFYEFRIKLISKAKQNGIEVRIVDRFYPSSKVCSCCGAYKKDLKLSDRVYKCSCGLSIDRDLNASINLANAKEYKIA

SEQ ID NO: 1894 - protein, 476 aa, unknown
  TnpB Polypeptide
LFHFFLHINLSKIILILPLRKVVKTMTRKKAVKVLRKQKKRENMQRFTQKQNIGRACLTAKEFRLLQRMSHSSKALRNVGLYTMKQSYLNHNRMATVKEVDTAMQADTNYWGVQSNSVQAIRRALFTEVKSFFKALEQWKKNPEKFTGRPKFPNYSRSTDKRIIEIYQVPKVDENGYWMIPMNVAFRKKFGSIKIRMPKNLRNKNISYIEIVPKQKGRFFEVHYTYEMHVSQMKKPSTTTSNALSCDLGVDRLVSCVTHTGDAFLIDGKKLKSINQYFNKIICNLQQKNMDNGISKRIVTNKIAALWHKRERQINGYIAQALGLLFKKVKEFDIDTVVVGYNTGWKHKSHMGKKNNQKFVQIPFQKLIAAIENKCVKEGIRFFKQEESYTSKASFLDKDPVPVWSKDDKTQYRFSGKRITRGLYQSKAGTCIHADINGALNILKKSGVVELDENLKVKTQILLEVQKRKAIASRIA

SEQ ID NO: 1895 - protein, 388 aa, unknown
  TnpB Polypeptide
MRAYKYRIYPNTEQIVLLAKTFGCARFLYNRMLSDKIKYYEETKQTLNRTPASYKQEFEWLKEVDSLALCNVQLHLNTAFRNFFRDKRMCFPKFKSRKRNKHSYTTNRVGKNIDLTATRIKLPKLGKVKVVKHRDAPSLDKLKSVTVSRTPAGRYYVAILYDVNVEVKSVTPDTGIGLDFSMSKLFVDSEGKSIDYPKFYRRAELKLKKAQRTLSRRSEGSNRYLKQRYKIAVLHEKVKNQRKDFLHKLSTLTAKKYDMVCVEDLNMKAMSRSLNFGKSVHDNGWGIFLTFLSYKLEDRGKVLVKVDKWYPSSKTCSVCGKVNNNLKLSDREYVCPCGNRMDRDLNAAVNIRREGLIIYKTAGHAVSAQLCCAHESARLRSPHFKESA

SEQ ID NO: 1896 - protein, 295 aa, unknown
  TnpB Polypeptide
VEYKTSGWKLDPDGRHITFTDGCGIGRLKLVGNPNQRLQEFPKNMIKRVRIVRRADGYSCQFCVDTERRVEHVPSGKQLGIDVGLKSFLTDSQGNTVSNPRHYRKAESRLKRLQRRLSRKQKTSASRMKARKQLAKQHLKVQRQREDFARKQANALVSSCDLIAYEDLQIKNMVRNRKLAKSIHDAGWGIFLQWLARYGFLHEIPIIAVPPHYTSQKCSDCDTIVQKSLSIRTHICTGCGVVLDRDQNAALNILSKALKNGTEGHSGTSGHVPQNASGDLTSTASSKRRRGKSDR

SEQ ID NO: 1897 - protein, 406 aa, unknown
  TnpB Polypeptide
VLKAYKFRLYPTVEQSVLLEKHFGACRFIYNHFLALSKKDKALKKSDMQKAIVSLKSDENFLWLNEINSQSLQVASHHLHEAYQRFFKHLGGYPSFKTRHHTHQSFSVPQNVELSDNKVYIPKFKKEGITVIVHRALPVNALIKQATILRHSGKYFISMLIEDYQEIASLCTPQTSIGIDMGLSCYMATSEHKKLDNPKWFIRSQKRLKALQRVVSRKQKNSKNRIKAKQKVSALHTKVSNQRKDFQHKLSHAITKHYDVIGVESLHVKGMVKNRHLSKAISDASWGEFIRQLEYKALWRGKHLVKIDTWFPSSKTCSCCGSVKKSLELSQRTYVCDECNIKLDRDINASINIKNEALKILDMAGIAMTVKSAPISILAQASEIAKDTNNRLYESVEAPTISALAV

SEQ ID NO: 1898 - protein, 397 aa, unknown
  TnpB Polypeptide
LRRAYKFLLRPTVGQARMLAECLEDCRQLYNAALEERREAWRMGKHRVTFYSQDAQLKEIRAADPERYGRWAFTCERAAIRRLDRAFQAFYRRCKAGEKRVGYPRFKGRGWFDSLEWPEGHGAKWDSVPHPTVTRIRLLGVGHVRVHQHRAVRGTIKTVTVKREGSRWYVVLSCDDVPAEPLPATGAVVGIDLGVAHFLTTSDGAHVPNLRPLVTTADRLTAAQQSLARKKRGSNRRHKAVCKVAALHGKVRRTRLDYAHKTALALVRDHDLIVHEALQIANMARRPKPRPAEDGGYEPNGAAAKAGLNRSILDAGWGVFLSILAAKAESAGRMIIAVNARHTSQRCSACGHVAAGNRITQAEFRCLACGHEAHADVNAAINILRSGLDLQEAQDAA

SEQ ID NO: 1899 - protein, 302 aa, Burkholderia sp.
MAGMITVYRYRVKSLDGLLNKQSRAVNYVLNFCYDTQKHALKWSKKWPTGFDLNVLTTGSSKALGIHSGTVNATCEQYAKSRSQRRRPYLRYRSRKSLGWVPLKGRDLKREGDAFRFAGHTLRVFSSRPLPESKIKDGTNFAQDVHGNGFLNIVIEMPDVEARPIRSGVGIDLGLIDFAALSTGEKLPNDPFGRRAITSRSATCRPPDSPEPGWRRASVTHPGRPSETSSVTRRSRTERRSRKSTKAVRPSPVRRAGRKTAGLRIREWTCSGGGVEHDRDTNAALNILRCGRASPVVGIFRL

SEQ ID NO: 1900 - protein, 399 aa, Streptomyces sp.
MATAQVKRAFKYRFYPTDGQAAELSRTFGCVRKVYNMALAARTEAWTRQVRMNYNQTSAMLTVWKKTEELAFLNEVSSVPLQQCLRHLQGAFTNFFGKRAKYPRFKSKKKSRQSAEYTTSGFRFRDGQLTLAKMREPLDVVWSRPLPQGAAPSTVTVSQDAAGRWFVSLLCEDASVKPLPPKEAAVGVDVGLNHLLTLSTGEKIANPRHERKDRARLALAQRRLAKKAKGDGANRREARRRVAKIHARIADRRRDHLHKLTTRLVRENQTIVIEDLSVRNMVKNRSLARAISDASWSEFRALLEYKAQWYGREVITVDRFFPSSRLCSHCGTLARRMPLHIRTWTCESCDTSHDRDVNAAKNLLAAGRAVSACGAGVRPQRSSPGGQSATKQEVSRREP

SEQ ID NO: 1901 - protein, 397 aa, unknown
  TnpB Polypeptide
MIIRQGFKFRLDVSPDQDARLRVLVGHARYVWNQALARCNDALEKGERVPRYTEMAGWITAWKRESDTEWLKEAYTDNLQQKLRDLDSAWQRCFNPKLDAEKPCFKKKGRNRDSIRFVNFPKYCRLEGRRVKLPAGLGWIKFRQSRPILGEIKNCSVSYHAGHWHISFQTEREVSAPVHPKPDSWIGIDLGVARFATLSDGSFTEPLNSFKRHQLALAKAQRQLSRKVKFSSNWRKAKARVQRLQRRIAHVRRDYLHKTSTRISQNHAMIVIEDLQVKNMSASARGTAEAPGKNVRQKTGLNRSILDQGWYEFRRQLEYKAGWAGGEVLAVPAHHTSQTCPSCGHVSRENRTTQAKFACIECGYENNADVVGALNILARGIEARAKGGISPGSPVSI

SEQ ID NO: 1902 - protein, 500 aa, unknown
  TnpB Polypeptide
MKRTNTFAVRPLSNTGEQLLRNLLDASAALWNEVNYQRLMRYNDEDGYEDEDVWDADTGRLEGKYKATLGTSTAQQLIRKNSEAWRGFFKNKQKFHDPEDPSITEHPHPPGFWGNQDDGRKLHTVIRNTSYTVEWGERSRLEILVGSELKDRYDHTGRLRLEIVGNPNWPEYEKQGRLDLWYDETDSTFRASQPVTISSDKQATPLADHKAALDIGANNLVACTTTTGEQYLYEGRKLFQRFRETTREIARLQSKLPERQSLSESSETDGFAGIAELCSAQSRKTESSERLEQGRYSSKRIRRLYRKRTRRRNHAQDALCRDLIGRLYDEGVDTVYIGGLTDVLETHWSVETNAKTHNFWAFKQFTERLACTAEEYGISVKVRSEAWTSQECPQCGGTDRTTRHQDTLTCPCGFEGHADLTASETFLKRHQNSPSSDRRTRHNVSRQRHTNKAVRPMARPVRLEWDSHEWLEILHSHRPKQQRTDPSTVHRDGNVASGES

SEQ ID NO: 1903 - protein, 322 aa, Lachnospiraceae sp.
LLWLDIYCNNYCNRELKKAYEWLKEVDKFALTNAIYNMDSAYQKFFKEHAGYPKFKSKHSNRKSYTTNFTNGNITVDFDRGRIKLPKLKRVKIKLHRKFSGRIKTATISKVPSGKYYVSVLVETEHSPLVKTNGQIGLDLGIKDLCITSDGKQYENPKTIKKYEKKLTRLQRQLANKTKGSRNYQKKRKQIALCHEKIANTRKDYLHKISSEIINENQVIVSENLQIKNMVKNHNLAKTISDVSWYELTRQLEYKSKWNGRNYIKIDTFYASSQLCFSCGYKNTNVKDLKVRDWMCPFCNTKHDRDINAAKNILAEGLRQVV

SEQ ID NO: 1904 - protein, 388 aa, unknown
  TnpB Polypeptide
MMTLLKSFKTEIDPTLEQKQKIHQTIGTCRFVYNFYLSHNKEVYEAEKKFVSGMDFQKWLNNVYLKEHPEFSWIKDVSSKSVKQSIMNADKAFRSFFKHQTSFPKFKKKGTSDVKMYFVKTDAKAVIYCERHRIKIPTLGWVRLKEKGYLPTTKSGMVIKSGTVSMKAGRYYASVVVEIPDSPSVKNNENEGIGIDLGLKDLAIVSDGKAYKNINKSAKIKKLEKRLRREQRSLSRKLENTKKGESTQKNIQKQKLKVQKLHQRMDNIRTDYINKTVTEIVKTKPSYITVEDLNVTGMMKNKHLSKAVASQKFYEFRVKLEAKCKERGIELRIADRWYPSSKMCHCCGSIKKDLKLSDRVFRCQCGYVENRDLNASLNLRDATTYTIA

SEQ ID NO: 1905 - protein, 425 aa, Actinomadura sp.
LVVQVKLLPSPVQATALAATLHICNAAANRVSAQAYQQKVFSRAGLQKLVYAELKASGLSAQPALHVIRKTADAYTTLHALIDAGLLGPERSRRRRRATSKPIGFRPDAAHPFDDRCLSWQYDARTVSIWTAAGRLKGICFTGKPSHLKTLAEHRKGESDLVHRDGTWFLYATCEIKETEQYEPADWIGVDRGIENLATTSDGNNHQGQALKRYRRAQARRRAELQKKKAAGSRSAARRLAKRRQREARHATGENHKISKSIVADAQRTGRGIAVEQLDGIRDRVRLKRHQRATLSSWPFHQLGTFLEYKARRAGVPYLQVDAHYTSQMCPNPWCGHVSRKNRPTRGRFLCVACGLAGPADDIAAVNVRQRARTAWAFVTMPDPDPEPSGRDRGDAPPASHPAATGSATRRDHRASKLGRSRPRR

SEQ ID NO: 1906 - protein, 544 aa, unknown
  TnpB Polypeptide
MTGKISSRKEHVETSHDGSKGNSDFITVECLLAFDTDEDKKKVLDLMRKFSSMIRFAYKRLLKKTNEKDLRKFLPIRYGLNARYSHAAIFLAQQALDSCLKRKQNPKKLIFGSRAFFEQLKKKHLIGARREKLRQKWEERRYGVLYAIGQKASKGNLNLRPVNLQGQWCLRINLGNGEYVWARVIRSTKRKTDKWLGFISDIEHATKTSEWFPYTVRMKLRNGKIYAQISTEEKFPELTVTKDNGVIGIDINAYPFHLALVYTAKDGNMEKYERLSLEKLLDGSSEKRTYLSWQIAYQVMEIAKRERKAIVVENLEKLPKGKRGDGLPKLRQRLQKWIYKALLQKIEIVAKRNGIQVIKVNPAYTSIIGKLKYAPLYNIDKDMAGAYVIARRGLGFKERLPKNYRKLLEDKEFLSYSVARVENRIAKLRKEIGEEKNEYKRNKLRSDLRRLKGELSLLVQSLLDSGESELAAQQTVNRKMERVRGSTQVERKSWQVLSVALAFSCLESLRDLSPLKRVILLRDWVGAAKQNGLVPPYLVRGRMH

SEQ ID NO: 1907 - protein, 387 aa, Lactobacillus sp.
MLLSLTVKAKLKLDNATDSAKFQETSEQYRSACNHVSEYIFNNYFELSTFKIHKKIYRDLRQRFGLKSQLAISAIRTTVARYKTVQTQLRRKPMAYATGKKDKKGKEIYLKISRDLHWLWKPVYFQRPQADLVRNRDWSIIADGEKLSINTLQGRVKARFVLKTGFEQYLDGTWEFGGAKLIKSGTNWFLHIAVNKEFPELARNDMQHVVGLDRGIRQLVTAYDDQGKTTFFNGQAINRKRHHYKALRASLQKHNTRNSKRRIRQMGNKENRWMTDLNHQLSKTLIAKYGPNTLFALEDLVNVRFAMEKTVKDKRYEKVSWAFYQLEQMLTYKAIQQVLQLSRLVRLIPVSAVLTVARSRRRIATTNCMPINVQTAGTSLMTTVSVP

SEQ ID NO: 1908 - protein, 423 aa, unknown
  TnpB Polypeptide
MLRLQAFKFGLMPNGEQERDMRRFAGSCRFVFNKALALQKANYEAGGKFIGYVAMAKLLTDWRNSIETPWLKDAPVHPLQHALKDLERAYKNFFSNVKAGRQPGFPRFKRKDSAARLRYPDAKQFEVDQANGRVKLPKLGWMRYRASRDVLGRPKNITVSSSGGKWFFSVQTEREVEPPMLRSVEAITAIGIDVGIARFTTFSDGSFVAPLSSFKRHEVRLRRYQRSMSRKKKFSNNWKKARTKVQNIHGRIANARKDFLHKNTTAISKNHAMVAVEDLQVRNMSRSAKGDVQTPGKQVRQKAGLNKAILDQGWFEFRRQLDYKLNWSGGMLVAVPAHYTSQTCPACGHVAAGNRKTQALFACLDCGYENNADVVGAMNILARGHRVIACGEDGSGRGRKTTAKPASVKQEPAEATARELTHA

SEQ ID NO: 1909 - protein, 394 aa, Symploca sp.
MIFSYQYKLKPTKQQCQVIDNTLEMLRYQYNYQLAQRFDWYEQNRCSIDRCLLICQLPELKEKPNKYSQEKSLVQLKKNRPWYKNIHSQVLQEVPRKVELAFDRWLQGDSNGKKSGRPRFKGVGRYKTFTYKQFKSHNFVGDKIKLSKIGEVKIIAHRPIPDGFAIKTASVTKKADGYYVTLSLEDKTVPTIKPDFDANNIVGIDVGLIDFYVASDKTRIAAPKHLRKAERKLKSAQRKVSRRKKGSNRRLKAIKKLGIQYKKVADTRKDFHFKTAKKLLSKYDVVAVEKLNIKGLSRTRLAKSVHDAGWGQFLSILSNKAENAGKKVIPVKPHGTSQDCSSCGHKVKKLLSQRMHNCPVCHTSLCRDLNAAINIKNRGAHGLKAQIMSSKKSL

SEQ ID NO: 1910 - protein, 396 aa, Bacillus sp.
  misc_feature (380)..(382): Xaa can be any naturally occurring amino acid
MKRAYLIEIKPTTEQVSKIRQTIGVCRYVYNLYISKNKEAYESEGKFLSGYDFSKWLNNIHTKECDQWIKEVSSKAVKQAIMNGDKAFKRFFKGLSQFPRYKKKRKQDVKCYFPKNNKTDWTVERHRVKVPTIGWIRLKEYGYIPKNATVKSGTVYQRAGRYFVSVLCERAEIRVKPMLNKVGLGIDLGLKDFAVRSDGKTHKNINKTVQVKKIEKRLKREQRSLARKFENLKKRGGKSVTNKRVNIDKNVLRVQKLHARLANIRIEYVKSIVTNVVKTKPTFITVEDLNVKGMMKNKHLSKTIAKQSFFAFKTWLLTKCEEYGIELRQVDRFYPSSKLCSCCSQKKADLKLSDRVYTCECGNVMDRDLNAAINLLQAKXXXNLRLWSVTANCSSK

SEQ ID NO: 1911 - protein, 370 aa, unknown
  TnpB Polypeptide
MMQTLKVKVVVEPEQAKALHETMHQFNAACNYVAEIAFQMHTANKIKLQPIVYHDIREKFGISSQMAVRAISKACEAYKRDKSIKPTFDLNGAVIYDQRILSWKGLDTVSLLTVHGRIKAPVKICDYHAPRLDRIKGQADLIFRNKEFYLCVIVEVPEPVLIVPTNVLGVDLGIKNIAVDSTGETFSGKKIDKTRAKLDNLKASLQSCGSDSAKKHLKKLSGHESRFKRDTNHCISKKLVKKAIDTSSLIALEDLKGIRERTTVQTKVQRHRHSSWSFDQLRQFIGYKAAIAGVPVAYIDPAYTSQECPICHHISRSNRPTRDEFCCICCGFSDPADIVAARNIAARASVNMPIVARFFAEPQAHEFIRG

SEQ ID NO: 1912 - protein, 373 aa, unknown
  TnpB Polypeptide
MLKTYRYRLKPTKSQVTILERQLELCRFVYNDTLAYRKNAWELEQRTVKRFETQDRLPQLKLEVPELKDVYSLVLQNVALRVELAFKAFFRRVKAGEEPGFPRFKGKSRYDSITYSQSGFELDSEMLHLSKIGDIKIKLHRPIVGKIKTCTIRRMPTGKWFACFSVDMGDIPRPPWKDGSVVGIDVGLASFATLSNGEKIDNPRFFREDELALAKAQSKRDKLPKGSSLRRKASKVVARIHERIGDKRTDFSNQVSRRLVNRFGVIVFEDLDIQNMLKNHHLAKSISDVAWGMLVKATASKAAYAGSKVVLVDPKYTSQMCSRCGMIVKKDLSERIHNCSECGLTMDRDLNAAINILRLGMQSVRKSDRIPVL

SEQ ID NO: 1913 - protein, 179 aa, unknown
  TnpB Polypeptide
MKGHRENDVVFRECLIPDDWIGVDLNTTGHVAVVAHPVSGGIVMLGDISGYPDRDRANQNQRIAKEIVKMARQLWCGIKLEDLTGAGFTGRKKRGTPLAFSRREGSFYHLQKLIERRAQGAGVRIAYVDPAFTSRCCSQCGRPGIRKGKKFSCPACGYSGDADANAALNIASAPVVGVS

SEQ ID NO: 1914 - protein, 400 aa, unknown
  TnpB Polypeptide
MPEGAYRGALKAGAEVVKEDINDLLWDLNLYRYALQKAVDALWGLNKVPKKSQAHQLLYLLLRSYGFRAHIVRNIYSTALALVKSAKENNGSKPIVKKMSARFDYQDSRVDIDNHVVKVILRNRWYTLRIVHRMEYIEKFKSQRWKEVHVKYCNGKLYVSIVFEVKYSPRTPRGAVALDINLKQVVDCDGASIRRYRTRFIDALSKKARAEELQRRYPKRWRYNNRILSIIKPLHRKARNIVVDWCRKFAKKLILKAEKYGHAIALEDLKYLRRNAVKNEDRVVWKLSMFAYRKLQETVVSKAIEYGVPVVLVNPRNTSTICPRCGARLNYNHRLASCGKCGFIADRDVVGAMNIWLGALHAYAEEHGSPLSASAMKGETRRSGGTRNEGMKKVIKNIQK

SEQ ID NO: 1915 - protein, 387 aa, unknown
  TnpB Polypeptide
MLKGIKIRIYPDKEQEKLLLSYCKDYHNMKNFLVAKFKDNLPNVGNNNIIGYKDRDLLQEYESTYNCKTELLMRSVRGAIVDYVSGVTRFYQKLSSRSPKFHKYDPNKQSFYIVDGRYLVKDYSIRMPIRIELAQKYKSTISRKIPIDKKYVTKENLTYIKNIRFHYQKGKWYVSGCYDVPDVTINQNKEFLGLDWGIKNFMTTSESTLINYPKEIVREYYRIRKLSHYLDKKVRNSNNYKKLKKKFDKAYKRMNGLKRNFIHQETTKLARQYHIVIEDIPFQDISKDKQGKKRKFIRRMSVLAPKYMFEEQLEWKCKKFGSHFIKVNPRNTSRTCSVCGQIHDMKLNDRMMICSCGNKMDRDINAAINIKNAGIHKVLAESICCTR

SEQ ID NO: 1916 - protein, 386 aa, unknown
  TnpB Polypeptide
MRKGIKIRIYPDKEQEELLLSYCKDYHNTKNFLVAKFKDNLPNVGKRNIIGYKDKDLLSEYESTYNCKTEMPTRCIRGAIEDYVSGVRKFYQKISSKPPKFHKYDPNKQSFYIVDVLYKISNCHIPMPINRNFVKQYKTISKKIPINKKYATKEHLTYLKDVRFHYQKGKWYISGCYDVPDVEIDNNKEFLGLDWGIKNFMTTSESTFVNYPKEVVREYYRIRKLSHYLDKKVKNSNNYKKLKKKFDKAYKRMNGLKRNFIHQETTKLARQYHIVIEDISFQDISKDKKNKKKKFIRRMSILAPKYLFEEQLEWKCQKFGSYFIKVNPRNTSRTCSACGQIHDMKLNDRMMICSCGNKMDRDINAAINIKNAGMNKILAEGICCTQ

SEQ ID NO: 1917 - protein, 318 aa, unknown
  TnpB Polypeptide
MLKGIKIQIYPDKEQEELLLSYCKDYHNMKNFLVAKFKDNLPNVGKHGIVGYKDKDLLLEYETEYNCKTELLMRSVRGAIIDYVSGVKRFYEKLSSKPPKFHKYDPNKQSFYIVDAIYLIKNFAIPMPVRKDLRAKYKSTISRKIPIDRKYATKENLTYLKDIRFHCEKEKWYVSGCYDVQDVAIDNNKEFLGLDWGIKNFMTTSESTLINYPKEVVREYYRIRKLQCYLDKKVRNSNNYKKLKKKFDKAYKRMNGLKRNFIHQETTKLAQQYHIVIEDISWNQISKGKKRKFIRRMNVLAPKYIFEEQLEWKCKKVW

SEQ ID NO: 1918 - protein, 475 aa, Micromonospora sp.
MSDRVVIVPAVEHRDRRSVIQAYRFALDLTSAQQRAVLAHAGAARVAHNWALARVKAVMDQRAAERTYGIGEADLTPTQGWSLPALRRAWNAAKGDVAPWWTGCSKEAFNTGLDALARALKNWSDSRLSKRAGRPVGFPRFKSRRRSTPSVRFTTGAIRVEPDRKHVVLPRLGRLKLHESARKLARRLEAGTARVVSATVRRDGGRWYVSFTCAVERVGRMPARPGATVGVDLGVKYLAVLSTGELQPNPRYLDAAARRLRRLGRHASRRIGPDRRTGRRASKRWERARAQLGRAHARVANLRRDGLHKLTTRLAREYGTIVVEDLNVSGMLRNRRLARHIADAGFAELRRQLAYKTSWNGGRLAVADRWYPSSKTCSGCGAVKTKLALSERTYTCTICGLVLDRDANAARNLAALAVTVAGSGPETLNGRGADRKTPLAVPVAVKRQPGTATAGKTGTVPPQGRTSNHVLTYAT

SEQ ID NO: 1919 - protein, 428 aa, Gracilibacillus sp.
MLHIVNRGYVYRAAPISPEVERYVRQCFGADRKIYNLHVAHLYDYLEKNHYQIGDKLPSLKKMGMPTVSMFKKQCVNKDHVAYLYLVDAYASNEAKQHFKKAIMAFNKVAYKKQYKRSALKRQKTLGIEPTFRDLKGMPTFHSRKGSKSSYTTCNQNGTIYIKDDILYLPSAQKSSVKVVGFKLNKHRDLPKNSKIKNVTVTMNAKGQFDVSIGVAFPLEIESIGTPARILGLDYSQSHFFVDNEGKKANYPHYYRKMKERLAKEQRILSRRKKESKRWEKQRLVVSRLQRKVVNQRKDWLHKKAYALAKRYDMVVVEHLDLRAVGQNKYYANNQQDNGFGHFRLYLTYKLEQQGKYVVQAPKNFASTQLCSTCGHQNRALKGNVTIREWDCPSCGHHHDRDINAACNLKQYGEKYTKEEIVPPTIVV

SEQ ID NO: 1920 - protein, 281 aa, unknown
  TnpB Polypeptide
VGFEEWYCSDSQDFHVSIDKVIIKTRAVIGGTPEKLLRQALNGKKGYTVGAPRLINREGKVYLAVPVTTNVSIPKIENLTHPTVIGVDLGINTLAAAVAISTDERILPAKVVSGKRLKHQLRRLWGKRRKASRLKKSEEIQALDKKTKRTIQHWTNTTANEVVRYATKFNQPVISLENLSTYQATRRRTPWANPQLRDQLGKWARGEIGKTIQRNAALQGIPVIWVNAAYSSRICPRGCLCMLTRSSRSVFQCPACGVKLPRDINAAIELARRGIRLIKKC

SEQ ID NO: 1921 - protein, 402 aa, unknown
  TnpB Polypeptide
VEYRRTAVIKLDTPEGADAHLRETVEQFKYCANTASKWCWHGDDGYHVTSKAKAEGALYDPLREDTGLTANLVQKGIRQAVEAVKSGVERLKNDQDTSRPTFTADTAVYDKRSATFHRDHVSLSTVEGRIECDYSLPDDTDVPPTKYVANENYEFRRATLHRRDGDWYLHASMLKADDDTDSTTGHRTVLGVDLGVNQLAVASTGRFWSADEFTHWKREYETRRGDLQQCGTRAAHDAIAGVERKEAGRFEIFLHRVANELVTEARSHDCSHIVFEDLTDIRENVPAASWHHQWAFRRLYKYVEYKATEQGVEAVQVDPRNTSKRCSTCGFTHDDNRHGEEFACLDCGYQNHADYNAAKNIGLQYLRRRQNADDGGAPVDVRLNRGTLNVSGEYNLPASSEA

SEQ ID NO: 1922 - protein, 401 aa, unknown
  TnpB Polypeptide
MRKINKSYRFRLYPNEGQIELLAKHFGCTRFVYNFFLDQRIERYKLTGKSDNYYAQAKVLTEMKKQEETAWLNEVNSQTLQFALRSVDTAYTNFFKKRAKFPKFKSKHSKNSFTVPQFTSVAGNRLFIPKFKEGIKCRVHREIKGKMGKVTITKTPSGKYFVSVFTTEEYITPIEKSGKTVGIDLGLKNLLITSEGETFNNNRYTRRYECKLAKAQQHLSRKKKGSRGFENQRLKVARLHEKISNCRADYLHKCSISLVRRYDIICIEDLNVKGIVKNHCLAKSVSDASWGTFVNMLTYKAEWNDKKIVKIDRFYPSSQTCNVCGYVNKDIKDLSVREWECPHCHTHHDRDVNAAINILRIGLNNTSAGTVDYTGGEELRADLLESHSSEKPEANNYFKKV

SEQ ID NO: 1923 - protein, 367 aa, unknown
  TnpB Polypeptide
MHKATFQYRLYPTPAQATALQRTLDECRWLYNRLLAERQMAWGDTDTSVGLYDQVNRIPALRDERPTLAGVHSQVLQNVATRLDLAFKAFFRRVKAGDTPGFPRFRGYGWYDSFCYPGSGHKVDGQRVFLSKIGHIKAVIHRPLEGTAKTCCVKRTATGKWFVTVACAVEDAALPATDSAIGIDVGLAAFATLSDGSEVANPRFFRTQEKALAKVQRRLAREEKGTPERRKRRKPVARVHERIANRRKDFAHQHSRRVVDAHDTIAVEDLSVNRMVHNHCLAKSISDAAWSLFTSCLSYKAANAGRGFIAVNPAYTSQDCSRCGHRQKLTLADRLYRCPCCGLEIGRDHNAAINIRALGLQSIGARP

SEQ ID NO: 1924 - protein, 282 aa, unknown
  TnpB Polypeptide
VYNDCLRVRAEAYAAGERISDAEVQRRVITLAKGTPQRAWLGEVASVALVQACQDARWAYRSWFDSLSGKRKGREVGHPRFRRKHGRQSIRLTRNGFTFHGRRLYVAKVRDIEVKWSRDLPSVPPCDREVGIDLGLKSLVVTSGGEVVPNPRFWRAAQRRLARAQRVLSRRQKGSRNRARARHQVAVLRRKVRETRLDHAHKVALRLVRDNQAVYAEDLCVAGLARTRLARSVSETVHDRDVNAARNMLAAGRVGNPNACGAGARPHPVAADAEAGTHRSAA

SEQ ID NO: 1925 - protein, 339 aa, Erysipelotrichaceae sp.
MYICVKLQLKANIEVENELKQYERHFKEEINRITEIFRQRGHSFELRYKEISNHISYNSKHLVLAQAKQKYAAEVKKEKYSAPFSSVWSNSSYQLKEHSVVLELGLYRHRNMLELPCYINEQQRKRLQSGPHTNMKLICHRGKWSALIYVQIIFKPNGEKATMGIDIGLKVPAVAALDSGEIRFFGNGRQIRFQQRKYQSHIEAMLRHHQKKKIYHFQHKLHHVLSDFDHKTAKQIIDYAIEKHVGVIKMENLMSINKKYEKSKSKSLHHWSYRRLQDYIEYKAFIAGIRVVYINPYNTSRTCPQCGKINHPKDRFYCCICGFRGHRDAVAAMNILHAL

SEQ ID NO: 1926 - protein, 406 aa, Acetobacter sp.
MIQRKANIYRLYPDAEQGLTLARIAGACRAVYNLALEQRRDWWQRHKDRTGKSISFAGQCRELTDLRRDVDWLREAPIHPLQQALRDLDRAYQNFFSGRSGYPSLHRKGLHDSFRFPDPTSLRVERTGKKVGRIKLPKLGWVAFRGWYDLPGVIRNITISRRSGQWFASVQWEREVEEPAPSILPAVGIDMGVAVFAATSSGETIAPGDFGRKALRTLRKAQRTVSRKKKGSANRRKAVRRVRILHAKVANARKDFLHKLSTTIAKNHGTVVVEALQVRSMSASAKGSVEESGRNVRQKAGLNRSILDQGWRMFRTLLGYKLADRGGRLIEVPAAYTSQTCSVCGSVDPANRASQARFICTACGHTENADINAAKNILRWADCPLKPVEGYRVRRPIEAGSTRRAV

SEQ ID NO: 1927 - protein, 367 aa, unknown
  TnpB Polypeptide
MLKAYKYRIYPNNEQKIQIAKTFGCCRFVYNQTLVYRKEVYEKEKKSVSKTDCNNYCNRQLKKEYEWLKEVDKFALTNAIYNMDAAYQKFFKEHAGYPKFKSKHDNHKSYTTNFTNGNITVDFGCNRVKLPKLKGIKAKLHRNFSGQIKSATISQVPSGKYYVSILVETEHMELPHTNQNTGIDLGIKELCITSDGKKYENPKIIRKYEKKLVKLQRQLAHKEKRSQNYYKTKKKIALCHEKITNTRKDYLHKISHEIISENQVIVSENLQIKNMVKNHHLAKSISDVSWYELTRQLEYKAKWNGREYVKIDTFYASSQLCSVCGYQNTETKNLTVREWICPVCGTNHDRDINAAKNILEEGLRQIA

SEQ ID NO: 1928 - protein, 425 aa, Firmicutes sp.
VGDELHIPFCKKIAYNRSINQIEGGVMVEVTRVIAIQLNPTKEQQIIIGHLTYSASKLWNVANYNIKNKTLKLKELKSKLKKDFWYKNLHSQSAQAVLEKLKTAWENCYKKHTKAPRFQPKDGHYPVRWKKQGIQISNDKIRLSFSKQTKQYLKDTHSIESDYLWISLPKNLSLSRVQEVEIKPHRIYGHTVYVMHIVYRKTIELDNTNRENIMAVDLGIRNLATVVTTNKTAAIYDGRELISRLKLFSKHKAKLQSAVKKSGQKTSKKLHYLIVKERNYVKDYIHKMSTFIIRQAQKERIKTISIGELSRDITNIDIGKRNNEKLHKIPFGKLCSMIGYKAKEVGIDVMLVDESYTSQTCCVCGRVDKSNRKYRGLYVCSCGNVINADVNGAVNILKRVSPNLTLGRSRGNLDIPVRVRVNDVL

SEQ ID NO: 1929 - protein, 381 aa, Pediococcus sp.
MTLKGIKVRIYPNQDQQNKIMANFGYTRFVWNQMLNMLVIRYENNPKAKFLNAFALNNLLPVMKLEHPWLKDAESTSLQVVNHDLIEAYQKFFKEHHGFPKFKSRKFPKQSYQSKAVNHNISVINNKQVKLPKLGLLRFKSSRKITGKIKSVTIRLSATGKFYAILLVDTEITTLVKTKHAVGIDMGIADLMITSDGIKYPTIRFDKALSKKKHYWEKRLARRRLQAKKAIAEDRHHKVLEPREWSDFKNYQKAKLMVAKYAEKIANQRQNYLHTLSKKLVEQYDVIKIEDLKAKNLMKNHSLARAIANQSWRELRSQLEYKCKWYGKQLVTVNPRKTSQICADCGYDDGKHTLDIRQWTCPNCGINHDRDLNAAQNILKA

SEQ ID NO: 1930 - protein, 384 aa, unknown
  TnpB Polypeptide
MKAFKYRLVPNKTQEATLERTLVTCRYLYNASLAERIDKYKADKTSVTYVQQANALSDKKNEWQEQVHSQVLQDVLKRLDKSFKNFFTGLKSKRRVGFPRFKNDRRFKSFCYPQSGFKLLDGRIRLSKIGDVKLKLSRPVEGKIKTCAIVKDVDQWFVVLTCETPVAVKVASTKPSVGIDVGLTTFATMSDGSIIENPRTLVKSQKKLATVQRRLSCKIKGSNRRNKQRTKVAKVHRKIRRQRDDFLHKTSTALVKKYGTIVFEDLNIAGMMKNHCLAKHIGDASWNKLIQFTTYKAESANGAVVLVNPRGTSQRCSGCGEVVPKTLADRIHCCPHCGLVMDRDLNASHNIKSRAGSVLTNAQGDDVRQTDFAKAQFSLQSSLN

SEQ ID NO: 1931 - protein, 405 aa, Anoxybacillus sp.
VDATRVEKYIIKPSHPYFHMLDEFCFRSKNLYNFANYHVRQLFFKDGTYLSYNKLDKLIKTEGMDADYRAMPLAQCAQQTLRMLHQNWKSFFKSMKDRAKNKEKYTGRPKPPKYVRKDGRYVLVLTNQSCKIKDNHVVFPECFQGFQLKTKIVGKLQQVRFIPKHQHIVVEVVYKISVPSGKKDNGRYISIDLGLDNFATIVNNVGAKPIAIDGKGLKSVNQYYNKQISHYRKVVKQMNRLDWTKRMSKITEKRNHIVENFMHQASRFVIKHALSLDCDTIVVGMNKDWKREVNLGKRTNQSFVHIPYQTFIHQLRYKAEQHGIRVIVTEESYTSKCSFLDMEEIKKQKQYKGTRIKRGLFQSANGMLINADVNGAYNIMRKVFPKAFANGIEGVGLHPIRVLVA

SEQ ID NO: 1932 - protein, 212 aa, Anoxybacillus sp.
MKHYKPKEFAEMLHVSVKTLQRWDNEGVLKAYRNPKVRKLKKKLKREQRSLSRKYENLKKRGEKPATKRGANIDKNIFRVQKLHARLANIRLEYVKFVANEVVRTKPRYVVIENLNVKGMMKNRHLSKAMAEQCFYTFQTWLIHKCKKYGMEVRQVSRFYPSSKMCSRCGHMKKDLQLSDPIYVCDGCGHTMDRDLHAATSLLRATDYIVLT

SEQ ID NO: 1933 - protein, 436 aa, unknown
  TnpB Polypeptide
VVFEAVKVALDPSPAQERLLLSHAGASRFAFNAALAHVKAGIEAGEKPEWSFYSLRKWWNASKDALAVGEDGVIWWRENSKEAYSSGLEALAKGLSNWSKSRKSARKGRRMGFPRFKAKDHATPRFAYTTGAFGLIEGDPKALRLPKVGRVHCMENVAERVGGARVLRMTVSKRAGRWYAALTIERDIPTAARAPKGGAVGIDLGIKTLATLSDGTVIENPRPLKKTERRLKRAQKALSRKAMGSKRRAKARAKVARLHVRVANQRQDAIHKATTWLASTYSHISVEDLNAAGMVKNHHLAKAVSDAAFGEFRRQLDYKTARTGATLHVIDRWYPSSKTCSRCGRVKAKLSLNERTYRCDGCGLVMDRDLNAAVNILVAGSAPETINAHGGTRRRNDLSGRAMLDPVKCEPSRRGGKPRRLGADECKPVLQATSSS

SEQ ID NO: 1934 - protein, 394 aa, Mycolicibacterium sp.
VSRYRLLPSQEQAVALRGHCRQARYVWNLAVEQQNYWRPGRRSPSFAEQCAQLTDARTEFDWLAAGSATLQQQALRDFAQAMRNFFNGTHRRPTWRKAGVHEGFRQVGVKSAHVQRLNRRYGQVLVPKVGWVRFRLTRDVPESVKSYRVTLDRSGRWHISFAHIPETIPGPGDGSVVGIDRGVAVSAALSTGELMHVPHLSAGEARRLKVLQRGLSRAKKGSNRRARTKLAIAKLRARETDRRKDWVEKTSTDIAGRFDTIRIEALDIRCMTRSARGTAERPGRRVAQKRGLNRAILGSGWGKLVTRLQHKAFGRVEQVPAAYTSQRCSACGHVAPENRKSQAVFRCVACKAGPCNADVNAARNIAAGRAVTARGDLDISRSVNREPQLSTPAT

SEQ ID NO: 1935 - protein, 375 aa, Bacillus sp.
MLVSKAYKFRIYPNKKQEILIAKTIGCSRFVFNCFLALWNDTYKETGKGLTYPSCSAELTQLKKQQDMLWLQEVDSTALQSSLKNLADAFSRFFKKQNDMPRFKSKKNRIQSYTTKCTNNNIAIVGNKIKLPKLGLVRFVKSRKVAGRILNATIRRNSSGAYFVSILAETEVQPLEKTGSSVGVDVGLKDFAVLSDGTTYNNPKFFRTLEEKLAKAQRILSRRTKGSSNWNKQRVKVAKIHEYIANRRADYLHKLSTEIIKNHDVIGMEDLQISNMLKNRKLAKAISEVSWSQFRNMLEYKAKWYRKQVVVVSKTFASSQLCSNCGHQNKDVKNLNLREWDCPSCGTHHDRDVNAGLNLRNEAIRLLTVGTTGIA

SEQ ID NO: 1936 - protein, 405 aa, Ralstonia sp.
MQRLQAFKFELMPRGEQQRDMRRFAGSCRSVYNKALALQIENYRAGGKFINYVAMAKRLTEWRNGPGTPWLKDSPVHPLQHALKDLERAYKNFFARRAAHPRFKKKGQRDSFRYPDRKQIKLDQANSRIFLPKLGWIRYRSSRDVPGEVRNATVSLHAGKWFVSIQTAREVEKPVPQATSAVGIDVGITRFATFSDGTFLAPLHSFKRHEARLRRAQRAMSRKTKFSANWRKAKARVQRIHARIGNARRDYLHKATATISKNHAMVCIEDLQVRNMSRSAAGTGKSPGANVRAKSGLNKSILDQGWFEFRRQLEYKLAWNGGWLIAVPPQNTSRTCPCCGQVSAQNRTTQARFRCVECGFEENADVVGAINILARGHRVAACGESVQSGRSVKQEPTAATAQLIA

SEQ ID NO: 1937 - protein, 442 aa, Bacillus sp.
VATTKDGVHIKGTKKDLPEGWVTFAFRFAIFPSKEQSMKLEKAFGCERKIYNEYVAGLYEYLETVGFEGGFIRYKVPNYTTITKKYDFLDRSNDSFVYNDAKMRFQAAIKKYNEIYAKRPLQYKKSVRKKMKTIDYVPTLRDIKGMPKFHSKKQGKLSYTTNQTNGNIKITQENGHYQLCIPKFQEGIPILLHRELPCDGMIKKATVKREGTKYIVSLSVDYFCPKEKQVDNIISDKVIGLDYSQSQLYVDSEGRTAQYSRYNKIIEKRVRRFNKSLARKKNQAKKDENDNIIYSKNYEKQVRKYQQITTKAKNQRKDFLHKKSNQITNDYDAIVVEDLDLSNLVQCLKLGKKLHDNGFGMFRLMLKYKAENKGKHYIVADKFFASSKLCSECNHKKEKLKLSERAYVCENCGTKIDRDYNAGRNLKHYGIRVLYEMGLLAA

SEQ ID NO: 1938 - protein, 347 aa, Lentzea sp.
MLTKWKRTEELSFLNEVSAVALQQSLRHLHVAFANFFGKRPSYPRFKSRRRSRASPKYTKAGFSWRDGELTLAKMDRPLAIRWSRPLPEGSAPETVTVSRDQAGRWFISLVVETSTPPHPVIHAAVGVDVGLSSLVTMSTGEKVSNPLHEVRERSKLTRAQRRLAKKTKGSANRDKARREVARIHARIADRRRDFLHKLSTRLVRENQTIVIEDLNVSGMLRNGKLARAMSDAAWSDFRAFLEYKAQWYGRTVIAVDRWFPSSKICSACGQKAESMPLNVRDWRCDGCGAAHDRDVNAAKNVLAAGLAVAACGGDVRPTRRQPARRLPAKQEARPVRVVASRLHARR

SEQ ID NO: 1939 - protein, 224 aa, Streptomyces sp.
  misc_feature (194)..(197): Xaa can be any naturally occurring amino acid
MGRVLGVQLRYNYRAYPDATQRRALARAFGCARVVWNDCLRDRKEAHAAGLPYVKSAELSRLRITQAKRTEERAWLAEVSAVVLQQSLRDLDAAYKNFFDSLKGKRPGRRVGPPRYKSKKDTRQSIRFNSNAFSLNDDGTVYVAKVGNLKVKWSRRLPAAPTSLTVTKDSSGRYFLSFVVDTEPDILPEAETDXXXXPGSVRSQVPPPLPEYARRPLPEPSAHR

SEQ ID NO: 1940 - protein, 405 aa, Symploca sp.
MRTAYQYKLRPTRKQTATIDKWLSMLCAQYNYLLADRFNWYEQNRSPVNACPLVCHLPELRVNPDYYSQKKTLPQLKKDRPWYKDIHSQVLQDVVKRVKVTFDRFLKGDSNRRRSGRPRFKTLNSYRTFTYPQIKQDCLQGNRIDLPKLGKIKLVLHRQIPEGYKIKTVSISQKADGLYVTLSLENQTVPEIKTDINPHSITGIDVGLKDFLTTSNGETVSIPQHYRKAQKKLRLIQKKVSRCQKGSSRRLKAIKLLAKQHKKVADKRKDFHFKTANHLLSKYDVIAHEALNVKGLTRTKLAKSVLDAGWSSFLSILTNKAENAGLLVVPVSAHNTSQDCSSCGEKVPKKLHIRWHNCPNCGCSLGRDHNAAINVKNRAVGHPVLKAQLMSDGIPGVTEKPTLTR

SEQ ID NO: 1941 - protein, 436 aa, unknown
  TnpB Polypeptide
MKLTGDLKALESSIRIYREALRFIIPIVDAHWDEIKNFKYIHQRMARIEKLIHSTKKNQAQYNFDERFPKLPTYLRRAALNCALGIVSSYRSNLANWEKEPKGQIPQLSLTHYTYPAYYKGNLFRNFDPIRQTIELKVFKNGDWVYEVYRLKTSDCTYYQNYLTGKKQNVPIIQKKGRRFYATFSYEENVPLIPEESIRKICAIDLGLGTDATCSIMDQDGTVYARKFISFSEEHDRLHTQLGRIKRNQKCGSRHNKTLWRKVAGISQDIADKTVKTILDFGNAHGVDVFVLEHLDFKGKNIVKRAHFWRYKRIYKVLSHKAHQYGLRVARVNARYTSRLAFDGSGWSKRGREITPETPYALMQFVSGKIYNADLNASYNIGARYFIRHLLKTVTVTQRLALEAKVPQVAKRSTCTLSHLINLRSEFVALAAKTQA

SEQ ID NO: 1942 - protein, 368 aa, unknown
  TnpB Polypeptide
MKKQKAYKFRLYPNFEQRILFEKTFGCSRFIWNQMLADRKAHYEKTGETLKSTPAQYKEDFPWLKEVDSLALCNVQLNLNKAYKSFYQSGFGFPKFKSKKAAQSYKTNNQNGTIALLDGKVRLPKIGWVKVKVHRHPKGLIKSATISKTATGKYFISILCEEEIIPLPKTNSNIGIDLGLENFAIFSSGEKVENLRFLTSLSKKLAREQKILSRRALLAKKKGRKLSDCRNYQKQKLKVAQIHERISNQRRDFLNKLSMELIKNHDVICLEDLASKNLMKNHHLAKAIGDVSWYEFVLQLTYKANWYGKKIVTISRWFPSSQLCSTCGFSSGKKPLSIREWTCENCGTHHDRDINASLNILKEGLRLA

SEQ ID NO: 1943 - protein, 223 aa, unknown
  TnpB Polypeptide
MAKRKKKDAACELIAYRFYGHDRGLVNLVTSCGDNGETVFQDGQGVRRIKERYARTRASLQAKGTKGARRVLKRISGRENRMMSDVDHCISKTLVSGCRAGALHIFEDLSGVSFQNLEDRNASGRYELRSWTFYSLEMKTAYKAAMRRGAILKVNPQYTSQKCPGCGAIDKTARDSSQHRYTCKHCGRVYNDDEVAAKNLRQLGIWYVSGVDNPHFSKKVSGY

SEQ ID NO: 1944 - protein, 539 aa, Ktedonobacter sp.
LSYPLRLPDELQADALRLLDLSREVVNAVVTSLWDRLDDFGERTNKYAYKQVEEMTSSPQLHGDRQWRCEAEQAGRILRGQAERKKQFALILPILSQGMIQPKTETKRAGKNRKAIKEALGDLREENTDGGSAVELQSLIEQACNYYLTHGCFPDHYEDMQAVPIQQTAVLPYAGDDGRAMGQSYRMSLDLEHKMITLAIRTPSESGKWARNWREKTIKMVLPELVLSRVKQGQVLALSLREIKQPDGVRYAVLDFIVEVPIPEAARWPSMRYVLGFDWGVRTLVTASVVDLEGHRVGRPFFLDTGPFDGRQARTRRQIDILKAKVAKVQARRDHFSEGDPGQEPATRKLAVLRREIARCWRKYETGNKDLAHLAANVLLLLATASGCELIAGESLKSMKSTGRGKDARGKWRNWRNNSQIRGELWRTLRYKCYLSGIRLEWQQPRKTSHTCHHCGKPADTFRSPAHLDKVNDWGAWLVCSNPNCQWNGSRDYTASLNIARLGASLFRHAQSTGRIHHPSIADTAVKAVSYMGAVEVLR

SEQ ID NO: 1945 - protein, 504 aa, unknown
  TnpB Polypeptide
MAKATTTIRQRLNLGQPQGEWLHTNQALFNRVASFYFDVIQAHIGILDLPNKEALTALEKLTQRTDLNRDPILPLDALQEDIPAMFRRAAIHAALGSARSFHSLLAKWKKEKAKAQSKNKKFDKRPPTSPSTWNKSVTLYAGMWKERTGSSICIKVWTGSCWSWIRVRITGREIPEGFELCSPQLVKRGTQWCLHTPVEKKIIVPGKMEKQIRTRSDTRICAVDLNINEQLAVCTIRDVEGSTLATRFMGGGQRVSGFRKKQLGRIARNRSKTGIIAENEQDNAQLWQKLRHVDENLSHLVSQRIVEFCQEYEATVLVFEHLGNLKPEKGKYSRRGNSKRAFWMKGRIFKYAKYKAYNAGIITTRVSPRDTSKKCANCGSMVARYSEGQEPVGYQYGAPLFLCHNCGKAGNSDRNASLMIGNRLFERYEIVFPPEKPLASHSARVEQSTGVVVLQEPNAQAVGRTSLCARHESNNGQGTAQNGHSSTVEPVRVFTQQLLFPLEP

SEQ ID NO: 1946 - protein, 352 aa, Rhodococcus sp.
  misc_feature (252)..(255): Xaa can be any naturally occurring amino acid
  misc_feature (352)..(352): Xaa can be any naturally occurring amino acid
MAGRVVKRAYKYRFYPTAVQAEQLARTFGCTRYVYNRALAERTRAWSQEQRRVTYADTSKMLTDWKRDTETAWLSEPSKGPLQESLRQLQGAFDRFWRKQTGYPQFKKKGRSKESATYFSNCFTYRGGQIRLAKQTEPLDVRWSRPLPEGAVPSQVTVSRNARGQYHVSILVEDTIPELEPADRVVGLDAGITSLYTLSTGEKITNPRHERRDRARLAKAQRVLARKEKGSRNRAKARLKVAKIFGRIADRXXXXVVSGDLGCGLVRVPVDARVQGRLVRAAGGGDRPVLSLVEDLLGVWGARVDDAADRAGVGVPMRHRPRPGCERGEEHFGRRTDGDSLRRWCETAPRLX

SEQ ID NO: 1947 - protein, 425 aa, Rhodococcus sp.
  misc_feature (252)..(255): Xaa can be any naturally occurring amino acid
MAGRVVKRAYKYRFYPTAVQAEQLARTFGCTRYVYNRALAERTRAWSQEQRRVTYADTSKMLTDWKRDTETAWLSEPSKGPLQESLRQLQGAFDRFWRKQTGYPQFKKKGRSKESATYFSNCFTYRGGQIRLAKQTEPLDVRWSRPLPEGAVPSQVTVSRNARGQYHVSILVEDTIPELEPADRVVGLDAGITSLYTLSTGEKITNPRHERRDRARLAKAQRVLARKEKGSRNRAKARLKVAKIFGRIADRXXXXVVSGDLGCGLVRVPVDARVQGRLVRAAGGGDRPVLSLVEDLLGVWGARVDDAADRAGVGVPMRHRPRPGCERGEEHFGRRTDGDSLRRWCETAPRLGCGEATVGETGTSGRESRGDSRSFTAERTSSGTTPATGWCSWRSGSSPERTSRTERYGSARPVASNGVPVRALR

SEQ ID NO: 1948 - protein, 458 aa, unknown
  TnpB Polypeptide
MATRTYKYRIYPNHEQEEKLSFFFGCARKMYNLSLAWWKEEYAKSRESGEPMGRMPDYTFYKKKDEYAYLKDCDSVALQQARIHLQKAIDDFLKSKGGARKGKRLGFPRFKRKGVSRDSYTTYNNNCVKISDDCKHISLPKLGKVRIRLHRRFAGVIKSVSVSRSRAMNHFVALTVETGEPCKPLVNRIERRDKLSVVSLDMSLQGLVVSSDTSDGTKTKFVRQYRKHERKLARLQRRVSRKQMVGTGKYRTDKHGKQVEIKERSKNREKARIRHAKYAEHVANMRTDFLTKEALYYVRKYDVVVIEDLDMRAMSKSLRLGKSVHDVAFGEFRSWLEWEGLKYDCHIHVVDKWFASSKTCSSCGHKKKDLGLKDREWTCPECGTVHDRDFNAAVNLREEFVRQYNTAGTAGINACGDGTSTLRDYLARVLPQKPETVRKQEASDCESGPSDARDLSRG

SEQ ID NO: 1949 - protein, 398 aa, unknown
  TnpB Polypeptide
MNGSLLLANTHALRCNSWVRKTFKYRLYPNKQQQRLLEQQLEECRWLYNHLLAERRAAWEERRESLRLYDQHATLPALKAERPTLAGVQSQILQNVAVRIDLAFKAFFRRCAAGETPGYPRFRGKGRYDSITFPQVPVGCRLDMDARHLRMMNIGQVKVILHRPLEGVPKSATIRRSRTGKWYVSFSCECTEPSPLQKTGHQVGIDVGLKTFAALSTGEDIANPRFFCQEEKALAKAQRCLSKAEQGTPERAERRKVVARVYERVAWRRGDFSHQHSRHIVDSFDVIAVEDLAVNRMTHHHCLAKSIHDAAWSQFADLLSYKAAWAGRRYVAVNPAYTSQDCSQCGHRQTLPLSDRIYPCPCCGVVLDRDFNASLNILGVGLHTLGLAPRSSRIYPGE

SEQ ID NO: 1950 - protein, 521 aa, unknown
  TnpB Polypeptide
MFVSLQFKLELKREDKEKLIKLMRKQSSAIRVAYNMLKELEKEKTKKPHAQIYQRLRQLFPELPTKYIDSAIYKVKQYPKNKIVVFGSKRLFEKLCKNHFTGKLRERLKKQWRELRQGTLISIGSKADKGNRLTRFEDLNGQLHLRITTGNREFIYAKVLRESSNSKDKWITFMAMLLESWQTQSYFPYTVELKLREGEIYGSVSFELPTPEVRYTKENGVIAVDTNASPIHLAIAEVSKTGELLSYQTISLHHLLGLSQNSKDHQEWILAHKIVNLAIQKNKAIAVEDLKKLKKGKRGDGKAELRKRLHHWNAKKFLQKLRRVAMIKGVEVIEVHPAYTSVIGMLKYAPQLSIDKDIAGAYVIGRRALGFKEDMPENYEKLLKDRAYLEFALKKYEEREKELVGLIEKESNEYKRNALKSELRNVQYAKKLLTNLIQSLQSEPSGCEGANGRNPEQGETKKASFVAWQVLKVALLFPILGKVLPRDLSPLKPILVEGAWDRVRSRLVPLEIGGTVPTRDF

SEQ ID NO: 1951 - protein, 468 aa, Streptomyces sp.
  misc_feature (178)..(178): Xaa can be any naturally occurring amino acid
  misc_feature (281)..(281): Xaa can be any naturally occurring amino acid
  misc_feature (415)..(415): Xaa can be any naturally occurring amino acid
VVRGGRKLLNTRHNLAAAGFTEADWRKRWESARWFLSADGESGKRFGNETIRVTPQGEVSIKLPAPLADLANARNGRYVLAATVAFPHRGEEWRDRIVGNRAVAYRIHLDAGRERWYLDASWTRPVVRTMPLEAARAAGIVGVDTNADHFAAWHLDVHGNPVGDPRRFPYDLAGTASXPGERSQRPVRPGRDGVLPAPGCRVGRPDRGQSGSGLPHPPGRRAGPLVPGRLLDPARGADDAAGGGRRGRDRRGGHQRRPLRGLAPRCARQSGRRAPPVPLRXYDLTGTAGHRDAQIRHAITRLLHWAKRCGVRAIGLENLDFTAETTREKHGRKKRFRQLISGIPTGKLRARLVSMAAELDMVIVAVDPAYTSQWGAQHWQQPLATPTRTTTRHDAASIAIGRRALGHPIRRRTAXRASGVARRPAAPSRTAHTMRAAERGQRERGRPAGHPPPFGMPAVITPGSKTHS

SEQ ID NO: 1952 - protein, 362 aa, Melghirimyces sp.
MLRTYKFRLYPKPEQQERIDFTLERCRLLYNRLLDERIYAYRTEKKTLTYYEQKKTLPERKKAIPVLKEVYSQVLQNVAERLDKAYKAFFKRVQSGGKAGFPRFKGENRYHSFTYPQSGFSVEGKYLHLSKIGEVRIRLHRQVTGTIKTCTIVRKNGRYYACLTAEQALKPLPKTGKEVGVDLGIKHLAVTSDEQFFAPSQQLRRSEWRLKRLGRLVSKKKKGSHRRKKAIRLLARMHEKIANQRKDYAHRISHEWVLRYDLIAFEDLNVQGMIKNHHLAKSIVDAGWRQLVQYTTYKAESAGKRVVQVNPHQTSQRCASCGEIVKKTWVERVHRCPFCGYVQDRDVNAAINILQLARQKVS

SEQ ID NO: 1953 - protein, 400 aa, unknown
  TnpB Polypeptide
MFFWYNVYTLKLKGVWYMEKIMKGYVFRLYPNDKQIELIEKSFGCSRYIYNYFLSKNKNYINSYNSIKEIPNLIKENTWLSEVDSCLLRCSIFNLEDSFKRYKNGLSEYPKFKSKNKTLPSYRTNNITSTYKEKTYNSISIDLEKRIIKLPKLKEVKIRGYRNLKNINGRIINATIKKQASKYYVSICVEEYICIPKIIPAKIIGIDLGIKDLIITSDGEAIENKHIIEKNENKIKGLNRWLSRSKPGSKNRYKIIKKIQTVYKKIKNARKYLLHSISNKLIKENDIITTEKLRISEMVQNKNLSKKIYDASWHELIRQLEYKSKWKNKKFYQIETYYPSSQICSRCGYQENKMKDLKIRKWECPSCTNNNERDINASINIMFEGLKIYMKEGLNELQVS

SEQ ID NO: 1954 - protein, 294 aa, Acidobacteria sp.
MKSYKFKLKPSKRIENEFLEWLDVCRELYNSALQERRDAWKLNKISVNYYSQAAQLPEIKLVREDVAGVSAQVLQSTLRRLSKTFDDFFRRVKNGKKAGFPRFKGKSFFDSFTFPQMKGAFNLTGNNLRLSKIGKVKVRLHRQIIGKIKTCTIKREVKDWFVIFAVEDEKQPLPKTGKQIGADAGIENFLTLSNGSTIANFKFYESSQKKLRIVQRSIARRKKASNRQRKAVLHLRRIHQKIKNQRNNFGHRVSAWLVRNFDFIVIEDLNLIGMTKGFLAKQIYDVAWNSFYKS

SEQ ID NO: 1955 - protein, 268 aa, Meiothermus sp.
RLIVPMKLGNYQRGMLARAKSVQGGVLTKGPKGKWYINLILRLEVPTPPTGGGKVVGLDMGQRYMATLSSGIQVSGGGVKSRRIHLRNKRAEVRSKLDTGRTKGLSALWERLSGKERRFVDHTLHTLAKRIVDSLEPGDTLAIEDLTGLRSRTVKRGKEARHLHNLWPYARFRSLLGYKAALKGVQVVAVDPRDTSKTCSRCGHCDGANRKSQALFRCQRCGYQQNADLNASANIAQRAGSTGAGRRNTAPILGISTLHRPFPKAHAL

SEQ ID NO: 1956 - protein, 455 aa, unknown
  TnpB Polypeptide
MYTAEPVSERYWQCLFDWLAAHAPLWNQLTYRRRQAYFDDDGDVWDVEFTDLYDDYAPILGKATCQQLARKNSEAWRSHFRLLDRYHDDTDSAVTEKPAPPGYWGNREDGHELHGLVRNDLYTIDWGEQRSTLEFGVGNALKDRYDFKHHERLTLEINGTPQWHGDDSRLELTYDEAADRIRVHHPVRIRPDNVCEQRLDGFTHTLDPENTTHTAAIDVGANNSLAIVTDQGDTTVYHARPEFERFQQLSEEIAQLQSRLPGEEYTSRRIQRRYDERRRKRDHSRNAAVRHAAEWLLERNIDTVYIGDLTDVLETHWLAAVNEKTHTFWSHRQLVDRIELTLGDVGITVEEVSEADTSSECPVCSGQLSRDGDNAHCGGCGLEGHSDVLGAWNLLQSEVGPMARPAALGAGRPRDAPTDGAYWQWNGHDWRPADWERSRPRNQPSIGTPASSQPG

SEQ ID NO: 1957 - protein, 361 aa, unknown
  TnpB Polypeptide
MWRSVKISLKFATAKKLRRLAHLTRRLRKLTQRYINFIWISGGRLAAATLNAVPCLCLSYRQRSDCLKYALDIITSCRASAKTLSTEPGKPVIGKTFKFSSLTATIELGKGSFDYVLKISGVRAGKRIALPFKSHKRLNHWLAKPGARLLDGCIIRGCEAILWIDLPDLPTKDDGGSLGLDIGYNKLLADSAGKMYGTRIKELCEKVRRKKPGSKGKQRACRERYQYISETARLLPWDRIKLIGVEQLKNLKRGKKPNRNKAFRKRMAPWSYRQVIERIRHLAAENRVALHFVDPRNTSRECSVCKSVFSENRQGEKFCCVRCGYAVDADTNGAQNIIARTCRNSRQSMVAESSEVQLPLF

SEQ ID NO: 1958 - protein, 380 aa, unknown
  TnpB Polypeptide
MIRAHKIRMYPNNKQATYFSKACGVARFAYNWGLSEWKRRYVAGEIATVGILRKELNAIKNERFPWMLEVTKCAPEEAIRTNLNRALKNFFEKRTKFPVFHQKGRHDSFSAYNRHFSVEGTMVKIPKLGMVRIAEPLRFSGKIIDATVSKTADKWFIAINVEIPDPEPIHTGGNLAVGVDLGVKTLATLSDGTFVSGPNASRKYEQKVRRLSKELSRRKGGKKGEAKSNNYRKTTIKLARLHARLANIRLDATHKLTTALVKKYDLIGIEKLNVAGMMSSHRIARFIADNNFYEFRRQLEYKAPAAGTRVIAANVKYASSKTCNVCGVKRETLSLNVRKWTCESCGAVHDRDVNAAINLKNYAMGCTVSACGGLGEVSPR

SEQ ID NO: 1959 - protein, 547 aa, unknown
  TnpB Polypeptide
MVIDSKYTKTFKSNGLTHQKYDELLSFASMLRDHKNTISEYVNANLEHYLEYSKLDFLKEMRARYKDVVPSSFDAQLYTQVYNCYQNKFDAIQKHLEFEVIRFIGFDFYKRDTKNNKKGDLKKVVVSRTKTPLSNCLTYLTRYGNEGTLEYINSQLPTCDEKKRKFYENIIRCCDKFGFERLLGIALRKRTRIINRYAEHPIEFKSLSFGGRCRKSRIIDYNSHYGSVINSFVSLSGIGRKSFDIPVHFNKDWHGSMKDYRKSNPDYEYILTFNERKRQVNVNLCKDGQRYIPEAGNNVVGIDVNCKHNLFTLSDGTTYDYDRRLVNDFCKFSLEMDKLKEDKTYKVGKRKQRKLDTLKNKMLKSEQQLIAVVCEKLAIQGVDHIVMEDLDNGFGRCFVKDSDNSDINYNRKVKFLGLSSLKQEVERIARKYGIAVSTVQASYTSKMCPICGCIDDENRPNQETFDCVECGHKDNADVNAAVNIRNRVLVTVLRKQLLKQLGNGAYEPRRLKREKVKEVLLSFRRSLMGTSESECSENINLNTFDYV

SEQ ID NO: 1960 - protein, 396 aa, Prevotella sp.
VAKIIKTIRVMLIPNNKQKTKLFQYANTARFAYNWALAKEQENYKNGGKFLSDVDLRKEFTKMKQTQEYAWLNRIDCDVPKQAIKDACNAYKKFFKGLAKFPKFKSRRKSTPSFYQDNVKIQFSNTHVRLMLVAGKGKAKNKRSQKICRIRLAEHNRIPTDCKYSNPRIKFDGLNWWITVGIEYPDTVDIPKSEGVGIDLGIKDLAVCSDGNKYKNINKNPEVKKIEKKKRRLQRSISRSYEKNKKGKEYCKTNNVIKKEKLLLKITHRLTNIRQNYLHQTTSEIIKREPSFICIEDLNVKGMMKNRHLSKAVQEQCFYEFRRQIEYKAAWNNIPVIVADRFFPSSKLCSCCGMIKKDLKLSDRIYKCECGNIIDRDYQAALNLKRYGENVLKSVA

SEQ ID NO: 1961 - protein, 421 aa, Alloactinosynnema sp.
VRRGAIRVQPHAPPSPGSGLPAGSGILLRPRRVRPHALAGLVLGGAAPDLEPDQTRCRTLVGRLLEGGVQHRPGRVVPRPGQLAGRTYRSAGWTPRRGAASQDPPQDDSIVPVHHRGDPGGGHPPARHPAPVGGIRTSESTRKLARRLDSDTARVLSATVRRERGGRWFVAFQCEVQRTDRPARNPEAVVGVDLGVSMLAVTSRGRFHPNPRHLAHAEKELRSACRALSRRQGPDVRTGQHPSGRWEAARNVVARRHVRVADLRRDGLHKLTTGLARGFGTLVVEDLNVAGMLRNRRLARQIADAGFGEFRRQLTYKTSWRGGELVVADRWLPSSKTCSGCGWVNPKLRLSDRIYRCKCCGLVLDRDLNAARNLRQYVARSGRETVNGRGADQKTTRARVAGGVETSTNPSLTRLVHVGTH

SEQ ID NO: 1962 - protein, 477 aa, Caldivirga sp.
MLRRAVAVELEVAKEFNKLLYSVEAMYLNIIREVVEYAVVNNVTSATQLQRLFYSKYRSEYQGLHAHLIIQAIRQAAEIAKSFMERRRKGLVDKPYPEVKAVSIRFTEQAWSYEQFVKSIAPVKLELSLLGGRREVWLRLHKRFWQYWWRVLTGEAVLASTLIIKRKTNRWYAVFIFEVKPKEEEPQSVVTFDINENTVVISRINLASTVGMVADWNRQYMVPELYTIKTDFGRLARRYGRIRDTITERLKPLYALPNGKYVSITDVREFRKRVKHLREKDRKLGRVRQVASELAKTPGIIVTEELGDNPQESMINGIGKDEVRHRIKQTPFKALEKAVEEKALERGSKIFRVSSYRNSRVCPVHFTKLESTNDWHVLKCPLGHYVDRDHASILNMLWKTTPRSWTKGVWWNMKLEMNWREYEGKSNPLIPQNIVQYIHAVLKTFTASEESPAVLARGSPMNPAREANEDWARTPPK

SEQ ID NO: 1963 - protein, 579 aa, Halorubrum sp.
MSSHLALPIRLPFEEKERHARLDTLTKSVANTLIERYWTPERLTEVTDYSYQAWKYFDEGEAFADVDLYLPSRYKRCVMQKVGETLRSHADKREAFQSIQGVLPDHKIRRIHTRRIKEQLWNAEEYIKSGYVDLLIGQLNSYYDKHGRFPESYFEMQDCPSYSKGVLPYSADDGPTSGQAVKYEYDEDTQTLTVKLKTPDTLEPETRGDWTWTEHELEGYEAFHELLEHGSLSAPSFHPTQTKTGDNYYELLFPIEVEHQEKPDDVETVLAIDGGIRKDATAAVVNKNGEQLSVPYFIQNTERERMKRLNRERNQLNSKLAYLRREGRDPTDSFRHVQAEYERVNNKIRHKREQLVHDVANQVLALALVYDVDAIVHEDLRSLSPPRGEGQLSWELSSWARREIISKIEYRADIAGLHVEKVHPGNTSRSCPRCGSTGHTTKSPDHASEVWWGGHFRCDNTRCGFQADRDYVGAVNVARVFFSSSASLDHGFTSSYTGDSEIVPASRSAGPRLVFGDAPAAYLGQSNEKRVTAGGGSCFIAPAVTPTETKNNSSKDSVSSPATHSVSQFTRATAVYCRK

SEQ ID NO: 1964 - protein, 422 aa, Nocardiopsis sp.
VRLQRGHKARLDLTRDQAALVEDQGHAARALWNLLHDWWTMASENRRVPLADADAAIKQARKDIPWLAALPAQAAQQVLKTYFNAWRACWAGQRAEPRFKARMRTRAAIDVPQGRDLQIVRLNRRWGQVKIPKVGRVKFRWTRDLPIGKQANKDNRITGARLVREVHGWHIVFRVQRQVEDPAPHEGPTVGIDRGIAKPLALSDGTFREHGPWMTDGETERLRRLEKKAARQRRARKQGERTSNRLKRTYDQICGLRARAKRRALDWQHKTTTELARGFSRIGVEDLNIQGMTRSARGSVETPGTQVRQKAGLNRAIAGQAWGRTVTLLEYKTAERGGAVVRVAARGTSQRCSVCGFITSGNRESQDRFVCKNPTCGHSGNADTNAANNIDHAAGLAVSVRGDLAGRRSEKREPPESPPQAA

SEQ ID NO: 1965 - protein, 506 aa, unknown
  TnpB Polypeptide
MLVYRNRQFRISKKHPLYGYCDTVTALCCNLENAVRFRQRQLLTVVKKAPADRSENENFILAEVMDAIPVMSKHYQVPSENRYAYGYEFYNSLLKVTGNPDYHAEGLPRQSAQQSIKKCVRDLNSYFASMKAYKKDKSAFTGVPKIPGYHRKGGHVTAIITNQDAVLKSTDRNNLRYQLKLPLTKDTLAVGNISDGAKVKEVKITPDNGTYVIYLVLQQELPDVTFVETPKRIAAIDMGVDNLMAVTNNCNLKNLLYKGGVAKSVNQLYNKKIADIVSKQTLSSKEKFTPTEEYYAVTNQRNDALRDLFHKTAKHFLTWCVDNRIDTIVMGMNRFWKQECDIESDSARQNFVQLPFNMLREYIKYLAEANGIRYIEQEESYTSKASFADRDYIPVYGKDDERASFSGIRGPKHYRGMHKKSGFHGIYQTKDGSFLNSDLNGSANILRKAFPDAFQMEPDFEKVCIIKHPDLEKAASLKKRQLEKHTPGTISHAKAKRLRRKGKLAA

SEQ ID NO: 1966 - protein, 362 aa, unknown
  TnpB Polypeptide
MKTNECAKYTYLTLQLLPTDKEREMLQMTWDNYKEACNAFSRTKYRKLAKKENIDVSAYEKEVPKSARALAQRLLHAVYEDSIKHTVGRAYDYRESDEALALIAFGEYDETNVRHLTIPYFRKPTINVDFANKVCRLDLAKSFQTIGFSLPEGLPEPPASWEAQRAYLQPIYGTWYLTLMFPNPMAEIDVRPDVHIVGIDRGEINIATTYSRDKGAHRYKSKDYSQPCKGGTKDDYHKNLFAKDVRVANDIVESEPSGTIFILEDLHFKKLRKGWSYRNFSDVFIYLAALHHQYVYFCDPRNTSRTCPKCGEVVNTTRDSKKHRFICHHCGYGENEYVNDDENAAENIYLRGRKLLLAETKK

SEQ ID NO: 1967 - protein, 330 aa, unknown
  TnpB Polypeptide
LNIAYRYRIYPTEEQKILLGKTFGCCRFLYNQMLNDKIQEYKKTKKMLKNTPAMYKKEYTFLKEVDSLALANVQLHLEKAYKNFFRDPKVGFPRFKSKHHSKNSYTTNVVNGNILVEGSRIRLPKLKWVPMKKHREPAENCRLKSVTVRMEPSGKYFASLLYEGYSCENQAADKDYSNAKILGIDYAMQGMAVFSEEIEMEEAGFFRKNEKRLAREQRKLARCVRGSHNYVRQKKKIARCHEKIRSQRRDYLHKLSHRITDQYDIVAVEDIDMKAMSQCLHFERRSRSDCVHEQVAKRIANVRFTKVYRIMDTGCSEICWVISLPGRERN

SEQ ID NO: 1968 - protein, 477 aa, Asanoa sp.
VKVTRIAYSARLNPGKYAALHEQAQRLGRVRSLAWHTFGSVAAAWCSDRDLRDLWMRDGTGQIFGVPANAWKETLRDAFDDICASREAAKVPVKRAIAKRPANDRRALFALLKSNRWTDDRWLSRQMRRRWKRGKNRTHNQIIVRSDKVDTFTLAEGGDVWLKVPGLEPRRPVIIPLNTTVAPNGTLRLILRGNRVEVHYQIDASAMKSSQRSCGDREVGVDKGYTEALTDSDGKHHGEDLGRLLTTDSDRLKERNRRRAKLRSIANSAAEKGRHAKATRIKSNNLGTVKRDRQVAVHQARVRTEIFTAVHSVVDKAKVVVAEDLAKTFTGRKSLGKNTNRRLAAWTKGVTAEALRNVSERRGSALVLVNAAYTSQVCPACEGFARRNGDRLHCTPCGVVWQADHAAAVNVMSRRGDPDITLHTPYQRVKEILQERADRQRIRLPIQDSSRAINGGERIIQPRPDSNRSEFVKEAAA

SEQ ID NO: 1969 - protein, 281 aa, Defluviitaleaceae sp.
MPMIKAAKIRLKPTKGQEQKLWQSAGVARFAYNRTLGRQKENHDSGGKFLNDQALRKEFTQLKHKEEYAWLYETSNNITKQAIKDACDAFLNFFKKKAQFPRFKSKRKSRPAFYNDNVKLIKYDNETKQGQFLIEKVGWVKISEPERIFGGKFYNPRISFDGKYWYISIGQDITQPMPTLTGESIGIDLGLKNLAVCSNETTVNNVNKEPSTRQQAKKLRRLQRKVSRKYDMNKNGKEYVKTRNIIKLEKQIRLTHRKIANIRLNHVHQATTEPVKTKPHG

SEQ ID NO: 1970 - protein, 426 aa, Actinomadura sp.
MSRFRLYPTGGQEQRMVKYCEHARYVWNLAVEQHREWRPGRRPAPGFAEQSRQLTQARREFEWLRDVPLVVQVQALRDFAKAKTARFQSGFGEPTWRRKYRHEGFRIIGDGCAPAFAPDGTPRLNPKTGKQVMNRRVAVQKLNRKWARVRVPGLGWVKFRLTRPDLPRAGSYRVTFRHGQWHIAFAIVPEPVDAPGTGKIIGIDRGVTITAALSDGRKLNCPQLTTRERARIRKHQRRAARAPKGSPRQTAEYARAALLKAREVDRRRDWCEKTSSMLARTYDVIRFELNIKNMTASAKGTVEKPGRNVRAKAGLNRAILAQGWGRLRSRTEHKAPGRVEDVPAPYTSLRCSACGWIDKNSRKSQAEFVCSSCGFRCNADINAAGNVAAGQVARPALNRACAGGATPCERSSVREPQPPPAGIPLT

SEQ ID NO: 1971 - protein, 355 aa, unknown
  TnpB Polypeptide
MKTLKLRIKDRHCKVLDQLASEVNFVWNYVNDLCFKHLQRTGKFFSAFDIAKYTAGASKAGLNLHSQTIQAITEELVLRRKQFKKAKLRWRVSNPKSAKKSLGWIPFKKTAIKYQNGQVKYGNHWFSLWDSYGLSKYNVKTGAFVQDSRNRWYVCLVVDNAATLASKGTESVGIDLGLKDFATLSNGQKIAAQRTYRRYEQKLGIAQRARNKKRVKAIHAKIKQIRHNHLHQESTKLVKNYAAIFVGNVNAKSLAKTKLAKSVLDAGWTLFRTLLKYKSENAGVWFDEVNEKYTTQTCSCCGSRDSSPKGRAGLGIREWTCVQCGTLHDRDINAAKNILALGHERLVEGILALGY

SEQ ID NO: 1972 - protein, 339 aa, unknown
  TnpB Polypeptide
LKARHEFLRAAHSQPLQQTLRDLASAYSKAFDPKLPAEMPIFKKKAHAQGIRFPQGFRVQRNGVFLPKIGWVAFRVSARTAKRKVEGEVKNVTLRLEGSRWYVSFQTEREVEEPTHEDAGSVVGVDVGVARFVALSDGTFFEGANAFKKHQRRLTLLQQRLARKVKFSANWRKAKARITNLHSKIANIRTDQLHKSSSTISKNHAVVVLEDLSVVNMTASTKGTVKAPGINVAAKSGINRRILDQGWSEFRRQLAYKLAWKGGTMLLVDPRNTSRACSACGNVSRENRLTQAAFRCVACGHAANADTNAAINILRRAGQARIACGDAQASPKREAQCAA

SEQ ID NO: 1973 - protein, 372 aa, Symploca sp.
MLTLTYEYKLIPDKQQISVIEQTLKVCRSVWNYALRERKDWLKSRKSPVNACSLEQEYIIPCDVPYPNYHNQAKSLTKAKKTNERLKSVNAQVLQQVLRNLDRAFADMQSKKLGFPRFKNKYRMRSYVYPQMLKDCVKGNQIKLPQIGWVKFRKSRDIPDGFEIKQARIVRRASGYFAMLSIQLNVNIPEVQFKGHPLGIDLGLDKFLATSDGELVDRPRFLDQLQSKRKLLQRRLKNKKKGSNNRDKLNQKIARLHQKISDTRKDWHFKLAHHLCDQGKSIFIEDIDFSSWGRGMLSKHCLDAAFGQFVNILKWVAWKRDVFVAEVDNNFTSQICPNCGFHTGKKSLGIREHHCPECGYKTHSRCSRSTSN

SEQ ID NO: 1974 - protein, 393 aa, Nostoc sp.
MYALKRELKLNKKERSLMRGIAGFKRFVYNYALDLITASWNFDDIKTGDSKRLDAIKKVFTSHTMNKPEYAWIKKYPSTVYQSAFIDLKNAFSRWRKGLAQFPVKKSKKKGDSFTVYKTSGIYIEKGKPALPFTNRVVINQSKRINLPGIKEFRLKEKIDFICSSQTFTVSRTADKWFVSFILDVEKIPPIIHPIERIGVDLGVKTLATCSDGTTYTMPVTTKKAKTKLGKLQWRNRNKVLGNKKLKIKASNNARKFLAKTAKIYARIANIRQDTTQKMTTDLSRKAYVIRIEDLNIQGMIANHKLANAISNNCLYEIRRQLTYKQPFYGTKVELVDRWFPSSKMCCKCHHVQPMSLSDRIFNCQSCGHIQDRDENASINLENAPNDKVSPVL

SEQ ID NO: 1975 - protein, 388 aa, Deinococcus sp.
MESTTLRAFKYRLYPTKAQITSLDTTLLLCQRLYNGMLEERRGAYKKAGKSLTAYDQMKSLPEVKAALPEYTAVNAQVLQDVAKRLDKSFKGFFRRVKAGQKAGYPRFRSRDRYDSFTYPQPSQNSVSGDGKHLYLPKIGNVRIKLHRPFSGKLKTLAVKREGQEWYAVLTCEIPKPAPLPQTGNAVGIDLGVAHLVITSDGEFVDNPRPLRSAQKRLRVLQRSLSRKKRGSKRRHKARRAVARLHLKVKRQRDDLHHKAAVKLVRENDWIAHENLSITGLARTRMARSVLDAGWGSLIEKLISKAEEAGRTVVGIHPAYTSQDCHLCGHREKHSLSVREFTCKGCGAFLNRDVNAAKNILAWSMPSRTQGGSVERACPEKPCPLGLG

SEQ ID NO: 1976 - protein, 368 aa, Chloroflexi sp.
MNKMLIRTISIKLDVDGHEAALQETQERFNAAASWIASVCWDENITNTNTAHHRVYGETRSRFELGAQLAVCARAKAVEAIKAMKAKKSQTCPRFGPHGSIRYDARTYRLVSLDRVSLNTMQGRVICRMILGKRQHEMLVDPAWEVGGADLVWRRGIYYLNVTQSKEAPEQIESTDTLGVDLGVVRLATDSEGESFSGAKVHEVRMRYHKRRQVLQQVSTRSAKRRLKKLSGREKRFQKDTNHRIAKSLVQKAVRTRKAIALEDLTGIRERVTVRRANRYERHSWAFSQLRGFISYKAAWAGVEIKLIDPRNTSRTCSQCGHCEKANRQSQASFLWKQCGFCLNADINAAINISQAQVKVPLVSRLRA

SEQ ID NO: 1977 - protein, 398 aa, unknown
  TnpB Polypeptide
MNLVEKHIINSSKELDILTFKCKNLYNKANYVIRQEFINNGKYINKLDMFTRLKDDFDYKELPSRVSRCVIRTLDANWRSFFETIKDYKQNKHKYKGKPNLPQYLNKSGKFNAIFIDSGILKPTKKNPDTIGLSSLKLRIKTKILYKDIVEVNIKPLKTDKYQINIVYKKLEEVLKKDNGNYCSIDLGLNNLMTLTSNKRGVNPLVINGRPLKSINQFYNKQKSLFQSELPKGIKSSKKIIKLSLKRELKINDYLHKSSHYLINYCLENELNTIIIGYNEGWKHEINIGKRNNQNFVNIPFEKLITMIEYKAKLSGLIVKKQEEAYTSKCSFLDLEPIKQQINYCGTRICRGLFKSQKGLINADVNGSYNILRKAVPNVFTNGIEGVAAHPKRIKSFK

SEQ ID NO: 1978 - protein, 282 aa, Bacillus sp.
LQLNIGKLGFTEGKLKQVRVIPKYNEYVVELVIDVPSEQQMIEENARYMSIDLGIDNLATIVTNTGMKPVLVKGKHVKSINQYYNKMKSHFTSILRNGKQTNEGPFTSKRIEKLHQKRYLKIKDVFHKVSHHIVKLAQEEEVCKIVIGQNKSWKQETNMGKRNNQSFCHIPHNLLIQMITYKANAVGIQVVVTEESYTSKASFLDNDFIPTYGENDQNTTFSGKRIKRGIYRSANKTLINADVNAAANILRKVIPNAWTNGIEGLGVKQLANVLTPLTLIVR

SEQ ID NO: 1979 - protein, 367 aa, unknown
  TnpB Polypeptide
MLVRAVRAKLRTNNVTADALADTMTKFNAACNALSQIAWDTQTFRHFDLHKLAYHRVRADFGLPSQLTVRALAKVADTYKADRSQRHTFGPRGAVVFDARCFRMTGVSSAELTTTQGRHSFSLAHGGKQRKQLSQGVTGEADLLFVDGNYYLSIAVKFSDPPKADISGGILGVDLGIVELATDSEGQSYSGAVVKAVRCRVREHRRQVQKKKSRSAFKRLQKINRRASRFVRDVNHCISKSLVLKASVLRKALSLEDLSGIRERASVFSKAMRWQMGNWAFADLAAKVCYKAAEVGIPVVFVDPRDTSKTCHKCGHCDKANRKSQASFLCQSCGFCANADYNASKNIEARGLLSRPLMFRLVAPAIG

SEQ ID NO: 1980 - protein, 375 aa, Proteobacteria sp.
MQTRVIQLKLSVLNRGKTQRLETMQQAFTDAVRFHLDTAYTLPKPSVSSLHAACYRTARDRFPLPASIIQQARDKALAIYRGMQTRKRQGKKTSRPRLERALPLRIAVENLRVFPDKRMARLSTPDGFVWLPLIIPDVWRALCALPHAVSELVRRGTDWYLMLTVKSEEVPAPDGPHFGLDLGVANVALLSGPAVVRFFDGKPLRSLRGRFFRYRQALQQKRKLGMVKRSQGKESRWATQMNHQVSREIVDIVAANGGRLHVETLLGIRDRVKMTRKVNRMVHSWPFAQLLDFITYKAALAGVQVSEEDPRYTSQRCSRCGHTARKNRQAQAAFRCVACGYALHADLNAARNLAAKGACSSGVGAVTAPLNGEVL

SEQ ID NO: 1981 - protein, 295 aa, Okeania sp.
VTIYPAQAISKKSLKKGLLEPSGTNISIPTKIPGKVNEIRLVPRNGYYIFEAVYEVESGKPIDNNRVAAIDLGLSNLATVSSNVKEFQPFIINGKPLKSINQFYNKKKGELQSQLQKQDEKRFNSNKINKLTRKRNFKVETYLHQASRIIINNLRENQIGTLVIGNNQKWKQEVNLGKKNNQNFVQIPHHKFIEQLKYKADKVGIKVIINEESYTSKASFLDLDNIPNYSQGVKHKFSGQRIKRGLYKSKNGLLINADLNGSYNILRKAVPNAIADGIEGLGVIPFRITPGKVSS

SEQ ID NO: 1982 - protein, 404 aa, unknown
  TnpB Polypeptide
MPVKILKTFRFRVYPDAAQIARLGRWNDALRFLWNLANEQRLMGLARPKGERIYPRDSDQRKELKDLRAALPWLADVPQDVCSRLLVVLDFAWRRCFRKISRAPRWKKMGRDYLSFCEPHPKKWRIDGSNIRFPKIGTLRAVLHRPLEGKPKTCTLHRDGDQWFAIIFCEIELTDPAPRDGPVVAIDRGLANFGGTSDGEMIASPHHLQVSLKKLARAQRIVSRRKTGSNNREKAKIRVSRIHRKVRRQRNQFLHVQSARFAKSHGVVVLEKLNVAGMIRSKLARSIADAGWSRFADFLRYKLAWSGGTLVEVPAEYSSQTCSACGCVDAESRRSQAVFYCTSCGYQDHADLNAAKVLLTRANRSGLPVDGSACKGPGRSRKRAGLRVPRRPSEGSTAVELITS

SEQ ID NO: 1983 - protein, 404 aa, unknown
  TnpB Polypeptide
MKIRKAYRFRLKTTPLIEEKFDQFAGCARKLWNMVLAISLRRLEARQPIFWYNEAAFWLALWKSSDEYGFFKACHSQVLQQKLKDLDKAFRDAFDKNQPLKKLPTWRKRNQHSSFRFPQGFKLENRRVYLPKIGWVGFFKSCDIEGTPKNATISKQGPHWFLSIQVEIEKAVANHPATSAIGIDLGVKRFAALSNGSAIGPINAFKAVEIKLAKEQRKLSRKEKFSCNWKKQKKRVQMIHSCIARSRRDFLHKTSTQLSNNHALIVVEELKIRNMSKSARGDREKPGHRVKAKSGLNKSILDQGWGEFKRQLEYKQTWRGGLLLSVNPQHTSQCCHACGHIAKENRVSQADFYCQQCGHKDNADTNAAKNILAAGHAVLACGEWVQLGRSKKQEPPRNCEKVAA

SEQ ID NO: 1984 - protein, 429 aa, Chloracidobacterium sp.
MQRLQAFRFELMPNGQQERQMRRFAGACRFIYNKALALQKERYERGEKKLGYAGLCKLLTEWRNSAETAWLADAPIHPLQQKLKDLERAYGNFFAKRADFPRFKKKGRSDSFRYPDPKQIKLDQGHSRIFLPKLGWLRYRNSRKVLGDLRNVTVSLSGGKWFVSIQTEREVEQAIPQGGAVGIDMGIARFATLSDGTFYAPLNSFKRHEVALRKAQQAMSRKVKFSNNWKKAKARVQRIHSRIGNARRDFLHKASTAISKNHAMVCIEDLQVRNMSKSAAGTADAPGRNVRAKSGLNKSILDQGWYGFRRQLDYKLAWKGGHLIAVPPQNTSRTCPGCGHVSADNRQTQARFVCVACGYENNADVVGAINILSRGIQLLRDEGQDTANALVGMQVDWLPVSARMACGSNCIGSRKQEPAETTARGAIRA

SEQ ID NO: 1985 - protein, 309 aa, Chloracidobacterium sp.
MRTVGLGCKTFTGMPTPSRSGISPKPGNGSSPTLKEGKEAHEPRLKKKGRCRDSFYVANDKFTLEGKTIRLPRIGEVAMTEELRFAGRILGATVSRTADRWFVAIQVEVPDAQFYRRRTSHEVNGIDLGIKAAATISSGEVIEAPKPLKAALRRLEIRSRRLSRKLEAARKAAGFERHARLPEGTRLPVSNNRQKSAATLARLYARMANIRADFTHKLTTRLCRENQALVIEDLNVKGMLENEKLARAISDVGFGMLRSPLEYKARRYGTQLTIADRWYPGSRLCSICGWKNEALTLREMGVCSMWCAP

SEQ ID NO: 1986 - protein, 269 aa, Chloracidobacterium sp.
MRNFIGVARRTRSTALTWASRLPQRSPAVKSSRRQSRSKQRCAVWKSVADVSAASWKPPGRQPDLNAMPACLKERACRYRTNRQKSAAILARLYARMANIRADFTHKLTTRLCRENQALVIEDLNVKGMLQNEKVARAISDVGFGMLRSQLEYKARRYGTQLTIADRWYPGSRLCSICGWKNEALTLRDRTWVCAQCGAHHDRDLNAALNLKRLATETALPVASPSSNGGAAAGTVPAVVGKVTPVRYDGGQQDTSGQEENRAHFCAHS

SEQ ID NO: 1987 - protein, 202 aa, Chloracidobacterium sp.
MEAKLLNGTAEQYQALDEAIRTAQFVRNKCVRYWMDNKSVNKAVLYAHCKDLAKEFDFVRKLNSAARQASAERAWASISRFDTNCRNKAVKKGYPQFKKNCRSVEYKLSGWKLSPDGMSITFTDGFNAGTFALYCNGEARHHILNSKINRVRVIRRADGYYAQFCLDVERKEQGAYTGNVIGIDLGLKGFLHRPERQPCRVS

SEQ ID NO: 1988 - protein, 246 aa, Chloracidobacterium sp.
MEAKLLNGTAEQYQALDEAIRTAQFVRNKCVRYWMDNKGVNKAVLYAHCKDLAKEFDFVRKLNSAARQASAERAWASISRFYTNCKNKAVKKGYPKFKKHCRSVEYKVSGWKLSEDGMTISFTDGFNAGSFALYCNGEARRLILESKINRVRVIRRADGYYAQFCLGVERKEQGEYTGNVIGIDLGLKAFYTDQNGNPVECPKYLRKAEKRLKRPPAQVEQEVQEKGANLNPGTTTSKRKDWAKHI

SEQ ID NO: 1989 - protein, 276 aa, Chloracidobacterium sp.
VQSGLGLPFPGSIPTAETRRSGKGIPSSRSIAVLWNTRYLAGSCQEMECLSPSRMASMLVLLLCTAMVRQRHHILNSKINRVRVIRRADGYYAQFCLDVERKEQGAYTGNVIGIDLGLKAFYTDQNGNPVECPKFLRRSERRLKQHQRRLSRKFKKGAKSQSKNYHKQRKRLGKVHLKVQRQRKDWAIKQARCVVTSHDVVTYEDLQVKNLVKNHHLAKSIHDAGWSQFTAWLDDYGKVWDKAVVSVPPQYTTQDCSHCGHRVVKTLSTRTHSCPQ

SEQ ID NO: 1990 - protein, 302 aa, Methanococcoides sp.
MLKAHKYRLYPNKEQEGKFLQHIGACRFIYNWALEQKIKSYEQDGKSVSRFTLNKMLPELKVEHEWLKDINSQSLQGATLHLDNAFTRFFREKKGFPKFKSKKNPVQSFSIPQFYKVDFDNGKIKLPKIGWINAKLHRRYEGKEKTATVLRTSTGKYHISILVNDEKEVPVKESFNISTTVGVDVGIKDFATLSNGEKIENPKYLTQSMKRLKVLQKRLSRKKKGSANRQKAKLTVAKLHEKISKQRHDFQHRLSYKLISENQAIALETLNVNGMMKNHNLAQHIGDASWSSFVEKLEYKAE

SEQ ID NO: 1991 - protein, 380 aa, unknown
  TnpB Polypeptide
MIYVTKYRIYPSREVADIIFKQFNICTDLRNHCLDTHRFDVRMIPELRKEHPELKEVHSVVLQNMIFQIKDNIKALSKVKSKGKRVGKLRHRPVRTLIYEQTGYKIIDSKKLVLSKIGEIPIVISRPVIGDIKQVVVKFNRSTHKWSASVISRTPDENGIRDEKRTVGIDMNLTSFSHDSDGKIFKHPHNVRKASQQLGRAQRKFSKKKKGSNNRRKERVKVALIYNKVENCRDDFLHKWSNYYVKNYDRIAVEKLNIKKMLEENPKNIPRWIKRGMNRNTLDASWGKARTFVTYKAERAGCQIVAIDPSYSTQDCFKCDTRVPKELSERIHKCPTCGYTVNRDLNAAFNIRKKAFAVGWGTPESTLTEIGTSGSISTLN

SEQ ID NO: 1992 - protein, 412 aa, unknown
  TnpB Polypeptide
MSFVSYQFRIYPNTFQRQSLIDHFGCTRWVYNRYLSEAHDCYEATGKTMRCNDFIVRLVKLKNEFPWLKEVNSQSLQMAARNAERAFVNFFEKRAKRPRFKSKHTGRQSLQCPQHCKVLFPKIGTKGHIVLPKIGPINAILHRRFSGPIKTVTVVRDPSGKYYASVLVDNAQALLAPDAIDFEHTAGIDAGIKMALTVVGQSGTVRIENPTFLKKNSEQLKKQQKRLSRCKRTVTFKENEKGEKVKEVTVSKRYEKVRHELARTHEKIRHRRKDWINQVTRQLVNDSQVTTYVIEDLNLKGMVKNHHLARAISDVGIGNFYRILRYKLEAAGKNLVVAGRWFPSSKLCPECGTKKESLTLRERQWCCAHCGHEHDRDEAAAKNLRHWVKLTEIEKHRYGRNGRALEGEVIPF

SEQ ID NO: 1993 - protein, 412 aa, unknown
  TnpB Polypeptide
MRSQKIRLKLTKEQENLAWWYSKVSRNFWNLLVDIDKRNNKGEFDEILNKNGNKTYYSKFHNRDVYNLNESDYRNLAKFVIAKNCEDDSEKWSWYYQPNQSFIYSFLSRELVQIRKQNKGKLNFRSVDKIEPNFDVRCGVSSNNKRPSRIYLKENGKLQIPTIGDVKFGSVRKGFDLSGKKQIAKISFDGKYWYLSYTEDVETSVTNLPDYTDGIGIDLGIKTLATVSGGTSVPNIKTFRRVRILNKRLKRLQRKVSRKYLINKCNKHNKTKNIIKLERQIKLIHRSIRNIRINHIRKFVSELVKKQPQYIAIEDLNVKGMMRNKHLAKDIANCSFYTIKEHLIRKAKERNIIVRLVDRFYPSSKTCSNCGGYKKDLKLNQRVYHCDNCQEKIDRDFNASLNIAKTDKYVLA

SEQ ID NO: 1994 - protein, 402 aa, Actinophytocola sp.
VSRALVKRAYKYRFYPTEQQRHELLRTFGCVRLVYNKALDARTAAWYTEQRRVSYVQASAMLTEWKNTDELAFLSEVSSVPLQQCLRHLQRAFTNFFDNRANYPRFKSRKKSRASAEYTRSAFTWRDGNVTLAKMSEPLNIVWSRPLPEGARPSTVTVSCDAARRWFVSILVKTTVDHHPRSTAAVGVDAGIESLMTLSTGEKITNPRHERRDRERLVKAQRELARKRKGSANRAKARLNVARIYAKITDRRRDYLHKITTRLVRENQTIVIEDLNVSGMVKNGNLARAISDASWTQLRLMLEYKASWYGREVIVVDRWFPSSKMCSECGTLVDTVPLDVREWTCRCGTSHDRDVNAAKNIVAAGLAVAACGGSARPTRRESVRQLSMKQETQPVRVGIPRL

SEQ ID NO: 1995 - protein, 213 aa, Methylococcus sp.
LGWVPFKVGSAVWKDGQVRFNGHFFKVWDSYGLAQYKFRSGSFSEDSRGRWYFNVVIEVPVAPNGMTSAVGIDLGLKDYATCSDGTRLEASQPYRNLQEKLGIAQRAGNKKQVQKIHAKIKNRRKEAVHKFTRQVVDNNGMVVVGNVSSSKLAKTTMAKSVLDAGWFMLKTQLSDKAKGQEVEFLEVNEAYSTQSCSCCGSIPDSSPKGRAGR

SEQ ID NO: 1996 - protein, 403 aa, Okeania sp.
MQLVEKHTINRQHKFWKECDYLALQSKHLYNAANYTQRQYFFAEGKYYNSIDIYHQTKNHEAYRYLPTKVSKQIVRRVSEAWKGWKAALKDWSKYPGKYLGKPKIPKYKHKEHGRNTVIYPSDALSKPLLKKGIVKLSQSNIEFSSKAANINQVRIVPRLNCYVIEVVYTVPDVDKKQSQYAAGVDLGLTNLMAVTSNRPGLKPLLVNGRPLKSINQFFNKRLSKAQSKEACRQIKELNSKRDNRIDNYLHTASRRVINWCIANDITTLVIGNNQGWKQSIKIGKRNNQQFTKIPHSKLINMLIYKGELAGIQVIVTEESYTSKASALDGDTLPKYKPNSKHTFSGRRTNRGLYKASTGKTINADTNGSLNIARKVIPNFMDGIEALPFMPLVLKLWTKNEFV

SEQ ID NO: 1997 - protein, 415 aa, unknown
  TnpB Polypeptide
MKSTRHINHWKKEKIKKTLQETKTRRDSMTCKVIECKVVSNSLSKVTKEQLNKLFVEAKWLYNSILASENIGKFDTKVESVPVKIKGVFEQRNLEQISAQMKQGLHTRIFSSMSTLKALKSKGYKTGKLKFKSQIKSIPLKQHTQTFTILKNSKRIKIQGIKKPLKVSGLNQLPRNYEVANANLVKTGNDFYIKITIYTKKEKFDVPNQSIGIDFGCTTQLTLSNGEKIEYQVPVSNKLKRLDRKLSKSKKGSKNRTKVLVKREKEFNHLTNERKDIKNKIVSKLVKNYQTICFQDESISDWKTKGHGKKIQFSAIGGIISALQRKAVTPIVVEKYYPSTQLCSNCGNKQKIGIRERTYHCKSCGSKIDRDINSAINIEKEGIKSLVPTECREVKLVETKTSAIDLLPNQLQVQS

SEQ ID NO: 1998 - protein, 430 aa, unknown
  TnpB Polypeptide
MKKAHKIRMNPTAEQVEYLKRACGTRRFVYNWGREHWEAEYQAYKAEQETIPEAERKLQSPNAMALKSQFHALRERDYPWTYDVTKCVVEGAFDDLDKAYANFFAGRAGYPQYKKKGKSRESFYLSNDKFVVGSHWISIPGLGRFLLDTQKIEKGRGKLRRKLGTVNLSEKLRFIEEGKASFPTKKRNRRKQALCQQVKIMGATVSCEAGHWYISIQVDIKQALPPTPQPVVGVDVGLKQVAVVSDGRRLENQKPLAVHLKRLGTLQRRLSRKKKTKDPETGRTTFSRNYEKQRLKVARKHQHIAALRRDVQHKFTTELARTCGAIGIEDLHILGMMANRKLARAVADAAMGQLLTFLKNKMASAGGQVFIASRWFPSTKRCSGCGHVKMRMPLKHRTYQCLACGLVIDRDLNAALNLAQFALEKLRQLA

SEQ ID NO: 1999 - protein, 403 aa, unknown
  TnpB Polypeptide
LYFAELVVFSIPIVCAITFIYFAFLNTVMMKTIQTVVEELPEQRVVFNENFALMTEAQNFVVSSCYENEQTNSFRMHHINYPILRSRFGLPSQLAVVANKFACTAVKTAIKREAPRPRFSGKSVHYDSRSSTVDLTKKTASLLTKNGRVKVKLNIPLYFQKFADWKVKESNLVVCRDGKLRLMISIERLSRVSSKKGRMIGVDRGINNIIATSDGWLHDSDHLFYVKNRYRNMRRVLQAIGTRSASLHLSKIRQKEKRFGADINHVLSRRLIESAGKDGVIVLENLKGVRSARHRQKQNWRFSNWSFFQLESFLQYKGEEAGVAVEFVPARNTSKTCSVCGSLRRGQRQGSAFKCKVCNVVLHADLNAAKNILHRYQSLTGCCQPAYCSPNGSNKPPALAGGS

SEQ ID NO: 2000 - protein, 485 aa, Micromonosporaceae sp.
VVVYRTARVGLRVTAGQRRRCFGLLRSAGDVWACVLEVNAWRRRRQDSPLAGYQELCRQLAASGPGTFGDLDTTGARSVLRRFSDAWFAAAARRKAGDTTARFPRRRRALVPVRWYHGTFTITGRRVRIPCAKGSPALWVRLARDLPYPVEHIRSITLGHEGGRLFLDVTAEVPVAAYPPGEGPDPGRVAGVDLGIIHPYAVAGPGGQGLLVSGRAIRAEHRMHLADSKGRRRAVARRAPKPGQKGSRRWRRYRRRTRQVEGRHRRRVRQAQHEAAKTVISWAVQQRIGVLHVGDPRGVLDLPAGRRHNLRLRQWQIGRLIQVLTDKATLAGITVHLVDERGTSSTCPRCHRRVPKPSGRVFTCPHCGYTGHRDLTAAASIATRAPGGGSTTSPAHVVLPQVVTHRRAGRHLPGAGQSRRDPRRPPRAAPRGQLASGGPPHPPWEGSRSPTTARIHNTTRNPVNVSGHRTRLPRNWSRSGRGLRA

SEQ ID NO: 2001 - protein, 440 aa, unknown
  TnpB Polypeptide
LKKAYEFRIYPTLEQEEQFKKANGLCRLYWNTCLAEKNEAFSKGENYSIKTFKSTFEKTRPEVLEWGKEVDSTIFAAEWKIITGAWNNFFKSTKKQSLGNFGKPQFKSKKKDNVSITFTSQNKPRILKNGYLFLTRKLGPIKGVFHRWVEGEMLHATIKQTKTGKWFVKICVEKKDEKKNKSGKSVGIDWNCDDEDFISMSNGTKVKCPRFLRQSQKQLKHQQRILSRKMYFPFFQKYGRMPELKNPNDAQKFKECFVESNNYLKQKYKVALLHEKVTWQRKDWLHKLSRQICNEYETIVVEDIDLRKMASELRHGKVVGDQGFGMLRQMIAYKGHLEKVKPYNTSKMCHNCGFVNPKVVLGVKKWKCPNCGENHDRDINAALNILFKYNTSQSVVGRELTENTNASGAPKISAMKEEILLTDVYNNRQQGREAIESLAQ

SEQ ID NO: 2002 - protein, 228 aa, Moorea sp.
VAKGQGRAKYPRFKSFHHRQSIQYPQYVKQIGDCLNFPGKLGTVKTKIHRPLDGTIKTVTVSKTPSGKYYASVLMEYESDNAQPSTDGNVIGIDLGIKDFAITYDGEKTSKFSNPKHLAKYEKKLAKKQRIAAQKEKGSNRRKKARKIVAKVYEQIGNVRQDYLHKLSRKIVDSNQVIVVENLNVKGMVCATRTLRERNHKLAKAISDRVAWPLGQSRLGNFCKLPFL

SEQ ID NO: 2003 - protein, 502 aa, unknown
  TnpB Polypeptide
MPSFILELEVSYSGTLLKERKPGTKLKDLGIKHTLDTKMNVAVAIRNTVKKEALRRLHILQHDREYQALMEEYRTCKRDEEAFAKVCQKLNAVKRRIGFSEYDLHKYVLYAKHQYSDILGADECQKLATQAFQAVEEILYGKSQKANFLPRTSDSSVEGKSHKSTLKYIGDACIQFGKGNQYPLIIKKNDNYAIEALKHKVKYVRLVRRTIRGKQRYFAQLVLDGIPPKTKNLNYGRKNSRVGLDEGVSTIAVVSKKKVMLRELAPGTVMDEKKIRQLNRAMDRSRRATNPGNYNSDGTVKKGKKVWKKSNRYRKLEAKRKELYRRSAWNRHTSHQALANEIVSLGLDIRVEEMSISGLSKKAKKTTVNKKNGRKRSKKRYGKTIMSRAPAALIAAIDQKLSYVGTKIKKVDTFTVKASQYDHVSNTCNKKPLNERWHTLPDGTKIQRDLYSGFLVCYTKDELDRVDRKACIRNFKQFQKLHDQEIAHLKELDDPALRWYIA

SEQ ID NO: 2004 - protein, 331 aa, unknown
  TnpB Polypeptide
VKIISSYGVELRKQNIPIRQTLDVYRAAVSYLTEVYAQVWEELERIPGTKKRFNEAEHLIHTTKKNQARFDFDIRFPKMPSYLRRASIQNALGSVSSYKTRLGLWEKTDRLEGKPRLVYENHAMPVFYRDVMYREDEGGKDAAYLKLYDGHDWKWFHVRLSHTDMEYLRKNWSGKKASAPTLEKRHRKYFLRFSYTEDVILAKIPAKEQIICSVDLGINTDAVCTIMRSDGTVLGRKFINFHSEKDRMYRVLGRIRRFQREHGSVQAKSRWAYAKRLNIELGRKIAGAVTNMQREPCRYNCLRIPGDKRKDIREKETETASVEKTGYPETL

SEQ ID NO: 2005 - protein, 402 aa, Escherichia sp.
VKRLQAFKFQLRPGGQQECEMRRFAGACRFGFNRALARQNENHEAGNKYIPYGKMASWLVEWKNATETQWLKDSPSQPLQQSLKDLERAYKNFFRKRAAFPRFKKRGQNDAFRYPQGVKLDQENSRIFLPKLGWMRYRNSRQVTGVVKNVTVSQSCGKWYISIQTESEVSTPVHPSASMIGLDAGVAKLATLSDGTVFGPVNSFQKNQKTLARLQRQLSRKVKFSNNWQKQKRKIQRLHSRIANIRRDYLHKVTTTVSKNHAMIVIEDLKVSNMSKSAAGTVSQPGRNVRAKSGLNRSILDQGWYEMRRQLEYKQLWSGGQVLAVPPAYTSQRCACCGHTAKENRLSQSQFRCQVCGYTANADVNGARNILAAGHAVLACGEMVQSGRSLKQEPTEMIQATA

SEQ ID NO: 2006 - protein, 489 aa, unknown
  TnpB Polypeptide
MLQLIDQDEVVGINSHKEIMRSYKYELKPTKKQEVSLNKTLSTCRHLYNLGLEQRKKSYEKGGWSINYSDQQDQLPELRQKCAEYQDVYTDVLQNVLRRVETSYDNFFRRVKNNNSDSGTKEKPGFPRFKGYGRYDSFTFPRLGYGCHIVNKSGDKDEKGNILRLSKIDDIKFIKHRIIGNGSPYLIKTVTVKREIDKFFVTFVAETYSEISSPRQYTNIEELNNKSVGTDMGLSNLATLSNGKIIEPPEYLRESAKKLTKHQRRLSKKKRYEKEIEIVDKKTKKKTTKKIKINSKNREKERIKVVKIHRKIVNQRKNFNHEVSRTLINNFDLISFEKLSIQNMVKNHHLAKSISDASWYQLQMFTSYKAEWAGKIVEFVDPKNTSQLCSGCGNKEHLELSDRIFKCSKCGLEIDRDLNASINIRNRSIEYQRLLKDIELIKNKELTPATGGGACGESNRNSEKQETMSDKDRVNIENMSIQAPPFRAG

SEQ ID NO: 2007 - protein, 467 aa, Tolypothrix sp.
LLLNYQYRVYPNSNQKLQLNSWLRICRYWYNRQLRDRFDWYENNRTSINSCPLNCSLPKLRDNPSFYSQKKQLPIIKEDLIKVGYSGELLDFTSVPSQTLQDVSKRVDLAFTRFLAGDSNGSRSGKPRFKNAARYRTLRIEGQAITVERVEKSWLFLSFSKLKGWLKVRLHRPLPNGFVLKNALLTNKADGWYIAICLEDPNVPTFAPEDVIPSWDNTLGLDAVLHENDYLATSENSKLPSIKSFRKSQKRLAQISNRKSARNKGSKQRHKLAKREGREHQRIARTRKDHAFKTAHALVRIGKKVIVYEDLNLRGLSKPNKAKQDEDGKYLPNGQSAKSGLNKSWNDAAFGQFFATLEYIAGKAGTRTIAVRPAYTSQLLAYRDEFIFTDCDIRKYWDEFESLWVDRDINASINVKRVGLGLFPTIKRRKGNLVVGNSTTNSTSKEVLATLRMYQKPTFSRYSDECR

SEQ ID NO: 2008 - protein, 345 aa, Tolypothrix sp.
VLLNVQTFHLSAIALTIDETSFWTPKGARPPGFKKVKKYKSFTLKQAGYKFLGGNRIKIGNRTYQYWNSKKIEGTVKTLTIKRTSLGELFLVVVVDDGSNPDIQVKTGRIAGFDFGLKTFLTCSDGIKIESPQFFKQSLNDIKKAGRQHSKKLKGSSNRERARKNLVRKYEDISNRRRDWFWKLAHDLTDKFDILCFETLNLKGMQRLWGRKISELAFGEFLQILEWVAKKKKKLVVFIDQWYPSSKTCSSCGHVLESLDLSIREWRCPSCQSVNGRDDNASKNICAVGASTVGLGDVSRATPALQLLFEPRIPAIKLRGVCQKLFYGSGATIYFSRTAFQTKYA

SEQ ID NO: 2009 - protein, 440 aa, Crenarchaeote sp.
MILLLALTGLKMGVKIGHVEAGLRSYDWRMPEEHNRIIVDHISDLLFAPTDRARENLERENVHGKIYVTGNTVIDAVIQHMPLAEENSKIINKIRFGEYILMTAHRAENVDDPNVLKNFVEVCIHSPLPIVFPVHPRTAKRLKEYGLYNILKRCGNVQLLPPVGYLDFLMLMKHCKLILRASVDLGIVNLATVYVEDGTWYVFKGGVLSQYEYYNRRISEVQKVLTKHKQSRSRKLKLLYDKRRRFLRHSLNSMVRKIMEELKEKGVSEVVIGYPKEISRNHGNKLIVNFWNYSYVIKRFEEVGEEVGMRVVKVDESYTSKTCSLCGEAHESGRVKRGLFKCPRMGKVINADLNGAINILHIPESLRSTDRRISVVRDRGDGLKTQPVIYRWTNGVGWLLATSYEVVKMKAVNHKPMIRPKGTLALPGRGGGQKHHIIGM

SEQ ID NO: 2010 - protein, 644 aa, unknown
  TnpB Polypeptide
MNNIKEKPPDFFKGVKVPIKYIIKQPDLNLTKINDAVMRAHQITIHGLMFIKLYLLDHYNTYKKLPEIDHSFVVNCLKIVCVKGSSGRPPSDKTKNLKDNLQSFYDEHYKPLRQDDNLKYTQMNTILDYLADDIITVYKNNIQLHYIEYVERFVNICWKKKYIIDKIRRLNITKKEKDNRINKLCSQLRHIKNDIINVETTKYKSHHTYHNWINDIKKHIIPNKSFAKDSIHYDIHAKQFDYLPCMIYMMKYIEQEGISINNVFPLRSDIIPKHITLDSTTIVNLLLRKEQGNKGDYLTEGNLKKKKSEIWGFFFRTQRKCFKREGYSFHHMIETDGISCSILLIRNDLIDKFSKPKNTSLSKELYIDELDDYTKIQNKKIVAIDPGKCDIISCVDGCCKDANTFRYTQDSRRKETKSKKYNKLVLEFKKEQIDGKTIIEYETELSQYNKKSLDINKYKEYIKKKNEINNILFPFYEKYIFRKLKLNGYINRVRNEQKMINRFKKMFGDINDVVVCFGDFEQHKHMKYKEPIKGKGIRTLFKKSGYNTYLVDEFRTSCKCCNCEGGDCEKFMIRENPKPWKNNYALVHGLLRCKSGCGLWNRDVNGAKNIYKIAYNHINGLDRPLYLCRSKQSDTLHDVSNHNL

SEQ ID NO: 2011 - protein, 418 aa, unknown
  TnpB Polypeptide
MANAYRIERVRLYPTTAQRRQLESYAGAHRWTWNWALAAREAHFAAHQTSLSYYEQGRALTVLQQQPDNVWLTGIPRRVKVGALRDLDKAYRAAFRRVQRSERPGFPRYKARKRGDASFEIPAETRFDGRRVKIPGIGWVRARGGRDIATTTTTARYFRDGAGNWWAALRYTVPLADAEVSDVSAIGVHLEPGHAMTLSTGEIFNESRYVSRSDRKLRRLKRAVRRTQPGSGNRQRARRRFARATRHVANQRRDWQHTVSRRLVDTHPRLVMQERGMTVHATDPESQRAVWGDHARRGRVSDATWGGLTRLIREKAAAAGCPVVTIPAEMSADVTCSRCGHVREALPELVNIWLCEHCGTLHERGMNAARNILSVGVREDARSERRREAPGDAKRLWTHNKTLAGAGEERFASASRKQ

SEQ ID NO: 2012 - protein, 403 aa, unknown
  TnpB Polypeptide
LIVILIRKAYKFRLEPTADQVARLAVLCGHARFVWNNGLRHCLSKIDDGEKVPSYAELCKLVTQWKKGYDLSWLKEAYTDNLQQKLKDLHGAWMRCFDKSLKAEKPRFKKKGKNQDSIRFVNFNKYCQLDGKRVKLPSKLGWVNFRKSQDVQGTVKNCTVSFKSGHWYVSFQVEQEVSEPKHGSISAVGVDMGIAKFVTLSDGSHLKPLNAFRKHENRLAIEQRKLSKKVKFSSNWQKQKSKIQKIHTRISNCRKDFLHKASNQISNNHAMIAIEDLRVSNMSKSSKGNADQHGKSVKAKSGLNKSILDQGWHEFRRQLEYKQLWNGGLVVAVPAQYTSQTCPCCGHVSKDNRQTQAYFKCVECDYTNNADVVGSLNVLERGHRLLACEVSGAVMPPATGTCR

SEQ ID NO: 2013 - protein, 449 aa, Caldanaerobacter sp.
MRFAYKRLLEGYDRKTLKRDLQGTFDLNSRYVDDAIMKARSTLESARELGKSPKKVIFGGRDLFGKLQKRHINGKEYQKLKTKWQERRKGNLYSRGDKSKKGNLNTRIEVEKNGTFLRINVGERKYVYAKIQAGWKKNKNREGILQQISMSNIPYSVELKLKNGNIYAYFSIEEEYPEIKITKEKGVIGIDINAYPDNISWTEVDEKGNLISYGNIPMPELASGSKDKKEYFRWQYAHKIVKIAKEKGKAIVIEDLEIKEKGKRGDFSGRKSRRIRHSFSYKSLLSKIKTLAKREGIEVIEVNPSYTSIIGMLKYAPQYMITKDVAAAYVIARRGLGREEKIPDNYINFLNTLTEKELEELKDHIKNTVKNIHLKKKHLKEINKVIKLIQSLESELERVLKSLYGTSFSAYDFWQVLKVAVVTSLSPEKVKRDFSTLKGLLIQGKWRDP

SEQ ID NO: 2014 - protein, 456 aa, Streptomyces sp.
VGGASVTLGCGLDGGVQVIGEAEIEIRMYPTPAQAEQLLLHCAHARYVWNLAVEQHSHWKRGRKAAPGFAEQCRQLTEARCENEWLGAGNADVQQQALKDFAKAKNARFTSGFGEPSWRKKFVHEGFRVIGTDRVPEYDTNGSPKLNAKGKQVMGRSVVVQKLNRRWAQVKVPGCGWVRFRLTRPELASAKTFRVTLRNGQWHIAFAVIPEPIDAPSTGEVIGIDRGVKITAALSDGRTLNCPQLTVRERAQVRKHQRRAARARKGSPEKTAEYAKVARLKAREADRRKDWCEKTSTMLARTYDLVRFEKLSIKTMTAKAKAKPDPDQPGQYLKNGRAAKAGLNRVILAQGWGLLRQRTEHKAPGRVEDVPAPYTSLRCSACGWIDKNSRKSQAEFVCSSCGFTCNADTNASINVAAGQGGIPRPRRSACAGGTTLPTKRSSVREPQPRWVGIPLF

SEQ ID NO: 2015 - protein, 388 aa, Anaerolineales sp.
MSTMIRKTFKYRLYRCDKRDKHLHDKINIAGIVWNHCLALQKRYYRLTGGYISKYRMQKHIGKLRSKSPRFAYWKKLGSQTTQLVTHKLDDAYQRFFKKLAKRPPKFRKVKLYRSITFTQAGWKLLGKNKLWIQGKVYKFVKHRELEGAIKSVTIKRDSCNRLWVCFSVECEIEIPKRVMTGKTAGLDFGLKTFLTDDTGKVYKSPEFLRQELKTIKRLSRQFSLKQKGSKSRKRAKYALSRAQIRVSDKRTDSHYKLAHQLCDEFDTIYLEDLNIAGMKRLWGRKVSDLAFGGFVTILKWIAKKCAVEIVFIDRYEPTSKMCSHCGNLQDMPLSYRVYECNCCGLVLDRDHNASINIKRIGASIQLPEACQTGTCACIAVDGRSTRI

SEQ ID NO: 2016 - protein, 375 aa, unknown
  TnpB Polypeptide
MLKAYKYRIYPNLEQQVLIEKHFGCSRFVFNWALALQQRYYAMFGKSLSRSKIQSHLVKKKKKARFAWLSEVNSQSLLNALRGVDTAFTNFFKGQAKFPRFKSKKIPQRSYQCPQHCTANFEQGVINLPKIKGIKTVFSREFEGRVKTVTISKTATGKYYASILVENNEVVPTPTTIEPSLTVGIDLGISHLLNLSDGSKFDNPKHLSKASQRLSAQQKIFARKQKQSKNYQKQKLAVARIHEKVRNQRLDLHHKITHSLICENQATSYAIEDLAVKNMVKNRKLGKAISDVGWGQFVTLLTYKASWYGKNILKVNRFFASSKICSHCHHKLDALPLSVRHWTCPSCQTHHDRDINASNNIRQQALADVAGLATV

SEQ ID NO: 2017 - protein, 451 aa, unknown
  TnpB Polypeptide
MLEAVKVALDPSPVQERLLLSHAGAARFAFNAGLAHVKEALEAGEKLEWSFYSLVRWWNASKDTLAIGDDGTPWWRENSKEAANTGLRSLASALSNWSKSRKGQRKGKRVGFPKFKAKDRATPRFAYTTGSFGLIQGDPKALRLPKVGRVHCMEDVTGRVGDARVLRMTVSQRAGRWFAALTVERDDKPMTKPPKGGAVGIDLGVKTLATLSDGTVIENPRCLAASERRLKRAQKALSRKTRGSNRRAKARAKVARLHAHVANQRQDAMHKATTWLAETYSDISIEDLNVAGMARNHRLAKAVSDASFGEFRRQLEYKTARTGAALRVIDRWYPSSKTCSACGAVKAKLSLSERVFHCDACGLSMDRDMNAAININVAGSAPETLNARGGDISRADTPSGNANPSETRTKLRCKPRETWSGSSQGLPVSRKQVACNVYPDRKETQYDYRRA

SEQ ID NO: 2018 - protein, 420 aa, unknown
  TnpB Polypeptide
MLKVYKYRIYPTNEQIEHFVQSMGCVRYLYNKALEAKIKHYETTGKSLTCFDLITTMLVEEKKNNEWLKIPYSQCLQMPFRNLDNAFQKFFRKISKFPTFKKKHSGHQSIQYSQNVRIDFKKNILRLPKIGNVKIVIDREFNGKIKTCTVSKTPTNKFFISILVDDGKELPIKQPINETTSIGIDLGIKDFAILSNREKISNPKFLGSKLQRLKVLQRRASKKKKKGSNNRKKANLKVAKLYEKVTNQRADFLHKTSTKLIRENQTIILEDLNIAGMMKNHCLARVISDVSWAKFITMLQYKSEWYGKNLVQIGRFEPSSKMCSCCGTINRDLTLKNRFWTCEGCKAEHDRDVNAAINIKKFGLIGALCAPGAASPNYGKNQILSRPERSAELVEMPEGAAPKVRENKDRGDNKLLTKVK

SEQ ID NO: 2019 - protein, 477 aa, Deinococcus sp.
MEHPYLRVRLALHPAAVQAAALDSQWQLAQDIWSVLARHARLEASGHHQSMDRVAGHAGAGVALDAPSPRPLPRRSNAARRRELEALARERGWRAQLGSVTLDGLVSDFGRILKSLGPVAPPNAIPLTPPPDFALALGGLARPVDELHAEIVGVPGLVRTPMFLLPGPAAAAVQTWRQTFGGELTTRREALEARLLAGDPAADTDYLAHVARYGLIEDHLGALSACPVVAPTSVTLVLAEAAQLLRTETGTYEIAWAFRLTRVTPLVYQDLVALDPGVRSLWSWVSGHHSHGRSPMPLRLQRPWSPIMPAPSAGLLVRPQDLIYARLRRHQLLHRTRLRPVLKAGLARFLRFAAVAVEQTDFRGMWRRGEDYPEAADFLSTRLYEQFLFDCARLDPAHRMAVWVPPEWTSVDCSLCGSRSALRYRGRAGRCQVCRQHVDRDHNGARNVYRRGAAQLVARGLPWTPAPLPAAQRRRRQ

SEQ ID NO: 2020 - protein, 458 aa, Deinococcus sp.
MPKPPLRLTTRIHPSPPQHARLHHMWTTLLAAQHTLTAWLHHRAAGGTRSLLDFASGHGPVTAGHPRRPARALPPLDQLNAEVRAARDALGWTPAVPPGALRWMTAETAREWRAAGQRRPHGPLPGPWPPSRAPELHLDNAVQVLDPVTLHLACLDADELIPADLYLPTPYWHALLRRQQRRAAHERARCDTLEHTWLDAGDGKAAAELLTRRARGGPWTELPWPAVPDALPGDPVSREGTVLRWVTGDGLPGRWVAEWTFGTGDVMAPPWVFDDVLGVDLGYHHPFACASGGLSTLTPRPFRGSFAPPPLQASNARTAPPRHGAWARARHRRALFLRLRPIFEAHLDLALQHRAVAIEQVAWGGFARRGFPFASYALDVGLVAWLAWLDALATSHGVRVLRVPPAYTTRTCSACLRVGPRPASGQPFRCVGCGYSAQADLNAARVIRRRGLAKLGRP

SEQ ID NO: 2021 - protein, 509 aa, Microcoleus sp.
MSNWVDMLRSHYNWCLNDRITQYSQQFIQGKYCEIRTKSEACPLTSCVSRNGATGSPWKLGKIDKDGKIKNPRRNPGDIQITALPELKVARPWFAGIDSTVLQQNVKRLDTAYKNFFEGRRFPKFKNRSNFTSFTFVMGVKIQGNKIYLPKLGWMRFHNSPPIPIGFTIKACTVRKRQNGWYVSIRIEDKSVPDYTTKPLKDVVKIVGCSRGITKLVHLSDGSQIENPKFSTTNKAKRTLRIRPRRVNRKAKGSKNRKKAAQKVGLFHQKISDKRQAHHWKVANKIVDRKIDGIALEDLNISGMMRRCQVKIDEKTGRFLKNGQAKKKGLNRSISDAGWGELILKIEYLAVKQGKIVIKINPKHSSQECRNCGNIDKSNRDGEKFICAKCGYQEHADIGAAKTIRDRALKLVRGGTAKRECLHLNAQKRSSRRAGKRDEFGNPGNRDIESEISQESSRLQAPGVSTQLGSHTSAVRGRYNLGRCLVARSGIARLNCRAAKIWLNTLFIS

SEQ ID NO: 2022 - protein, 505 aa, Gammaproteobacteria sp.
MSKCRPTPTFVLELPLRVDPTAERILRARFEAARQLYNACLGEALRRLDRMRSSKDWQAARQIPRDQKKTRREAFQEVRQRFGFTPHAIEAYGIACKNACWIGHHLDAHVTQKIALRAFQAVEQYLLGKRGRPRFKSRIKALQSVEGKSNAAGLRWRGWVAWKGLVLKPLFDPKDKHGIQTFALQCRVKYVRLLWRQLRGKRHWYVQLVLEGHPKWKDKHPVGEGDVGLDIGPSTIAAVGEKEALLEPFCPSVAFLSQKIRRIQRAMDRSRRASNPDNYNPDGTVKKGVKVWVYSHGYLRLQAELQELQRRMAAARKTEHGQLANRLMAMGHIHKTEAVSIRAWQRRFGRSIRDRAPSLFLNRLNRKAESAGGKLERFPTRTTKLSQTCHCGSVEKKPLSQRIHTCGCGVVMQRDLYSAFLARCVEGEDLCVGLARARWPGAEPLLRAAWREATCDGKGKVPATFGAFRRRSGSSEEGGIAKAEASMPSRDGREAAVVPTRTPRL

SEQ ID NO: 2023 - protein, 386 aa, unknown
  TnpB Polypeptide
MIKNYKYRLYPTPKQKVILNQTLTTCRYLYNSALYHRITEYKTNKHSVTYNEQANYLSSHKNEYHLQVHSQVLQSTLKRLDTSFKNFFRRVKEKKGKAGFPRFKGDNRYHSFCYPQSGFELSNSGNRITLSKIGTIRLVYSRPIKGVIKTCTIIRDVDQWYVVLCCESPDVPFIQCDRPEVGTDLGIITYASFTDGTAYDNPRHLLKSEYKLKRRQRILSKRVKGSKNRCKQKIIVARLHRKIRNQRDDSLHKRSRELVNTYGTIAFEDLAISNMVKNHKLAKHISDCAWGKLVRYTTYKSESAGVTVGLVDPRNTSQMCSNCGQIVKKTLADRVHSCSCGVVLDRDYNASINILNKWKKSTVGHTGINACGDETSTLALLGQVMS

SEQ ID NO: 2024 - protein, 426 aa, unknown
  TnpB Polypeptide
MIIHKAFKFRLAPTAEQEKAIKQHAGNTRFLYNLLLEMNEKKYEKEQKLIFRYDMIMSLPKLKEEHDFLKISIAQSLQQVGRHLDKALKDFLDKKQPDKQFPTFKKKRKNKDSFTVPQHYKIRKNYIYLPKIGEVPWIKHCAIKGKVKHITITQDGSQWYCSVNVELKVKKPKPVIKPGNIISSDLGIKTFAMLDIGEIIDLEKVTKKEDKKLKKFHRHLSRKKEGSNNRKKHLKRLQVLYRKTRNKRKDFQHKESRDMINKYDGIILETLNIKGMMKNHCLSKAVQNCAWYQFITFLKYKSAWAGKPFIQVDRWAATSKKCCRCGWHHKELKLKDRTYKCQDCGLVIDRDLNAAINIYKIGIIQYLGLKIPWDSRESFDLYVSLKGDKLVKHTPGENLGYRASAQWGSLNQEKETLGLDLPVVVG

SEQ ID NO: 2025 - protein, 360 aa, unknown
  TnpB Polypeptide
LVYNLALEVKIWAFRNGTRLSAFDLCYQLVDLKKEYDWIDQVDSQALQAAVRKIDIAFRNFFNGQGYPKFKSKRNGGSFQCPNNTRKVNWDQSTLTIPKIKNIPIILSRKFQGKIKTITITKTPTKKYFASILVETNEDIVSAPKVQNAIGMDLGIAHFAVMSNGQKIDNPKYLSKTIARLQVLQRRASKKKKGSHNRKKANLKVALIHEKIANQRNDFLQKVSTRLIGDNQTDTICVESLFVRNMVKNHKLARAITDVGWSKFISMLEYKGKWYGKNVIKINPWFPSSKTCSGCGQVLDELDLSVREWTCGGCQVTHDRDVNAAKNIRMKGLQTGVGSSGEPVESWRIRRAKKQERLQM

SEQ ID NO: 2026 - protein, 360 aa, unknown; identical to SEQ ID NO: 2025
  TnpB Polypeptide

SEQ ID NO: 2027 - protein, 262 aa, Tolypothrix sp.
IKIVIHRKILGTPKNVTISKTPSGKYYASIVTEQDIPHAPLNGDKIGLDLGIKEFAITSKGEKFENPRYFRASLRRLKIRQRRLSRKAKGSNNRSKARLAVAKIHEKVANQRQDYQHKISLKLVSENQRISVESLNIKGMVKNRKLARQISDVAWGNFLTMLEYKGDIYGCEVHYVDRFFPSSKRCSNCGYIKQDLTLSIREWKCPECKSLWDRDVNAALNLMLFSESKIPLEEGKSTPDQLVERLGMNRVTGSGQEATGAA

SEQ ID NO: 2028 - protein, 169 aa, unknown
  TnpB Polypeptide
LQRLSGRERRYQTWLNHNISKLIVLSALQNNAIVAVEDLTGIRERTNQQSRSKVERRRSNSWAFFQLRMFLSYKSLKYGVELVAVNPAYTSQTCAKCLHIHPVPGKSYRSGKVFKCGHCGNHCDADDNGSKMISIVGGSVNSLGGSKLFCSLSSQALGLLQSPALQGWG

SEQ ID NO: 2029 - protein, 390 aa, Leptospirillum sp.
LEQGPRPPNETARCRNSPPVLRGHGQAPDPLAVERGVRLPGPGPGSSPATNPQEPRPGPLGSTGQDEPKRFPRFKRKGEGDSLRYPDPLQIKIDLATRDPQGRNLLPRIFLPKVGWVKVRVSRDIEGDLRNATVTRTAGRWAVSLQTEREIPEPEIRTRPEVGVDLGVAFFASTSDGFRIHPSPDLSMAMKAAKKKLVWEQRKLSRKDRKGPKSQNFRKQKIRVARAHERVANMRLDFLHKASTTVGETQAVVYVEDLKIRNMTRSARGTKESPGRNVRQKSGLNRSILSQGWGTFLSLLAYKLERRGGRLVQVDPRNTSRTCFACGHIAAENRPDQTAFRCVSCGYEDHADTNAAKNILRAGHARCACSPGQPGEFVALPFSRRINPRE

SEQ ID NO: 2030 - protein, 381 aa, unknown
  TnpB Polypeptide
LKENIHIRKWGDTVAEKAYKYRIYPNKKQKELIQKTFGCCRFVYNTYLAKRIEMYKKNKERFSYVQCANDMKNLKSELEWLKEVDSTALQSSLRDLDMAYQKFFKEHTGYPKFKSKKTHRYSYKSKCTNGNIQYCNKYIKLPKLGMVKTKNKLVPQGRILNATVSQEPSGKYYVSLCFTDVDIKPLDKTNNSIGIDLGIKEFCITSDGEMIENSKYLKKSLNRLAKLQRELSRKSKGGSNRNKARIKVARQHEKIANQRKDFLQKLSTELIKNNDVICIEDLQVSNMIKNHKLARSIADVSWSEFVRQLQYKAQWYGKQIVKVDKFFASSQTCSVCGYVNRETKNLSVREWTCPECHTHHDRDVNAAINIRNEGLRLLKVV

SEQ ID NO: 2031 - protein, 366 aa, unknown
  TnpB Polypeptide
MKIHKAFKFELIPNGEQVRKMKQFSGCARFVYNRALAYQNEQYEKDKTFKFSYVKLTKLLPEWKRELPWLKDCNAQVLQQSIKDLESAFKNFFEKRSDFPKFKCKGLKESFRFPQSSKLEQHNNRIYLPKIGWIRYRNSRNVLGAVKNVTVSQKCSKWFVSIQTEYEIETPTPNGGEISIDMGVVRLATLSNGEYFEPINAFKTYKGKLAKLQRQFKHKTKFSKNWQKLKIKIAKLHHRIANIRKDHLHKISSAISKNHAIVYVEDLQISKMVKSSISDLNRAILDQSWYEFRRQLDYKLLWNGGYLIPVPPQNTSCCCPACGHTSKENRRTQADFKCVECGYTENADIVGAINILKRGQEILAAQ

SEQ ID NO: 2032 - protein, 369 aa, unknown
  TnpB Polypeptide
MLQTLMVRLDPSPEQHKMLFETMKRFNEACNDIVETVFFMHSTNKVNVHKTVYYPIRERYGLSSQLAVRAISKVCEAYKRDKSIKPEFRLDGAIVYDPRILSWKGLEKVSLITLQGRQIIPTRMGDYQAARMDRIRGQADLILVKNVFYLCIAVEVPEASPYDPVGVLGVDLGVKNLAVDSDGEVHSSEQIRSTRKRSDSLKSRLQSVGTKSAKRHLQKLSGKMARFARDVNHQISKGLITKAKDTFSLVSLEDLEGIRNRVTVRRSQRRDHYSWSFDQLKQFVTYKATVAGVPLVLINPAYTSQECPICHCISKSNRPTRDGFRCICCDFSGPADKVAAANIAARVAVNLPIVSRFFAEAQALPFRVG

SEQ ID NO: 2033 - protein, 352 aa, Streptomyces sp.
MRQGTHVPCSRVCALFVRSAACSSGTRFACTRSPAKPVRWRGRSGAPASSTTTPCAPAVTPTPRTFPTPRLACSPERWSPRRRSARNERGSRRSPPWCSSSPCVTLSRRTAISSPRSRATARERRPDTQRMPATDQSTGIDLGLTHFAVLSDGTKIDSPRFLRRAEKKLKKAQQDLSRKQKRSKNREKARRRVARTHAQVADARREFLHRLSTKLMRENQAIAVEDLTVSGLARTRLAKSVHDAGWGSFLAMLDYKARRYGRTLITIGRFEPTSQICSVCGHHDGPKPLHIREWTCPACGTVHDRDTNAARNVKMAAGLAVSACGAPVGPEPVLAQREETGSHGTPTGDRAA

SEQ ID NO: 2034 - protein, 429 aa, Nostoc sp.
MQTISVKCKIQVPIELHSEIDRTLQGFADACNQILEVAKREKCWNTTKLHHLVYKPVREATGIKANHVCQAIRRVIGNAKAAKQVHKFRPTSINLDARTFQYLEELQTVGVTLMCGRKKFKLSIGNYQLALLKGQSPTAATLNKTKHGDYYINICVDLLTNPTGKTPVLKSSAPGDQDAQTFRKVIGVDLGRRDIATTSNGDSWSGKQIQNTRDRYSKVRANVQSKRTRSSRKLLRRLSGREQRFQKWLNHNISKQLVQDAKQSNSALAFEDLTNIRQSLNQKPRTKTERRRTNNWAFYQLRMFVDYKANIAGVPVVFVPPAYTSQTCSRCHHVHPVKGKSYRSNKSFKCGHCGFEHDADINAALNIAVLGVSVNNPEVPGIACLLESHCVAGMEEFVGSGVGQLSLFPTGGEIWDKAYSAFGTPNRCR

SEQ ID NO: 2035 - protein, 404 aa, Mycobacterium sp.
MQVRYRYRIEPAPAQQAMLARVFGCTRVVFNDALRVRDEAYRAGVKLSDSEIQRRVITTAKTTTERAWLREVPSVALVQSVNDSRRAWRNFFDSTTGKRKGRRVGRPRFKSRKDHRQSFRLTRNGFSLKPSGRLFVAKVGEVRVRWSRELPSTPSSVTIIREPDGHFYASFVVDVPATPLPAVAREAGVDVGIARLATIATTDGRRSDIANPKHLGRKLRKLARLEREKSRRQKGSANRNKTRRKVAVAHNEVARARRDYHHKQALALVRDNQVIHVEDLNIVGMVKNRRLARAISDAGWGQFVRIIGEKADRYGRTVHTVSRWLASSKTCSTPGCGHRLDELPLQVRAWTCPDCHMVHDRDHNAAKIILAAGRAERLNACGAPISPPTREAQGDETGSTPTAA

SEQ ID NO: 2036 - protein, 307 aa, Natronorubrum sp.
MGNQKSSISDDGFKLKNTSGRHATLWLSKIGDIPIRDHREIPDKAAIKEVTVKKETTGDWFVSFGLETDDADLPEKPNVDSLDATNSVGIDLGILNYIHTSDGKTVDWLDLEDEYERLRREQRKLSRKEQRSNNYEKQRQKVAKVKRHIRRKVLDYQHKLTTWLVKEYDAVFVEDLNVKGMLEQSHNARNKQDAAWRQFITLLEYKANLYGTHVVQVEARGTTKECASCGVETAKPIWVREHSCPSCGFECDRDANAAMNVLQRGFSELGLGWPEDKPVKTALPTDTTSVSAKRVCRGNLDRLSDVV

SEQ ID NO: 2037 - protein, 540 aa, Natronorubrum sp.
MRFVVVGSNFCHLTIDIGNEHTIGIGTDPGLQEIRTVQSVGSQGTCLLAEREGAKPPSSESAEGASREGYSARTTLKHPSKTKPLHSTRVNQQREASHMNYGPRYRLFPDKPQRESLGWQRNTVRQVYNHALYRLDQIPESEGTVRQRVWTVRDELPDLKQWWNDLTQVYSTVLQAAVERIYHSIKSLGQLKQNGFSVGELNWKKPREFKSFTYRQRGFELDKKSGPKGRGLLILKKVRGETLEIPIRLHRDVLDDADIKHVTVKQEATGVWYASFSVETETPKKPAPEDINSEDTVGLDLGVLNFVSDSDGRSIGRLDLDDDRERLEREQRSLSRKKYESRNWERQRSRVAKVHEGMSNKKRDYKHKLAHAYTTLYDAVFVEELDVKPMLESDGNARNKAEVGWRDFITILKHHGRKNGCHIVEVEPRGTTKECAECGVETAKPLWVREHSCPSCGFEVDRDFNAALNVQSRGLAKLGVVHSKATSSESLCDSDGLRKSRSDFRTPVETAATVDTRSVSASRVVESGSSALKEAASAAE

SEQ ID NO: 2038 - protein, 429 aa, Actinomadura sp.
LLVDVITVLDREDKLAMQGERRIKPRLTRGSETRRNGRVTYCYGAGVKLVVQVKLLPDAATAEALRETLKLCNRAAGHASRRAHATGVTGKTALQRLVYGELKAMGLSAQPAIHCVRKVAGAYATLAQNLKAGNYGPPGSRRRARVENAPVRFRKDAAQPFDDRSLSWRIQERTVSIWTVRGRLKDLAFACSAEQAAMLAAYRRGESDLVWRGGCFYLYATCEVPPAEQYVPDGFTGVDLGIANIATTSDGTVHCGKHINQVRHRNRRLRRRLQGKGTKSAKRLLRHLSGREARFAADTNHRISKQIVTEAQRTTRGIALEDLGGIRARVRLRKPQRVTLHAWSFAQLGAFIAYKAERAGVPVVHVDPRHTSQGCSACGHIDKNNRPDQATFRCTSCGFAEHADVNAARNIAARGAAGWAVSHAADDAA

SEQ ID NO: 2039 - protein, 430 aa, Moorea sp.
MMLTFEYRIKPSPKQAQCIDHWLELLRRHWNYALGQRLDWLRRTRCTIDRCSLISEPIGEIPQKVNYYSQQSDLKQTKILFPDYKDIYCEVQQINIQRLDKAWKRWLVPDKKGKRGGRPRFKKAGQLRSFSFSRVNHPKSVIKFQDNSIWTRKWGVIPVIVHRRIPDDFSLKTATIVRCADGYYVCLTAEEETVPTLLPKDKIQSAVGIDVGLKDFLTTSKGETVAVKKIYRNRQNYLARQQRKLARKVKGSKNHEKQQKTIALTHQKIKRHRKDWHYKTAHWLVKNYDFIAGEDLNIKGLARTKLAKSTHPSSSPPGRGWGWVGNFLMKLEAVAVKRGVWFVKVSPHGTTINCSNCGHKVPKTLSVRLQECPSCNLTMDRDENAAINILKKALEIHGVGHILSAWVGLVDRQPVNQETSYSECIQLSLF

SEQ ID NO: 2040 - protein, 458 aa, unknown
  TnpB Polypeptide
MMRKGIKVTLDPTPRQARLLASNAGAARFVFNLGLMHVKSQLNGLTSCEGKGKADWSMPALRRWWNEWKQELAPWWRENSKEAYTSGLQSLANAFANYFAWRDGEREGDRMGWPKPRSKHKTTPKFTYTTGSFGVADPYGLKLPRVGRVHCMENVGKLTGGIRPSRMTISRHNGRWYASLLVEVPDPQPSTTLQGHVGVDLGVKRIATLSDGTTVENPHTLKASMRRQRRIQRKLNRRKQGSKRWVEAKRELQEVAAQVARQRRDRMDKLTTMLATTYRDISIEDLNVKGMTKRPKAKENPDNPGQYLPNGRKAKAGLNKEILDAGFGTFRRMLEYKCALSGARLHIINRWYPSSKTCSNCGAVKAKLSLKERIYVCDQCGLVIDRDLNAAINLDVAGSAPEDDKRARRAHKTKASWQPPENPLQPVGKGNANQAAVLTHCLRLGADAGNGVLSTRTN

SEQ ID NO: 2041 - protein, 312 aa, unknown
  TnpB Polypeptide
MSTITKGIKLRLYPNRQQQVQLWQMFGNSRFVWNQMLNMAKQRYQNNPSSQFIGEYGMNYLLKPLKQEYPFLKVSDSTSYLVVTHNLSLAFKQLFKHQGGCPKFKAKSYAKQSYTGRSKCRIIAKRRMKLPKLGEIRTSKTGYLQNCRIKQYTLSYDATGKYYLSLQVEVPQPKPLPQTRQAVGLDVGISDLVISSDGTKYATFNAKWYEKQAIAWQSRFNRRKHRATVRVRQYNHEHKGLPEMDISDYQNWQRAKQRKARCQAKIADKRADYLHKLTTQLVKQYDVIVIEDLKAKNLQHNHHFARAIANAS

SEQ ID NO: 2042 - protein, 322 aa, Bacillus sp.
  misc_feature (34)..(67): Xaa can be any naturally occurring amino acid
MYSIYYSPIYFKTTIIKRSMNVLLKHGKSSRAFXXXXXXXXXXXXXXXXXXXXXXXXXXXXXXXXXXPTIGWIRLKEYGYIPKNATVKSGTVYQRAGRYFVSVLCERAEIRVKPMLNKVGLGIDLGLKDFAVRSDGKTHKNINKTVQVKKIEKRLKREQRSLARKFENLKKRGGKSVTNKRVNIDKNVLRVQKLHARLANIRIEYVKSIVTNVVKTKPTFITVEDLNVKGMMKNKHLSKTIAKQSFFAFKTWLLTKCEEYGIELRQVDRFYPSSKLCSCCSQKKADLKLSDRVYTCECGNVMDRDLNAAINLLQAKEYTILT

SEQ ID NO: 2043 - protein, 162 aa, Bacillus sp.
LGIKNFAVRSDGKTHKNINKTVQVKKIEKRLKREQRSLSRKFENIRKRGEQPVTNKRANINKNILRMQQLHARLANIRLAYVKSIVNDVVKTKPTFITVEDLNVKGMMKNKHLSKAVAQQCFYAFKTWLSTKCREYGIEYGKRTDSIHLLKCVHVAVKKSRI

SEQ ID NO: 2044 - protein, 398 aa, unknown
  TnpB Polypeptide
LTGVKQRKLHETYAAFKVIAAESFQTIQSANTRTYTQLHHLAYTKNKATGVASQLIEEAQRYAWQRRKVASAINQPTVRFDKRLFSFKGTGRNHPVLSVRINHERLGLPIKEDRAYRRLQEHLVDGWVTTSVLMTCRYRFLLLLQKQAPSPHAAENVLGIDQNSNGVAVTVMSGKGKILKQLYLGRNISLQQIRFENRRARLQEYRDVKGHRGRAGLKLRRLSGRQRNYVRTSTWQLANTIVNLAERHDAKIAIEHLYKLRRRKGEFSSKSRRKTNRIPYGFLRHTVRHKATQQGITVLEVSARYTSQTCRRCGHVSRNNRRNWRHFRCIKCHFEANADRVASVNICRRAIQATYPVTKGQFPPTGAPVSVPVRQDEEASWQQSRLQVASSRLQSRRS

SEQ ID NO: 2045 - protein, 246 aa, Paenibacillus sp.
MLHHKTFKFRIYPSVEQIVLMRKTLGCSRFVFNHFLTKWKESVQATGKGLSYNACATQLPALKQAFPWLKEVDSIALQSAVRHLADGFERFFKKQNEAPRYKSRKHPVLSYTTRYTGGNIKVDAKQLQLPKLGRMPLAKSREIEGRILSATVRLAPSGKCFVALVCETDIQPLPRTDRILGIDRGIKQLAVPSEGPVLANPRYTLRYERKLAKWQRRMARRVPGGSNWHKAKETWPASTRRYEIAD

SEQ ID NO: 2046 - protein, 336 aa, unknown
  TnpB Polypeptide
MPAYKYFTKDGKTKWYANFYYDDWLGKRQHKCKRGFSTKKEAIEWERDFLAQGAKDPDILFSALIKNYMSDCSSRLKLTTLENKQYLIISVTMKLKAYENSYYGNGAISMDINYDHFALAELDETGKLLDQKLIRFDLMNKSTGQVTNILGVAVKDIFDWCAEKDKRLIVEDIDLTIKLASRKYGNRKGNHHMTLFAYQRIASSIENQSLKREIAFYKIDPAYTSQMGKFLFMRKYGISIHQAAAYTIGLVGLGLYEKLVPDSRMLNLLKTKEGTVPEFSQETYKNIWARITNTFSGIRKHFFYRSIPYEVLEERKRPSLRTLAAEMKIRYMPVFE

SEQ ID NO: 2047 - protein, 302 aa, unknown
  TnpB Polypeptide
MLADKIRYYQEEKKMLKNTPAGYKKEYPWLKEVDSLALANVQLNLEGAFRKFFRELGVGFPHYKSKKHSRKSYTTNMVNGNICLQDRFLKLPKMQPVKIKTPPYDPGGWKLKSVTMSREPSGKYFASLLFDCENQTAEKRQAEKFLGMDFAMHGMCVFSTGERAGYPMFYRNAEKKLAREQRKLSRCEKGSRNYQKQKKKVALYHEKIKNQRKDFQHKLSHSLAEDYDAVCVEDLNLKGIAGGLHFGKGIQDNGYGQFLSMLGYKLEERGKYLIKVDRYFASSKICSVCGHKKKELDIIRIG

SEQ ID NO: 2048 - protein, 367 aa, unknown
  TnpB Polypeptide
MLKAYKYRIYPNKAQETLIQKTFGCCRFVYNQTLAYRKNLYETDGRSMSKLDCINYINCDLKCNYKWLKEVDKFALEQAVSALDNAYRCFYKLHAGYPKFRSKHNHRYSYTTRITNANIKVLFDKNKIQLPKLGLVGSRLSRPFVGQIKQATVSQTPAGKYFVSVLVETKQHKPLPSTDKMVGVDLGIKDLLITSSGEKYDNKRIIKQYENKLSREQRRLSRKVKDSSNYNEQRIKVARIYEKIHNTRVDYLHKISHKLISENQVIVSEDLAVSNMVQNHNLAKAIYDCGWYELTRQLAYKAEWNNRIYVKIDRFVASSQTCHVCGFITSKTKDLSIRKWTCPKCGTHHDRDINAAINILNEGLKCL

SEQ ID NO: 2049 - protein, 415 aa, unknown
  TnpB Polypeptide
MSLDKACLDSTIKIYREALSFVIDVVNKEWEIIKPFSVLGRNNIVEKLIHSTSKRTAKYDFDSKFYKFPSYFRRSVISTAIGKVSAYKSSLENWDKAGKKTKEPKLNLYHFEFPAFYKGNCFTKEADNIVTLKLYKNNDWVWVSFALKETDVKYIKRHYSLKKELCPILCKIDRNYYLRFAFEEEAILPKVAETNAKILAVDLGLNHDAVMCVMDSVGTVYARKFIKIAYEKDQLNHVLNQIKRDQKKYGYTNQRLWRKANNLNDQIGEKTSLEIISFAVLHQVDYIVFEHLDLQGKKHGKTKQKLSLWRAQQIQSIVSLKAHQNRIRISRVCAYNTSKLAYDGSGIVERDKKNYSLCTFTTKKKYNCDLNATYNIGARFFLRAYDKKAKEENKLKIKTSERTLQTLKDYLKPCV

SEQ ID NO: 2050 - protein, 491 aa, Nostoc sp.
MPTLTYIKGLPTPAGELNSLGLTEFEMFLTAYSSVFHKAACETANHLLTVNRFNDSSWNTHLQKTYGISKRHANGVISLAQGAVNASKEHRKLHIRTLEGKLKSLNSWITKSEKKLSDSVKFYAKKNWHKSKTGCHFPLSCSLKFRNTNWNNLRFQIHYKKRRAYKLTQKIEHLKTSPIQTVIPKNQVFIVGSKDESFGNQICQWDGHTLKFRVPACLESRFGKQVITKLGNFDRNINRLPKDGAKTWHFFRKHNKWNAAVKFTPVAIQPVSRHSAYGCIGIDLNPGSIGWAYIDKDGNLKSHGQIPLQIGLPSGKQDAQIVNACLQLTRFAHAFCCPIVCEKLDFSTKKEQLGEHGRKYARMLSAWAYSRFYQLLDSISSNRGIYLMKVNPAYTSLIGMVKYARQYGLPSDCAAALAIARRGMRLTENIPGSITAYLSVKDGKHVWSLWNQLNKLIRKSSIKRHNFYAISNWGSLVKRLSEQSDKSKLRH

SEQ ID NO: 2051 - protein, 431 aa, Candidate divison MSBL1 archaeon
VQGEKDEKMELTQKIKIQPTEEQEEVLTSLSEMCRLLYNFSLAERIENWKENKDKPKDERNHVTYMDQQNKLPELKEKHPKYKWVYSKVLQMTLRKLDADYKSFFTLRKTGDEKAQPPHYKGRKYFTTLTYNQSGFKIDESVIRFSHNHSSDVLLEFEIPEKFDFDDENVKQVEVFKDEVKSEYYISVTYEIETPEHEDNGLYQAFDLGIIKHTGVNMHGESIEFKNRRADKYWQPKIKEVQSKRDHCKKGSRRWKQYNKKLWKMRRKCANQMKDHQHKISRVLVNNTKANTIIIGDLNTKKMSSEENGNGKELNHSLQNTGMMGRFARFLTYKAKLVGKKVIEISEKDTTKKCCICGKKEDRPLHERIIRCDCGNVMDRDLNSAINIMKRFLSQERSVDELSSFMDGILRQTDSRYAHKLTPKHSQKTPS

SEQ ID NO: 2052 - protein, 478 aa, Flavonifractor sp.
VKVTSSYAVHVQDHRQSLKATVSLYRAAVAFMIDVVDKEWDTLPPICAAGGKLGQHALEHMIHKTKGFPKPKYNFDEKFYKFPSYFRRAAITMALGAVSSYRKNLANWEAGGKQGRPPKLAYDRNVMPVFFRGNMSECESMLQGETTVVQLKLFVKNDWVWVDIHCRPRDVKYLVKWWSGAKASAPTLEVKKRKGRRDCSFRLRFAYEEYRDLSLRDEPLDRRLALAVDLGINNDAVCSVMAADGAILGRRFINFPREKDRMNHLLNKQRGEQRDHGRYGGRRTWDQINNLNDQLSANIARAIVDMAVEHGVNVIVFEALDFHGRIRGRKAQRLHLWRKRAIQDMVEHKAHRNLIRISRVCAWGTSRLAFDGSGEILRGRVNLTNDELAALIAMETKDRKKAKGRPETHCGQERCTFLNGKEYNCDLSASYNIGARYFLREWCKVTPGLEETLPKTTQRTYANLKALKPQHSYRKAAA

SEQ ID NO: 2053 - protein, 315 aa, unknown
  TnpB Polypeptide
MFYVRCIVIYRTITACSIIIAADETTNARYTLKHTDVVSIRNHRKDGKISAPILEKKNKKWFLRFAFEGQAKLNDTKLEKRRILAVDLGVNTDAVCSVMTKDGTIHARKFINFAGDKDRIYHTLNKIKKVQKYSGSQNTKKLWRYARFHNDELARKVASKIAETAMQYQCDVIVFEHLDTKGKKKGSKKQKLQMWKKNTIQKIVEQKAHKNGIRISHICAWGTSKLAYDGSGYALRGTEAGNKSYSICRFQNGKTYNCDLSASYNIGARYFIREIQQNQSVKNWSVITAKVPECQKRTQCTYNTLLKINALDMVS

SEQ ID NO: 2054 - protein, 401 aa, unknown
  TnpB Polypeptide
MTVLAHRIRLDPNNVQATWLERCAGTARFVFNWGLARWQQQYAAGKRPSWQKLNAELNACKAAEFPWMNEIPWAVANRALADLGNAFSHFFRRVKLGQKPGYPRFKSKKRATPVFAIEARALRFAGRRVKFPKLGWLRMREALRFPGKVISARFTKRAGHWYVSLQVEIDESRWSYPHRCETQAAVGVDLGVRDLAVLSTGEKVKAPRALRAHETKLRQLNKQLARRTKGGKNWRKTKMRLQKLYERITNIRQDVTHRLTASLVKRFRVIGIEDLNVCGMAANRRLAKSVMDAAMAEVGRQLGYKSVLAGSEIIVADRWFPSSKLCSDCGTKREGPLALSIREWSCKSCGVVHDRDMNAAINLRTAAQAVTACCHGSAGADRKIDAKLPLGQESSNVVNLG

SEQ ID NO: 2055 - protein, 513 aa, unknown
  TnpB Polypeptide
MKEKSDTSGQRQDSGCMTQSLLWENFPKSGESVTAGFHLINRETTLKGRLPLCADGAPDMKSLQTSEAGLISEERGFLPYWNPFAAEMSQRLWLPIKTDCADSDLSLSDGLSSATAENSWFSAMFLTPRSQNLSVTCLPLSLCSHADSENTGLKSKKIRIYPNDGQKSLLRQWLGTARFVYNQTIAYLKEPDTLADWFGIKTEIIANLPEWAEAVPYQIKSVAVRDACIAVKNAKMKYKKTGQIQDVKFRSKRENRDSFFIPKTAVKESSFYTTLLGKKMKMTETVPEILHDCRLKCENGKFWLCVTVTKANLVSENQRYGAAALDPGVRTFQTFYSPVAAGKIGTGDFGRIHRLCKHLDNLYSKIGKAKCRQKRRLKKAAVRIREKIKNLINEIHHKTSYFLCKNFDEIFLPSFETSGMVTKLRSKTARAMLTWAHFRFAEFLKHKASEFGTRVVRVCEAYTSKTCSACGKIQNIGSKKVMNCTACGTVLDRDINGARGIFLRALGDTPSFS

SEQ ID NO: 2056 - protein, 417 aa, Actinobacteria sp.
MYPTARQGRALVELLVAQRDVYNAALEERRGAWRWERRPVTRYEQFGQLSGDRDGFEWLARFGVGVARGTLVRLDEFFRRVREGQRPGFPRFRGAGSWDSVQWADTIGWNLDHHNRRGYGRLYVQGVGHIRIKVHRVFGDGAEARKLVVRRRGIRWEATVFWRNVQIPPLAPTGRACGIDVGVDVLAAIADDQGGMELVANPRHLRARQDKLAAAQRALAACTKTGRREGGRRNRAKARVARLHAKVRQARRDLAHQLSARLVRDFDLIAHEALDVEAMTRSARGTLERPGRNVAQKGGLNRSILDAGWGQLLCLITYKAASAGRMIQRVPAARTSQTCARCGHTSGESRVTRDRFACVACGHDAHADANSAAVILAVALGHLVIRAPSRERGVNCRPESGHQPVTAGRDAAPSCGS

SEQ ID NO: 2057 - protein, 384 aa, Nitrosopumilus sp.
MLHTKCVWQFHDKREELADVFNYFRLCTNEAIRISDEKNLTSRNTMHHELYEHLRNNSQYYAKYVHGSISVAKARLKLYRATKKKKPNANRPYMKRNMITLDNQTYKIIDNHLRFPIRAKQYIYIKLASYVLQKLESAKLGSITVTPEKLVISYSMEIQQKNPHSYVGIDRNLDNATSFDTNNKFMIYNLKKTNDIKQKYRQVKSHFKRNDARIRKKLFTKYGKKEKNRVHQLLHNVSKRITSQNQGIILEDIKGIRKLYRKGNGQGKKHRGKMNTWSFYELQRQIEYKAKWNGLPVQYVKAHGTSSKCAVCGIKLVPEEHRVMRCTVCKILIDRDENAAKNILARGLRFGPNAPQVEAMKQFQDAESIVASQEDGQIINIPMT

SEQ ID NO: 2058 - protein, 398 aa, Nitrosopumilus sp.
LKTIKSIKQNVPQNHDLDSMMETFRKMVNHCIRIGLENNCSTLKRLSMLSYHELSRYDILSSYKLNAISQACGRLSQMKQSIKRGRKTKSPFVRKQFLTNCYGIKINGSLLSIPYKPRQPIHILLNHHTLKILSDPTMTVRSFSLTAFNISLCISKEIEEIECTKIVGIDRNLRNVTCGNDSLVTFYKTNKLLSIKQNTIHARAGFKRNDHRKKRQYYKNLQQRLQNRTKQFIHKISKDIINHAVETKSAIAFEDLKGIRKLYRKGNGQGKKYRGKLNGWQFYELQRQVQYKALWVGIPVVFVDPKRTSKLCPICGKRIQEDIQNRRKLLCTNCGKSMDRDVIASMNIAHKAWSRFTHAKGDTGEATSELFSRMSEPICCNYNDVAIRIVDVSKSRSP

SEQ ID NO: 2059 - protein, 399 aa, Nitrosopumilus sp.
MVLTRNYKFRLYPNVIQEKKLQNNLAVCRWIYNHFVDLTQNGFITRNDCNYILTEIKQQESWLYQYHSKMLQSVSAQINGAQKALIEKSKQRHKTGSLRFCKYHDYRTFTYSQSGFKLERKGTTDLLYLSKIGDMEIRHHREIPYNANIKQVIVTKSKSGKWFACVTVDITEPLIGIPKISFKNSVGIDVGIKSFVHDSNGFQTPNPKNLQKMLKPLKRIQRKVSRRKKGSNNRLKAVLHMQRIHEKIANMRKDFQHKISTQYAKNNDVVFVEKLQLTNMVKNHRLAQSIADASWGAFIQKLEYKCKMLVKVDPRNTTIDCSRCGNKVPKSLAVRTHRCNVCNLVLDRDHNASLNILNRGLNMSTGVDYKLPQELREVTLAESAMHSMKQEEATQLVGW

SEQ ID NO: 2060 - protein, 309 aa, Nitrosopumilus sp.
LQRNYKFRLYPSDSQEYKLNNNLNVCKWVYNKFVEQAKNNFLTRNDMNYILTELKQSESWLYNYHSKMLQMVSTQLESAEKSLIELSKKGNKTGQLRFARYGEYRTFTYNQSGFKIETNGDKTLLYLSKIGHIEIRKHREIPDDANIKQVIVTKTPSGKWFVCATVDISEPLISIIPKISFSKPVGIDVGIKSFAYDSDGYQTPNPLNLKKMLKPLARIQRKVSRRKKGSNNRLKAILHMQKIHEKIANRRKDFQHKLSTQYAKNNDVVFVEKLENSKHGKKPQIGKKYNGFKLGDIFAKTGIQVQDAS

SEQ ID NO: 2061 - protein, 458 aa, unknown
  TnpB Polypeptide
MALGLAFNAGYLYSVFMKIIRSDRLSIKSDSAAQREALADTLGLYRRLVRDLMSLAFTHWPQIGSLQGNAVVQAIEGLMHPTSRRPEVRYTYFHRRYYKFPSYLRRVAIMDAVGQVRSFQTRYRDWQDSDRRKQPPALTCSTSTFPSLYKGQCVRFSDDLKTAFIKVWHCNDWLWMSFKLGGRCRYRGKGKSLSPLLVFKGKRWSLSLPEEFTPKRKASKKPPRRVLSLNVGINTAATWAVVDAQGTVHARGFIQRSDKDCEHHLMQRIRSTASKHTRHGSQLPVGFCTRDHRRLKQLADNEAHQISRQLVNLALKHDCQAIVVEQLKGWRPTAGRKRSPMKTRFHRWFHRMLVNRVHSKAVENGLRCVAVYARGTSSQAFDGSGPVRRDAKNYSLCTFSSGKRYHADLNAAYNIAARGFVYYQGGGRKSASRATQQKPDRTPRIPVTLSTLWNSHAA

SEQ ID NO: 2062 - protein, 382 aa, unknown
  TnpB Polypeptide
VILTYRYRLLPHKSQHRALEMLCAAQRELYNAALEERIDCYRKTGKPRTYIDQCKGLTECRREFPEWGELPANLQRWTLKRLDEAFQGFFRRLKARRGKAGFPRFRGKGRWEAFGFNEFSGIRFDGKRLRFAGMPGGLKVYLHRALPEHADIRSCVFRQDGAGWVVCLQIAVPTPEKRAVASVIGVDLGLEVFAHCSDNVEIPNPRIARRAEKELRRWQRALSRCQRGSHRHHKVRAQVTKVHRKITNTRSSWLHKESAGLVKRADLIIVEDLQVANMIRHPTFARSIADASWSRFVSMLSYKVEKTGGHLIRVDPRNTSQKCSRCHVLVPKSLAVRTHKCPSCGLVIGRDYNSSLNIRRAGVGAWAPNVIGCDERAPGNMC

SEQ ID NO: 2063 - protein, 384 aa, Lactobacillus sp.
MTLKGLKLRIYPNQAQQLKIKMNFGYNRFVWNQMLNMLIKRHENNPQAPLLNVFALNSLLPTMKLEHSWLKEAESTSLQSTCHDLVGAFQKFFKEPDTGFPKFKSRKYPKQSYNVKFSGASLAIKNEHTIRIPKIGLMPFKTGRAVTGKIKNATIRLSTTGKYYAMVLVETNVNQLAKTGQAVGIDLGVADLIITSRGRKYSTIRFDKMLAKKKYYWEKRLARRGRQAKREMAWDKHNHVPEPRELSDFKNYQKAKLMVAKYNERIANQRRNYLHNLTKQLVEQYDVINIEDLKTKNLLKNHHLARAIANQSWREIRRQLKYKCAWYGKQLVIVNPRKTSQLCFNCGYDDGKHPLAIRKWTCPRCGMVHDRDINAARNILKATA

SEQ ID NO: 2064 - protein, 384 aa, Lactobacillus sp.
MVLKGIKLRIYPSLAQQLKINLNFGYNRFVWNQMLNMLRKRYENNPQAPFLNVYALNSLLPALKREYPWLKEAESTSLQSTCHDLVAAFQKFFKETNTGFPKFKSRKFPKQSYNVKCSGTSLAIKNNRIIRIPKVGLMPFRTGRKITGQLKNATIKLSTTGKYYAVLLVETEISPLAKNGQTVGIDLGVADLMITSDGQKQPTIRFDKLLAKKKHYWEKRLARRRRQAQKEIAWDHHNQFSEPRELSDFKNYQKAKRMVAKYSEKIANQRQNYLHQLTIQLVKQYDVIKIEDLKTKNLLKNHQLARAIANQSWREIRRQLTYKCPWYGKQLVIVNPRKTSQLCASCGFDDGKHELSIRKWTCPNCGTNHDRDVNAAKNILAATT

SEQ ID NO: 2065 - protein, 506 aa, unknown
  TnpB Polypeptide
MHTVQLILRPTEYEKAVINKRFHAVSHIHNVCAKHAKKLLIQLDHDEEYQSWRSEYCKLLKQKKLSKADRTRRLELSKQMSVRRQEIGLSKWALQSYIKVCGKRYSKLISSQQVQAEASNVWTGVEKCLFSKGKDIHFKKFMDFDTIGGKSNLNGAKLNPDTMTVSWLGLKLKCYLPKKASDKDYVLESLDHKISYCTIKRMMFSNGWRYYLIVTLDGDAPHWERKAKTGIMGIDPGVSTIAAVSDTACILEELAPDADVYEKQMHKLEQHMDASKRISNPDNFNPDGTVKKRMDCKPWVFSNSYEAARRKRKTLYRKKSAYILHSHRNLCNRLLENADSFIVEKMDYAALAKRSSKTDRQDKPTDIVQKDGTVKTVNKFRRRKRFGRSMNRRSPSRFLSELKRKAESSGGTYAEVNTQTFKASQYSHVTDECVKVPLSQRFKLIGNDSVQRDLYSAFLIKNADSAFEHPDRDKCIYGFESFVAVHNETISYMKESKISMKQCFGF

SEQ ID NO: 2066 - protein, 532 aa, unknown
  TnpB Polypeptide
MAGAKKPNYILELKLNTTGSQSALLDKRFRIANSIYNTLVKFAKKQLKRMKENKGYKRNLKEYLHYKELAEKDKANGLEKSENIAKFNTYKEILNDIRLSYSLSEYQFHAFIKKQQRMYKKHIDSNTAQKLATAVWKAASEVMFRNGKDIHFKKFGTLTSLEGKKNTQGIRFLKDKRMLSWNKLNIPVKIRYNDLFALESLEDNIKYCRVVRKPFKTGYRYFLQLIIGGYPPQKRINGKANHGNLRPASLKASVKGKVGIDIGTSTIAVCSGSKLILDELAKDSKKYEREIFKLQRRLDRSKRANNQNNFNSDGTIKRGVKLQWVRSKSYVKTLFKLKNLYRLKSSYIKLEHNRLANEIISLGNEIYVETMNYKALQKKAKFKKGEEKNSKGKNKRRKRFGKSLNNKAPSTLLAILDNKLGYEGLSLNKVNTQTFKASQYDHIEDKYIKKELSNRVNIIENKLIQRDLYSAFLLMNSKKNLKETDRKLCLKTYDSFKKQHDVLINSLINSKEKLPRSFGINEFKKAIDKSIA

SEQ ID NO: 2067 - protein, 361 aa, unknown
  TnpB Polypeptide
VVNYDLSGYAKNALKQYVPQLCGGSYDAKELHDDHPVRFTNEGPKLDHKPQNAIEWYVKIPHHDDYHLWLPANPNPEQREWLEALHAGDAKMGECRLFERDGEWYFHIVATRSVEERQTTSSASETPIGVDIGEASLLTVCHRDERGSPTTPNLWNDEGKQVRRLRETYFTATRRLQKRGSERIAESYGEELWRHIDHTLHTVTSEVVAYADQFENPVLVLEDLTHIRENMDYGAFMNRRLHGWGFAKMHAQLCYKAAEKGIRVETVNPAYTSKSCHCCGDQGTRPEQATFRCTNPECWVRDYQADVNAALNISDRYLSGESHPREHTDDDDSAEDGGRLTGPQDSQADATQQETLGTYAS

SEQ ID NO: 2068 - protein, 426 aa, unknown
  TnpB Polypeptide
METVLPVKPMKTYSCEKNRHIAEKGKLTKDRRSRLQAKTIELGIDKTYAKPHAEKLNLLFLQAKWLTNDIIGHLRDGDLKSWDDKKKNVQVRMGKNSEKYEFRDLTILSSKNKQNLRDRVKDNLSSLHALKNNGHKVGTLEYAKEVTSIPYNQFRNDFDVDLEARKIKIQKVGWLKVHGLSQLPQDADIATGKLLKTPRGFVFHLTFYTSKEEYTFTPGSIVGIDFGVKTFLTLSDGMEYQNSIPITPRLKNLQRKLSRQKKGSNNYIKTLCSIQKCYHDISHQKDDIANKLVNFLLNTYEIIVIQDESLKAWKRLWGKKLHHSILGRVKKKLKNNPRVIVLSKWVPTTQYCPVCERLNKHSLDKRVYSCGCGYSAPRDVHAAENMIRMAVLHPDLRMTNRDMDLSWVKDSRLDLFTTPSAGRAGV

SEQ ID NO: 2069 - protein, 320 aa, unknown
  TnpB Polypeptide
MLAHRDKSSSKYYNTIPCVVSKSLITKYQRNKKCKSVSNIVIPICGDKGKVVKLEGNGIRIPAIFKKFVLPVVFMRPVAGFIRSIEFIQRKGVWYTHISYNTPAQSSLKPTGTVGVDRNSVGAVATLADPQTGKVLHLGFNPAYTKEVWRRRKSSLQRLGKRRLLHKIRNKQSRRTKYENHVVSKQIVDYAASHRRCIVLEKLDTVRKGKIRRYSEKSQWSFYQLLQYILYKAALRGVMVIEVDPAYTSQECSRCHQLTKPNGKFYRCAHCGHNDHRDANAAFSLSQRVQPIGGLARDSVRPRSVLLTAPFTGTEAQQCA

SEQ ID NO: 2070 - protein, 369 aa, unknown
  TnpB Polypeptide
MIKTFKYRLVPTRKQQAALQTLLDSCRFLYNCALEQRKMRRIGQFAQMREVTEVRAAFPEYQGVHVHILQNVIKKLDRAFQGFFRRIKHGQKAGFPRFKGKDRFDSFAFNNTGFKLAGRYLQISKIGAVKLRLSRPLPEGSAVKSLVVKRSGQNWYACLAVEFSPVHLPHSDARVGIDVGVVQYATFSDGSSPIKNPRFYENAQAELRRSQRRVARRKRGSHRRRKAVALLRKLHERIANKRNDFLHKQTTALIRKYGTIGVENLNIAGMVQGNCSKQILDASWGTWLRMLVFKAEEAGRRIVAVDPRFTSQTCPCCGYKDAKNRPTQAEFKCLDCGFEANADFIASVNISARIEPSGVNVGRLSPCVA

SEQ ID NO: 2071 - protein, 396 aa, unknown
  TnpB Polypeptide
MESTTLRRVYRFRIEPTSPQDEGFRRYAGARRFIWNWALQQKRTHYAATGKSLSEKELSARLTALKSETDTAWLKEMDSQLLQQVLADLKKAFTSFFEKRAKYPRFKSKKRDTARFRIPQRVTLADGSLSVPKIGRVKVRQSQQVEGVTKSATFKRDARGHWFVSLVAEMEMPAVAIPDPSEERTIGIDLGLKDAVVTSDGARVAAPRFYRAAQRQLQRAQRSQSRKQKGSKNRATARAKVARIHQKIANKRNDFCHKLTTALVKTHDAVCIEDLNVKGLAKTKLAKSMRDASMGTIRRQLAYKGVWYRTHIVAVGRFYPSSKLCFECGYKNDALTLSDRVWACPACREVLDRDLNAARNIKREGLRILAVGRTDRLNACGQPLRPPMAAMLAISA

SEQ ID NO: 2072 - protein, 425 aa, Ruminococcaceae sp.
MPCRLRHPATGRRLRHAAGRHLRGRPGSGRSPDWGHDKCSIRGGGMANKAYKYRIYPNKKQAEQIQRTFGCCRFVYNQMLALQNERHAQDEKYLTKYKANNYCNQVLKKEYMFLKEVDKFALTNSIWNLDQAFRNFFNHIARYPKFKSKRASTKSYTTNYSNGNIVVFDNAIKLPKLKAVKANVHRPIPDGWTIKGATITQTPSKEYFCSILLEYEDTISPTESRQKLFATGLDYKSNGLYVSMSGKTCGSPKYLQKSLKRIAIEQKKLSRKKPGSKNYEKQRIRLAKQYQHVTNQRKDYLHKEALALAEKYDVICVETLNLRSISNKKFHIGKQTLDNGYGMFLEMLEYKLNDRGKVIIKVDKYYPSTQICSLCGLKNPAAKRLSVRYWECPTCHAIHDRDINAATNIYREGLRIYSEQHLASA

SEQ ID NO: 2073 - protein, 196 aa, Bacillus sp.
VDVGLKELFVASNGMKERNINKDAKVKKLLKRKKSAQRDMSRRFKKVVKIQSAGYEKAKAEHLRLSRKIMNIRNNHIHQATAKLVKTKPMRIVVEDLSISNLFKNKKLSRAFSLQKLNFFFQCLSYKCEKYGIAYVKADKWFASSKICSCCGVKYDHSVQPEGQWSLKIREWCCVSCNSHHDRDVNAAINLSRWVK

SEQ ID NO: 2074 - protein, 669 aa, Mycobacterium sp.
MASAPTHITAAISGDMGVVMRRRGKSKAPNFKYEGPVAVIRLELDAADDLMRRRLEKHWEAVFRLRRALQRDAADRCRAYSAARHERQRDQKKIRERLGLTRKGLEAAAKKHIEASGWMGDHLTKATGLHVAAEVWETADRHLFADKSGRRHGPPRVGSWWDFARIPGRARSHTKPRPTWETYRLVGSLDGHLNTYRHPGLPASITCAGDTAGQPGGSSILMAPSRLPTPARPASGSWWKHDGALAVVFTGLPAGDLVVPVRLLCGAGQWAHLRHFLADPHVWHKIDLVRVADHQAPGGWRYYAHLLTHQAGYQSASTTARRAGIPVGRRGGVDANVSNLSVASFPADGPDDGLVTDQIICTPEQQNAAARAAVKTRARQRALDRSRRNTNREQYGPSVRQATRAERRCQAGLATKQISDPGGPRAARADGVPLRAYRRDTLSTRYRKTRWDHRDDARKTCQAKQARAADIAARIVAAHGNTLTVEDCRISTWAKLWGKRIALFSPGMLVSALERECAATGGRLYRAGTSSTAMSQHCLCGQRVAKTLDQRIHDCQRCGLHAERDVVSAMLAACVDFTDPEDPRTARVDYTLAHVLRTWLAPQQEWGGSVNRHQPPAPSGAEPARTGSHHPVASAEYAALGPPPNRPDHKSGRRGSSRKKQPPKLFGTA

SEQ ID NO: 2075 - protein, 390 aa, unknown
  TnpB Polypeptide
MRTYKFRLYTNKNKRLHRTIDTAGRIYNHMIALHRRYYRLYRKSLNVFCLQKHITKLKRTKRYAFWNILGSQSIQDIAQRIDRGYKLFFRNRAAGLPSRPPGFRKVKKYRSFTLKQAGWKLPGGNRVRILGEDYRFVKSREIPGEIKTVTIKRDALGYLWISFAVEEERSLQPSRTMTGKIAGMDFGLKTFLTLDNGEKVVSPLFFTQGSRRIAKANQSLSRKKRGSKNRRKARMNLAREHWKIACRREDFQWKLVLSLVRSYDILCVEDLNIKAMQRLWGRKISDLGFADFLRKLEYLCFREGKQLLRTDRWYPSSKTCSSCGSVLETLSLSKRKWTCPECHAHHDRDINAAVNIRNEGLRVLSINSVGASTDMPETVRPEISGVLQRA

SEQ ID NO: 2076 - protein, 414 aa, unknown
  TnpB Polypeptide
MLTRVVPALGQQPGTVTHTDYRNPVQVKRAYKLRAYPTRAQEGRAVRLLRDHCDLYNAALQERREAWRMQQVSVSYGDQSAQLREIRAADPDGQGRHSFTAQQQTLRRLHATFGAFFRSVRARQKAGYPRFKPYQRFDQVLFVAGDGARWKPVEGARWGHATFQAVGRLKVKQHRQVVGRVKTLQLKREYRRWYVIVVVETEAEPLPPTGRAVGVDVGVVRFLTTSDGEVVANPRFLDTAQATLTDLQRRKERAKPGSGNRKRLRRVLTKEWRKVRNRRRDFHHKTARALVDAYDALALEDLRVANMTASASGTIEAPGRTVAQKAGLNRAILDAGWGQFTAILTAKAESAGRRVILVNPAYTSIDCHACGTRCARSRQDTVVCPDCGPIDADVNGARNIATRAGLGSGQASAA

SEQ ID NO: 2077 - protein, 468 aa, Mycobacterium sp.
MARFVVPDGWTVQAFKFTLDPTEDQARASARHFGARRKAFNWTVAALKADIAAWHATGVETAKPSFRVMRERWNRAKDDVCVNAETGQVWWRECSKEAYADGVAGAVDAYWNWQHSRAGERAGKRVGFPRLKKKGRDADRVCFTTGAMRVEQDRRHITLPVIGTVRTQENTRRVQRLTGKGRARVPAISVRRNGTRLDTSVRVLVQRPQQPSVALPGSRVGVDVGVRRLLATVADADGNVIEQVSNPRPLDAALTELRHVSRARSRCTKGSRQYRARTTEMSRLHRRVNDVRTHHFHVLTTRLAKTHGRIAVEGLDASGMLRQKGLPGARARRRGLSDAALATPRRHLFYKTAWYGSELVVADRWFPSSKTCHACLHVQDIGWDEHWTCDRADGGCGATHQRDDCAAINLARYEDTDAKSGSVVGPVGAAVKRGADRKSGRRPAGGREARKGRHHPVAEQPRDGVQVA

SEQ ID NO: 2078 - protein, 459 aa, Mycobacterium sp.
MPKFEVPDGWTIQAFRFTLDPTEDQTRALARHFGARRKAFNWTVETLKADIAAWHATGHETAKPSLPVLRKRWNQAKGEVCVNAETGLPWWQECSKEAYADGIAGAVDAYWNWQQSRAGARAGKRVGFPRFKKKGRDADRVRFTTGAMRVEPDRRHVTLPVIGTVRTQENTRRVERLIAKGRARVLAISVRRNGTRFDASVRVLVQRPQQHHVARPDSRVGVDVGVRRLATVASADGTVIEQVSNPRPLDTALRELRQVSRARSRCTKGSRQYRERTCELSRLHRRVNDVRTHHLHVLTTRLAKTHGRIVVEGLDAAGMLRQKGLPGTRARRRGLSDAALGTPRRHLSYKTRWCGSQLVVADRWFPSSKTCHACRHVQDIGWDEQWRCANCHVTHQRDDNAAINLARYEEPDSVVGPVGAAVKRGADRKTRPSRAGGREARKGRSHRAAEQPRDGVQVA

SEQ ID NO: 2079 - protein, 640 aa, Emiliania sp.
MDDSHPCLIDMLNQQQSNNIMESTAEPLINGQEMEQLNTCDQHQTDNGYMGSSMETQVMDMFPSSMDESLPESNSITSDDSSMSSNRSTQDALPSPIVLPDLTTTAPVLNRFYDSRLKDVYNMFIYPTETDSVGSATISSSTYSTTMEQQLKLTNKMNSLPQTNRPSLQTTSFLSSQFSVLGCTEREVEAAVDAQVGEKRKKIPFQRQTELQGNLRTYKIKMFPTPEQKDELKRTFGMARYAYNWAIAQMKEGKKPNNIQLRNEFRKLPLPQWASEKKKQVATRITAGAIKQAVDAVLTNLKKKKKDPSHHFEMTFRSKFANSEVVNIEKAANGGSLAKMQAYTSEHLPYRAGRKNALLYFGNNLKQAGPILIEDNPNVIDMFVAEGKPKEDGKILYDRRRNTYYYIYLYEQPALRDPDPGFSDKDIVCTDPGEVVFQTFYSPSGSHGELLLDFRQVLLERCKKLDILHSRVTKKEKMRRQGLLQGRKNYLIIRRLKQAWARERARLSAFVERAHYFAANYILKNYDIIIQPQMAVSKMVSDLNSKVARSMLTMSHYMYNRRLEWASTRYAGRYIVHANEPGTSKTCTNCGYWHADLGTSRTFKCPSCGIAVSRDLAGARNNCLHAVGTVIRNRQLSEKR

SEQ ID NO: 2080 - protein, 395 aa, Archaeon sp.
VLAVKTVRQNHQASTELLRLLDEFRRMVNVCIAVGIEQNVSSLKALSLKAYHRLSRETLSYNRLCAISTATGILRNYRKAKKKNSRTKFPYAKKLILTTCYGFKIQNGLLRLPTKPRQYIYVKLNSHTLRVLSGLNVRSVTLTPDSLSISYSKEIGEIQPEGYVGVDRNLDNVTVASTDRTVRRFDLSNPTKIKADYRYVKSRFKRNDSRIRARVFSRYGEKQRNRIQPLLHNVSKRIVDDAKTKRNGIVMEKLTGLRKLYRRGDFQSRNYRARMNSWSYGELQRQIEYKARWEGVKIIYVPARHTSKRCSICGYKTLESTQRQLWCPHCGAVLDRDENAARNIAAGGLRFSPDGPPGEAMVEEREPDNATLILKVDEGKLSPTTDDFRLYPTKT

SEQ ID NO: 2081 - protein, 423 aa, Saccharopolyspora sp.
MIFMRTAYKVRAYPDSEQAAQLGRTFGCVRLVWNKTLDARHRAYHAHGKKTSYKETDAALTAWKKTEELAFLSEVSSVPLQQTLRHQHTAYANFFAGRAKYPRFKSRNGRQSAHYTRSAFTLRGGRLKLAKHAKPLVFAWSWDAGILASLNPTMVIVSREPDGRWYVTFAVDTEDPEPAPETGRTVGVDLGVKDFAVLSTGEKVPNPRHMDRKARNLARYQRQMARKQPGSANRRKAKNKVARTHRKIRNARADFLHRVSTRLVREHDVIALEDLNIAGMSSSAKGTPDTPGRNVRAKAGLNRAVRDAAFGEFRRQLEYKAERAGKRVVVIDRWYPSSRTCSACGHLLKSLTLSVRHWTCPDCGTRHDRDHNAAKNILAAGLAVAGETPGDACGAGVNPQGASPRSSATKQETRPVRFGIPGH

SEQ ID NO: 2082 - protein, 407 aa, Caenimonas sp.
MYRLATPRPTTATRVLRVRVKDRHKVWLSSLAREVNLVWNYCNDLQIRVFERERKLLSGFDFWPYLKGSTRGDAALLLPVQAVQETAEQFARSRKQHSKVRLAWRKSGGARRSLGWVPFKVRTIRHAHGQVYFAGRWLSLWDSWGLGGHELRAGNFSEDARGRWYLNVTVTVDVRRGAPELLPRLPAQADAIGIDLGLKELATCSDGTTVAAQRFYRNIEPALASAQRSGKKQRVKALHAKIGNRRKDFLHKLTTTMARSHHVVCVGDVNAKALARGRHAKSVLDAGWSTMRTMLRYKCADAGAWFVEVPEAGTSRMCCACGAASGPQGVEGLDVRQWTCDVCRVAHDRDVNAARNILARGVAILEEQFAAAGEARAVEAAVNEVGGLHGRSAGAGHGPPVVGIAAL

SEQ ID NO: 2083 - protein, 417 aa, unknown
  TnpB Polypeptide
MIKTYKVRLEPNNKQAGKFRQFAGAARHAYNWALEREKEAYELGKGFISDIDLCRLFTKHKAENDWLYTISNDVTKQAIKDACLAYKRFFKKQSDLPKFKSRKKSKPSFYQDGFKVKATDTHIKLEKISESTRKNKQKLNWIKLSEKSRIPIVETYQNPRVTFDGIHWHISVSVEASEKPAEPRGDGIGIDLGIKELAVCSDGHTYSNINRTDRIRRLEKAKRRKQREISRKYEKNKDGNKYVKTNNIIKAELKLLKINHKLTNIRNDYIHKITTDIVKREPSFIVLEDLNISGMLKNKHLSKSVQEQCLYTFRQILTYKAERAGIKLVIADRFYPSSKTCSQCGTIKLDLKLSDRVFKCKCGLEIDRDLNASLNLCRLGTVSSTGINVCGVLNQTKVAKAKSGTVKQEINRSVRNS

SEQ ID NO: 2084 - protein, 378 aa, unknown
  TnpB Polypeptide
MKKTFKYRIFPTKGQVRKLNKALDACRWLYNRFLEERKTAWEKERKSISRYDQVNSIPKLKKEYEFLNDAYSQCLREVAVRLDLTFRAFFRRLKAGEKPGYPRFKSKSRYNGFTYPQSGFKLFEKTVKFSKIGDIKIKLHRPVQGTIKTCTIKRSPTGKWFVTFVCEVNHNPIEKPIEPTIGVDMGLESFATLSNGEHIRNPRFFKHEEKALVKAQRKLSNQKKASKDRGKARKVVAHIHERISWKRHDFGHQQARKLVNRFNTIVVENLSINDMRQGNFRSINRSIGDVAWRQFLDCLRYKAAWAGSHYIQVNPAYTSQTCFQCGNRHKLKLSDRVYRCPYCGFSLQRDHNAALNILRLGLQSLGSTPRSPRTCSGE

SEQ ID NO: 2085 - protein, 384 aa, Psychrobacter sp.
MTKQILKAYKVRLYPNEDQQIFFAKSFGCSRFIWNKMLGDKIEHYKTTKTALNNTPAQYKKEFEWLKEVDSLALANVQQNLRAAYNTFFKQGTGFPNFKKKGVKDSYTTNNQKGTVAITANTVKLPKIGHITAKFSDKINGLIKSATISRTPSGKYFVSLLVETITKPLPKTQSNIGIDLGLTHFIVLSSGTKVANPKFLSKLQDKLTREQKILAKRREVAKADQRKLSESRNYQKQKLKVARVYEKITNRRRDFLHKLSFNIIKNHDVIAIEDLNIKGMVKNRKLAKAISDSSWSSFTTMLSYKAEWYGKTLVKIDRWYPSSKTCSNCNHLLTKAELPLSVRTWNCPNCLQKNDRDLNASINILHQGLILAKQSKTVGATGLA

SEQ ID NO: 2086 - protein, 388 aa, Thermoprotei sp.
LKLTVQLKVSRKTNKAKLLFLEELYGKYQTALKLFYNYAKDNQLHRLGKRSLIEKELQKLYYAVKESLNLHSQLVQSARRDVVNDIMSWLKVGGEYPKLLEKPLTLVYDRSYRLFEHGKEFKLWAKICGVAYPLELGDTQLGLIKKAEKIGEAKLLKRDDEWYLHVSIEVKEAEPLNPKGVLGVDLGLRNSAVVTGSKPVFIKHRRLLYRVSYYWKKIDLLKSKLPKGQRTSKRIKRLWRKIARINRFIAHDTSAKIVKLALKTQKAIALEKLEVPNSGYNREWSRRLSNWVRGKIIKYVQYKAKLNGIPVILVNPAHTSRECHVCGGDGERFSSTFKCKVCGRTYNADFNASVNIARRATSLLARRRNPASVGLRDDGRKLPIFSGE

SEQ ID NO: 2087 - protein, 414 aa, Methylacidiphilales sp.
MKNVVKVRIYPTPPQKQLLSKAFGCARWYWNNSLNATNELYKETGKGLSQIGMNSRLPALKKEFEWLGETYSQVLQSVSLNLSRSFINFFEGRTSFPKFKSKHDKQSIQYPQNVKIVDNKRKHLGGFASQIVFKKSLKFPGKLGVVPAKIHRTFDGKIKTVTVSMNCAGKYYASLLFDDGLPDIEIKSEGKAVGIDVGLTHFAVTSDGSKFDNPKHLKKREKNLKRKQQKLSRKQKGSNRRYKARRIVARVHEKIANCRSYFQHKLSRKLVNENQVIVVENLAVKNMVKNHCLAKSISDCGWSEFTRQLRYKAERDGKIYLEIGRFFPSSKTCHVCLNQVGSLPLDVRSWTCSSCGTKHDRDVNAAINIRDEGIRLLALGTSATANGRDVSPRVGRKSSVSKAVPVEIGSPIPL

SEQ ID NO: 2088 - protein, 390 aa, unknown
  TnpB Polypeptide
VLKAFRYRISPTEEQKVLLNKHIGSVRFLYNIALETKQIAYASKQVNLSRYDLQRQLKDLKNECEWLKEVNSQSLQVALMNLDAAYLRFFKGQNSFPTFKKKSNGGSFNIPQNVFLEDGKLVIPKFKKGIDIVLHRPIKGEIRQATISRTPTGKYFVSILCETGEVIKPKKNIKEKTTIGIDLGIKTFIVASNGQEFDNPKYLRKAQSKLKYVQRKYSKNKGKRTKHRLAILHEKVANQRKDFLHKVSSELIKNHDSIAIETLQVSNMLKNHCLAQSISDAGWGTFVTMLEYKAEWYGKNILKIGTFEPSSKTCSCCGNINKELTLKDREWTCECCGTLLNRDVNAAINVKSFALKNYVLGTKTKTRNELPTLVGVMTYEAHPIAYGVGG

SEQ ID NO: 2089 - protein, 409 aa, unknown
  TnpB Polypeptide
VNKLKVTRTEQHIIKRNNLLWQLIDNMCFKSKNLYNYGNYIIRQEFINNGNWIHYNSLFDLCKDSNPYKDLGSNVGQATLRLLDKNWKSFFTSIKDWKVNPSKYLGRPRLPKYKPKDGRFILSIDNNKVMLKDGFIYFAWKPLKVLNNHFITKIPQDNKVFQCRFIPTGSSYTMEIIYEVEVAEQPVSSERIISIDLGVDNFVTITNNVGLKPFVIKGGVIKSVNQYYNKEKARIQSQLKTINKKDWSNRLQKLTEKRNNKIKYLMHVYSKRIIDYCLENGFDTIVCGYNKEWKQESAMTKKVNQKFVTIPYEIFISMLDYKALDSGKKFILNEESYTSGTSFLDNEFPVKENYNKSRRVYRGLFKSNTGKLINADVNGSYQIMKKVFPNVFDNGIEGAGCHPMSMKIA

SEQ ID NO: 2090 - protein, 302 aa, unknown
  TnpB Polypeptide
LKEFFNDKTGKVGKPRFHSRKYLRYSCTGKSLVQIASRRYLKMPKLGYIKTSKTGILKDAKIRRYTVVLEPTGKYYLSLQVEAKPAEQFKQTGKQVGIDVGVADLAILSNGLKYPSFDGSYYEKKAISWQKKYSRRRHLAQMLCLQDKYRRALCPRNLESFSNWQKARKQKAFYQAKVAAQRKDYLHKLTTHLVKQYDVIVIEDLRVKNLQKNHHLAKSIVNASWSMFRQMLEYKCQWYGKKLIAVDPKNTSRICSKCGYNSGEKPLNIREWSCPKCQTHHDRDINAAVNILNKSKACIVEL

SEQ ID NO: 2091 - protein, 432 aa, Nostocaceae sp.
MYGCQQNLVNPDEGLKAVLEFICSESHKLTNCGIYYARQIFFKKGKLIGKYDLEKEYKTNKHYQVLHSQAAQQILRSVAESFKSFKELDKKYSRGELHFKPKLPKYRKGKGYALVTYPKQALKLVDNNIKIPLGNTVKRWFKLDSFLLPMPSNLKFADIKELRILPRNQYFYAEFVYEKESVQEIKLNLEYALAIDPGINNWLSCVSNVGTSFIVDGRKVKSLNQWYNKRVSTLKEGKPQGYWDDQLAQITEKRNRQMRDAVNTAAKLVVDHCIEHQIGTVVFGWNQGQRQEAQLGKTTQSFVQIPTAKLKERVKQLCEYYGIKFVETEESYTSKASFLDGDFLPIFGAKPEGWTPSGRRVKRGMYRTNKGILINADLNGAANIMRKVETQLGLSLVKVCRQALTLATRFRIWETKAKKLRGTALASLVATV

SEQ ID NO: 2092 - protein, 472 aa, unknown
  TnpB Polypeptide
VHRTIKKQAILARIQNFRHDSLIMKIICGFQFELHTTDEQRSALSRNAGCRRFVFNKALELQNERKKNGLSLLRYKELCLELVKWKKEEKTVFLKEAMSQPLQQALKDLDRAIADSFRPKSDSARKEWPKFKTKDIGDGFRIPQFKPEHIDDANGRVKLPKIGWMRYRKSRPLAFKCADGSMKSGTVRQIHIKKDCGHWFVVFTTEFDIEMPDPKALDVGIDLGVVHAVATSDGQFFDLNTGRIKELEKEIARYQRKLALNRSSRLKLAKEGRAEAFDKTKPSRKRRRLLEKLQKLHRRVRNIRRDFQMKTAHTLAQEYGCVYVEDLKTRNMTKSAKGTIDNPGKNVKQKSGLNRAILRTGFFGMRQAIEWQQYKAGGYVVAVPAAYTSCECPSCTCTDKRNRPRQAQFRCIGCGYENNADIVGAINVRRKGRTGPSAHDKKRIACEVSAGADVPFARNSGANSENQPLGVA

SEQ ID NO: 2093 - protein, 418 aa, unknown
  TnpB Polypeptide
MLLSKKTSIKVSREYANLIGHMCYAASKLWNVCNYERQHYKETGIEQYPDWYYQKKAHKEDLWYKQLPSQTAQEVCKLLDKAWKSFYALKRSGGIETPRPPRFKQESIPITYMQMGIVHERDTDRVRLSLPKTLKKYMEETYQIHENFLFLENKIFRDMDHIKQLRISPPKNGKCDMIVIYEIEEPEQLSQNGHYLSIDLGLHNLMTCYDSGNGRTFILGRKYLSLERYFHKEIARVQSVWYAQQSKRGIKYPKSSKHIQRLYRKKQNAVKDYLHKVTRWIAEYCRKENIHCVVVGDIRNIRKEKDMGHKNNQKFHGLPYNKLYIMLEYKLKLYGIQLIKQEESYTSQCSPFSPEISKRYAEASNRKERGMYITDGVRYNADAVGAFNILRKYLSVSGKQKELSVTGLKNPEIIKVAV

SEQ ID NO: 2094 - protein, 476 aa, unknown
  TnpB Polypeptide
MLRAYRFALDPTPSQARVLASHCGAARKAFNEGLAHVRRCLDQRAAERSYGVPEQQLTEVPWTLPALRRWWNLHKDELAPWWAENSKEAYNSGLDALARGLKQWSASRSGKRRGARIGFPRFKSRRRARVSCRFTTGAIRVDDRSHVVLPRIGRVKTHEPAMALSGTISAGTARILAATVSFDGRRWYCAFTVEAGREPQRPAHIGVDRAHPVVGVDAGVRDLLVVAAPDGAELARVGAPRALAAAQARLRAVQRRAARQDGPDRRAGRRGSKRWQRTAERAGRLHARAANLRRDALHQASTRLAQRHDVILIEDLNVAGMMRRKPGAGKGGRGLNRALADAGLGELRRQLGYKTIWYGSQLVVADRWYPSSKTCSACGAVKAKLALADRTYQCDHCNMVLDRDLNAAINLARLSEHATRVEGRPAGSGPVAGRGAIRKTSPPMGAAAGGDETSTPHSGRPAAGQTGTAPPQGEAA

SEQ ID NO: 2095 - protein, 388 aa, unknown
  TnpB Polypeptide
VLEIFRFKLYRSKKNKHLHQQIFIASRIYNHCLALQRRYYRLTGKYLHKFRLQAFVTKLKKRAKFQYWNELNSQAIQEIVERIDKGYKLFFSERQKGNTKIRPPKHKKYKNYKSYTLKQTGYKYLGGNKLKIGRRTYQFFLSEDIDGEIQRLNIKRDSLGDFYLSFTCLVNDDAPTSIVTTGKSAGFDFGLKTFLTGSDSKEWKAPQPLKAALKELKAANRALSSKIDGSRNRKRAKDHLARVHRRIANVRNDYQWKLAKELVDTYDELYFETLAFQGMKALWGRKLSDLAPANFLAKVEYLADKTGKLYIQIDRWEPSSKRCSVCLKINDNLELKDREWTCSCGAHHHRDINAAKNILRVGASTHKGVGNKTALISASNDDLRIPRL

SEQ ID NO: 2096 - protein, 385 aa, unknown
  TnpB Polypeptide
MACNLFVERTITVKLDPSEAIGQTVRIFNGATNFFLRLGFHNRTHSKRKLQALGYYEARDKWPALQSSLVQGARDCAADMLKRERCRRLPIKKPHSSARFNQRTFKAFLDSGFLSLTTVEGRLKVPLHIPEYFRKYLGGKVKALRIRDVDHDLMADLVVELPDVPIKEVANPRVVGIDRGINNIAVTSDGRFFNSKHVRNVQGRYAYLKRELQSAGTRSAKRHLKRLSGRERRFQADVNHRIAKEIVGADFDVLALEDLSIRKDKRLGKEFNRKLGRWAFAQFETFLRYKSEECGKHVISVPPEYTSQTCSRCGDLGIRKGHSFRCPVCGCSLNADLNAARNIASLGNALVGRPTVNGPIVATNDAENRTSVEVSYKPPIPMGGS

SEQ ID NO: 2097 - protein, 400 aa, Okeania sp.
MKARFKYRIYPTPGQKHRLAKLFGCVRVVWNDSLNYCNELYKKGNKKPSNAELQKIFITQAKKTENREWLSAVSNIPLQQSLNDLNQAYQNFFKSTKGQRKGRSIKPPKFKSRKSKQTARFRKGGFKIGQHKVYLAKIGKLKIVWSRELPAPPSSVTVIKDSANRYFLSFVVEIQPEILPQTDNSVGIDLGIKTFATFSDGTKVDAPKPLKKRIKKLRKLSKSLSHKTKGSKRYEKSRVRVAKFHGKLKDTRTDFLHKLSTEIIRENQTVVLEDLNVSGMIKNRKLSRAISDLGWRQFRTLLEGKAEKYGRDFRVIDRWEPTSQTCSCCGFKGGKLDLSIRQWECLSCGSKHDRDTNAAINILVAGGHSETRNGRGGKCKTTAKVAAACETSTRRGATAR

SEQ ID NO: 2098 - protein, 422 aa, Scytonema sp.
LSLSPSAWLSSRQSAWTNAITEARQPMFAIKRRLKLNKQEQGLMAKHAGFSRLVYNYGLDLFWQSVEAGLKATDSKRIQAIKKCLTNVTKKRAEFDWMNTMSSKVYQSALSSLQLAFSRWRKGIAKAPTRKTRKNKQSFTVYDSNGSVLVKSGRFVKIPTLGIFRLQEALDESYITQTFTISREADAWYVCFAIDAERIPPIMHGVAEPVGIDLGVKIFATISDETEIEAPKPYKTAKTKLGQFQYRNRNKQRGNRRTGEKASNSAKKYYKKLARFHKRVADKRQDFLNKTTTAICKKYAHIKIEDLNVSGMVANRKLSSAISDLGFYEFRRQLEYKAPVFGSKLDIVDRWYPSSKQCRKCEHKHKGLKLKTVCLIVLIVDTLRIETCTRQLILQMRQMINAVGSVRPELSACGLEGADSPG

SEQ ID NO: 2099 - protein, 432 aa, Salinivenus sp.
MYLTRKLKLGKTDQLDRLARRTGELWSTVAKWHWRFVDRQGYWLSKGQAQKMYCKGFDGLHSQSAQAVADSFYDSLQSWRKKRKSGDYEGLRPPYKQKRYFKVQWKPAAIRLRDDGVLRLSNGRGNDSNGRGNDPVLIDWPSEKEPKRVEIGWDGSQYELRCQYKVEEDEEPKGDKTTGIDIGEIHLAAVRAGDESWTVNGRELRSLRRQQNRTKARLDSKIDRKERGSRRWKRLVRAKDRQLSKIRGRIKDLLYKQSTRLIKTLHERRVGTVVVGDLTGIRNGMDYGSKANQRLHQWAYGEFVRMIEYKARLHGMTVKRVGEAYTSQECPSCGNRHKPHGREYICGCGFEGHRDLVGAANIHKKYLGQDEPKGSPLRVAGEGPKRSVMASPTGVRYRPHMRTEPTGSEPQRCTPASSRKTAFQRQECRPVG

SEQ ID NO: 2100 - protein, 418 aa, unknown
  TnpB Polypeptide
MVNLVTTRTITTSLTNDREGVIRDLDSLARSGSKIWNVARWTIDRIWEHTGEIPDEGPLKSYMKNQDCWKDLNSQSSQAIVEELSDAFQSWYKQDDPDANPPGYRKHGDDRPRSTITFKEDGFKLDTEHQQVRLSKGKNLKDRWADFILCEYDTGPETDLTDVEEVQQVRAVWNGDDWELHFVCKVAIETDESTGKKTAGVDLGICNTAAVSVGDETLLYPGNALKEDTHYFRQVEYETEGENGPSNHAAWARQKKSRRQDHFLHALSKDIVEQCAARDVGTIAVGHPKNIRDDEDWGRHDNKRLHDWAFETLLSHIEYKAEERGIDVERVDEYELATSITCCVCGTKANSNRVERGLYVCDDCGLVANSDLNAAENMRATVTPNPEEDRSNGCLAQPSVHLFDKSMGRVRPQEQVRS

SEQ ID NO: 2101 - protein, 574 aa, Streptomyces sp.
MLSGRRYLLNLSPEQEDMCQEFGNICRSVWNTALEQRREYRRRGAWMNYAPQCAELADAKREHPWLKAAPSHALQQTLKDLDRACRDHGTFKVRWRSKARWSPSFRFPDARQISVERLGRKWGRVKLPKLGWVRFRWSRSPGGEIRSATVSRKGGRWFVAFLVDDQAATPEQHAMPGTAVGIDRGVKTAVVTSDGHFHDQPFVTTGEIARYRRLQQSLARSKRGSANRHKTITAMGRIMSRVSDRRGDFCAQTAARIVVKNALVVLEDLRIKNMSASASGTAAEPGRSVRQKAGLNRAILDKGWHRLERALANASRYTGTRVVKVNPAYTSQRCSACGFVTEGNRESQAVFRCKSPGCGHYDHADVNAAKNIKAAGRAVSACGDLGISRSVKQEPVSRGDRPNPLIGESPGIRPGRKSTWTIGGRRSARHAAGADGSDRGRALGCAGRPADRGHRAGWVPPRARPRHVLVRASARRLRCPARAQAVCRPAVPFSALSAGQRRPARVPEAEGRRVQRRPSVCEGGHVAVAARPWSGRPVRLPAADRVAAGPGPGPRRRRRIACPHGRHGAARLGG

SEQ ID NO: 2102 - protein, 410 aa, unknown
  TnpB Polypeptide
MKAQRVEKQMIKPTNEYFPMLDQFCFLSKNLYNHANYIVRQSFVKDNKWIRYGELDKQLRADKDYPDYAEMPTAQAAQQTLRLLDKNWKSFFASIKDWSKNKDKYLGKPKLPRYANKNGRKSLIITNQNCKLKDGMIHFPKSFNGFVCKFYCCNRPDFVKLNQVRFLPHYNCIVIEIVYEVEITDTVKQNQNYISIDIGVDNLATVANSFGKQPFIVNGKPLKSVNQYYNKHVSKYRSIANQMNGVAYTKRMDKLTEKRNRKMEDYLHKTSREIIEYCKKYNVSKIIIGNNKEWKQNSKLSKKVNQHFVQIPYNRLIQMLEYKAQEIGVTVIITEESYTSGTSFVDNEMPVKENYNKSRRIKRGLFKTSDGSFINADVNGSYQIMKKVIPNGEILWNRSCAYQPFRVAIV

SEQ ID NO: 2103 - protein, 539 aa, unknown
  TnpB Polypeptide
VIVKVRTGAQAATVAERTGGVVLAANVRSDGTTGAALFVDVGCDFEAVRAGVEAATVLFELFDGTAATFDTDGPGVMVPNGWTMTAAKFEVEWPEDPSRVHSHFGARRFAYNWALGQVKTDIDAKTVDPDHVGVRWDFQSLRNAWNRSKHEVAPWWAENSKEAYCTGIADLATALGNWNSSKRGTRQGRNVGFPKFKSARRDRKRVRFTTGAMRLEPDRRTIVVPTVGALRSKENTRRVQRHLAAGRARIFNMTLSEQWGRLFVSINYAQRTPNTAHRPTRDGVRCGVDLGLRDLATVATSDGDVIVYPNPAPLRATLAERRRTGKQMSRRIPGSRGHEQAKAKLVRLDRRAVNIRRQAAHQLTTELARTYSEIVIEDLDLAAMKQSMGRRAFRRSVSDAALGTVRPMLEYKCRRHGTTLTIASRWFPSSQIHHGCGCRLHAEHRLDKMLTCTETGERVDRDINAAHNLRDWPQSQSSGPVRSAAPSGSPEEPRASRVGGPDHVPNTSPGEADVRRTTPGSTPTAEEARTKTLQREATR

SEQ ID NO: 2104 - protein, 405 aa, Acetobacter sp.
MKVQRAHVVKLYPDAGQEEFLRQIGGATRFLWNLALYQRQIWGRRHELNRFSQSKELTQLRAEVNWMTACPSQVLQQVLNDLEKAFQNFFAQRARFPQSRKKNRGDSFRFPDGKNTLYERLTGKGGRLKLPKLGWVRFRGWRPLPGQIRNVTVRCDAGQWFAAIQYEYEITDPAPRTLPAIGIDRGVAATVAISGQGRIKGPEAYRKALKRLQRAQRIVARRKNGSQNRHKAVLRVARLHRTVRRVRADFLHKVSHWLAKNHGTLVFEYLKIRNMIRSAAGSLAELGHNVRQKAGLNRSILDQGWGMLHTFCRYKAAERGGQCLDVSAKNTSRECCKCGHIAVENRGSQARFLCVQCGHTENADDNASVVILKRAVDCGLLPVEALHYLANKAGNTVGHFPTSCQ

SEQ ID NO: 2105 - protein, 581 aa, Rhodococcus sp.
VAVDDATGEQIGLDDVDVRVGWLLDLITAAGDELVSRLWQPATFDVLDAGRDRQDRRLPAQGHVAAARLGWNPIYPDGIYVPSRVTRVVTAQVMATLRTLAYRDTAIAALSARFDSATGRLTAPTGSGDTVPSGFARGVQRQLIAYSRRTDGAPAGRLRITEIQGPPQTSAMARLSAADRQLAQLAVTGDELVLTVKLPTCPAPGRAQWRSVRLTAAIPEHLHDRTITAWHLPTLVLDRKGLLWRCAATELVPADDLKSAAVAVGVDWSPTTLGAAAIVAEAIVGLSSDYRGWTYDDRGLGIKLARLQAEGQLLHAKAARLTRLAATALPEVRAGLEEKIAVLGAHRTAVGVKRGKINRELAFDFARQVTDYAAAAGAQVIAVEDLTTLETRGHGRVNNNRAAQSARRQAVAALAHTAAGAGITVVSVPARGSSALCPGCDEPLSRPGGYHDAWCPRCRVGGNRDHVAGVNLAKRALLGRNKVTRRRGQLPAVRVAEHAPVRRCRDKNGPTPSRPRHCRVRRSLPAVTQRLGVNPKQHVPAPQASVWDTVKPTPPHGDAGSRDTRTPLQSATRVADSMRSM

SEQ ID NO: 2106 - protein, 405 aa, Kribbella sp.
MACGYLITVSRYRMYPTSAQAAGLLLHCAHARYIWNLANEQWSMWRRDLGPTPRFVEQTRQLAEARGAFDWLRAGSSTVQQQALRDFDQACRNYFAGTHGRPTWRTAGRHEGFRIVGPQAGRVEQLSGKAARVLIPKVGWVRFRLSRSLPRAKSYRINRDRAGRWHIAFAAVPPTIPPPNTGAVVGVDRGVTVSAALSTGELLSCPKLSTSESRHLTHLQRRLARAEPGSNRRRRVRTAIAKLHARATDRRKDWVEKLSTQLARRFDVIRVEDLKVAQLTRRPRPKPDPLRRGVFLPNKRRAKAGLNREILASAWGLLVRRLEDKAGGRVEKVNPAYTSQTCSRCGHCTPENRESQAFRCTSCGHRDHADINAAVNIAAGRAVSARRESEGVLSAKREPSLGSLR

SEQ ID NO: 2107 - protein, 392 aa, Streptomyces sp.
MVMKLVVRVKLLPTPVQAAALEATLHACNEAATWAAHVAFEEKAAKPLALRKHTYQQIKTRWNLGAQAAQHAIKKTCDAYTTLRANLRNGNYGKPGSKRYERAAGKPVTFRADAAQPYDDRMLSWQHKQRTVSIWTTAGRMKNVAFTGEPGQLAVVAAHRKGESDLLCRGEQWYLLVTCDIAEAEGNAHPVGFVGVDLGIVNIATTSTGKRYSGRRLNRRREADRELRTKLQQQNTKSAKRRARKHTGKEKRRARDINHKISKRIVVEAQRTGRGIALEDLTGIRERARLRKPQRVTLHSWSFHQLDAFIAYKAKRAGVPVVYVDPAYTSRECSRCHHIEKANRPSQAVFVCRSCGFAEHADRNASHNISHRGWYAWVRGAESQAFALTLIA

SEQ ID NO: 2108 - protein, 366 aa, Tenuibacillus sp.
MPVIKAYKFRLFPTQDQAILMNKTIGCSRFVYNHFLSKWQDTYQQTGKGLTYNRCSSQLTQLKKEIPWLKEADSIALQATLENLADAFSRFFNKQTRTPRYKSKKYPIQSYKTKLTNDNIKIMGNRIQLPKLGKVKFAKSRDVKGRILHCFIRRNPSGKYFVSIVVETDVEPMDKTGSAVGIDLGLKDLVVLSNEITYKNLKHLHQYEMKLAKEQRILSRRQKGSVNWEKQRIKVAKLHEKIQNIRQDYLHKIAFNIVKNHDIIGVEDLQVSNLLKNHKLAKAISDASWSQFLSMLTYKAKWYGKQLIKVAKDFPSSQLCSNCGYQNQDVKHLAIREWTCPECGVHHDRDINASQNIRHEALRLAH

SEQ ID NO: 2109 - protein, 419 aa, Halobacteriales sp.
MPTTRRTHVCHINNHTQVAGALDRHGWSASKLWNVANYYARQQWDETGEIPDEKELKYELKDHIKYNGLHSQSSQKVLEELSQAYSSWFGSDDNRGNPPGYRKRNYYDSDGNRVHEEHPRSTVTWKQKGIRHDTKHDRICLSKGKTHKNGHDFILCEYETPPEVTLQNVQQVRAVWCRYKQRWELHVVCKKEITAESPGEKTAGVDLGICNPATVALPDDALLYPGNTLREDKHYFQREEYQTEGNRGPSQTAQWAREKLSRRKDHFLHALSKDIVERCVAHGVGTLVVGDPSGVDEDDWGRHGNKRLNNWAYKRMMNLIDYKARERGIEVEMPDERGTSSSCSVCGHEDDDSRVERGLWKCDRCGVVAHGDINGADNIRQKTLPVTPPLGDSGNGCLAQPRVIQFSRTHGFQPRAPAE

SEQ ID NO: 2110 - protein, 402 aa, Streptomyces sp.
MARQVKRAFRYRFYPTSEQAAELSRTFGCVRLVYNKALQERTRAWYGEQRRVSYVESSAMLTGWKKTEGLAFLTEVSSVPLQQALRHLQTAFTNFFAKRAQYPRYKSRKRSRASAEYTRSAFTWRDGRLMLAKMSGPLDIRWSRPLPQGAEPSTVTVSRDAAGRWFVSLLCEDTVTEAPATGAAVGIDAGITSLVTLSTGEKIANPRHERRDRTRLARAQRELSRKAKGSANREKARRKVARVHARIADRRRDFLHKLTTRLVRENQTVVIEDLAVRNLLKNGRLARAISDAAWTELRSMLEYKCAWYGRELVVIDRFFPSSRLCGACGTVRGKLPLNVRTWTCECGAVHDRDVNAARTILAAGLAAAACGDGVRPQRESSRTGQSSMKQEPQRATAGTPRL

SEQ ID NO: 2111 - protein, 334 aa, unknown
  TnpB Polypeptide
MRTAYQYKLRPTKSQAIEIDRWLSILWAQYNYLLVDRFNWYEQNRSPINACPLFCHLPELRNNPDYYSQKKTLPQLKKTRPWYAEIYSQVLQDVVKRVKVTFDRFLKGDSNGKRSGRPRFKPRSRYRTFTYPQIKDGCLQDKLINLQMFGKVKVILHRPLPDGFNVKTASVTKTTDGYYITLSFEDKTVPEIKPDFNPDKITGIDVGMKEFLTTSEGETVAIPQYYRKAQKHLRVIQKRVSRRKKGSNRRQKAVKQLGKQNKKVADKRKDFHFNTANYLLSKYDVIAVEDLNVKGLARTRLAKSVLDAGWSTFLSILTNKAVNAGKVGSPSKGL

SEQ ID NO: 2112 - protein, 523 aa, unknown
  TnpB Polypeptide
LAKNQTYRAFVARPSHILDFLNGELIDGASVLASLASEVRDISAYATFVVRNDEALGDELARATATAPAVAGRQAGVTMPDFLVTGRSGRSRKERLVQYNAVTSCRSWQERAKVANGESPKYVSQGWKRTADKSAPTYGEDYVNLGAVDKCYAAVEGDPFAYGEIILKMVIQGQWYRLIFDFDNKRFGEGKVTLPVIKVEDGVPVFIFTVVTDNPIVQFSGDYTIGVDVGINNYDTVVARDTKTGRIAYETTLSQRVHSLWNSVRASERQVRALRKKAATLLHDRQARMSALDEAQLHREAASRKKRELAILAAQEIADLSHAWGNAVVSVEDLGWAINAAQHGRWNRGAFVRRLAHYVSQNGGWVVTVNSAHTSQLCHSCGAKVSHPTHELSVCPEHGVMDRDVNAAANIAARAVSRVVKARATRAKNRKLRPQQPLKTPVARNSLKYPGRDRTKSVPTPKRKKHRLVSKEVILPVCPARAQAYSLEASVLADQETRVTLGTNVAALKQGNVTYKSRLRSPA

SEQ ID NO: 2113 - protein, 385 aa, unknown
  TnpB Polypeptide
MPTKKSKTAQRRESIEDAAPQRTLALSLDITPEQYGVFAGLADSYNRMWGSLVSWCNHNRCVNLTRVQKENYARLRTKYPELPAQFVCIAIRDAAGAVRSWNSNHPKRRWSLKASRRKTTINYDLRVMSLRGNLLSLSATLGQKRQRILLPDVPDWFDRRYPERSLNAAKLVLDPDGHGASVRLIYRLPHAAPVEQGDVLGVDLGQHALATDSRGGEISYSHMQGVKRRYAHNRKTLQEKGTRSARRRLQAMGQREKRFIRDINHCASKQLANTPNISTIAFEDLTHIRRQAVKGTKTSKTRRNMLNQWPFSQLQEFTAYKAALCGVRTVMVNPAYTSQQCNHCGHVAAGNRDHARFDCLTCGHSDNTDHNAALNIRDRAIQNLG

SEQ ID NO: 2114 - protein, 412 aa, unknown
  TnpB Polypeptide
MPTARLVRSLLFPLDEAPSPLRWLLGEFRLLVNRSIRIALREDLRSRSRLTKVAYRTLSAEHDVYKQYITSAFEIALAVLKSHRRRARRGRRTNVPYLRRLMLKAENQSYRLDRETGRLRIPIRGTEGVQLILPLSAWHRSILRDPTWGLGSLTVTPDRIVVVVRKAAPDPYAPDAAIALDTNEASLDGVAVGDGEARLVTVPFPEVRVVQATHFRRRRRLARKKANDRRVMRRLLHREGRRERNRIRQRLHRVSKELVASAAERRAAIVLEDLQMPQGGGQGPRMRRRLSSWPQGELHRQIAYKALAAGVPIIRVNPAWTSKTCPACGARRRDRVGQDFVCLVCDWEMDRQHNAGLNILKRALASDEALARAVRFRPGALRRDVVIPLYDLPAREGAREEPSGVECLAEAA

SEQ ID NO: 2115 - protein, 406 aa, Streptomyces sp.
LLRAYKFLLRPTVRQAQALTEMLRDHCSLYNGALQERRDAWRHTSKTSIRYGDQSAQLREIRAFDAERQGRWSFSSQQATLRRLDKAFQAFFRRVRSGGKPGYPRFKGMGHFDTVVFPRDGDGCRWDSTPNDAHTRVRLQGVGHVRVHQHRSVKGRVKTVSVKREGDRWYVVLACDEVPAEPLCGTGSIVGIDMGTVHFFTGSGGERKENPRFLESMAEELAAAQQRLATFPKRTRCRTKKHRTAARKVAKLHARIRRQRLDHHHKTALALVREHDVIGHEKLNTAGMTKAPVPKPDPERDGGFLPNGAAAKAGLNRSILDAGWGLFLGILADKAESAGRRVIPVDARNTSRTCPPEIGGCGHVAKENRATQAKFECVKCGLVENADRVGALNVLHRAGLVLCAEA

SEQ ID NO: 2116 - protein, 350 aa, Coriobacteriaceae sp.
LRFGPAAIPSPPWKGRPWQSPGNSSRTRRACSHGKGLRDPHLPQRRPARACRAHLRLRQVGLQQVPRDQEDRIREDREIAVGLPAPEARHGLEKDGCTLACRGGLPRAPAGGREPGEGLRWVLPPLQGGRKGDARQSYRTNWGISVPDARHVKLPIIGVVKARVSRPVEGRVLNATVKRVPSGKYFCVLTCTDCPKPDIPEGRIEVLGVDVGIRCLMARSDGNAIANPRSLARSERKLARAQRRLSRKKKGSRRRAKQRARVARVHEKIASQRKDALHKATTGAVRESQAIAVEDLDVRGMEKSRRLAKSVADASMSEMARQLEYKCCWALRHGPAPYAGAATTVISMRP

SEQ ID NO: 2117 - protein, 402 aa, Escherichia sp.
VKRLQAFKFQLRPGDQQECEMRRFAGACRFVFNRALALQNENHEAGNKYIPYGKMASWLVEWKNATETQWLKDAPSQPLQQSLKDLERAYKNFFQKRAAFPRFKKRGQNDAFRYPQGVKLDQENSRIFLPKLGWMRYRNSRQVTGVVKNVTVSQSCGKWYISIQTESEVSTPVHPSASMVGLDAGVAKLATLSDGTVFEPVNSFQKNQKTLARLQRQLSRKVKFSNNWQKQKRKIQRLHSRIANIRRDYLHKVTTTVSKNHAMIVIEDLKVSNMSKSAAGTVSQPGRNVRAKSGLNRSILDQGWYEMRRQLEYKQLWRGGQVLAVPPAYTSQRCACCGHTAKENRLSQSQFRCQVCGYTANADVNGARNILAAGHAVLACGEMVQSGRSLKQEPTEMIQATA

SEQ ID NO: 2118 - protein, 408 aa, unknown
  TnpB Polypeptide
MVLVEKHIIKPHHKYYDELDHLCLLSKNLYNSTLYSIRQYYFATKQFLNYQAVNKQFASGNQPDYRAFPTRVAQHTQMLVDRNFKSFFALLELKAQGKYNKPIKIPKYLNKKAGRQVVHYVKGALSFKAKGFIQLSKTNIKIKTKLTKGEVQFVRLVPKNHYVVIEIGYNVKEPEQKVNDNILAIDIGVNNIATCVTTNGEKILINGKQLKYINHNYNKVVADVQGKLKTTHNQNSSKYTNQIINKRNNRINDYLHKITTYIVNHAVSKDIGTIVVGYNKEWKQDTKMGKVNNQNFVNIPFYRLINMLEYKCRLKGIKFQTITEGYTSKCSFVDNEKIAKHTSYLGKRITRELFKTKNGLIINADINGAYNILKKYMQKNATWNETLSQTLVQACSMPCVRKVNIRLS

SEQ ID NO: 2119 - protein, 405 aa, unknown
  TnpB Polypeptide
VSAQTIRNWDANGKMIKSIKVRLNPNNKQLTKLFQYAGCARFAYNWAIAKEQENYKQGNKFLSDSELRKEFTQLKKLQEYKWLNKVSNNVTKQAIKDACNTYKRFFKGQCKYPKFKSKKHSTPSFYQDNIQIRFTDTHVKVEGFSMSKKKNKQKLNWIKLCERGRIPTDCKYMNPRFTYDELYWYVSVGIEVDDNTSLPSNEGIGIDLGIKDLAICSDRNTYKNINKTKRVKKLEKRKRRLQRSISRRYEINKKGVSYCKTKNVIKKEKLLLKLNHRLTNIRKDYLHQTTSEIVKRKPSFICIEDLNVSGMMKNKHLSKAVQQQGFYEFRRQIEYKSAWNNIPVIIADRFFPSSKLCSCCGSIKKDLKLSDRIYKCECGNVIDRDFQAALNLKRYGKNVLKESVA

SEQ ID NO: 2120 - protein, 373 aa, unknown
  TnpB Polypeptide
MQVTHRFRLYPNINQEEKLLETLDLCRLIYNYFLSQWDSKAKIPSRLELQAQLPEVKREKPELNKVHSKVLQMALYHLYSNLKALSRLKKSGKRVGRLRFKGKGWFKTFTYNQSGFKLIRTGKRLDLLYLSKIGDVPVRLHRGVEGNIKQVIIKKHNSGRWVACVCVEGHIPEETKQVRKAIGLDMGVKHFLTDSEGRQIENLMFYEKSLRRIRILHRDLSRKKKGSENRARQRMKLANLYEKLVNQRDDFLHKLSRFYANNYDLIVVENLNISNMVRNRNLAGKILDASWGKFLHLLEYKAARAGVQVVKVNPRGTSREGDKSLDRDYRASLNILMRGWGSPKMPVEMEPLLVEIPASTIIEAGSPPALSRG

SEQ ID NO: 2121 - protein, 582 aa, unknown
  TnpB Polypeptide
MYHQGSLLPDWELVQKHSKGGSRKGKLKGSSPKVDREDTTLIQLSLFEAVNPQMNELLSFMPEFQVAVKKLTLNNRLTFLSLVIPMQKSLPTSEADLTSSEKVFKPYWTEFSQTLSNLLSLPTKTGFAALGSILSHGSVVGNKLKYWFSTKRTSAQNERWSKIFLPSFTSSAVDCTDLESTKNKLLKTVSYRVYPIKELESIWKKWVAAVRQVYNIAIAYLNEHQGFDKVGKKGGKLGFRTMLKASGLIPQWCLNLNVSKILDNASIEAYTAWAKTAKKNGKKLAKFRSVRDQKITIQFDPTAYKKGRWMVSATKHLPQPDFKGHDFCVLTDGSTELTSNKGRWFAHFPVEMEKTPISNSKVIALDPGVRTFMTGFDGSDFLEFGNGDFNKIAKLCSYLDKLKSKHDKAKGSKSKRLRYKLRQAMEKLRTRIKNLRSECHKQVGSFLAKNYDAIILPTFETSEMVAKKKRKLKNKTARAMMTWAFYQFAQTLEHLCNRYGSKLARITEEYTSKTCTKCGQVHRKLGSSKNFRCPHCGYEIPRDFNGAVGIFLKAMWDTTFINSVGDVVLDVQDISDVRRCLG

SEQ ID NO: 2122 - protein, 383 aa, unknown
  TnpB Polypeptide
MIKGFRVQIIPSEEQRKKIIDFCHAARFAYNWGLEIEEENYKNGGKFISGFSLCVLFTEFKNKEENKWLKEISGRATKVAILNVATAYDNYFRKRANKPKFKSRKKSKMSCATHERSIKFTSDKVKLEKLGWVKLAQKNRIPYGDNIRYIIPKIEYDKLNFWVSVGVEIIDKQDNDKPKTDVIGIDLGIKTLATCSNGIVNNKPDIKKETKKLKRLQRKASKLYQPMLEECKQTKTKFVKLQKSKNLLKLEKEILKIYQRISNVLTTNIHTFTTSLVKSNPEAIVIEDLNVVGMMKNKHLSRSIKEAKFYEIRRQLTYKCKWNNIKLIIANRWFPSSKLCSECGHKKDKLSLNERTYICTECGSILDRDLNASINLKNLAYAT

SEQ ID NO: 2123 - protein, 532 aa, Kibdelosporangium sp.
VAPPDGARIRDRLRLSTADENVLTLVGQHLGSHARQDLVDRIRIGDVPVKQNQRARRKRKLTSVASSRWAGAITRTSEDQFQLAMRCLRDERASLRRAVNAIRRRLKVACGERRGRMRGYADRSERWQKQRRLALLESRLTEVESRIDHGRPAIVVGGRRLVKVRHSLDDEGLNEERWRERWDAARLFLTADGESGASCGNYTITITAGGEVAIVLPESLRHLANSPRGRYCLSCRVTFHNRREEWLDRVEANRAVRYDITRDPVRGRWYVDASWSTDKAELPAPAELIDAGASLLGVDLNADHLAVCVVDSYGNPVGQPYTIDVDLTGSTTTRDGRLRHAVTALIRLARQHGCGIAVENLNFANARSSGRETLGRGRRAKRFRRTVCTLPTGRFRERLRGMAFHAGLVVIAVDPAYTSRWGAQHWKPPLKEQATTGTVTRHHAAAVAIARRACGYGLRRRPGVIAHHRSDGERRATGQAAIRAKGVWTVGPPRTTGSLIRGCETRARRGEELTFPTSTTVRGVTGHPSGST

SEQ ID NO: 2124 - protein, 506 aa, Caldivirga sp.
LAGIFVSGYPLICLVCLLFLVPGLVPFSSLDEPVGRYPTLFTTLGTPSSSTPKLKGSRKLRDENMRTVRLRLLPSGAQERRLRKLADATARLWNELNYTRLMQFRMMGKIDFKGTEHEFYHKYKDKLGVNAGQVVRLSNWAWDSFFETLRLYRQGKLPRFNSKPSPPGFWKDKLLGKRRLIILVRNDRYYLEQVNGGEGYLVLKDWGLKIKYAGRVKWSGRQGMLMIKLEDNRWFAYVPIEVGSKPVRSNPRGYVMGVYEKVQIEKPRGSNKAFIDIGLNNLFAVVFNHSDTAILIKGSTIKAEYYWWKREIGTYQAIRDWLRNCGFKTWHKYHAFYLHAVFKRRERLRHYYRTAIRFLAKTLWQMGIDEVFVGYPYLVGQDNGNEYNVNIWWFSKIIRWLGEVLQEYGIRLNVVNEYGTSRQCSICDMKHENGRVKRGLYICQTTGIGINADLNAARNIAKRAGYEVPMPTKILGYMVTTNGVKPLTPKEGETTKTPKINPTSLR

SEQ ID NO: 2125 - protein, 373 aa, Pyrinomonadaceae sp.
VIRKTYKYRLYPTRSQVALLESQLSEACRLYNAALQERRDAWRLERKSITCFDQTYQLKDIRAAGDTDIQGYDVAQEVLQRVDKAFKGFFRRVKRGERAGFPRFKSLSRYDSFTFTHYGRGCRLLDNNKLRLQGIGQVKLKLHRSIEGKIKTLTVRRDAGKWYACFVVECEENPLPLSSKTIGLDVGISAFATLSDGTEIANPRYFEQSQAKLRKAQRKVSRRKKGSNRRRKAIQLLQRIHAHIRNQRADFHHKVSHALVNQYGLIAIENLNVKGLAKSHLAKQVNDAGWSAFINKLAEKAEEAARVLIKVDPRGTSQRCVCGADVPKTLAQRWHECQSCGLSVSRDHASAMEILRLGLSLHAPTSPITECVA

SEQ ID NO: 2126 - protein, 315 aa, unknown
  TnpB Polypeptide
LQRIQEDRFDILPISTSQCLCTYRNFFRREKAGEKPGFPRYKAKHRSRCCYKTNFVNGNIRFEGDGRYLRLPKLGSVRVRQKRKIDPSWRIKSATVEHTRSGRFEVSVLFEFETQEPEQDEPESFVGLDYSSHDLYVTSDGERPGYPRYFRHAERKLAREQRKLSRMQKGSANWRKQKLRVARIHEKMKNQRKDFHHKAANGLVERYDCVCVEDLDMKGMSRSRLKLGKSTMDNGFGMFRALLSYKLEDRGKRLVTVGRLFPSSQLCHECGYRFSGTKDLSVREWTCPSCGRTHDRDVNAARNIRDEGMRLALSA

SEQ ID NO: 2127 - protein, 363 aa, Paenibacillus sp.
MLRTYKFRIEPTKEQRETIKDTLMYCRRLYNALLEQRMAAYKKRGISLTFYSQKKELPTLKKECEEYRSVHSQVLQNVVERLDQAYKAFFRRLKRNEKAGFPRFKGENRYHSFTYPQSGFSLEGKYITLSKVGTVRIKLHRQIKGTIKTCTVVAKNGRYYVCLSCEIEAGGLPTGKVVGVDLGLKHLAVTSDGDFHDAPKYLRKSERELKRLQRIVSRRMKGSRRRKKALALLAKKHEHIANQRKNNAHHVSRQLINRYDLIAFEDLKITNMVKNNHLAKSITDAGWNQLVHFTTYKAESAGKRVVLVDPRNTSQQCSNCNEIGKKTLAVRTHRCPTCGFECDRDVNAAKNILKRAVQQSNVS

SEQ ID NO: 2128 - protein, 394 aa, unknown
  TnpB Polypeptide
MMNLLKVYKTEINPTPEQKQIINRTIGVCRFIYNFYLAHNKEIYDKEKRFVSGTNFSKWLNNEFIPNNQEFKWIKSVSSKSVKQSIINADRAFKNFFKGKSHFPKFKKKNKSDVKMYFVKTDANATIRCERHRIKIPTLGWVQLKEKGYIPTNSNTHIIKSGTVSCKAGRYYVSVLVEQEVASKPVLNDFGLGVDLGVKDLAICSNGKVFKNVNKSSRVKKLENKLKREQRSLSRKYESYKRENNNILKGASTRQNIQKQKLKVQKLYQRIGNIRTDYINKTIAEIVKTKPFYITIEDLNVKGMMKNRHLSKAVASQKFFEFRSKLKAKCDENGIELRIVDRWYPSSKLCHCCGSIKEDLKLSDRIYKCDCGYTEDRDYNASLNLRDAQTYNIA

SEQ ID NO: 2129 - protein, 393 aa, Thermococcus sp.
MPSETIKLTAKFKLKEAPEGLDELFKTYREIVNFLISYAFENNVTSFYRLKKETYKSLRKEYSSLPSHYLYTGCQMATAIFKSFRKRRWNGKAKGKPVFKKEVIMLDDHLFKLGLDAGVVKLSTPSGRIQLEFYPAKYHERFKSWKAGQAWLIRTPKGVFLNVVFSKEVVVGEPKAFVGVDLNENNVTLSLPNGEFVQIITHEREVRTGYYVKRRKIQKKLRAGKKRKELLEKYGQRERNRLNDLYHKLANKIVELAEKYGGIALEDLTEIRDSIRYSAEMNGRLHRWSFRKLQSIIEYKAKLKGVRVVFVNPAFTSSLCPVCGGELSPNGHRVLKCPKCGFEADRDVVGSWNISLRALEMWGVSVPPESLTMKTGVGKVSRNDVYELYSNHG

SEQ ID NO: 2130 - protein, 435 aa, Thermococcus sp.
MKRTVTVKLQPSKEQEKALFELAQATAVIWNKLNYERLKQFKEFGKIDFSTTEKEAYHEFKDWIGGSTVQQLARKNAESWRSFFSLNRKKKSGELPEWFKPRPPGFVREENGRKLFVIPLRNDQYRIDGNVIELRRPGKFGKVRIQFKGRIYLKGKQGRLEIIYDKIRRKWYAHISYTVEEKLANDEWVRVPKQPLGNLSAGIDLGVNNLMAVYVENGEGFLVNGRPLKSIAFYWQKKIADYQSKLNKSGAKKSRKLQRMHEKAKLQARHYINTAVRQTLERLYHLGVSRIVVGYPKGISRNSQRGKRQNFVLSQVWRFNYVIKRLKEVAEEYGITIVLVGEAFTSQLCPLCGQRHSNARFVRGLFECRGEGVVMNADLVGAFNILKKVVKTITPNLGGLFAQGRGNWGKTLPEGPKAQLTLGFNEAPQTSPPLG

SEQ ID NO: 2131 - protein, 436 aa, Thermococcus sp.
MKRSVTIKLQPSKEQEKILFKLADTGAKVWNRVNYLRRQEFFEGKPVDFNRTEKIVYEEFKKEIGSATVQQVCRKNAESWRSFFSLLRSWRNGELPEWLKPKPPNYLKDDGKRRQLIILRNDQYKIEGNKLILKGLGKFKRLEVQFKGRIHLKGKQGRLEITYDPVRRKWYAHISYTVEERLIGDEWVKIPRQPLGNLSAGIDLGVNNLMAVYLENGESFLVNGRPLKSIDFYYQKKIADYQSKINKSGAKKGRKLSRMHQKAKLQARHYINTAVRQTVEKLYQLGVSGIVVGYPKGISRNSDKGRRQNFLLSHVWRFNYVIKRLKEVAEEYGILVEVVDEAFTSKTCPVCGKPHEGARFVRGLFKCPATGIVFNADLVGAFNILKKVVRTITPNLGGLYAQGRGNWPKARPEGSKTRFLAGLNEAPQTSPSMARG

SEQ ID NO: 2132 - protein, 396 aa, Thermococcus sp.
MPFETIKLTAKFKLKEIPNGLDDLFSTYREIVNFLITHAYENNITSFKRLKKETYKSLRKEYPELPSHCIYTACQMATAIYKSYRKRKRKGKANGRPVFKKEVIMLDDHLFKLDLEKRIIKLSTPNGRVVLEFYPAKYHEKFRDWKVGQAWLVRTPKGVFINVVFSKEVEVGEPKAFVGVDLNENNVTLSLPNGEFVQIITHEREIRTGYFLKRRKIQRKIRAGKKRKKLLEKYGERERNRLNDLYHKLANKIVELAGKYGGIALEDLTEIRDSIRYSAEMNGRLHRWSFRKLQSIIEYKAKLRGIKVVFVNPAHTSSLCPVCGEKLSPNGHRVLKCSNCGFEADRDVVGSWNIFLRALKMWGVSVPPESPAMKTGAEKVIRYEWCGGSTRAKSSG

SEQ ID NO: 2133 - protein, 437 aa, Thermococcus sp.
MKRKVTLKLQPSKEQEKTLFQLADLGAKVWNRVNYLRRNQYFQEQIVDFNTTEKTVYEEFKRKIDSATVQQIARKNAEAWRSFFSLLRKKRNGELPDWLKPKPPNYLKEDGRRKPLIVLRNDQYRIEGNKLILKGLGKFKRLEIQFKGRIHLKGRQGRLEITFDPVKRKWYAHISFTVEEKLEGGEWVVLPRTPKGSLSAGIDLGINNLMAVYVENGESFLVNGRPLKSIDFYWRRKIAEYQSKLNKSGTKTSRKLKGMHEKAKLQARHYINTVVRQTVRRLYELGVSKIVVGYPKGIARNSDRGKKQNFILSHVWRFNYVIKRLTEVAEEYGIQVLVVNEAFTSQTCPVCGKPHEGARFVRGLYSCPATGLVFNADLVGAFNILKKIAKTITPNLGGLYAQGRGNGGKTLPEGFEEPVLTGSLMRTPQTSPSMARG

SEQ ID NO: 2134 - protein, 436 aa, Thermococcus sp.
MKRTVTVKLQPSKEQEKTLFELAHATRKVWNRVNYLRRQEFFGGKPVDFLKTQKIVYEEFKKEIGSATVQTIARKNAEAWRSFFSLLRSKRNGELPEWFKPRPPNYLKENEKRKLFLILRNDQYKIEGNTLILKGLGKFKRLEIQFKGRIHLKGKRGRLEITYDDVKMKWYAHIGFTIEEKLIGDEWVDVPKQPLGNLSAGIDLGVNNLMAVYVENGESFLVNGRPLKSIAFYWQNKIADYQSKLNKSGCKKSRKLKRMHQRTKLQAKHYINTAVRQTVEKLYHLGVSRIVVGYPKGIARGSEKGRKQNFILSHVWRFNMVIQRLKEVAEEYGIQVLVVNEAFTSKTCPVCGKPHEGARFVRGLFKCPAEGLIFNADLVGAFNILRKVVKTITPNLGGLYAQGRGNWPKTRPEGLKARFELGFNGAPRTSPSLARG

SEQ ID NO: 2135 - protein, 270 aa, unknown
  TnpB Polypeptide
VLETNIIEGECYKMTYANIKIDKIIEFIEKVATVKDFESMGLSKYTFNHLKDDPTYLFRMQLSKVSKINAYMNTLESLEKRKSQPIQEKKTKSVYVDVVGIDLGSNNTITASDQSMKRIFMMQNERIKNAMFTYEKTKNKKNSKSELYRAINKNTDKLINSLLNHYIEPVTYVIGEMNQSSYAMTLFYKTFLHKLKRKQDINNISVYHVDESQTSITCPKCGYKDKKNRKNNNRFDCKECKFKCDNDDVVACVNIVKQYSVLTNEKAKQI

SEQ ID NO: 2136 - protein, 413 aa, Natrarchaeobius sp.
MGDDGYLRRTAITRVTVSQSDEKLLRRTVDEWLEACNIASEMAWNGCDSAVDVQNLAYDRIRDETALGSQHAILATHHVARAVKSGLERRRNGKTATRPDFTSRSMTFDTRSMTVFEDRGEVSLTTLGDHDRVRATLLLPDDSGYQHQFLECDEWEPTESTLHYRDGNWYLHLGFRKPNSEDPKTENGTVLGVDLGVAEIAVTSTARFFSAGELNHARREFERVRADLQARGTRSAYRTLEKVSGRETEVVKHVLHDVANGIVEEALEYDCAGIVFEELTGIRDRLPEANWHSEWAFDTLLEYVTYKAKAEGLFVDTTMPKDTSRRCPECEYIDDENRLVRNQFECQSCGCTGHADYIASKNVAARYLRRDQQLSRRRGVSQYALKSGTMTPTGEYSPYSPASSDESTGKSTP

SEQ ID NO: 2137 - protein, 390 aa, unknown
  TnpB Polypeptide
VIGTVKKIRFATGTHRRHPKESNSKVFHDPSNAEYQWWYQIRMGNGGRGVEKTFIYLPLTFNPKRVKPEDLRLDAVQVCYVRHGRQFMVGATYEGEPPKFREPWVKFHGIDVNTKTNLLALSDGRFFDYDRQWVEKMISLIDHATRFCTQEMSIRDKARLAKYARQNEWHIKRKLHGFLEIMEAEGVTDLVMENFNLQDDATFFTHPALKVKYSRLLRLLRLSHIKDWMNSQAEKRGIRVHLTPHDLTSQECPKCHRIDSASRVTQAVFSCVHCGYTGPADPTAGTNIQCRVIADVLRGPDALLHEKDSMGRWRPKPGLTQRYIRDVVERQLYAGLTPGDFTEPLAPGKTKSGEAVYWFIKVCIEAPPIVVCLGGVVHTVRIGRLDDQTG

SEQ ID NO: 2138 - protein, 589 aa, unknown
  TnpB Polypeptide
VEPEPVKKPGPKRREFRSDWSPGAYRFTLDLDDRQEAQLTRAVGAARFAFNAALAEVKANLDTRAAEKAQWGAPVTDPLGWSAFGLRAVWKDARDDVAPWRGEVSVWAFDTGTAQLAAALKNWSDSRRGTRAGRPVGFPRFRSRRRPGAQSIRVTSHTKIKVGAVQGARDNRHIVLPGPLGGQVRTRENLKRLTRRLQAGSAAVTGATISRTPSGRWTVAIHVQQHQPIPGHGHTPGSELELAQEELLEPAADTHEPAGRSSSSSSSSSRSSSSASRPRSSCPSSVVGVDLGVGAQNLMVVADPDGVEVWRVENPKALDRVHSQIARLQKKIGRAHRVAVAEGRVDAAGRPVDSNRVKALRARIARLHRRAADIRADSIHKATSSLVAAGHTAVVVETLNVAGMMRRGGARKKGLNRAVADAALGEIGRQVGYKTEWAGTRLVHTGRWFPSSKMCSRCAAVKPKLPLAVREYRCDHCGLVIDRDLNAAANLARVAVDPAWETSGWVPTAAGSSRQHQPGGEPGTGKPTSDQQREHPDRGSRRKPSGADGGNGADPHQGRELRTLTSAAAGAGPHGEGTAGRQGGQRLSS

SEQ ID NO: 2139 - protein, 518 aa, unknown
  TnpB Polypeptide
MHTLRLPLKTNRNTEALFEKRFRLIERIHNQTVKHAKKLLTKLDKSKEYRILRKEYGEYKAKADAGDESAVAQKTLAADKMNAFRISLGLSKNAFDKYVSEMQHKYKKHINSHQAQVEAERVWAGVEKVLFDDGKDVHYKKRAEFRTIRGKNHTTGIFFRENPSDKKCPYSVKWGTLVIPVKMPDITKADLPNGGNYIAESLNNEIKYCEIVRLWFKSGWHYYVNIYLDGDAPKKMKPGTSIMGIDEGPSTAAAVSEDLVILEELAPKCKDYNRQIARLQCQIDASVRQTNPEKFNEDGTAKKKSEYNGSRWVFSKSCLRKKSMVRELYRRKSEYSTHMHGNMANRMVNNASVFITEPMDFKALAKRVKETKRQNNISVIKKPDGTEQVICKYKRKKRFGKSVTDRSPAELMRILQRKCSQYGLLYYEVDKWEYRASQYDHKTNTYTKIQLSQRFKVIEWNKVQRDLYSAFLLSCRRNSKKPNRKKCKELFSHFVEMHDMLIHQMKTNGISRPACFGF

SEQ ID NO: 2140 - protein, 384 aa, unknown
  TnpB Polypeptide
MIRTIQCPLPLDPSLVGTIRSYNEAVQAVIDAGWDARTCNKNKLHALTYKTIRDRLPRLQSSLVQSARDMASASLKLANKKSWSCRKPVKKPMSSIRYNQRTFTPFLESGTISISTIVGRKRYPLVVPDYFKKYRLTAVSAIVLKAKKDRIIAFLNIELPDPAVNKHPIAFLGVDRGINNAVVASDNTFYSSNHIKVVKCRYQHLRQSLQSKGTRRCRRKLKALAGRERRFMAGENYRIAAWLVAKPFDCIVLENLKGIKTNSKKLKKVGKQTRRKFANWAYYQLEQVAVNKALEAGKMVLFVNPRHTSQRCSRCGHIEKGNRTGSGFSCKQCGFSIHADLNAARNISGRGSAVAGRADVNRPNVARNDEAVFPPPIAAANLRL

SEQ ID NO: 2141 - protein, 437 aa, unknown
  TnpB Polypeptide
MLVVKTVKIPVHYAITKRKLSILDSLTARTTYGVWLWSKLFKEHKLKGTYTDRRQFYDEVKAEAKLGTMVQCCFDTAAWMWWSYREADKVWRRNVAVARREGEWKWLRKLLRREPQEPFTNGMQKKVPIWFDGRFGSIERSKRIKLCSYVARVSTLKRGVKLTIPLNPAKHHLKLLESGTMKSFQLVKRDGKYCVHVKVEFQVPDQPVYSVRGIDLGVKRSIASVMLRPNQPLRSTDFSIETDGLKRERLNRLEKQIAELQQAQKWEPLKRLRHKRLHVGEQYDRLAAKQVAATSQNSIVVVGYPKGIKYKNFKGNDKPKLRKALAHWTYGRQIRYIQEECAKLGIPSEAPDERWSSRTCHRCGSRHTERITQSVFHCWNCELIYNADFNGGINIGSPFLPTATTRKATDDLAYAGDEQAREIVACKPRSPHPFMGG

SEQ ID NO: 2142 - protein, 471 aa, unknown
  TnpB Polypeptide
VIGLQVVKTIKIPVHYDVTRRKLLILDRLTARTTYGVQLWSQLFKEHRLKGSYGERRLFHDQVKEQTKLSGALTQCCFDIATWMWSSYREAHKTWRREVTIARREGDKFWLAKLLRREPQEPFSNGINGKVPIWFDGRIGSIERSRHLKICPYVARVSTLRRGVKLTIPLNPAKYHLNLLEQGALKSFQLVKRDGKYYVHVKVDYAVPTQPVYAVHGVDLGVKRSIASVMLRPHQPLRSSDFAIQTDGLKRDRLNRLEKRIAKLQQARKWEPLKRIRHKRLHVSEYYDRLAAKQVAASSQNSLVVVGYPKGIKYDNARGNGKPWQRKHLARWTYGRTVQYIQQECAKQGIPSEASDELWSSRICHRCGSRHTERLTQSIFHCWNCELIYNADYNAAINIGSRFLASPLIRQATDDLAYARNEQAREIVACEPRSPHPFMGGSKSHRLAISVPSQQPTQQSHPVGRLNPDPT

SEQ ID NO: 2143 - protein, 419 aa, unknown
  TnpB Polypeptide
VADPLKRKGYAARIKKLERKKAEVEKHIAAGTVPRVVFGSSKLLVKLSKGKGSRGEWRRSRTGQFFSVGQANQKGNANTRITAREDKYKLEIRDWPCGDLEVVLRVPEYCRRLLGAALASGAAYSVHVKRNGRNYQALISFEVAEAPLEPWDGKPIAAIDVNPEGLAVAIVAVDGNLLASRFFREPALVHARAEKRSWLASNLVKWSFRWAKGNGCNAVVVEELKFGMVQESNRQVNRACSNFMRKKLLELVKMRALKLEWVYAEEDARYSSTAGELKYGKQFSRFNRHQLAAFVIGRRALGYGERLDEEQLELLPKRKRVHARKIISSFYGHRHELLMPREGTDGRMSGGDVKGASAFDERVTPHTAVTLVKPRLSLVLGGGCPRDELGARGHGVNPPSAQAGVKLGSVGDVYKVNVF

SEQ ID NO: 2144 - protein, 306 aa, Haloplanus sp.
MLETTRTYVARITNHQQVRDDLDQCAFSASKLWNVGRHYIQQRWDEDGEIPDEAELKTELKDHERYSDLHSQSSQRVLEELAEAFTGWYNSDGGNNPPGYRKRGDDHPRSTVTWKKRAIKHDDKHGQLRLSKGFNLKESRSDFILAEYETRPDVEVENIQQARAVWNGDRWELHLVCKKEIPVEDAPGDKTAGIDLGLSNYLAIDYEDGSSELYPGNVLKEDKHYFTREEYQTEGENGPSKRARKARQKRSRRKDHFLHTLSKHIVQRCVEEGVAKIAVGDLSDIREDENGDSRNGGASGNKKLHG

SEQ ID NO: 2145 - protein, 294 aa, Haloplanus sp.
VRRPPSDERPVSPLREHHRSVGVETPERLLCNLETKSRERPLRPTPQRDGVDGKPRPERDSACYEATKSGVARLQKEDNTSQPHFDAWSVVYDKRSATFYRDHVSLSTVNGRIECDYVLPDDAERTPIGEYLLNEDYEFRMSTLQYDRQTESFYLHARMRRTTDEQEQSTTSSSDATHRTVLGVDLNVDGSLAVTSTDAFIGNADEMNHQRREFEKTRGSMQQAGTRSAHLSIQSMNDREHRWMQDELHRASNQILEEARDHGCTHITFGNLTDIRDRMVGAKRFHAWAFRRWT

SEQ ID NO: 2146 - protein, 430 aa, Haloplanus sp.
MTATATKTLEATLAPPTAHKERRLQRTVATYRRALDDAFESSADTQTAVNDVVTGYTLTSYAKDALKNYVPQLRDTYNASELEDDHPVRFTNRGWTLDHSEDRTHEFCWRVPQAGRGNAFWIPLRINPAQRESWDDLLDGDVSVGEFRLQEHRTTWVLHVTIEYEVAEPEEPDDPTPVGFDIGESKLLTGCACQDGTPSDPMLFDGGRARHLRKEMHTTLKRLQEREAAQWRVDERFDYYQNALTDIVEKASRQAVEYAQQFENPVIVLEDLSYIREHLDYGAWMNRRLHNWAFARLTGRIEDKALEAGIPVRTVNPAYTSQTCHACGHIGSRSSQAAFRCTNAECWVTEYQADINAAANIAGRLDPWGESLPWKPAGDDLPRDGSACDSTTGHRGASRKSRQTTLSAYSSETSSRSEPSLVGSPAVHGG

SEQ ID NO: 2147 - protein, 419 aa, Haloplanus sp.
MNYNYRYRLTPTVDQRETLDYHRDTCRQLYNHALYRFNQIPEDEGTVKQRVRTIRDELPDLKDWWDALTDVYSKVLQPTIMRVAKNINALGKLKEQGYKVGELRWKSPREFRSFTYNQSGFELDKKGGQTVLSLSKLADIPIEFHRPLPDDATVKEVTLKKEKTGEWFAIFGIERDTEPPAKPSLEEIDAEEVVGIDVGIRKYAHDTDGTAVESLDLSEDRDRLEREQRTLSRKEYESTNWENQRQRVAECHLDIKRKRRDFLHKLSNYYAREYDLVAVEDLDVKRMLESPRNSRNTASAAWNTFTDMLEYKCEREGTHFVEVDPDGTTKECAQCSVETEKPLWVREHSCPACGFEDDRDANAAWNILSRGLTKLGVGHSKGTPVETALPAGTSPVPAKRVVEAGSPTLSERVSASRVG

SEQ ID NO: 2148 - protein, 411 aa, Haloplanus sp.
MGVRRTVRIALEVAPQSQAALHETATQFLWAANSVVDAGWGDDDIETDRQTLHERTYEAVREATELHSHLVQAARNRAAEALTSAVARREQGQQAGKPTFTSPTIRYTTKSATIDTDHATLATVEGRVRVDFRRPTTPAGTPFAYLDDPDATVTGADLVYDEVVDRFELHVRVETTAAAGQESEATSQRRAQTDSEHRTVLGVDMGIEALVVTSTGAFWSGRELTHWRREFERRRRSLQERGSRWAHEAMQRVGRREAGYYDDVLHTISKGVVEEAVAHGCAAIAIENLDGIRERFPQAARFQQWAFRQVQSFIQYKARAVGVEVISVNPAYTSQRCSRCGHTASTNRRTRSAFHCGDCGYSVNADYNAAKNVAMRSLRSAQMSSVGGAPVGVRLHSGQLMRDGTYVPDPS

SEQ ID NO: 2149 - protein, 356 aa, Haloplanus sp.
VQRLYDNLSTLRGRKENGYRVGTLKWKAPGEYRSFTYSQSGFKLKNTSGRTRLWLSKLGEIPLTFHRELPDDAEIKTVTVKQEPTGKWYAILGVEMPNDPPEKPESPGGCVGIDVGILKYAHDTDGTAVESLDLSDERERLERSQRDLSRKQHGSANWEKQRRVVAERHADLKNKRRDFLHKLSNYYAREYDLVAVEDLDTKGLVELPGNSRNRAGAAWGTFLRMLEYKCEREGTHFVAVNPRGTTKECASCGVSTEKPLWVREHSCPACGFEVDRDANAAWNILSRGIMKRLGAGRSESTSPEIKDFWLANESQSDSSTPVETASPWTLRCLQSASWKQEAPSSSASRQASGRVG

SEQ ID NO: 2150 - protein, 416 aa, Haloplanus sp.
MAIKVTRTYVGSIQNHQQVCGGLDSLGDSASKIWNVARWTADRIWDATGEIPDAGTLKSYMKNQPCWKDLNAQSSQKVIEELSGAFQTWFDLRHKSDEANPPGYRKHGDTRPRSTVTFKEDGFKHDPENNRVRLSKGKNLKNGRSDFLLCEYQTRPDVTLSEVNSVQNVRAVWTGGKWELHFVCKVELETADSAGDGVAGIDLGITNIATVAFPDEYVLYPGNSLKEDKHYFTRTEYDTEGKNGPSEQSMWARQKLADRETHFYHALTDAIITECVERGVGTLAVSWPEDVRESDWGKTGNKKLHSWAFNRLYQYLEYKGEERGVKVLKENEWDTSKTCSKCGDDTKSNRVERGLYVCSSCGLVGNADCNGAENMRQKITPSPHGENRSNGCVAQPSTYLFDRESGMFHTREQVVS

SEQ ID NO: 2151 - protein, 429 aa, Haloplanus sp.
MNYSPRFRLLPTEEQREAMDWQRNTVRQLYNHALNEFNDIPEDAGTLRQRVWMVRDTIPELKDWWSDLRQVYSTVLQKSVERIRDNIQNLGKLKANGYDVGSLNWKKPREFRSFTYRQSGFELDKKSGPNGRGVLTLTKLKGDTREIPIRLHRDLPDHDSIKEVTLKKEASGAWYVSFCIETETPEKPAVENIKPADTVGLDLGVLNFIHDSEGRSIGKLDLADERRRLEREQRSLSRKTYQSNNWEKQRRHVANIHVRMSNKKHDYKHKLAHAYTTQYDAVLVENLNIKGMLESPENARNKAEVGWRDFITILEHHGDKNGCHVVQVSSRGTTTECASCGVETQKPLWVREHSCPSCGFELDRDWNAALNVLSWGLDKLGVVHSEDMPVETATAVSTDGGEHSSFVVDASRVVEAGSSALKEAASAAE

SEQ ID NO: 2152 - protein, 342 aa, Haloplanus sp.
LQASLVQSARNLAADALSNCKDRILDDGQKASKPEFRGSVVAYNGRTITYNDDHVTLATVGDRVTAELVTPEDEEETPFAEYWTDDWERKEATLHKRDGTYYLHVAVKKQVESADSGDESTGNGVVLGVDLNVDGSLAVTSTGAFLGNADYLNHRRDEYERRRGNLQQTGTRSAHLTIESIGSRFARWSADYLHRISKAIVQEAVENDCAAIAFENLTHIRERISNASKFQQWAFGELQGHVGYKAEEYGIDVDDVAPTYTSQRCSHGECGFTHKDNRNGDEFECLKCGKELHADYNAARNIGWRLVQHWLKSGAGRATSQLVFKSGTLNANGDYTPSALRG

SEQ ID NO: 2153 - protein, 209 aa, Haloplanus sp.
LGVNNLAVASTGRFWSADEFNHWRREYGKRRGSLQQCGSRHAHENIESVGQKEYGRFEIHLHTVANELIEEAVENDCSHIVFEDLTYIRENIPEATWQHVWAFRRLCEYVEYKAEEHGIEAVQADPRNTSKRCSTCGFTHDDNRNGDSFECQQCGYENHADYNASKNIGLQYLRRRQNADDGGAPVDVRLNRGTLNVSREYIPPASAEA

SEQ ID NO: 2154 - protein, 291 aa, Haloplanus sp.
VTDRRIELLRALLHIDDTIESMSALAEDPDGGALPPLTRKQPPKAADIYRDSISPETLRHTPPLTLCRPPHDWPDADIEAAVLPPPSVKSAPCYFTMRKRVQNAGKDSIHDTLEEREERFVRDRLHKVSRHIVEWSRQFEKPCIVFEDLKEMRDSIDYGTRVNRRSHHLPFRALQFYTSYKASFEEIPTARINPEYTSQRCPMCGHTERANRNKKRFKCRSCSHQDHSDRGASVNIAVKGIRKLDWNVPALKSLPVVRKVRRQASGAVDAPTVTHPTARGYQADGRMGVSD

SEQ ID NO: 2155 - protein, 356 aa, Haloplanus sp.
MVVKRVYDNLSTLKAQKENGRAVGSLKWKPPREYRSLTYNQSGFELKNTSGRPVLWLSKIGEIPIHLHRDIPENAIIKQVTVKREPTGEWYATFGIDMDETTPEKPGNPENVVGIDVGILKYAHDTDGYAIESPDFSEERERFERAQRHLSRKEHGSANWEKQRQVVAERHADLKRKRRDFLHKLSNYYATEYDLVAVEDLDAKELVELPGNSRNRAGAAWGTFLRMLQYKCEREGTHFVAVDPKDTTKECASCGVKTDKPLWVREHSCPACGFEADRDANAAWNILSRGLEKVGVGYSESTSPEIKDFWLANESQSDSSTPVETALPADTPVSAKRVVETGSPTLKERTAQAVSE

SEQ ID NO: 2156 - protein, 404 aa, unknown
  TnpB Polypeptide
MTIDMIVERTETQIIRKSHPLWKAIDEMCLNAKNLYNYANYIIRQEYINNKRYIPYKEMNFNLKTHQQYKDCMSQPANCVLRLLDKNWKSFFKGLKEYEKNPKKFLGRPQIPKYLKKDGRFNWMIPNNCCYFEDGELKFRVRKLQSIKWKCRCVGRLIQVRFVPRGCVYVMEIVSQIEVSDATSENKRIVGIDLGVNNLATASNNIGEKPFVINGRGLKSINQFYNKRRSGLQSKLPKGQFWSKQLEQITFKRFNRVKNYMHHASCYIVKWCAQHQIDTLVVGHNDEWKQDLKMSKVNSQNFVGIPYEILIQQLKYKCEDVGINFIETEESYTSGTSFLDGELPCKENYNKKRRVKRGLFQATDTLINSDVNGAYQIIRKVFPDAFSYGIEVCLTPTIINVYKI

SEQ ID NO: 2157 - protein, 467 aa, Moorea sp.
MYKTIPIKANFTDFEQAFWLFQCQQANSLWNCAVYYSKQKHYGWLEQQEEAFTTYWSGDELRSGWKTYKCNIKYAELCKNLKENPHYKAMAAQSAQQSLKTVAESINSYNQLVSLYYKGTVDRPKLLRYRKKGGLAAVTFPRQALTYKKGLFYPSISKETKPELITEITLEPTDFIDPDWVKEVTIHPYLGQLWIDWVIDDGKQPVEHNPNLDYSQAWSFDHGGDNWLTGVSTHGKSLIIDGRKLKSLNQGYCRLVAKYKQGKPELYWDENLNRVQRKRNNQIRDAINKAARFIINRCLNDSAKPTLRERIGNLIVGWNEGQKNSSNMGKRGNQNFVVIPTKRLIERLKQLCPEYGIKLTITEESYTSKASFLDDDPLPKHGEKPQGWKASGKRVRRGLYRTSFGYLINADCNGAANIARKVARQLSLDLTKLSREALTLPHRYSLFNSLKKSYRTRCYEARFQPAS

SEQ ID NO: 2158 - protein, 366 aa, unknown
  TnpB Polypeptide
VTQTTIKTLSVRVKDRHAEVLERMAVEVNQVWNLANEKSYEAWHVPVPGVGWIQGEWRTAFDIQKELAGINKQRGWLIGSASVQEVIAVHAKARSQFKTSKLRWRVSKGAKRSLGWIPFKSRAAKFEGGKVRFAGQSFAVWDSYGFDTFKFRSGNFAQDARGRWYFNIQVEIPMQAVPTGVTAVGIDLGLKDVAVCSDGVRLQATQSYRTLEARLGIAQRANKPKRVKAIHAKIRNRRKDALHQFSSRLVKENAAIFVGNVSSSKLAKTRMAKSVLDAGWSMLKTQLQYKAMAQGVWFEVVDEAYSTQTCSCCGNISANSPKGRVGLGIREWTCPDCGATHDRDVNAARNILAAGHCRLAGGIPRL

SEQ ID NO: 2159 - protein, 420 aa, unknown
  TnpB Polypeptide
MLISKTLKCRVESNNDKHIKGIKRAILLQTIATDRKNKSLKEFMRTATAESNRLLSERKGCRTFMQFHHKTLLASKENTSFNVQVRCSLIRDAWKKKTSKVNGLAVKFNIPRNCKTFRTKSNFFVELGMYPAKRVAIPIKQNRNYQRFQSLIQDGWTCKTFGLTRNLQIVAYLSKEKEIPRRKNVLGIDINAKHFAVSVISPKGKILYQTYLGKDIWIKRKKFMERRSLLQSLNAFKKLKRLKQRERNFVKTNLGQIVKEIMKIAKRYDADIAIEKLKKFSPKGRRFNKEVMSIPFYRFKQILEQRCFDNDVHLDIVDSWHTSKWCSHCGAVGKGHSSNYSLFRCRECGQIANSDRKASLAVAVKSLLERDGYVPKPDIVQISKRRVPVNGLLRSDERSLSFAEHHTQPLEGIPTDFGHG

SEQ ID NO: 2160 - protein, 503 aa, unknown
  TnpB Polypeptide
MAAVGLVTAGQGLLSLRCGMLAHEMARHTTFKFCLDPTVEQHQVLARYAGASRFAFNQCLRIVKTALTLRKCDPSTHVPWTRFDLINTFNAWKKTEDAGRVFTVDTEGSIDKVVTGLAWRAEVCQQVFEEAAVDLGKGLKAWSDSRCGKRKGKRVGFPRFKKKTGAAPSFRLRNKHRKDKPPAIRVGDDNRPRSITLPGIGQIGVFDDTRRLRRMLTKNRAKICFVTITEHVGRWWVSLNVEADDLHPAQHHPLRAEGGRGGWVGVDRGLSAFVVAARADGEEVDRITDAPKALAAGLNRQRRLAKSLSRKQKGSHNRRDAAAKLGRHHHHVANIRRHFLHQVSNALVKTHDQLVIENLNVTGMLTNHRLARAISDASWAEFARLLKYKQTWRGGQLLEADRWYPSTRLCPVCGAVNGDMTLADRVFTCGCGHSADRDTNAAVNLARWGQTHHAQATSDPRTPKHGGRATNARRRDGADQHPSCAGETSPEDAGTDVQTAPAA

SEQ ID NO: 2161 - protein, 374 aa, unknown
  TnpB Polypeptide
MMVDYMKQQIMIIGKIKGLTKIKESVLQGEYDRFNNICKQVQECRNNDIEPEWKWFKDKNTHATFISEAIMSIKKPFVNLNDRPLYLRKDSGISRLEKQNTKISNYWLRIPTKQRKQFWVAINIPEYYQNKMNNFTFCDSKIVKKNNEWFAHITIEKNIEMITEYKDILGIDLGIRRPASVVQLSDGMTRYYGKEIRQIRGHYFYLRKKLGQKKANRTIKKIGKTERRKVNDQLHKISRKIVNRAKETNSAIVLGNLKDIQKNGKKKKNNKNYKGRAFNRRLNSMPFAKLSNYIEYKANLEGIRVIKVSERNTSKTCSRCGQIGKRNKGLFKCKCGYDDNADRNGAINIARRGLGEMSSSGAFVIMPKTVGGKL

SEQ ID NO: 2162 - protein, 491 aa, Caldivirga sp.
VPRVVPPGGGSISLDEPVGRLPTVFTTLGTSSSSPTPKPSNRGRRKQDGNVRTVRLRLLPNGSQERRLRRIADATARLWNELNYVRLVQFRESGEMDFKGTEREFYHRYRDRLGVNAGQVINLNNWAWDSFFKTLRLYKQGKLPRFYGKPSPPGFWKDRLLGKRELRILVRNDRYYLEPTNGGEGYLLLKDWNLRIKYAGRIKWSGKQGTLVIRFEGNRWFAYVPITVGAKPAKTNPKGYVKGIYEKIQIENPKGNNKAFIDIGLNNLFAVAFNHSDTAILIKGSTIKAEYYYWKREIGTYQAIRDWLRNRGFNAWRRYHAFYLHAVFKRRERFRHYYRTAIRFLAKILWQMGIDEVFVGYPYLVGQDNGNEYNTNVWWFSKIINWLKDVLEEYGIKLNIVNEYGTSRQCSICDVKHKNGRVKRGLYVCQTTGIGINADLNAARNIAKKAGYEVPIPKKILSYIVTTNGVKPLTPKEGITIETPTVKNPPL

SEQ ID NO: 2163 - protein, 452 aa, unknown
  TnpB Polypeptide
MKANCRKVYKGEQRYTNMDSIRAYRFRIYPDAKRQKEIDKRIVLAQQLYNTILEKAKSEYEKNKITNIGKSTLNGYMKEAINENKNFLKLYSQTRQDIFIRLQKAYQNFFRRCEEKKAGKKVKVGFPRFKSIDKYKSITYPQNNGSFRIERIKKEDRLRVSRIGTMKIDLHRPIEGKIKTLTIKRKAGEYYAIFTTVNEITVPEVADTNPVGIDMGLNSFVALSDGTKVEKPKFARQSAKHLARWQRKLARRTKWAGNEKAKEQSKNREKAKSGLQKEWEHVASQSDDFAHKLSNKLVNLGYTSFAVEKLNIHNMVRNHNLAQAIYNASWRKFIQMLSYKAESAGLRVFAVDPKDTTQECSRCHNVKKGVERLTLNDRIYHCNVCGLTMDRDINAALVIKNRMEMLKRATVGQTGSNASGDAASTIQRVSQVVSMNQEHTLQPLVAGEAHDL

SEQ ID NO: 2164 - protein, 394 aa, unknown
  TnpB Polypeptide
MSRYRLVPTATQEAALRDHCAHARFVWNLAVEQQSWWRPGRGRAPGYLEQARQLTGARAEFGWLRAGSQMVQQQALRDFAQALTSFFAGTHRHPSWRKAGRDEGFRIVAVKTGHVRRLSRRTGEVWIPKAGWVRFRWSRAVPGGVKSYRVTLDRAGRWHIAFAAIPEAIPTPGTGEVVGVDRGIAVTAALSTGEMLTAPRLGSARQRRLRRLQRRLARAGRGSNRRARVKRAIARLTARDADARKDWAEKTSTDLARRFDVIRVEDIRIKNMTHSARGTMAEPGRNVHAKAGLNREIMRSGWGLVVRRLEDKAPGRVEKIKPHYTSQRCSACGHVDAKSRESQARFVCTACGFACNADVNAARNIAAGHAVTARGGDGITRPVNREPQLLLQSA

SEQ ID NO: 2165 - protein, 382 aa, Lactobacillus sp.
MIRTQKVRLYPNHHMIRVLDQLCDYRRYCWNEALATWNDMYDLHTIESSNPRPSAYTVRNELVADKQDWQYQCSARTLQLAVADLGKAWQNFFDKAQPSWGKPKFKSKKAPRQGFKTDRAKIVSGKLRLDRPHGMQDWQDIKLSQHVNLSGDLKVVSIYRENGKYWASLPLEVSIAVKPKTGAATAVDVNVGHLNYTDGVQQTLPKRLPKLYRRIKFYQKRLAKKRQLNGKQATKSNSYGAMRTKLQHDYRKVANIQHDLMQKFTTRLVTDYDKIVIEDLSVKDMQMAHIASKGLQRSMFGYFRQILTYKCAWYDKELVLANQFYPSTQRCSECGHIKSGQDKITLSGNTTHKTKHHEYICYNCGAVLDRDKNAVANLLALI

SEQ ID NO: 2166 - protein, 399 aa, unknown
  TnpB Polypeptide
VKRAFRFRFYPTEEQSVELNRTFGCVRVVWNQTLAERHKTYSTTGKGISYPETDKNLTALKRTPEYNFLSEVSSVPLQQTLRHQAVAFTNFFAKRARYPRFKSRFEKQSATYTGRGFTFRDGNVKLAKMKEPLDVRWSRDVPKDQMPSSVTVSRDATNRWHVSLLFDDDIEPFPWSGNDIGIDLGLKSFAVLSDGTVIDHPNLLRKKEKRLARYQRIMAKRVKGSNRRKKAKQKVARTHASIKDSRKDFLHKTSTDIVRQYDVIAVEDLAVKNMVRNHKLAKSISDSGWGEFRSQLEYKAEWYGKTFVVVDRFYPSSKTCSECGYLLKELSLGTRRWTCPSCRTLHDRDMNAAKNIIAEGHSALRRNSGEARGADVRHMGETPVLSAMKREPIRAGGSG

SEQ ID NO: 2167 - protein, 361 aa, unknown
  TnpB Polypeptide
VLKAYKYRLYPNKEQEIYFSKTFGCTRFIYNKMLADRIKTYEENKDLDIKKVKYTTPAQYKKEFEWLKEVDSLALANAQMNLDKAYKNFFRDKSVGFPKYKSKKTNRFSYTTNNQGGNIHIKDNKIKLPKIGYIKIKLHREFKGLIKSCTISKTPSGKYFISILVDTENVQLPKNNNKVGIDLGLKEFAITSDGEFFNNPKNLKKAEKKLKKLQKDLSRKKKNSNNRNKARLKVAKLHEKIANQRKDYLHKISNYITNENQVIVIEDLKVSNMIKNHKLAKNIADVSWFEFRRQLEYKCVWKGRELIIAPSNYASSQLCSNCGNKSSQTKDLSCRTYVCPVCGMIMDRDINASKNLLKLAM

SEQ ID NO: 2168 - protein, 391 aa, unknown
  TnpB Polypeptide
MSFAGTFSHKGESMGNRAIKFRIYPTAEQSNLFVKTFGCCRKVYNLMLAYQIENYQSTGKFGSVTPARFKQEYPYLKEVDSLALANKQLDLQKAFRNRFSKSCKKKNGFPKFKSAKHSRKSYTTNNQNGTISISGNAIRLPKTGWVKAVIHREPEHGWNIKSATVSQEPDGSYYISVLFEFPDAVNDYTADLSNAIGLDYASNGLYKDSNGNTGTNHKYYRESHDRLAKAQRRLSRMKGSKKNEEKSNNYKKQLRKVNRIHRHIVNQRKDNLHKISTEIANQYDVVCVESLNMKSMSNKGFRNGKATLDNGYGMFLSMLEYKLRDRNKYLVKVDKWYPSSQICSFCGHKNPMLKDLAIRNWDCPVCGSYHDRDENAAKNILQEGLRILRAA

SEQ ID NO: 2169 - protein, 390 aa, unknown
  TnpB Polypeptide
MNMAMQRTVRIRLRPDAETAALFAETVARFTSSFNVVAEEGWRTGVANGIELHKATYYPERTRTGLPAQLVCAARVKATEALKSARALAAKEMKRPEDKRRLPSRPQSAHCSIRYDARSYRVDLAAGAAALLTLDGRRAVTFAFSTYHRRYADWRTASADLCRDRQGRWWLHVVVVAPAAVAEPTDETIGVDLGLVHPATDSRGEHHGSDHWRKVEERTHNLRRRLQAKGTRSAKRHLKRLSGKQGRFRRDCDHVISRRLVASVQPGATLVFEDLTDIRGRVPSRKEQRRRLHGWSFAQLQGFVAYKAQAQGVTVGYVAPRYTSQRCSACGHRERANRPSQAHFRCVSCGFACDADHNASMNIRQDYLAARAAVSPPIVPAPRQGQASGL

SEQ ID NO: 2170 - protein, 366 aa, Anaerolineaceae sp.
MKRTFKYKAKISKETETNALSWISLCCALYNSVLEQRRNMYRQYRKSVSCYDQMKQLPDLKKELPEFKQVGSQCLQDVVERCDKAFKAFFRRLKTGEKAGFPRFRSFHKYDSFTLKQAGWKLDGRNLHIANVGRFKLFLSRSIEGTIKTITIIRSTTEEWFVSFSCDDVSEKPLPRTGKEVGLDVGLNHFIVDSDSKFIESPKFFRKSEKKLRIAQRKLSRCKKGSNRRKKIKIQVAKKHEKIKNQRVNFLHKTANYYIKNYDMICIEDLKIKNMIRNRHLAKSIADASWGTLGSMLVYKAESAGRTVSKVNPYRTSVNCSLCGMPVQKSLSVRVHQCPHCGLILDRDLNASLNILAAGQTVQAST

SEQ ID NO: 2171 - protein, 450 aa, Weissella sp.
MKLENLSKIVENIYVRRYRVVATPELIEHHARNMQTQNQLWNFGNKYLEKTYGRMHLNRPYPNNKTQKNYVINDIKAKFIKENYNLDRWNAVIVGLHSQGANEFLTTLMTNFGEYRKTLYRASKMTTHEKLDYVNNVHGNNSQHRSWYRKGSLNYLRGTKSFKTVSLPNNNQVEIVSAHHIKIQDYGDLQVVENVSNLRNSTIVITKLKRKNNGQFELQLVFKRQVARIEPTTKVAGDWNMTNNKVFHTSNDEEIYISNDVIVKAEVLERQINGLKSKRDKSVWLGKNSRRVAQMNDEIRRLNIKRENILDEHYKQLAHVLMNDYDVIVIEDLDAKDMRAKKRQARSANRKLAMIKPYRMAQFIEMLANRTGKTLIKVDAYKTSQVEYGTTHEEKHDTSVRKWVSTLTGKLINRDLNASWNILYWGLNPEHHIKLKDYPRLSASSLVTIN

SEQ ID NO: 2172 - protein, 398 aa, unknown
  TnpB Polypeptide
MLKATKIRLYPNQSQEQKLAQDFGNVRKVWNMALALKQAAFADQLPLSCYDIKKMLPIWKDGEYEYLKVTHSQVLQESIRHLDVAYKHAFRRVQNKQVATSKRSKNKNVYGFPIFKSKHDARQAIAYPQGVRVDGNKLHLPKIGLIKAKIHRKLDGKIKTVTISRESTGKYYASILTENLDVKKDLIQSFDKDKIIGVDLGVKDLLMTSSGDKLPNPKYLKKQVKKLRHIQKDLSRKIEAAKNRCLLDCSPLKEQRKYFGANIAKNRQQLARQHEKVRFARENYQHQVSRLLANDNQVVVAETLKIKNMLQNRKLSKAISDCGWFGFLTKLDYKLQANGGRLEQISTWFPSTKTCNECGVLMSIFCSSTAFGLVESATLFMIEISMPQKTSKMAAFCN

SEQ ID NO: 2173 - protein, 379 aa, Escherichia sp.
  misc_feature (3)..(3): Xaa can be any naturally occurring amino acid
  misc_feature (219)..(219): Xaa can be any naturally occurring amino acid
VEXLERAYKNFFRKRAAFPRFKKRGQNDAFRYPQGVKLDQENSRIFLPKLGWMRYLNSRQVTGVVKNVTVSQSCGKWYISIQTESEVSTPVHPSASMVGLDAGVAKLATLSDGTVFEPVNSFQKNQKKLARLQRQLSRKVKFSNNWQKQKRKIQRLHSCTANIRRDYLHKVTTTVSKNHAMIVIEDLKVSNMSKSAAGTVSQPGRNVRAKSGLNRSILXANIRRDYLHKVTTTVSKNHAMIVIEDLKVSNMSKSAAGTVSQPGRNVRAKSGLNRSILDQGWYEMRRQLEYKQLWRGGQVLAVPPAYTSQRCACCGHTAKENRLSQSKFRCQVCGYTANADVNGARNILAAGHAVLACGEMVQSGRSLKQEPTEMIQATA

SEQ ID NO: 2174 - protein, 536 aa, Eubacterium sp.
MTDEEYKKFLKQFHKLSDRHILVAETDMPYSDVMKVVTLSDKIRKAGNELIGLMRKNYDQLMRTKRYRRLQKLYGDTEDKDKRKTLAKQLNEMQSEYNVTWDFCRKSMIPIGKKYGINAVFALTKAEDVWRGIEKCLYGNGKTIHFSKYGELPCIRAKQINRGIPISVKDNKLQFKISNNIFGIRVNDRFQQDEVDAVLSYLANPKIIDDKAVDTLVEDAYCINTYRPCYATLVPKLIRGKYRLYLHLTIEGKAKPKYDKNGDPRHIYGKGMIGADIGTQTVAYTSNAEVGLKNLSERGNSIQTSERKERLLYRAMDRSRRATNPQNYNDDGTIKKGRKTWKYSNHYKRLKAKHTELCRINATNRQLAINEDANHLRSLGDVFVTEPKNASKLMKRAKETTVNSKGKFNKKKRFGKSIKNRCPSGFQTTVEKKFKVTGGVYIEVPNNYRASQYDHTSDDYIKKKLSDRMYKLTDGTLVQRDWYSSYLLYCYDCRTQSIDKNKCITEFDKHYNKEKALITWIKANKIKILNSGIKVA

SEQ ID NO: 2175 - protein, 547 aa, Streptomyces sp.
MNEAKKPFRPLREPFVVQDATGVAIRDRLKDLTPQDEKVLRLVGAHLGSLAAADLALYSRAGFERTNDSWAARKQDLTARSSSRWAGAITKGTHDQYALARRSQFTHRDNLADGIRTLRHRLSLPIGEKGTKGKPGGYRSPAEWFHKSRRLHILEARLTTVQEDIATGRVHVVRGGKKLARNRHNLTAAGLTETVWRERWNAARWSLSADGESGKRFGNETIRVTPDGEASIKLPKPLQYLANSPRGRYVLSARVAFRHRGAEWADRIAHNRAVAYEIHYDVARGRWYLTASWKRPAVQAIGLEAARAGGLIGVDTNADHFAAYRLDAHGNPVGDPRRFTYDLTGSADHRDAQLRHALSRLLRWATRIGVSAIAVEDLDFSDGKTREKFGRNKRFRQLIHGIPTGKVKARLVNMAAEHGLALVAVDAAYTSKWGAEHWKTPLTSNKRAMTRHDAAGIAIGRRALGHPIRRRTKPPRHHQSDGGGHRNVQADRGTRGREGLRRTRNGTSPPRAAPGRAVTAGNQRVQHRSGHAAEHEAWHQDSLPLSL

SEQ ID NO: 2176 - protein, 406 aa, Lachnospiraceae sp.
MYYREHMFAFVSPLRYNSSMKQTLTAKLKILPDQEDRQLLIDTMHAYTAACDFVSSHVFLFHDLSLSSLNRELYRTIRGRFGLRAQMAQSVLRTVVAGYKAVLSSQHHWIRIRFNKPQMDLVWIAKGVDIDGRFGTAKLVYKHGRFFLHVPVTKELDEISAADVTNVVGIDRGIRFLVAAYDSEGRSTFFSGSAVKQKRAHYKALRRELQQVKTPSSRRRLKAIGQRENRFVRDVDHCISKALAENNPEGTLFVLEDLTGIRAATERVRVRDRYVSVSWAYYDLQQKLVYKALKNRQSVITVDPAYTSQTCPKCGHVSRGNRDKKNHIFCCEHCGYTSNDDRIGAMNLHRMGTEYLMQCQGSMPSLTGSQSIGPDVTTAATAVTNVGGRKADYHGSVTSSLLKASA

SEQ ID NO: 2177 - protein, 429 aa, Bacterium sp.
MHKAIHIKLNPDKRTREYCQFLQQESAHVWNRTKNFFWRTFRKKEIWLKSTSLQKYNTRDQLYPDEPFALHSQSIQSVAQQFSANLKAAHEVRKTNPSIRYPYKNKKYFRVQWKTGAIKIKSRNIILNNGRGNKPLKIRLPRTLANCTPKIVELIWHNGYWLSLIVEVDDKESVIGTGIAACDMGEIHAIAMTDGYDALIISGRKLRAVKQYRNKVIAQLQEKMSKCVKYSRRWNKLNRTKQRVQERTRRRVKDLNHKITTLTIQWCVDHNITTLVIGDLSGIAQNTKGRLARIARQKISQWSFYTQKEYLQYKAKEVGIEVVEVSEASTSRTCPRCGTINRSKNRNYSCSNCKLKCHRDVVGAYNILTVHQYGSLVPDDLFPYPQAKYLRIPFVGKSSSSPDGGLMVVSGNKPSRAKSMCCLAYAANQ

SEQ ID NO: 2178 - protein, 449 aa, unknown
  TnpB Polypeptide
MSSKYKRVGTKTSSFGSPGRIGHDSTPFYTSKLYEGLPKEEMVKYVENPIRKSRKGTYGFSRMGNCVSLLFSLYYGIFNIVRLVKTVKCKLEVNQQERQSILETISRFTQACNDALEIARENKIWNTYKLHHACYYSLKEKYQLTSNYIIRAIARVTTKRQRKPKSFKGGSIELDKDLFSIEAKERISLATIGGRLKLKLSIGNYQRGLLKGQKPKSATLIYNKRKKAFYINFVLEKEVPTPFGGNSVGVDLGINNIATTSNGLRFSGKKAIHIRKHFAKLRQSLQRKGTKSSLRRLKWLSGREQRWMADLNHRISKRIVESCKEGDVIVFENLTHIRKRMRVARKQRLIQHSWSFSQLQTFIAYKALEKGIPVIFIDPAYTSKTCSRCGSLGSRIRHSFFCSCGYRNNADYSATFNISSRGHALLVGALSKSPDVGSTDKPAALAVGV

SEQ ID NO: 2179 - protein, 395 aa, unknown
  TnpB Polypeptide
MNRSHKIRLNPNNKQITYFKKACGCSRLAYNWGLSEWKRQYEASEKPSAYIVKKKFNSIKRDEFPFVYEVTKTACESAFSNLDKAFKGFFRRVKSKKNPGYPKFKKKGIHDSFTIDNTKFSILGDKIKIPKLGLVRMSEELRFSGKLLSATVSRTSDIWFVSISVETSNENDDNQAFSPVGIDLGISKLATLSDGTVFDNIRTTKLYEGRLRRINRSLSRKKIGSNNRSKAKIKLSKLYYKIKCVRLDNIHKMTKTISDNFTHIYLEDLNVSGMIKNRKLSKAISDASFYEIRRQLEYKSKNVNVVNRFFPSTKLCMDCGTIHEMPLSKRVFKCDCNGVEIDRDVHAAQNILRQGLSEVKPVEMEALAVSNNSETIVCETGNSFKGFKGNLSNFL

SEQ ID NO: 2180 - protein, 354 aa, unknown
  TnpB Polypeptide
VYRKRDVQKRFYIELKQQFGLSAQPAIRVIGKVTDAYTSLKANVRAGNYGPPGSGRRTRALGTAIRFRALAAQPFDARCLSWQIPKGIGHEGAVSIWTTYGRLKGVRVLAAARDLVLLRTRRIGETDLIYRDGKWFLHATVEAPQPPLTDPANDFVGVDLGIVNIATTSDRDRATGAELNRYRKRQQRLRARLQAKKTSSARRLLKKRRRKKTRFAADLNHQISKRIVAEAQRTGRGIAVEELTGIPARVRLRKPRRATLHSWAFAQLGAFLGYKARAAGVVLVEVDPAYTSQTCSACGWVDKRNRRSQSEFKCGRCGFVGHADHNAACVIAERGRVRWGEVMRPHAAPTLTAT

SEQ ID NO: 2181 - protein, 722 aa, Streptomyces sp.
MAAANRPGPTSVVTRMTPTAGNRRATSRTSSSAGTGPMRSWTTTTSGSSSTDSAASRARVSTSWVESETGATGSASGSWLSRVVRERTASASPTAGRILVGMGGGLSLVRDEFVGTVLVGDRGVAAGRDEGEADALGEGLGVRDALGVERGQREGDGDRVGGRLAAVVLVRLEGGQLAHVEDPGVGDDDLRLVGVALSGALEGGVDVDGRPGGDLAGDAGGRVDHDGDLLLARLEGGLVDDHVALEQGALLQRRHGDLAADGGEVGDRVLRQPALRHLDLLELARVQGGVGRHVGTQLVRRDLGTDLGLHVVDDGEDAGERAEGAQDRQEQENHAAALTGVHRGSSVDTPAFRPGRKWTPAERGGESRSAARAEARSPIRGALLTAWKKTEELAYLGEVSSVPLQQALRHLQIAFSNFFAKRAKYPRFKSRKKSRRSAEYTTSAFRFRDGRLTLAKMSEPLDIRWSRPMPEGAKPSTVTVSHDAAGRWFVCLLVEDPAVQPLPANGTAIGIDVGLSHLVTLSTGEKVADPRHERRDRARLARAQRQVSRKATGSANRTKARVKAARVHARIADRRRDMLHKLTTRLVRENQTLVIEDLTVRGMVRNRSLARAISDAAWADFRSMLEYKAAWYGREVIAVDRFFPSSKLCSHCGALAERMPLNVRTWTCDGCGTTHDRDVNAAKNLLAVGLTASVCGAGVRPQRESSRTGRSATKQKTPRREP

SEQ ID NO: 2182 - protein, 411 aa, Streptomyces sp.
MQLRYAFRLYPDATQQAALARAFGCARVVFNDAVRAREDARKAGQPFPTAGQLSTRLITEAKRTAERCWLGEVSVVVLQQSLRDAESAYRNFFASLKGARKGPKISPPRSKSRKDARQSVRFTANARWSVTGSGRLSLPKIGAVKVKRSRTLPAVPTSVPTSVIVVRDAAGRYFASFVIDTDPDAEKARMPETDRIIGIDLGLTHFAVLSDGTKIDSPRFLRRAEKKLKKTQKELSRKQKGSKNRAKARLKVARAHAKVADTRREFHHQLSTKLISENQGIAVENLSVAGLARTRLAKSVHDAGWSSFISMLEYKAERYGRTLVKIGRFTPTSQTCHACGAVDGPEPLNIREWTCAACGTVHDRDINAAINVKTAAGLAVSACGAPVRAGAIPAQREEAGSHGFPTGNRAA

SEQ ID NO: 2183 - protein, 442 aa, unknown
  TnpB Polypeptide
MKLSMTYCVRTKGFNRVFDETVRLYRQAVSFFVAVCLKEWKYISVIQGQKNRSGFVESLTVKTKQNLVVPYDFSVRFYKFPSYLRRAAIAEALGKVSSYRSNLANWEATDPEKRGDKPSLPQTGFVYPAMYRSGMFVRTGMYQAALKVFIRNTWDWVLMDLRKSDVDYIKHHCTNYKECVPTLQKRGKKWFLDFVFQTAVKLPEVSIKNTRILAVDLGLNSACTCSIMTPEGAVLGREFLSLPREYDSLEHAISHIKHAQKLCAHKTPGLWKQAKGINDDIAVKTARFIVDTAIKYDVDCIVMEHLDLAGKKRGSKKQRLHLWRAKYIQAMVVNKAHRNMIRIARVCAWNTSRLAFDGTGRVQRGKEAELPSYSLCRFPTGKQYNCDLNASYNIGSRYYIRELLKTLPVTAGQAVAAKVPELAHRSQCTLSSLIKLNAVLAA

SEQ ID NO: 2184 - protein, 421 aa, unknown
  TnpB Polypeptide
MSEEKNLKIKNTLRATKERRSQMNCRVFSVKIQENRLSCTKYEKIVRCFLEAKWLRNAVVATDTLSLEDTSTVQVKVNGTFETREIKNLSSQMKQSVVDSVKTDVCNLSKAKKKGLKVGRLKFKHECNEINLKQFGKTYKIKSHNKISIQGIGVLVVNGLEQVNLDEVEFANANLIKKSSGFYIHLTVYTKKQPQPETSKEVLGLDMGIKDQLTFSNGVKANFYLEESEQLKGLMRKLNRQHKGSNQYKQTLNRIKRIYEHYNNKKKDVANKLNSVLKQNYIICFQDELLNSWKRKKSKQKFSFGKQVQHGILGRVKDKLKKNTSNVMLESSVPTTQTCPMCGCLTKHSLDKRKYHCSHCGFENSDRDIHSANMMVLLSGYGTYRSLNTDTVSTERMTSLLTNLSELGVVVSTNSMEACRL

SEQ ID NO: 2185 - protein, 440 aa, unknown
  TnpB Polypeptide
LLCRRQYNYRLGERLRWWEATRTPANACPLKSSIVPVEEIYKDIPEYRVQVRDGRKKGKDGQPVTKKGDTHPNIVGGYVEWQAVQLADLKNTKKKFPEYKQLHSQVLQDVVNRVDYSFSRYTTPDKNGKRSGRPKFKGKVYYKSFTYSQLTNAHLIKDERGRDLVALPGIGLVPLVLHRAIPSGFKVKTATVRCEADSWYITFSLEDRTVPAKEDEAIQPTLSNSIGIDLGLEYFLVTSKGDFVDVPQFLRKAASRLAKLQRNREKHFHGSYPRSRLNKKIAKLHAYIARCRMQFHFEVAYKILDKTSIVFVEDLSLKNLIRRNKPKLDSEGNYLANGQSAKSGINKSFVDAAHGQFVSILKWVAWKLGKRVIEVDPWGTSQYCHSCLNQTPKALSDRWHDCSNCGVSMQRDHNSALLIKKVGLGVASLKKALKGKKPTP

SEQ ID NO: 2186 - protein, 484 aa, Desulfurococcales sp.
MSSGGNPRGVSAEGPDPLQSFRELVEKRKKSNKRTVRLRLLLEEHEEKILFDIGLTSVRLWNELNYEKRKLFFRDNLTPEKRVEINRRYYHKYKNFLGVNAGQVINKNEEAWESFFKLLKMKKQGRLSPHISKISPPGYWKDRVTGKKKIHILIRNDRYYLEPISDGEGRLILKDFKLRIRYVGRIRWEGKQGRLEIIYETGRWFAYIPIEVGVDPSKSNPKGYIKPNYKDKKNRISNPRSIKQKDPVGDKKAFIDVGLNNLFAVVVSDGSALLIKGGVIKSEYYWWKREISTYQAVRDLLKNAGILTWIKYHEKYLKALYKRNERLRHLYRTAIRFLAEMLWSRGVEKIYIGYPIMLSQNNGNEYNTNIWWYRKIILWIIDVFIEYGIDVEIVSEDYTSQKCSICGEIHKNGRIYRGLYICRKTGKKINADINASLNIARRIGYKITITRKIESYLVTHNGIKPLIPRQRANTRDPEVRNLAL

SEQ ID NO: 2187 - protein, 488 aa, unknown
  TnpB Polypeptide
MSKKKPKREQSEKEPRRTTPTFLLELPLVVYEGQATRIRGHLEAGRAFYNAVLSEGQQRLRRMQADPAWQAARAIPRTQKQERRAAFSALREQYGFSEYGLHEAAKRLRTSWIAEHLDAVLAQTLATRAYHALNRVCLGKARRVRFRSRGRGLSSIENKRNDTGLRFVLEPPEEGNRGWLIWKDDQMPAVIDWDDEVVAHGLRHHIKYARLIRRPASSPRAQGADCQGYRYFVQLACEGVPHRKQKHAVGSDTIGADLGPSTIALVPREAEASLAVFCEELAPNAQAIRRLQRRMERQRRAANPDNYDAKGRIKKQGKKRLKWKTSKSYERTRRRKATRERKLAAHRKSLHGRMAHQIVAVGNTVILEKLSYKAWQKRGTARTRDVCRDAQTHRCKHGRHPDRSSPAASQTLAVLSRLRTARQKAALPALASLSLWSRSRAARPLYGVSGLHALNRPSDPVMCSGCHSLGKCGGALAGRACTGTPTGE

SEQ ID NO: 2188 - protein, 422 aa, Campylobacter sp.
MTISHKIELIPNNKAKTYFKKAFGCSRLAYNWGLAKWQEYYKQGIKKTYLDLKKEFNAIKKEQFPFVYEVSKYATQQPFIHLNLAFNKFFRDLKQGKLSYPKFKKKKDNQGSFYLGGDIIKFSTKNNKTYLKIPNLGKVKLREKLRFNGTINSVTISQKANKYYASFSIEISDDEFHQTHKQALDSHQALGIDMGLNSFVSLSNGLNIQAPKPLDKLTRKLKKIQRKLSKKIHPKTKGDSTKKSNNYKKQSIKLGKLHTKITNIRSDFLHKLTTILIRHYAYFGIENLNIQGMMKNHHLAKAISDVSFYEFKRMLTYKAGYYKRVVIEADTFYPSSKQCFVCKSKKEKLMLSQRVYQCENCGSILDRDYNAALNLQSLAQEKVGLVQAEFTPEDLTALLDDLATNHLVTSKVETGIQQKSYL

SEQ ID NO: 2189 - protein, 413 aa, unknown
  TnpB Polypeptide
MRRRPTLKAYKYRIYPTDAQVVFFAKTFGCCRFVWNRMLDKKLQAYKKKERIPGVIPAEYKKEFSFLKEVDSFALCNVQLQLEKAFKDHFRNRKQFNLPKFKKKRDKQSYTTNNTHNSIRVNFDKGLLYLPKLREGVKIELHRRFDGKIKSVTVSRTNDGKYYASILVETDNRRNKVVEPKSKACRIDVGLEHFATVTNDFGSYKVEHPKYFLKAGERLSRLQKSLSRKQKASKNSEKARLRLARQHAYITSARNDFLHKLSKAIIDENQVVVVEDINVKGLLKTRLAKSVADSGWSKFLTYLKYKAEWYGRTFIQVDRFFPSSKLCHHCGYKNGVLALHDRTWCCPACGETRDRDVNASINLYFVGLGWPKLRLWSRLWWMTVAPTGYLKSHPEQKQEAQPFTVEQSAIWFY

SEQ ID NO: 2190 - protein, 401 aa, unknown
  TnpB Polypeptide
MRTVLTHRIELKPNKLQEARFRQCVGASRLAYNWVLAEWQRQFEAGEKPNEAALRRQFNAIKPVEFPWILDLPKSVPQQAIKNVGRAYQRFFQKQSQFPRFKKRGIHDSARLDNGPGTFAFDGQRIRLPKIGGVRLREELRLDGKPLSATLSREADRWFISIPVEMDRPEPVGESQATVGIDLGISTAITLSTGEKIDSPKPLKKHLQRMKRRSRQHSRTQKGSANRRKSAVQLAKIHARIAHVRQDFLHKTTTELTQRFGLIGIEDLNVKGMMANATRSRAISDIGFYEFRRQLEYKTALSGGTVVVVDRWFPSSKTCSACGGYHESMPLSVREWTCAHCDAEHDRDVNAALNIQREALATVSWTGSHACGEEGAGVGRKTPAKPASLKQEITHGLFVYG

SEQ ID NO: 2191 - protein, 185 aa, unknown
  TnpB Polypeptide
MLRRLGISTWIYYHEKYLDAIYKRNERLRHLYITAIRFLADELYSRGVRKLYIGYPYMLSQDNGNEYNTNIWWFRKIVLWIVDIFMEYGIDVEIVPEDYTSQACSVCGIIYKNGRIYRGLYICKKTGKKVNAVINAVLNIARRLGHRIKISRKIKSYLVTHNGVKPLIPHQRANTRDPSIETPPL

SEQ ID NO: 2192 - protein, 252 aa, Hydrococcus sp.
MIVLEYKVKGNKSQYAAIDEGIRTAQFIRNKALRLWEDEEKVGKYDLNKYCAKLAKQFPFASKLNSEARQVSAERAWSAIARFYDNCKRKITGKKGYPKYKKHSRSIEYRTSGWKLDSKSKKQITFTDKLGIGRLKLVGSRDIYFYNEDDIKRVRLVKRADGYYCQFSINVDVKIETTPTGNSIGLDVGIKEFYADSNGHIEPNPKFYRKSEKSLNRANQKNLKNTTQKEKKLNNLNLKTIIKLEIDMLENI

SEQ ID NO: 2193 - protein, 275 aa, unknown
  TnpB Polypeptide
MVKAIKVMLIPNNVQKTKMFQYAGASRFAYNWALAREIENYEKGGKFLSDAELRKEFTKLRHSDEYAWLLNISNNVTKQAIKDACTAYKNFFKGLQKFPRFKSKKRSMPKFYQDNVKIRFSNTHVKFEGFSSSRKANKQKMNWVRLAEHGRIPTNAKYMNPRISFDGLNWWISVCVEFPDCRETLNDDGVGIDLGIKDLAVCSDGTKYKNINKSQKVKKLEKQKRRLQRSISRSYEKNKKGESYCKTNNVIKKEKLLLKRNHRLTNIRKNYLKKE

SEQ ID NO: 2194 - protein, 436 aa, unknown
  TnpB Polypeptide
MKLTGDFEALKASLSIYRKALTYLIPIINNAWEDLSQYEFANQKYSQIEKWIHSTQNNRAQFDFDQQFPKLPSYLRRSAIATALGIVSSYRSNLANWEANPEGKAPKLQLIHYDYPAYYKGNLFKNFDPIRQTIELKVFKNGDWVFEQYRLKQSDCTYYKRYLTDKKQNVPILQKKGRRFYATFSYEEKTVLVPEESINKICAVDLGLETDATCSIMDKDGTVYARKFISFSTEHDRLHTQLGRIKRNQKRGSLHNKALWRKVSGISQDVADKTARAIFEFGKEHGVDVFVLEYLDFKGKKAVKRAHFWRYKRIYKILTQKAHQYGLRISRVNARYTSRLAFDGSGWSKRGREIAPDTPYSILQFTTGKFYNADLNASYNIGSRFFIRHILKTVTVTQRLALEAKVPQVAKRSTCTLSDLINLRSELAVLTTRTQA

SEQ ID NO: 2195 - protein, 400 aa, unknown
  TnpB Polypeptide
METVRIYRLKDLDRRTRARLQAAQMEAARVWMYCVQRHQQARSERLPWPTRDDLQCETKGGQYKLHSQSIQMVCHQFFANIETIKQLRPGNPHHRYPYHPKKYMTVQWPAQAVARQGRHLILPMGRGRRSFSFHLSDLPDQMEAVSLVWNGEYELHIVVPAVLPEPAVLPTASPVQATADLGEIHQAAITTSTGKAFIVTGRGIRSLKRQHNKLLGRLSRLQARCKKGSKRWRRLQYSRERESGKKERRVRDLRHKGTRQVVNFCQREGVHTLYVGDPHGVRNQNKGRHHNQRMAQWEYGKDKQYLQEKCSKVGIECFTGNERGTSSQCPQCRWKKKPKGRNWTCRRCGFTGHRDIVGSMNMHTIAFGSRIAYPTSLTYRRPGPLRDRRQDKELSSSGTS

SEQ ID NO: 2196 - protein, 275 aa, unknown
  TnpB Polypeptide
MKLTLQLQLLPTPDQKANLLATMERFNEAATFAAKVGFEAGVFGQVMIHKRAYHQIRERFGISAQLAVRAIAKAVECFQRDKTKCPVFKPRSAICYDHRVLSFKGLTTVSMWSLSSRLLIPFVCRTYQKDRQGRSKGQADLIYRQGKFYLLCTIEMPENAPVEPTDVLGVDLGIVNLATDSSGEEFTGEKIDKVRQRNTSRTCPECGHCEKANRKNQAELECRHCGYSANTDFVGARNIRDRGIVTRPTIGVVEAKTGNGTADETAYKPIALAMG

SEQ ID NO: 2197 - protein, 533 aa, Okeania sp.
MAKSHGSLTGIEAKIEYHPAFEELGALYESWKRSAVNWMQTEKLSESELEKRLMKQFNIQWAWADSIATEARTCLNQLKTAKKNHYSKLELQIQAKTTAAKKLIIKLEKTLKLATKKGFPHTQARNKFFHQLLGLKSKIQKIANLKRKLKKLKNTERLHICFGSQKLFNAQHNLAENGYKTRSRWSIDWSKKRSGRFFCIGKSQPGGGTMIKVFSLQEDGLYQLQVQLPRPLQDKYGQKIQLEFSVSDRNGRSRATDLDYAINSLKPITISIFRREHKQDNWYVHLSTYVQEIPVVHTRKNGCIGIDFNAELISVTYVKWDGNIEYLEELPRKWKNQTTGQRQATMRNIVATIVKLADFFECAIAIESLDFTKKKAKMSEESKIYNAMLSNLSTGMFREALESCCRRFGVELIKVNPAFTSVIGMVNYMAKYGLNSGTAAALVVGRRALKLSEKIPQCLLRPEDVNKHDWSHWRRVASFIKLHRIRRTQLFQWRKALEGILTHSLWAEHQLSQQVHIETGEPRNHLHSPMANV

SEQ ID NO: 2198 - protein, 292 aa, Ruminococcus sp.
  misc_feature (290)..(292): Xaa can be any naturally occurring amino acid
VRKINRAVKIRIYPNKEQITQIEKTIGCSRFLYNRMLADKIRHYQEEKKMLKNTPAGYKKEYPWLKEVDSLALANVQLNLEGAFRKFFREPGVGFPHYKSKKHSRKSYTTNMVNGNICLQDRFLKLPKMQPVKIKLHRMIPEGWKLKSVTVSREPSGKYFASLLFDCENQTAEKRQAEKFLGMDFAMHGMCVFSTGERAGYPMFYRNAEKKLAREQRKLSRCEKGSRNYQKQKKKVALYHEKIKNQRKDFQHKLSHSLAEDYDAVCVEDLNLKGIAGGLHFGKGIQDNGXXX

SEQ ID NO: 2199 - protein, 388 aa, unknown
  TnpB Polypeptide
MDRKKSSTPKPPVERIAYRFYGVPTANDAALEAKTFGCCRYLWNRMLGDRNTLYQEIGEAPDNTPADYKDLDECNWLKEVDSLALANVQLNLETAFSRFFKGTSRYPKFKSKKFSRKSYTTNAVCAKNGKSNIVLDEKNGLLKLPKHKDWIRLKMHRNIRPGGVIKSVTVTMEPDEKTYYSILMEYPKTAVAKTKPKTMIGLDMSLPNLYVDSNGNTPDFPKPYRKIEPALVKEQKRLSRKKKGSKRYEAQRLKIAKLHAKAKHQRSDFLHKLSASLTDTYDLIALEDLDMSAIRRSLKFGKSTSDNGWGMFVEMLTYKAERKGKQLVKIDRWFPSSKTCCQCGHVHKELTLSDRTYICPVCGHVMDRDKQAAINILKEAIRMLQIAA

SEQ ID NO: 2200 - protein, 361 aa, unknown
  TnpB Polypeptide
MLTYKRKLRLNKAQEARIGSWIGTCRFVYNMGLEIRREAWKNKQQQVHKYELMKQLKPIKNIEWIKDVPHQCLEKVIVRLDNAYKSFFKGAGFPKWATKGQFNSIQFKQDAFDCIRATNTSVRLPKIGKLKIIKDTEIIGKIKNASIIKEPTGYFVCITTDAKKSIHSQNESQILGLDMGVRYFAVDSNGVKFENPKHFKTFEAKLRIENRSLARKKKGSNSWKRQLKKVALLNHKIANIRKDFLHKLSTQIAKNNHTVILEDLNIKGMVKSRLSKSISDCGWGIFRLMLEYKTNVVAVNPKHTSQTCNDCGAKDAKSRISQSKFVCTACGVESNADENAAKNILRKGIPFIRQREAIACA

SEQ ID NO: 2201 - protein, 385 aa, unknown
  TnpB Polypeptide
LRRGDPGLQAGEETPLLLSACPAYLFGSYGISLVFVRTAYKCRAYPAPGQASVLNRTFGCVRVVWNRTLAWRHQRYHAEQAGTNFTQASAYLTAMKATEELAWLNEVSSVPLQQAIRHQQAAYTAFFAGRARYPRFKSRQGRQSAEYTRSGFRWRDGALFLAKMDTPLVFTWSWPDVDPASIDPTTVTVSRDPCGRWYVSFAAGVPDPGQFPATGRVVGLDLGIKDFAVTSGGQRIANPGHLERRARNLARYQRRMARCQRGSANRAKAKAKAARAHRKVRAARTDFLHKASTRLVRDHDVIALEDLNVAGMVRNHSLAKAISDCGWGTFRRMIEYKAERAGRHVIPVDRWYPSSKTCSSCGHLLASLSLDTRAWTCPAGRPGNR

SEQ ID NO: 2202 - protein, 412 aa, Okeania sp.
MVEKAYKFRLYPTPEQENLLRRTLGCVRLIYNKALAARTTAWYEHKERVSYKQTSAMLTCWKKQEDLDFLSQVSSVPLQQSLRHLQTAFTNFFSGRAKYPNFKKKRNGGSAEFTKSAFKWKDGQVYLAKCTEPLPIRWSRQIPKNCVPSTITVKLGPSGRWSISLRVNDTRDLKLKQVNKQIGINLGITSLVTTSDGEKVANPKNLNKLHKKLRLAQKSLSRKTKGSNNYQKARLKVAKIHGKIKDSRLDYIHKLTTQLIRENQTIVVEDLALKNMLKNHNPPPSPPGRGARGVGSDPNWGEIVRQLDYKAEWYGRELIKIDRYFPSSKRCSNCGHIVDKLPLNIREWDCPECAARHDRDINASINILAAGQAVSVCGATVRPERSKSRKAGAMKQKAPNSDVKESHAVTQV

SEQ ID NO: 2203 - protein, 386 aa, unknown
  TnpB Polypeptide
MRVYKFQLKPSKSQEVKLQDTFKLCRLMYNKLLEELNSQKVIDKSMIQGIIPDIKICEPKFRRVYSKTLQYECYRLFSSLKGLSKSKAKGNVVGRLRFKGERWFKTITYNQSGFKLIKTNKHYCKLRLSKIGDINIRKHREVVGKIKGIIIKRKVDSWEAHIITDGEYTIDSGKSVIGLDMGVLSFITTSDNEKIGNPLFMNKSLERLQLLHKQISKTKKGSKNRRKICNKLQKVWEKIDNQKKDFFHKISTKIVNRSQFIAVEKLNIKSMTKNKKREHHNHRNILDSSWGLFLQMLKSKAENAEIKYAEVDPRNTSKMCHKCGKLQAMPLSARTYNCECGVVVDRDYNAARNILRLGMSLCGDDTSTLVEQVLSRKQEDTALSSF

SEQ ID NO: 2204 - protein, 383 aa, unknown
  TnpB Polypeptide
MIKGIKVQLKPNNKQNSKLLQSAGTARWAYNFALAKQEENYTLKDTNTSGGKFISDNDLRKELTILKKTEEFKWLNNYSNNITKQAIKDCCDAYIRFFNKLSDKPKFKSSKKSKPSFYQDAYKIKFTQTHVRLEKIGWVKLTEYNRIPIDTKYYNPRISYDGVHWYISVGIEISQIPIELTNDSIGIDLGVKVLAVCSNKEEPYKNINKTKTVKKLEKKLKRLQRKVSKKYEKNKDGRSYIKTKNIIKLEKNIKKIHKRLDNIRTDNRHKVTTEIVKTKPSRIVMESLNISGMLKNKHLSKAIAECGLYKFKETIKYKAKIYKIEFVEADKWYPSSKTCSECGYVKPKLSLSERTFVCECCKTVIDRDKNASINLSRYVPIVA

SEQ ID NO: 2205 - protein, 367 aa, unknown
  TnpB Polypeptide
VLKAYKYRIYPNSEQRIQIAKTFGCCRFVYNQTLAYRKEIYEKEKKSVSKTDCNNYCNRELKKDYEWLKEIDKFALTNAIYNMDAAYQKFFKEHAGYPKFKSKHDNHKSYTTNFTNGNIAVDFETGKIKLPKLKAVKARLHREYSGQIKLAIVSQVSSGKYYVSILVETEHKELAHTNHNIGIDLGIKDLCITSDGKVYENLKIIKKYEKQLVKLQRQLSHKGKRSKNYYKTKKKIALCHEKIRNIRKDYLHKVSHEIISENQVIVSENLQIKNMVKNHHLAKAISDVSWYELTRQLEYKAKWNGRKYIKIDTFYASSQICSACGYQNSDTKDLSVRTWICPKCGAEHDRDINAAKNILAEGLRQIA

SEQ ID NO: 2206 - protein, 408 aa, unknown
  TnpB Polypeptide
VKKNKKIIWQNLFSDIEFYFGEKMLKAYKTEINPTEEQKEKILRTIGTCRYVYNFFISHNQTVYEKTGNYVSGFKFSKWLNEKFLPQNPDKAWIKEVSSKSVKQSILNADKAFKNFFSKKSGFPNFKKKGKNDSSMYFVKTDSKTVIPCERHRIKIPTLGWVQLKEFGYIPTDSENFVIKSGTISVKAGRFYVSVLIEQKEPQKVKQTGNGIGIDLGLKDFAVLSDGRTFENINKTHVVRNLEKKLKRKQRSLSRKYESFKKRKGEATRQNLQKNLLEVQKLYKRLENIRTDYINKVVSEVAKTKPEFVTIEDLNVRGMMKNRHLSKAISKQKFFEFRTKLTSKCNIQGIELRVANRFYPSSKKCSVCGKLKNIKLSERIYKCECGNEIDRDFNASLNLKKCDVFEIA

SEQ ID NO: 2207 - protein, 340 aa, Desulfobacteraceae sp.
MQWLGTARFVYNQTVEYLRQPETLADWFGIKTEIIAGLQDWANPVPYQIKSIAVRDACIAVKNAKMKCKQTGQIQNVKFKSKREQRDSAFVPKSAVKESSFYTTLLGKTMRTAEPLPEALYDCRLTCENGKFWLCVPVRKANLVSENQRYGAVALDPGVRTFQTFYSPVTAGKIGTGDFGRVQRLCQHLDNLYSKISKAKCKQKRRLKKAAVRIREKIKNLINEIHHKTAYFLCKNFSVIFLPPFETSQMVSKLRSKTARAMLTWAHFRFAEFLKHKASEFGTLVVRVCEAYTSKTCSACGKIHNIGSKKVMNCTACGTVIDRDINGARGRALTDTSSFS

SEQ ID NO: 2208 - protein, 268 aa, Fusobacterium sp.
MKQGIKIANRHKVLDCKCFRIYNKNDKILCELIYEKEIEQVKKNDRVASIDIGLENLFTIAFNYNKKGISIKGTKLKAINQYFNKEKARLQSMLPNKQYVSKFINQLLYKRTEQLRNYIGYYTNKLIEILRTERISKLVVGYNKGWKQEINIGSKNNQSFVNIPFKKILDILRYKLEDNGIEYKEQEESYTSKASYLDNDEIPIYKEETNEIKFSGRRIKRGIYKSKQGKIINADLNGALNILKKSGEKLIEELEYLRFDNIFTSKLV

SEQ ID NO: 2209 - protein, 358 aa, Candidate divison MSBL1 archaeon
MRVRKAIVCRIVEPNKGKLDALKREYDKVQQYINGEDVDLYSATVQGMDKYMDWGRLKEDKEYPWYLRNDTFWVEKAENTAEFDYWAKIPVKDVWGGINVPVKPHEEIKEEYDVRDSKIVRKNYGFELHLSVSKEVEPVENYDGAIGVDMGLDKLAVSVSLPDRRTRCYGVDVGYVQAKYYFLRRNCSDGYVRRKWDNKDSNKLEDICHQISRKIVDAAKEENLLIVLGELDDIQGQDKGREMNRKLHNFPHWKLRNYIRYKAKWEGIEVIEVSEAYTSQRCSRCGKIGDRHKGRFRCDNCGLEIDSDKNGAHNIARRGIGKYNETSSDARGVVTTPEATTVDSTSAMQVGEVGGNLC

SEQ ID NO: 2210 - protein, 221 aa, Okeania sp.
VPSLIFLVGVLNTQTSRKNGMVVVLSSHSSAFKWKDGQVYLAKCVEPLPIRWSRQLPQNFVPTTITVKLDPSGRWSISLRVSDTRNLKIKPVLKQIGIDLGITSLLTTSDGEKIANPKNLQKLHKKLRLAGKSLSRKTKGSNNYQKARLKVARIHAKIKDSRLDYTHKLTYVANPTAPLQLIKENQTIVVEDLAVKNMVKKRCDPATTPARLRNAHQETIS

SEQ ID NO: 2211 - protein, 367 aa, unknown
  TnpB Polypeptide
MLIHKAYKFRIYPSKDQAVLINKTIGCSRFVFNHFLGVWNEAYRSTGKGLSYAACSAELTKLKQELEWLKEPDKFSLQNALKNLADSFNRFFKKQTDAPRFKSKKNPVQSYQTNYTNGNISIIGNKMKLPKIGLVRFAKSKEVEGRILHTTIRRNPSGKYFVSLLVETDVHPLPKTNQEVGIDLGLKDFATLSSGEMFENPKFLRKMEQKLIREQRILSRPVKGSSGWNKQRVKVARIHECIANCRTDYLQKLSTHIVKNHDMIAIEDLQVSNLMKNHNLAKAIGEVSWYQFRTILEYKAMWYGRIVVAVGQTFASSQLCSCCGYQNKELKDLHIREWICPACQTRHDRDINASKNILAEGKRLLSA

SEQ ID NO: 2212 - protein, 219 aa, Scytonema sp.
GYYLSLSLEDTTVPTIKPDFNPDSITGIDLGLKDFLTTSEGDTVSIPQHYRKSQKRLRVIQKRISRRNSGSSRRKKAIKQVAKQHKKVADKRKDFHFQTANNLLKKYDVVVHEDLNVKGLSRSMLAKSVHDAGWSNFLSILTTKAENAGLLVIAVNPSGTSQDCSSCGGKVPKKLHERWHSCLCGCSLDRDHNAAVNIKNRADGHAVLKAQRLLSNSRI

SEQ ID NO: 2213 - protein, 450 aa, Enterococcus sp.
MGYNTRAKTVSEKIISHTSSLNETCKKYNEVVTYFLQVIFQEFELDNDYSLNEAQGIVERLVNRTAKNPNPKYFDYNELFPKFPSYFRRAAINSAYGKWSSWRSNYLNWEKERSEAIDNKKKFTKKALTPQFKHNDFPVFYKGNMFNQTSDGYAIKVYKNNDWIWEKVVVRAKTDLTRRGITDWKQCNPKLVKRGKKYFLSFAYEKEVKLHKLKEKDTRILAIDLGLTNSAVGCVMDSDGTVLARLFIKQAKEKDHLFHLVNQLKKAQRQTRGAKCPRYWNAIKGLQTQMINDTAHQLIEFASKYNVHTIVFEYLGQMRTPKGMYGAKKLRFKLHYWRKTAIQNKVEEMAHYLGMRISRVLARGTSMYAYDGTGKVTRSDRKDLCEFPAGKPYHADLNASYNIGARFFIRAAIKPLSEKRRLALGAKVPEVLVRTEQTLSTLHQLRTCVA

SEQ ID NO: 2214 - protein, 518 aa, unknown
  TnpB Polypeptide
MLVSLQFKLELKKEDKEKLIQLMRKQSSAIRVAYNMLKELEKEKTKNPRAQIYQRLRQLFPDLPTKYIDSAIYKAKQYPADKPVVFGGKRLFEKLCKNHLTGKVRERLKKQWRELRQGTLISIGSKADKGNRLIRFEDLNGQLYLRITTGNREFIYAKVLREPSNSKDKWITFMLMLLESWQTKNYFAYTVELKLKNGEVYGNVSFELPTPKVKYTKENGVIAIDVNASPIHLAVAEVSKTGELLNYKTISLHHLLGLSQNSKDHQEWILAHKLIDLAIQKGKAIAIENLKKLKKGMRGDGKAELRKRLHKWNAKKFLQKLKRVAMLKGVEVIEVNPAYTSVIGVLKYAPQLNIDKDIAGAYVIGRRALGFEEDAPENYEKLLKDKAYLEFALKRYEEREKELTELIDKETNEYKRNVLESELRSVEDARKLLANLIQSLQSEPSSCKGANGRNPEQGRVAKTTLQSAWQVLRVALLFPILGKVLPRDLSPLKPLLVEGVWDRVRSRLVPLEAGGTSR

SEQ ID NO: 2215 - protein, 228 aa, unknown
  TnpB Polypeptide
MTPSAPTTIRRSLLTVEAACAASNAGPAVGIDMGLTTLAALSTGELIANARPTRRAEREMRRRQRQLSRCKRGSKRRRKVKARLAALHGKITRTRETHLHQVSASLAARFGVIAVEKLNVKGLAGGMLAREVHDVAWGRLIGMLRYKAAKAGAQLIEVDPNYTSQTCPDCGIVKRKELSERVHRCPCGCVLDRDVAAAKVILLRGGIAPGGRNALATAHGLGKMCEAA

SEQ ID NO: 2216 - protein, 228 aa, unknown; identical to SEQ ID NO: 2215
  TnpB Polypeptide

SEQ ID NO: 2217 - protein, 663 aa, unknown
  TnpB Polypeptide
MKRTKPKVKEKKTDKDNFDYMKTNKDNINNIIKDPTILPIINDLVNRTNKIVIHSYQFIKLYLIYHYDNNILFPVINKDFICDVFKVLTIRKCNKGGYTENTIPDKLKGLLHFYKTHYSTTISHNETIFYDKLSYILPYEAIDMTTNINNNIQEHFIDHLNKYVNIVFNIKEKSKQITKDNKDKTIRKELHKNLYDEIGKVKKDLIHFADFTSDQKYHQWIREQKTKLFPNKISFVKNSIHYDIKSNTQDYLISMFHISNELEKLNQIRIQNEEKQIRLFNVLPLRTNILGKNICIDTCALISNFLGDDPTSTHLKDYKKENNQYDLWNRFFKLNKRTFKKGQKYTFNSMIRTDGVSCCVLFVRVDTNGKPLKKTRKNKTCCEEENIDYIEKVELTDELRKMKVVCADPGMSDLIYCGAKDTDGKLQTFRYTQNQRRLETRLKKYNKLMDKISKETIIEDQTIKEIETELSVLNSKTCNYEKFKNYCMEKNKINYKLYSHYEQKIFRKFKLNRFTNTQKSEFKMVNNFSMKFGKPGKTIFVMGDHDKGSYHMKGLEPVISKKFRRIFRNAGYKTFLVNEFRTSKLCNCCNGELEYFLERPSQKPKRKRETEICHGILRCQSVKHKSEIFHNRDKNAVQNMLNIVKSVYDTGKRPNIFCRAVNS

SEQ ID NO: 2218 - protein, 410 aa, unknown
  TnpB Polypeptide
MNRACGYGHSIYFFVLIHVHTNTILGVGVRQSFQFKLFGCKRLTHLHRTIDVSAEIWNHAVALKNRYYKLFDKGLPKAKLQAHLAKLRNGNMSRWKVVGSQSVQAITDRLYLGWEAFFRGDIKRPPTFRKRCKYRSFTLKQSGYKVIGYGRITILGRNYRFNQSRAITGAIKTVTVRRDPLDDIYITFSCDQVPQPEQAPKTGLSAGADFGLKDFLTLSTRQRIAAPQPLKARLRRLRKAQRVLSRKQKGSKARKRARLDVARVHRKVGNIRNDWQWKQARMLLLTFDMLVFETLNLRGMQQLWGRKVGDLGFADFLSKAGWMARKLGRDLIKIDQWEATTKTCRVCGRRRDMPLNMRIFVCEGCGHIEHRDLNASNNILKAGRRLRSGASSKTAHGWQDTLVTAEFHAL

SEQ ID NO: 2219 - protein, 419 aa, unknown
  TnpB Polypeptide
MREHGAHARFVWNLAWELSQWGTLETYGEAKRRTRDDGTTFVQQKRRPVRPRPGFVAQCAMLAEARREFPWLRAGSSTVQAQALRDFDKAIAAFLDPANPARHPVPRTKRGRQGFVIRDTKARRVSRNFGEVLVPKCGWVRFRWSRPLPARLGMARVTVDSAGRWHVSFPGPQPPLLDKERAGTAVGIDRGVATALVTSDGLHYRAPRISRRNTARYLALQRKFSRQAKGSRRREKTRQAMARITTRVTDRRRDWAEKISTLLVRDHDLLVFEKLNTPGMTRKPKPKPAPGSAGTFLPNRRIQKAGLNKAILTSAWGVLANRTKEKAEASGCAVVYVDPRFTSQQCHACGHAEPGNRDSQAVFTCLKCGHHDHADANAAKNILARGLAAEAVPAQAPGHGAKRPRKTRKLAAGTARSTA

SEQ ID NO: 2220 - protein, 265 aa, Actinomadura sp.
MARQVKRAFRYRFHPTGEQAAELSRTFGCARLVYNRALEERTRAWYTEQRRVSYVETSALLTEWKKTGELAFLGEVSSVPLQQALRHLQTAFTNFFAERAAYPRFKSRKKSRQSAEYTRSAFKWRGGRLTLAKMSEPLAIVWSRPLPEDAVPSTVTVSRDAAGRWFVSLLCEDAIARLDPTDRAVGIDAGITSLVTLSTGEKVTNPRHERRDRERLAKAQKDLARKAKGSKNRCTAAHRAPLATKASRCSSPAPTRFSSNVKPCS

SEQ ID NO: 2221 - protein, 409 aa, unknown
  TnpB Polypeptide
MRSAYKCRIYPTPEQESVLNRTFGCVRVVWNRTLAWRRQRYHDEHAKTSYAQASAYLSAMKATEDLAWLNEVSCVPLQQAVRHQQAAFANFFAGRARYPRFKSRAGRQSAEYTRSGFRYRDGRLCLAKTGSPLAFTWSWPDIDPASIDPTTVTVSREPDGRWYVSFAVETAEPPPLPEAGRVTGVDLGIKDFAVTSDGEKIANPRHLERRARALARYQRRLARCQKGSRNRAKARAKVARAHRKVRAARSDFLHKTSTRLVRSNDVIVLEDLAVRNMARNHCLARSISECGWGAFRRMIEYKAERAGRRVIVIDRFCPSSKTCSACGHLLASLSLSTRHWSCPSCGTRHDRDINAAKNILAAGLAAARSDPGDACGADVRHSGTSRVRSAVKQEPRPARAGIPVLQCGE

SEQ ID NO: 2222 - protein, 450 aa, unknown
  TnpB Polypeptide
MKIYRKVSTFSAVLETKHNENVIDYFEDTVFKYSAMKRHALHVIRNNPEMKESVLNRYLQSKYGVTTRTANSCIKEVRGIINSALALLSLKIEKIENRIEDKKENLETKKRQLVKIHNGRKTNTKKLRKLKFQIYNICNSINRLEQKKETFQNRIDKKKPNICLGTKKLLKRNRNKFIARRDFQISYIGRKNEKSGNQMFQFSYDRKYNYYNFKIRKDFGKWKYDRSSERYVEGRCYFKYMSKELRKILEDKSSPVTVSMIRKNSKYYLHVSITLQYTSETICTRKEYGTVGIDFNKGMLAIAETDQAGNLKNVCQRKFSFGKGGKTKAQLSEILSDICSYAVAEGKDIVIEDLKSFKRKKAKTNKAKTQQGREYNDMLHKLPYSIYSQLLEDMCFKKKISLIKINPYNTSKIARQKFCKRMSLNIHSGAAYIIARRGMRIKDIYIKKAS

SEQ ID NO: 2223 - protein, 377 aa, unknown
  TnpB Polypeptide
MGIRVRLYPTEEQEVLINKTVGCCRFVHNQTLADCKQSYEQTQHFLSGKERSANLVSLKEEYEFLKEVSAVALQQSLRDLDSALNNFFKNRSHFGFPQFKSRHKDKQTYRTPYNNGVANILDNKHIKLPKLGKVRTKKFLIPNEYKLCNITVEKTNTNKYYASICIETEVQPLPKTNKQVGFDLGLIDLLIGSDGTRYERPKFAYTNKDKLAKEQRKLSKMRTKLERANANLDECKNYQKQKRKVAKLHEHVANRAKDFNHKLSRKLVEEYDFIAMEDLNINGLLKNHNLAYSVSDVRWSQLVNLIQYKCQWYGKEFRQVDRFYASSKICSECGTYHKDIVNSLSVREWTCPDCGTHHDRDVNAAKNILIKALSVGV

SEQ ID NO: 2224 - protein, 355 aa, unknown
  TnpB Polypeptide
MEKTFRASVIGLTKIKRKLLDYDYGNYQWWMMFGINNGILSAFRAFKGYKQERLTYKEYPLPLQSRFIKDWFRTRKTKLTSERIKIPNSRKKGIGLWLPLKFHQPMPKEYTLKDSFLVRKKNKYYIHFCIEIPEPEPYFPRTVIGIDCGLKNPVTLVDLESRSTLFLGKELKRTKGKYFYLRRKLGKEKNLKMIRKIRHKEKNIVNSILHQLSKDIVNLAYENKAAISIGYLKHLKKNKGRRFNRKLASFSYFQLCNYLEYKAKEKGVPFLKVSEYNTSKTCSVCGAIGKREKNWFRCEHCNYEDNADRNAAFNIGKRGLSYMLGLGVVASALKPIAKVNGQAHGHEIVQVCNLH

SEQ ID NO: 2225 - protein, 394 aa, Planomonospora sp.
VRRSFTFLLCPTAKQAAALAACLEEHRQLYNAALEHRRTAYRKAGVSIRYGDQSGELKHIRSGDPGGQARWSFSSQQATLRRLDKAFAAFFTRVRDSRTPGFPRFKGRGRFDTVTWPKDGDDCRWDSQPEHPTATYVRLQGVGHVRVHRHRPVKGRVKTISVKREGSRWYVILSCDEVPAQPLPATGAVAGIDLGVVSLVTTSDGGYIGNPRHLAASADRLAAAQRDLARKQRGSARRRKAAARVAALHATVRRQRLDHAHKMALALVRDYDVIVHEALRVANMARSASGTLERPGRGVAAKSGLNRSILDAGWGVFLAVLADKAESAGRELIAVNPADTSRTCAECGHVAKENRLIQAAFACTACGHAAHADVNAAVNIVRAGLALREAAQAA

SEQ ID NO: 2226 - protein, 356 aa, Chryseobacterium sp.
MIKTYTYKIKPSEKVEQKFNHLVGICRFVYNISKEVKEESYRRGLRLSCFDIQKQLTDAKKEHTFLKDVHSQTLQAVIDRLDNSFKKFFKGAGYPKWASKKKWKSIPFKSIKTTHNAFKLPSFGVVKVFKFKEPKGDLKTATIIKEADGLYLKIVVDEYNSKVKNRDSQSVVALDMGIKFFAVTSDGEYLENPKHLFKNLSKLRIENRKLSRMKKGGSNWKKQVIVVQRLYLKVKRCRLDFLQKQSTLLSNNYENVIVEDLNIKGMSKNKRLSKHILDCGWGTFFSLLEYKTNVIKVNPRYSSQECSKCGHTCKENRKTQSLFECVNCGYTENADHQATFNLLQRGQSLMEANVVH

SEQ ID NO: 2227 - protein, 364 aa, Chryseobacterium sp.
MKLTLKIKLLPTAEQAELLLETIRETNTVCNAISDVAWSKRIFNNFKLHHEVYHVYKSTFKLSSQMLVRSVAKVADAYKLDKKTKRIFRPLGSIAYDSRIMTYKTDNIVSLWCIGGRQKINFVCHNPAYLPYIKGEADLVYKKGKFYLFQTVDVHENDVEDVEEFIGVDFGLTDIVVTSDGVKHSADWINSYREQKQKVRSSIQSKGTRSSKRLLKRLSGKERTTATIINHSISKSIVSSAKEQGKGISIEDLTNIRFTSKRRNKKFRTKLGRWSFGQLRSFLTYKATLNGVKLVAVEPRYTSQTCSSCFHIGERKNKVFKCTNNKCEVDVVDADENASKNISLLGISVNNPERCDMYSCSVHY

SEQ ID NO: 2228 - protein, 477 aa, Brasilonema sp.
VVSKKQQKTEYIYTQVIPVVSCSDETQVNKIMYLCGTPRALSYNKLGSLQGWGLDWKKADPIVRTILKPTDIRLPAKLWEWSVNDAMKTISAQQEAVKTFLIRDIYRKTKDEIERKRLTDLLNINPTGDNWLHRQFRKQYLKGHTFVRNQIVYQGAGYSCKRLTRSSVQLEVAGFVKGKRITLKLRCRHVIKGQIRLIRNDQGSLEVHCIRIKTLVLPQSKPTQKIGIDKGYTEGFYTSEGIKIAEKLGQLMTAKTNRITRTNRNRYRLFAHAQSNPGKGANILKNNLGHKVKSRLLVREKATIQNFIRRDLRRTITTPVDIICEDLTQPIKGKQQAKHINRKLNQWMKGELQASIDLIALETGSTVSVVNPAYTSQVDSLTGTLLGRRSGDRFIRYTGDVIQADLNAAVNIRVRGTDNNITRYMKSGDVESELLTRTVRYLASISSSVTDALNLGWLLPKFKAKALKLETQYHPQG

SEQ ID NO: 2229 - protein, 351 aa, unknown
  TnpB Polypeptide
MQTITIKIRLFPDNLEIIKQLSQEYIKIVNQLSHQAAENKSFPKITTKDVDTFLPSAICNQAIRDAKTVYTKFKKTKKLSILKKPVYYINNQNYSILDNAIAFPITIGGKTKKTYFKAIPTERDMNLLKKAKLGLMRIVEKSGKWYAQVSIQISEEKPNGENIMGIDLGLKVPAVVVTSTGKTKFSGNGRQIKYIRRKYQSRRRKLGKLKKLSAIKKLGDKESRWMRDQNHKISRQIVNHAIQENVSIIKLEKLENIRKTTRTSRKNARNLHNWAFYQLQQFISYKANLVGIKVFEVNPAYTSQTCPCCSKRNKADDRRYECSCGFKTHRDRVGAINIMRQPVADGNSLPA

SEQ ID NO: 2230 - protein, 427 aa, Natronolimnobius sp.
MAIEVMDRTLVASIRNQREIQPDLDALGFAASKLWNVGRWTCDRVWSETGLIPDEGDLKSYLKTHERYADLHSQSSQRVLEELAEAFDSWKGKRRNGDSKANPPSYRKHTDDHPRSTVTFKQKGFKVDTKFGRVRLSKGKNLKECWSDFILCDIEARPDVDLEDVKSVQQVRAVWNASSSKWELHLVCKVEVEIPETPGENTVGVDLGVTNFAALAYEGGHAELYPLNCLKQDDYYHSKHIARCDDSASDRATRLNAKKSNRRTHYFHVLSKHIVERCVEEDVGTIAIGDLGGIREDEDGDVKDWGIHGNLDLHSWAFDRFTRMLAYKANAEGISVERVSERNTSKSCSCCGRKRKANRVKRGLYVCDECGMVANADVNGAENIRQKVTPSLATDGGDRSNGWLAQPSTYLFDSESGCFAPQEHVGS

SEQ ID NO: 2231 - protein, 394 aa, unknown
  TnpB Polypeptide
MLKTYVYRVYPTKEQEILLAKHFGCTRFIYNWGLAKKIEEYEKNKKCLSYFDLTKELTNLKQKEEYKWLYEVSNPALQYSLRYLDNAFTKFFREKTGFPKFKSKKNNKQSYSIPEHVSIDFDKQRINIPKFQKQNSLKIRVDRIFQGKLKTCTVKKTPTNKYFICVLVETNDVIPNKPKIEEKTAIGIDLGIKDFAILSTGEKIENQKNLAKLMPRLKVLQKRASRKQKGSNNRKKANLRLALLHEKITNRRNDFLHKLSHRLTHDNQVNTLCLETLNVEGMIKNHKLAQAISDVSWSKFNDYLEYKTEWYGKNLIRIGRFEPSSKICSVCGGINNELKLSDREWTCKNCGTHHDRDINASKNILKFALQQQNLVYTGQGMPVESVELPTIVGA

SEQ ID NO: 2232 - protein, 380 aa, unknown
  TnpB Polypeptide
MIKAFKYRIYPNRSQEILFSKTFGCVRLIWNANVASFNSYDKDNNPKPNIIQKSDLVLDRPWLSEVSAAAIQQKVMDFKETVKQYFSKNRKKKIGRPSFKKKGNTQSYRLPNQKFRIEGDRIRLEKIGWVKVVIDRNIPDNGKIISCTISKNSANQYYVSIIVDCEIVKKPKTGKEVGIDLGIKKFATLSDGITIDNPKYLRENQSKISRIQKYMSRKVKGSRRWHKNRLRVARLHNKISNKRLWFLHNLTTYLVNNYDTIFIEDLNVSGMVKNRKLASSISDASFSMFRSLLEYKCEWYGKALSVIDRFYPSSKTCSFCGWKKDDLSLSDRVFVCDNCGIKIDRDLNAAINIRRVGVDTLCNRMRRDEVMSPVEASIIK

SEQ ID NO: 2233 - protein, 363 aa, unknown
  TnpB Polypeptide
MKQIKTYRYKLKPTKDQAQQLEQWLGVCRYIYNLTLDYKLTLWNHYKISVKLNDVQWELTRIAQETEWMKALPAHVRQDATNRVFIAFDKFFKEKKGFPRFARKNRYNSLTFPTHIKVNPDESVIQLPKIGLVKYHNHRPLKGTLKKITVIKEVNGWYASLTVAEDIDYLPRIKTGIGIDFGIRSVIIASNGEKAENPKYTYQYEKKLAKLSRAVSRKKKGSSNQAKAAKKVARLQNRISNSRLDYQHKLSTKLIRENQTIALEDIRVNNFSSNRYLYKALKDAAWGQLIRLIEYKAHWYGRTVIKVAPYNTSKTCSNCGHLNKEVHKAKYIWVCSACGATHDRDINAAVNIKNKAVGRTVSA

SEQ ID NO: 2234 - protein, 450 aa, Aquificae sp.
MPLVSRALSIRISGKERKQKVRKLLLDLAHFKNLLILLIRKYKETYGEYPLNVSLLNGLVAKEYKGKYQKEFNELVNNIKANSELSEFWKNLKSQKEKIENANLVQSVIRSVVKDFNNYFKALKAYKKNPENFKGKPKPPKPKKLRYLMDSSVEGNRNIFKVQENSFLVKLRNGRWLKVKLPKDFNYEITSFRLKLVADDLYVDVVYKYPLEVKEPKGDFKAGIDIGLDELLAVVSDNPNLKSFIVSGKELKAFNQWFNKEKAKLQSQIDNLKNELKKRGEELSQEQIKTIQKEIRELEIRLKVLSAHRKRKLDNDLHKIARKLVDLLYETGHKTIYIGKNALESKNEINLGKKLNQEFVSLPFRKLINLIKYKAQELGMEVVEVDEAYTSKTSPFADIFKVRKSKNAKLCLGERKRNLFRDFISGKLFHADLVGALNILRVGATIAPNP

SEQ ID NO: 2235 - protein, 336 aa, unknown
  TnpB Polypeptide
MKPDTGYMKEARASDRHVKYCRIVRRTLNGVKRWFVQLVVEGLPPVRKVYAPKCEVVGIDPGPSRIAYFHEQHAAIVEVAPHVDLQEPKIRLLQRRIDRSRRANNPDNYNPDGTVKKGSSTWNTSNRGRRMAAKLAEHHRCLAATRKRDHGELVNDLLQIGGTIKIEKNNYRSFQRCFGRSTNRRGMGEFVEHLKRKAESAGCEVIELNAYKLKMSQYDPQTDAYRKKPLKERWHRWGNTGTLVQRDAMSAFLACHATEKGHDRALLLEKWTTAEALLSGSGLCRHEPCSDPEVSKDASGLTKPNCGSKAERERGLPRTLCTDGDVQAALPPERAV

SEQ ID NO: 2236 - protein, 400 aa, unknown
  TnpB Polypeptide
MNIFNSKFLYAIKSIKQDFLASLELQSMMETFKNMVNFCIRIGLEENITTLRKFSSLHYKDLDRFEIQSYYKLTAISQAMGRLAQMKNSIRRGKKSKPPYINKLYLISCYRFKINGMLMSIPIGNRSYSNILLNQHTVSKLSEGGIEPRSFVITPKLLSICIKKKVNEIKYENVIGIDRNLRNITVGNEKLVTFYNTNKLLSIKENTSHVIASFKRNDFRVKRFYQRKFGNRRTRRVQQFLHKISKDVVNNAVETKSMIIFEDLKGIRKLYRKGNGQGNKYRRRLNSWSFYELQRQIEYKAKWEGIPVIFVDPKCTSKLCPICGDRIQEDRQNRRKLWCSNCKRSMDRDVVASMNIAYKGRSRFILPRGGTVEAMKRNMEMPLILRVDVSKSNQKIRQNQ

SEQ ID NO: 2237 - protein, 376 aa, unknown
  TnpB Polypeptide
MLIYEYKVEGSQQQYAAIEEAIRVVQFIRNKCIRIWMDVAGTTANDLQWYCAILAKYYPFAMHLNSQARQASADRAWFAISRFYKNCREHKPGKKGYPTFQHDNRSVEYKGTGWKLDLDGKHITFTDACGIGRLRLIGSRDLATQPRLAIQRVRIVRRADGYFVQFGVKCERRVEHQPTGKQLGIDVGLKVYYTDSEGQSVENPRYYRKAEKRLKRLHREVSRKTNGSANRKKARKRLAKASLKVQRQREDFARKTANALITSRDLIAFEDLKIRNLVKNKHLAKSIHDAGWGNFLTWVKAYGAMHEIPIIAVAPHFTSQNCSGCGTKVKKSLSVRTHICPSCGLVMDRDENAARNILAKAVRTVGHTGTRPSTGG

SEQ ID NO: 2238 - protein, 376 aa, unknown
  TnpB Polypeptide
MNKAIKYRLYPTTEQAAMFVKTFGCCRKVYNLMLADKIESYKTTGKFVTVTPAKYKKEYPYLREVDSLALANKQMDLQEAFRNRFRKSRKKKNGFPKFKSAKHSRKSYTTNNQKGTVAVFDHAVKLPKIGKVKAVIHRQPPTDWVLKSATISQESDGKFYVSVLFEYKETIVIVPVSDNAIGLDYTSDGLYMDDKGNVGSNHKYYCESHKKLAKAQRKLSRMQGSKKNETKSNNYMKQLRTVNKIHRHIANQRLDYLHKKSTEIANQYDVVCVESLNMRSMSNKGFGNGKATMDNGYGLFLNMLEYKFAERGKYFVKVDKWFPSSQICHCCGSIHHEMKDLSIRTMKCNCGLVMSRDQNAAINIKKEGLRILRTAA

SEQ ID NO: 2239 - protein, 160 aa, unknown
  TnpB Polypeptide
MRENCQDCKGNWHTRKKGSSNYRKKKKEIALCHEKITNTRKDHLHKISHEIVSENQVIVSENLQIKNMVKNHHLAKSISDVSWYELTRQLEYKSKWNGRKYVKIDRFYPSSQLCSLCGYQNPNIKDLSVRTWICPECGTEHDRDINAAKNILVEGLRQIA

SEQ ID NO: 2240 - protein, 406 aa, Methylococcaceae sp.
MLRLQAYKYELMPDGQQERHMRRFAGSCRFVFNKALALQKERYEPGEKKIGYAGLCKLLTEWRNNGETAWLADAPVHPLQQKLKDLERAYSNFVAKRADYPRFKKKGQSDSFRYPDPKQIKLDQANNRLFLPKLGWLRYRNSRDVLGTVKNVTVSQSCGKWYVSIQTEREVAQPVPQGGAVGIDMGIARFATLSDGTFYAPLNSFKRHETALRKAQEAMSRKSKFSNNWKKAKARVQRIHSRIGNTRRDFLHKTSTTISQNHAMVCIEDLQVRTMSKSAAGSTEKPGKSVRAKSGLNKAILDQGWFEFRRQLDYKLAWNGGYLIAVPPQNTSRTCPYCGHASAANRQSQARFECVECGFEENADVVGAINVLRAGHARCACEVSGEVMPPAAGTHRSDSGAAQCRA

SEQ ID NO: 2241 - protein, 452 aa, unknown
  TnpB Polypeptide
  misc_feature (14)..(185): Xaa can be any naturally occurring amino acid
MNKTVDVFFSKSLXXXXXXXXXXXXXXXXXXXXXXXXXXXXXXXXXXXXXXXXXXXXXXXXXXXXXXXXXXXXXXXXXXXXXXXXXXXXXXXXXXXXXXXXXXXXXXXXXXXXXXXXXXXXXXXXXXXXXXXXXXXXXXXXXXXXXXXXXXXXXXXXXXXXXXXXXXXXXXXXXXXXXXXXXXXXLEIFYDSTRRKWYARIPMVVKINNKPKGKMKAGIDLGIANLATVAVQDGSLMLFKGGSVLSEFKKITKSISIEEKRLSRHGLKTSRKLEMLYNKRSLLLKNAREGLAREIVESLYDKGVGEIYIGYPKGIAQDKGNERNTNFWSYLAIIKRIKNVAQEYGIKVKLVDEENTSKTCSLCGEIHENGRIERGLFKCPHTGKVINADLNGAINILHIPESVEDRGKWLKAQPVVYRWTNGAGWVTTSYEAMKMKAINHEPMIRLEGTIAL

SEQ ID NO: 2242 - protein, 268 aa, Streptomyces sp.
VIGMKLRYQFWLYPSAPQRTMLAEAFGCARIVFNDALRARQDAYRQGAMRPTAAELSKRFVTDAKKTDERHWLDDASAVVLQQSLRDLETAYSNFFASGNGTRKGPRTGPPKFKKKTSRQSIRFTANARFSITEGGALRLPKIGDVKIRWSRRLPSAPSSVTVVKDTSGRYFASFVVEAEDKPLPELDLDETETGIDLGLSTYAVLRGRKVSSPKFFRRHGRAGRGTRLRRRPGAGRRGVPRGADRQVRPAAALLPPGQRGRAHLDRP

SEQ ID NO: 2243 - protein, 566 aa, Streptomyces sp.
MARGRRKREPKRVLRALAEPFTVSAPAGARIRDRLSLSAEDARVLRVVGEHLGGCARADLAERVRIGRVAVKESRRAERKRALTKVSSSRWAGAITRTSEDQYQLSLRCLFDERASLRRSIVKIRQRLAVPCGQRAGGVRGYLNQAERAQKQRRLQVLIARLAVVEARIEAGRPAVVVGGRRLAKVRHHLTDAGLSEAGWRERWEAARLFLTADGESGAPYGNYTISVDPVDGTVTIVLPEPLRHLANAPRGRYRLACTVTFNHRREEWLDRVTAHRAVRYDITHGPERGRWYLDASWSTPQTVLPTPVELAAAGVRMLAVDLNAGHLAACVIDAHGNPVGRPFTVPANLTGPTSQRDGRLRQAVSELIHLAKANGCAGLAIENLGFDDARATGRETMGRGRRGKAFRRTVAGLPTARFRERVRGMAHHAGLVVVAVDPAYTSRWGGQHWKQPLQEQSKTVVVTGHHAAAVAIGRRALGHGARRRPGVTAHDQRIVQRRATGQTVPRPRACGTASPPRTTGTPHQGIKTCRDRSDQLALFPVSQDRSGRQPASPVYSDPANTGRHR

SEQ ID NO: 2244 - protein, 404 aa, Streptomyces sp.
MGGSVKRAFKYRFYPNDAQAAELSRTFGCVRKVYNLALAVRSQAWATGQERVGYGQTSAMLTAWKKTEELAFLAEVSSVPLQQTLRHLQAAYVRFWGRQAKHPRFKTKRKSRASAEYTRSAFRYVDGRLTLAKMTEPLDVVWSRPLPAGTMPSTVTVSRDPGGRWFVSLLCEDTPSRMPATTNAIGLDVGLTALVTLSTGEKVQNPRHERRDRKRLTRAQRALARKEKGSKNREKSRTRMARVHARIADRRRDHLHKLTTRLVRENQTLVIEDLAVRAMLGNHRLARALSDAGWRELRRMLEYKTAWYGRELITVDRWFPSTKLCSVCGAVADTMPLNTRTWTCAGCGTTHDRDGNAATNLLAAGLAVTACGAGVRPHRESSSRPGRSVVKQEAPPARVGTPSR

SEQ ID NO: 2245 - protein, 460 aa, Streptomyces sp.
MAGRTTGEEARRIKRELLGVGDRTKHRGRAASPLKGLLRQPGAQQRTYRFRFYPTADQAAQLNRTFGACRWVYNEGLALRVKAWEEHRVSLGFAETCRALTGWKRIPETAWLKEASSTVLQQALRHLDSAFSRFFKGLSKYPQHKSKRRTRDSATYVRTGFRWVEDPERPGTASVTLAKQTVPLDVRWSRALPPGQLPVKLTVTRDRAGRYFLSVLAEEVIAPLPEVFLPGSREPRTVGLDLGLATLVTLDDGEKLPHPRLLAKYEKELTSLQRDLHRKQRGSKNRGKVRERIARLYASIGDVRRDQLDQLTTRLVRENQVLVVEDLPIANLTRAAKGKGRRRKAALNRSIRDAAWGELLRQLRYKCAWYGRTLVVVDRFFPSTRRCSACHAKGPKLDVSVREWTCAECGVLHDRDTNAAVNLREEGMRLYWTVAMALPPGRVPPSVIKASELLDLAPAA

SEQ ID NO: 2246 - protein, 408 aa, Streptomyces sp.
MQLRYNYRLYPTAVQRRALAQAFGCARVVWNDCLRVRREAHAAGLAYVASAELSKQCITRAKRTEGRRWLSDVSAVVLQQSLRDLDAAFKGFFDSIGGKRRGPLMGPPQFKSRKDSRQSIRLNTNAFVIRNDGRVYVAKVGGIRARWSRPLPAAPTSLTVTKDASDRYFASFVVEVSPSFLPEVDAEVGVDLGLTVFAVLSDGTRVSSPRFLRRAEKKLKRLQRDVSRKVKGSQNRAKARIKVARQHARVADRRRDWHHKASTRIIRDNQAVYVEDLGVSGLARSRLAKSVHDAGWSAFVDMLEYKAVKCGRYFGKIGRFLPTSQVCSKCGARDGPKPLAVREWTCKACGAVHDRDENAAHNTLAAGRADRLNASWSAGKTGTEAPAQRVEAGSHRDGPSAVAGILGR

SEQ ID NO: 2247 - protein, 620 aa, Streptomyces sp.
MARGGGKREPKRVLRALAAPFTVSAPAGARIRDRLRVSAEDARVLRVVGEHLGGRARSDLAERVRIGRVQVKENRRAERKRALTKLSSSRWAGAITRTSENQYQLSLRCLFDERASLRRATTKIRQRLAVPCGQRAGGVRGYLSPAERAQKQYRLQVLTARLADVEARIEAGRPSVVVGGHRLAKVRQHLTEAGLSESGWRERWEAARLFLTADGESGAPFGNYTISVDPVGGAVSIVLPEPLRHLANAPRGRYRLACTVTFNHRRGEWLDRVTAHRAVRYDITLDQVRGRWHLDASWSTPETVLPTPVELAATGVRLLAVDLNAGHLAACVIDAHGNPVGRPFTVLADLTGPTSQRDGRLRQAISELIHLAQTNGCAGLAVENLGFDDARATGRETMGRGRRGKAFRRTVAGLPTARLRERVRGMAHHAGLVVVAVDPAYTSRWGSQYWKAPLQQQSKTVAVTGHHAAAAATGRRALGHGARRRPGVTAHDQRIVKRRATGQTVPHPRACGTTSPPRTTGTPHQGNKTCRDRNDQLALLPVSQDRSGRQPASPVRGDPANSGQHRQERFTYSVLEGGGEDVIGCLYVYPSKEQADRVHVSAWLREVWPFETGLVDYAPR

SEQ ID NO: 2248 - protein, 403 aa, Streptomyces sp.
VKLVVQVKLLPTPSQAEALEATLRACNAAASWVSGVAFDRRLYRNFSLREHTYTEVKARWRLGAQAAQHVIKKTCDAYATLRANLRADRLGRPGSKGHRQASGKPIEFRAAAAQPYDDRMLSWQPAARTVSIWTLGGRLKGLAFTGGPEQLITLERYRKGESDLLHRDGVWFLLATCEIPEAEPNANPVDFLGVDLGIVNIATTSDGLIMAGRRLNRSRARDHALRAKLQRKGTKSARRRAQRRRRKEARRTRDANHKIAKRIVAEAERTGRGIGLEDLTGIRERVRLRRPQRAMVHGWAFAQLGAFIAYKARRAGVPVVYVDPAYTSRTCAQCGHVDAANRVSQARFVCRSCGFVDHADRNGSRNVRARALALWVSGARSSAPAAPRRAAGRGRHTTAGGVP

SEQ ID NO: 2249 - protein, 408 aa, Streptomyces sp.
VRVSLYECSTCQPKTNRSTVTGVKLRYQFRLYPSAPQRTMLAKAFGCARVVFNDALRARQDAYRQGAKRPTAAELSKRYITDSKKTEDRHWLDDASAVVLQQSLRDLETAYSNFFASRNGTRKGPRMGPPKFKKKTSRQSIRFTANARFSVTEGGALRLPKIGDVKIRWSRRLPSAPSSVSVVKDASGRYFASFVVEAEDKPLPELDLDETETGIDLGLSTYAVLRGRKIASPKFFRRQEKKLRRAQRKLSRAQKGSGNRRKAKLAVSKIHAKIADKRRDFIEQETTRITRESQAVYLEDLNVKGMGSKKGKRAKSVHDQSLGMFARTLEAKCARYGRLFAKVDRFFPSTQLCSAPGCGSIEGPRGLEGLKIRKWTCSCGTVHDRDENAECNIRREGRRIVAEGRPDT

SEQ ID NO: 2250 - protein, 546 aa, Streptomyces sp.
MPPNMADLRPVAAPFVALGPSGVAVRDRLKGLTPADEKVLRLAGAHLGSLASRDLKARCADGLEHSTGMWAARKKDLTSESSSRWAGAITKATHDQWALSRRCQLAHIQGLEAGLTAIRHRLSQPIGEKGTKKAAGGYRSKNEWFHKARRLHVLEERLERERADREEGVVHVVRGGKRLAGNRHNLDAAQLTEAEWRIRWEAERWFLQADGESGKRFGNETIRVAPDGEVSIKLPAPLAQYANARHGRYVLGAKVRFAHRGTQWADRIEANRAVAYRIHLDVAKDRWYLTASWQIPPSRTIPLDAALADGVIGVDTNADHLAAWRLDTCGNPTGQPRRFSYDLSGSAAHRDAQVRHALSRLLNWAKTCGVKAIAVENLDFRAEKTREKYGRHRTFRQLISGIPTGRLRARLTSMADATGIAIIAVDPAYTSKWGAQHWQKPLSSRTRKTTRHDAASIAIGRRAQGHPIRRRAAPPRDDQSDRRGHRTVQAGPEALGREETRHRIPGPRTRSVQPDAASTRATRTPKTVRDVRSDQVWVQDSLLLTD

SEQ ID NO: 2251 - protein, 385 aa, Streptomyces sp.
MKIVAQVKLMPEADQAAALRSTLRTVNESACWVSAVAFERGVPREYELRKHTYAELKARGLGAQTAQHVIKKTRDAYATLRANIRAGNLGRPGSKRRRKAESKPIAFRPEAAQPYDDRCLSWQYDQQTVSIWTTAGRLKKVRFACSPDALRMLREHRKGESDLMERDGLFYLIATIDLPEPEVFEPDGFLGVDLGIAHIATTSTGYRAAGRGLNRHRKRQLDLRKKLQAKGTKSAKRLLKKRSRKEARHAANVNHIVSKTIVTTAERTGRGIALETLTGIRDRVRHRKDQRTTLHSWSFHQLASFVEYKAKRAGVPLVYVDPAYTSQQCSECGHIDRKNRIDQATFACRSCGALMHADDNASHNIGRKGETVWIAGRESRVPATP

SEQ ID NO: 2252 - protein, 644 aa, unknown
  TnpB Polypeptide
MPEKSDGFDVRTVGCSLEKLVPDPTHLRKIRAAVEATHKATILASELLNLHIRRLLDADDAADLSCCFDANWLIKAYYEVTEARGSPKPDPALLATRQQCMPPFSPPSRAGLKQCLLYDARNMATVAATTVWMHFQKRVLSHVRRVLALGEEEYKALSKEQRRRRKLELMQVAADVCRAPGSNMQSPPERREWVDRERARLGIDAAVGDWKGKPLLYHLKARPHRFLRCIRLMSAEREAAGRGSFSLFPVRRTNVPRHARFDQEALRCLLGVGRSDHAKEKAAESRKRKRGEAEAAPVPRVRRSKEEMEGENAALFAGIVDLRATGVQRRSRFDFAFTTDGVCARVQMRCKAKKAGPLASMPRRGLWAIDELKRVARAEEALVVGVDPGKRELVVCVNMEERMASPVRYTQKQRTRDMRAAQYMAKQQRDRPRAVAEAEAALAGFNSRASSLADFASYCAKRHESLEASLAYYSDLGHRRRRWQSAIREQKSEERLYRRIEGMRKPEDARPILLAYGSWGLVAGRAGAACNRGNPPCIGVGLMRKLARRFVVSPTPEAYTSKTCCRCHGPCGPWEEKEAEMGKKIRGLRRCTQRDCMLPLNRDKNGATNIGTNFLRLMGDQPTIRSMTDEDLAFHRASICMECD

SEQ ID NO: 2253 - protein, 392 aa, unknown
  TnpB Polypeptide
MQLHRVCEAVATRSNPDSFRENIDMNLNYKYRMYPNKAQANELESIIETHRRLWNYALAEREDHYKTTGKSLSYFTQTKNLTQRRKSDEYLSKCNARSLNLTLRRLEKAFAAFFRRLKEGEKKAGYPRFKARGELTSFAIINGNGCKVVSGDKLSVTGVGMIKVKWHRSLPDDSVVKQVVISKEGSKWYSCFLIETAGNNHVKPCGTGEVGVDLGLETFATTSDGESLGTSRNLEGCIKRIKSLQRKKSRCKRGSARRRKLGNQIASIHASVKNRRSDTHKKTASYLLDSYETVVVEDLNVAGMLKNKHLARRISDAGWAGFVSTLESQAARRGGTVVRVNPAYTSQDCSSCGKRVKKPLSQRSHNCPYCGISLHRDHNAAKNILKKAAAVS

SEQ ID NO: 2254 - protein, 385 aa, Glycomyces sp.
VKIVAQVKLLPGSAYDADALAATLRACNRAANTASEVAFAKDLKRRNVLQDAVYHRIKADFDLGAQAAVRTIKKVCDAYATLKGNLKAGNLGAEGSKRRVRAESKPIVFREDAAQPFDDRILTWNLDARTVSIWTVAGRLKGIPFVCSEQAAKLLADRKGESDLVMRDGMFFLTATINVDEPPVSEPKAFLGVDLGVVNIATTSDGEILAARRLNRYRKRQRDLRAKLQQKRTKAAKRRLKAIRRRESRHAANTNHIIAKRLVTAAERTSRGIALEDLKGIRQRVTAKKDQRARLSSWAFAQLGAFVEYKARRAGVAVVHVDPRNTSRQCSECWHTHRSNRVDQARFVCRSCGIVLHADINGSRNIAHRGEAVWQRGAVKRPSTG

SEQ ID NO: 2255 - protein, 387 aa, unknown
  TnpB Polypeptide
LLSCKFRLYLSKQTEKALLQHLDLCRWLYNRLLEELNRAKAEGREQSQKDTQALIVKLKTEKPELEQVYSKVLQMINYQLWSNIRALSVLKKNGRRVGKLRFKGQWFKTLNFNQSGFRIEGKKLFLSKVGAINIKLHRPIEGKIKGVFVKRGVSEKWHAIFQVENTSNPLPGTGKSVGIDVGLRHFLTDSDGRQVENPKFYGKTLGKIKVLQYWLSRKKKGSRNREKQRVKLAETHEKLENQRNDFLHKLSRFYVNNYDTIYVENLNIKGMARNHNLAQKILDVSWGKFFQMLSYKAESADRTVVEVNPRGTSEGLSYDNPLRDYISANRIKMRGRDDPKMPAEMRPPRELIEVPASLVVEAGSPFRQGGVVHNAPPLNLLGTGRSL

SEQ ID NO: 2256 - protein, 386 aa, Anaerolineae sp.
MIKTFQYRLYPTSSQRKTMESTIETCRRLYNDCLAERKEAYEERKDNVGKFAQLRKVKILKDTSPYAEKIHSHILQVTVADLDKAFQAFFRRVKAGEKAGYPRFKGQGRFDSFGFKEYGNGFKVDGRRLKLSGVGRVAIRWHRPLEGEVKTLRISRKAGKWFASFSCEVDENPLPATGRAIGIDVGINSLIATSDGELVENPKWCRDGQAKLRVLQRTVSRRRKGGNNRRKAVHALQVHHEHISNQRKDFLNKLANDLVVNNDLIAIEDLQIQNMVKSHCLSKSILDGGWGYFAKRLSDKAVEAGREVVRVNPAYTSKSCSGCGTIFGDLDLSVRWIDCDCGVSMNRDVNAAINISKKALQNRGGQPRWELTWAVAPCVSQEAPAL

SEQ ID NO: 2257 - protein, 595 aa, unknown
  TnpB Polypeptide
MASTHLSLPLRLPFEERERHARLDTLTTRVANTLIECYWTPEHLKGIDDYSYQAWKYFDEDEVFAGVDLYLPSRYKRCVMQKVGETLRSHADKREAFQSTQSVLPDHKIRRIDTRRIKERLWNSEEYIKSGYVDLLIGQLNSYYDKHGRFPESYFEMQECPSYSKGVLQYSADDGPTSGQAVKYECDEDTQTLTVKLKTPDTPEPNTRGDWTWTEHELEGYEAFHELLEHGSLSAPSFHPATTKTGDGYYELSFPVEVEHKEKSDDVETVLAIDGGLRKDATAVVVNEDGEQLSVPYFIQNTERERMRNLSWERNQLNSKLAYLRRQGRDHTDSFKHVQAEYERVNNKIRHKREQLVHDVANQVLALALVYDVDAIVHEDLRSLSPPRGEGQLSWELSSWARREIVSKIEYRAEIAGLHVKRVRPGNTSRSCPRCGATGHTTKSPDHSFEVWWGGHFCCDNSRCGYQADRDYVGAVNVARVFFSETAPLNHDFTSSYIEDSEIVPASRSAGESLSTRRSSSEVASDAGPRLAFGEAPIVFTGQSKVVTAGGGSCFIAPAVTPTETKNNSSKPSVSSPAMLGVTRFTRVTTNCYRK

SEQ ID NO: 2258 - protein, 242 aa, unknown
  TnpB Polypeptide
VIHRNPEPEWKLKSASISQERDGTYYCSVLYEYDRNIKPAVLDKDNAVGLDYKSDGLYVDSNGSRPVSHKYYRESQKKLVKLQRRLSRKIGSKKGEEKSSNYVKRLMKVNKLYAHISNQRKDFLHKKSTEIANQYDIVCVENLNMRSMSNKGFGNGKATMDNGYGVFLKMLEYKLENRGKYFIKVDKFYPSSQMCYACGEIHPEMKDLSKRHIYCQCGYHNDRDLNAAMNIKREGLRMLGVL

SEQ ID NO: 2259 - protein, 381 aa, unknown
  TnpB Polypeptide
MRTYNVKLKFEEKDKNLTIETLQLCQKAFNIVSNYIESNLDLDMKSIHQSTYNKIRTEVKGIPAQYAIKMIKESFSAHKSMKSNGEDPFSECKRTKLSSRLDKRLCTIREEENGIFLLLTTAGGKGRRSKALLLTYPKFLDLFNSCQRHDPLIFERGGDLWLSVSFDLPEKKFVPGEILGVDLGQRRLAVTSEGKAFVSKEHNKSRRKIRYLKRELQAKDTKSAKRRLKKVKRKERNISKDSCHKLANAILESTKCTTIAMEDLSGIKDKKKSKRASNARSQISYYELKRIMEYKAQTLGKRVATVSPAYTSQNDHRGHMRGDRKGCRYYSIDGRVWDSDWNAAINIALRLSQKAERPASFSPPFDGGLNFAGRETSASQS

SEQ ID NO: 2260 - protein, 374 aa, unknown
  TnpB Polypeptide
MVNDCIQIGISSQVTALKRLSVLSWPQRRPYECPTYYKACAVSRAAGILATRKKSLRRGVPTRDPYSLKPQITAYQGFKIRNRALQIPVGPRRYNYLPLSRHTLSVLSAPGVTVRSFTLTETSLSLCISKEVTEVECSETTGVDRNLKNLTVGNDEQAVQYDLSLTVRIAETTSCIISSFKRNDSRIRQRLASKYGRRRRARTQHLLHNATKRIVGEALESRRAIVLENIEGIRRLYRRGNGQRHRYRHRMNSWSFAEAQRQIEYKARWAGLRVIRLSKKETRGTSVTCPRCGERLQEDLRLRRKLWCATCRVIMDRDVVAAINLSRRGRLRFDRSRTPRESQGGAVEAVKGNPTPTVILRVDALKSSKLNPKT

SEQ ID NO: 2261 - protein, 327 aa, Thermoproteus sp.
MGSVRRAVAVEVESPPPELSAVEGAYRRIVEEVAVYVAERGRLEGKKREELHRRFRELYPWLYSQLVQQAMNQGVEVGKSFLEARRDGRVHKPRPEVRRVSMRFAKDSWSYKRAVGSAAPVRLALSLPGGRREVWIKPHRRFWLYWWKALRGEAELASTLILKRRRNEWYAIFVFDVQPRGEPPAEAVAFDVNENSVAVARASLLSTVDAVARWNRQYINLAVYSIRTDFGRLAERYERIRNAKLEELKGKYPFAGRDGEERAQNVADTREFRRFAGRLRERRRKEARVRQVAREVARSPAVIVTEDLGENPQEEMIGIKGKKAKKA

SEQ ID NO: 2262 - protein, 397 aa, unknown
  TnpB Polypeptide
LLQTVATKTKLQTMKNFSLTAVNLANSLLSKKTSKQLMDLHRATYLESKKTTSFGSQVICDIQRNVIKTKGTTLKNITVKFNIPRNCKTFNTKNNYFVAFTIYPRKRISIPIKQNRNYQRLKGLLLSGWQCKTFGLTSNQQIVAYLSKTEPILPQRKNVLGIDINSKCFATSILTPQGKVLNQTYFGKDLWTKRKTFMQRRATLQSFADTGSYKARKKLLLLQNRETNFIKNRLGEIVRDITDLAVKYNADIAIENLKRFKTLGKRFNHQVMRIPFYKFKQILEQRCFDKNITLNVIDAYHTSKWCSHCGAVGKGHSIPYSIFKCKCGQIVNSDRKASLAIAIKSLLERSNQVLNQTSFFQFSNRRVSVNGLFRRNDVVVENNCIVHKHQLIESQRF

SEQ ID NO: 2263 - protein, 341 aa, unknown
  TnpB Polypeptide
MGFNMILTYKIKHKKDFNRELTLANKVAEYALANKTLSSKDVKHIGLKSMISNQILRKYARNKTIKQINSVKLTIPNQGIKHNQKEITIPCLKLVLPIWFNPSFEKINQIEIGKEFAYVSCSYKESPTYKPKQVIGVDRNTTGHVLVASNINTGKVLKLGKECNHIHNKYKQMRKHLQKKGKYKLVKKIKNRESRIVKNINHQISKKLVKTALKGKAIIVLEQLKNIRTTAKTRRKQRYSLNSWSFYQLQMMIEYKSKKHGVPIVYVAPQYTSQRCSCCGHIEAKNRKQKEFHCVKCGVVENADANAGFNIASLYQQGISQFNKESDLLKGNTDTPKGAML

SEQ ID NO: 2264 - protein, 381 aa, unknown
  TnpB Polypeptide
MIAYKFRLYPSKQQEQVLFNTFDLCRFTYNQLLEKMNKSKKINRAKIQHSIVELKKEFPELDKVYSKTLQYECHRLFGNLQSLVQRKEKGYKVGALRFKGRDWFKTINYNQSGFKLIQTGKRFGKLKLSKIGDINIKCHRITSGKIKQITIKKTVGKWYAILITDKEYKKQSGSGQIGLDLGIINYVADDKGNKVKSPLYLKKSLKKIVKAHQELSRKKRGSNNRWKAKQRLLKLHEKIGDQRNDFLHKLSSKIVNENKLICIEKLAIQKMARKDKSWNKRNMLDCSWGKFVSMLKHKAENAGAIVIEVNPENTTKMCSNCGNLQTILISQRTYHCDCGLELDRDVNSAKNILALGQGVVENHKCDSLKQDAIPSTQGVRL

SEQ ID NO: 2265 - protein, 438 aa, Lonepinella sp.
MSENNNIVSLSHKIEIYPNKKAKTHFRKAFGCSRLAYNWGLAKWQEYYKQGIKKTHLDLKKEFNAIKKTQFPFVYEVSKYATQQPFLNLNLAFQKFFRDLKQGKVSYPQFKKKRDNAGSYYIGGDQVVLSDTNKNSKKYKKIITECNAQYLKVPNLGYVKLSERLRFSGKINSVTISQNGDKYYASFSVSIAEENYQPQPKTKLGLGIDVGLKSFVSLSNGLEIKSPKPLAKLASKLKTKSRQLSKKQHPKTKGDKTKKSANYLKASLKLAKLHRRIVNIRNDFLHKLSSSIIKQADYICLEDLNVKGMMKNHKLAKSIADVSFYEFRRQLEYKAKYNGKEIIFADRFYPSSKTCSQCGSIKKELKLSERIYYCEDCGAKIGRDYNASINLLRLIEKQIGQVLPEFTPMDLTAMQSNLAINRIVTSKVEVGIQQKSHL

SEQ ID NO: 2266 - protein, 426 aa, unknown
  TnpB Polypeptide
MDLVNRKVTYRLYPSSRQANQMTEMLRLHQRLYNCALEQRIDAYQRCAVSLSFSKQCADLTRLRGEMPEYADLNAQSSQVTLKRLDLAFQAFFRRVKGGAGPAGFPRFKAFDRYPGWGYKAHGDGWKFSPNTDFINGTLRLSGVGNLQARGRARFVDEAKTSRDPGVPKTMEIIRKGDKWFASVTFETPIPFRKGGDVAVGLDWGTTKFMTMVTEHGGVIEVENPRLMKAALGGLRSAQRKLSRKQKGSVNRLKAKRVLARRHEKVAAKREDFLHQESARIVGMARLVATEDLNIKNMTVAGGAHKAGLNRSILDTSPAEFFSLLRYKAEDAGIKYVEVPTRKLKPSQTCSGCGRVEKKPLSQRLHSCSACSLELGRDVNAARVMLNFALYASATGQELALGVEEGRCPPMKHETPPIPERSRKRA

SEQ ID NO: 2267 - protein, 454 aa, unknown
  TnpB Polypeptide
MPGINIAWNSSSHARMKKKASDGARKYSSALQRISYLHTYFGRGKISGYEGGVGINIVQKTATALYSAVKKAIFRKKIHFRKFEETFSFEDKKATSGIIYKAEAECGTVFKLKPVRKSDMWLQEAMRYKVKYCRIVREPFGIHYRFFLQLVMEGIPPQKHAIGAGTIAIDPGVSTMTSYNGNRLSFKELAPNVNKYQEKVIKEQNRFSELIRINNPKCYDDKGAHIKDMRIQFSKSMKRSKMMLRTAYRKQRIYVEQSNNNLANEWLEDSGSVVKIETTSYKSLQKKSSKTERQDKESVVTDKTGRKRSVRKFKRRKRFGGSILKHAPSRFLSTIKRKVTATCGIVIDVSASKLKASQYDHASDTYEKVSLNDREKIIDDHIVQRDCYSSFIIFYATDKNEPDRNGCLNGFERFLVCQDKLIEEMIHNNFNNPNFGTKLINIKKQKLREEPAAA

SEQ ID NO: 2268 - protein, 387 aa, unknown
  TnpB Polypeptide
MKLIHKTYKLRLSPNKKQSELIAKHFGSTRFIWNYFLAQRKESYLEAKKSLNYYDNSKTLTVLKKDSEFDWLKEINSQSLQASLKDLDTAYGKFFKKQAMFPKFKKKGLSTDSFRCPQGVKIVNNKLQIPKFKPIKVNIHRKIEGKILFATISKTRTDKFFVAITCEVEHKALPKSTKTIGIDLGIKSFAVCSDNTVFENIKTTAKYAQKLKYEQRQLSKKKKKSNNRAKQRKQVTLVHEKIKNIRIDNIHKFTIQIVKNNGVIAIENLNISGMIKNHNLAKAIADTSWGEAVRQLEYKSDWNGRSFVKIDRWFPSSKTCFNCNFINQNLTLKNREWICPCCKSILNRDLNASQNILKQGLKILSGFGTQSELKQKRGQASGCKQSL

SEQ ID NO: 2269 - protein, 385 aa, unknown
  TnpB Polypeptide
MGVQDKDTVPASADVAVLGHETKYAGCVQLRYNYRLYPTPGQAQALARAFGCARVVFNDGLRARQDAHAAGLPYIADAELSARLTAAKATPERAWLGEVSAVVLQQSLADLNTAYRRFFACLKALWEWKAAGRQGPRPHRTGLPRFRSGKDHRQAVRFTANARFKVLADGNLRLPKIGDVPVRWSRPLPSAPSSVTVIRDAAGRYFASFVVDARAGALPQADAEVGIDLGLTHFAVLSDGRKVASPRFLRRAERKLKRLQRSLSRKARGAANREKARVAVARAHAKVADTRRDFHHKVSTAIIRDSQAVYAEDLCVAGLGRTRLAKSVHDAGWSAFTGMLEYKARKHGRAFARVGRFEPTVRHEAHCCIARAAGRDERRYLALRS

SEQ ID NO: 2270 - protein, 262 aa, unknown
  TnpB Polypeptide
VWSRELPSEASSVTVIKDAADRYFVSFVVEVNPILLLPDNGQSVGIDLGITDFASFSTGEKVKAPKPLKKNLRKLKKAQRKLARKVKGSKRRERARKKVAKIHAKISDVRKDFLHKLSTRIIRENQTIVLEDLAVSNMVKNRKLSRAISDLGWRSFRTMLKAKSAMYGRDFRVISQWEPTSQRCSCCGEIGGKKELAVREWQCLFCGAIHDRDVNAAVNIKVAGGLSETLNGRGGARKTVVKTAASSEASTHQLGQQRELFS

SEQ ID NO: 2271 - protein, 243 aa, unknown
  TnpB Polypeptide
MSPSVVFEYKYDMLHVPVKKESGNTATIKQRMKEDCNILSIQFTNSDAFAVGSVLNCQGQEQAVKFWGGGREYSHHCRRILEKIRKSQQATAGNQKGKADQKYWMHLKHLSEHYGHQVSSQIIGFALEQQASVIVLPRYDQKYSRNVMKGAGNWKPLHLSTRIRQYLGYKAWEKGILVIEVHASGISTTCAKCGGKLLTTDSRTGICCCENGHQGNRYLNAARNLGRKCLIQFGKLEQPETEK

SEQ ID NO: 2272 - protein, 425 aa, unknown
  TnpB Polypeptide
MLVQHRVVTECRSYQERVKAANGESSKYVSQGWKRTVDASAPGYGEDYVNLGAVDKCYAAIENNPFADGEIVLRLVIQGAWYRLIFDFDNERFAEGKVTLPVIKVQDGEPVFIFTVVTDNPVVQFSGDWVIGVDVGINNYATVIVRDVKTGRIVYETTLSQRVHSLWNSVRASQRQVSYLKKKSDRLLLYRQERMAALDEAQLHREAASRKKRELAILAAQEIADLSHLWDNAVVAVEDLGWISNTMQNGRWNRGALVQWLTHYVSQNGGWVVTVSPANTSQQCRVCGAKVSHPTHKDSVCPEHGVMDRDVNAAANIAARAVPKVEKARKTRAKNRKLQPQAALKTPVARRSLKYPGRDRTKSVPTPKRKNRPRVVREVILPFSPARVTVTRVLADCDAQGATGTCQAAIKQGNMTDEWRLCSLI

SEQ ID NO: 2273 - protein, 546 aa, unknown
  TnpB Polypeptide
MAEKKQLRTIDDPFVALGPSGVAIRDRLGRLTTEDEKVLGLVGEHLGRLASLDLRARCADGLEHNSDTWAARKQGLRAESSSRWAGSITKATHDQWALSRRCQLAHIQSLEAGIRTLTHRLSQPVGEKGTKRAPGGYRSKGEWFDKSRRLATLEHRLDAARDDREAGVVHVVRGGRRLLNNRHNLEKAQLTETEWRRRWDAERWFLQADGESGKRFGNETIRVTPDGEVSIKLPAPLAHHANAKHGRYVLSSKVRFQHRGEEWRDRVERNRAVAYRVHLDVARGRWYLTASWQRPTVKTIPLATARAKGMVGVDTNADHFAACRLDAHGNPVGDPRRFFYDLSGTATHRDAQIRHAISQLLHWAKRCGTAAIGIENLDFTREKTREKHGRRKRFRQLISGMPTGKLRARLVSMAADQDLAIVAVDPAYTSMWGDEHWRKPLTSNKRKMSRHDAAGIAIGRRALGHPIRRRAAPPQHHQSDGAGHRTVQAGPGVRGREGTRPPVTERARDARPRTGTTRTRVTSASKTVRDARSSGTWVQSSLLDTV

SEQ ID NO: 2274 - protein, 526 aa, Opitutae sp.
MSKRAKTQSFVAEFPLATPRSTEGPLDKRFRAGCHVYNGVLAEGLNRVDLLRDSKAWQAARRMPEGEPDSPERKARAKGFRAAAMAVGFTAYQLRDFAVDYRKGCWANDHLGSHDTQALGFRAFRSLEQYLYGTRGRPRFKRGEQFTSMEGFSNEAVIRYRDGVVHWAGLAMPILRDARDKDRWEQDALACPTKYVRIVRRRLKGRWRYYAQLVQLGKVPTRGIVAAKGGVGGLDLGPSTLAAVTDNMALKTVFCPKTADKSKEVRLVQRRLDRSRRATNPGNYHKDGTVQRGPKKWVKSAHYRQAQSELADLQAALAATRKREHGELANRLMAQARDWRTEDVSYQAYQQLFGRSVGKRAPSQFIATLTRKAENAGGKVVAFSTRTTRLSQFDHSTGTYVKKPLSQRLHVFGDGRIAAVDRDLYSAFLARFVRKNQLDTRQVVSAWPSAEPLVRLPVSSLPNYERRASPSTGGRKAAVRVVRQSKVRSSEGNSGDAVGRKAESPGKTSAWIRKAARKGRAPTRIP

SEQ ID NO: 2275 - protein, 312 aa, Halomonas sp.
VNAGATHAFIKVRWQNDWIWMGFQLKGQYRFRGKGQAKSPLLTYNGRHWQLSLPEQFNPPTPTKGTPNRVLAVDVGINTAATWAVVDAQGTVHARGFISRTDKDREYRLMQRIRRAARRHARHGCRLPVGFCRRDHQRLTHLADNQAHQISRQLVNLALNHDCQAMAVEDLKGWRPKAGKKRTPMKARFHRWFHRQLVNRIDSKAEEVGLKRVHVYARGTSRQAFDGSGPVKRDVANYSQCMFSSSKRYHADLNAAYNMAARGHVYFQGGQRKQTARVRSQTSTHAPRILVTLSNALATGWVRGIRIRDSIL

SEQ ID NO: 2276 - protein, 414 aa, unknown
  TnpB Polypeptide
MDLSRKVRLYPNKTMLTILDNLCNYRRFCWNQALDVWMSLVQQRQEHLPSELRLKVQQAIKDKSISFTDDENVLLMQYPAPTQYNVSKMLTKQKQEWQYQLSSRVLYRAVADLAQAWKYFFNNKEKSSLHAGKPSFRQKKNPKQGFKTDMSRIRNGKLLLDKPRQYKGDWYAIPFKGYSLPDGHIKYCSITKVNNKYYASLVIDVHIEPLVKTGQNTAVDANVNHFDYTDGQYSINPKRLNSLYEQIAFYQKRLARKRHVNGKKATESKSYTVMRTKLQALYEKATAIQNDLLHKFTTYLYRTYDTIVIEDLDVKSMQMSKKAKNLHRSLFGKFRFQMEYKAKKFNKKLIIADRYYPSTQRCSHCGTVKKGDDKITLTGNAKHGTAHNEYVCYNCGYTTDRDKNAVNNLLALIK

SEQ ID NO: 2277 - protein, 400 aa, unknown
  TnpB Polypeptide
MSYKTFKYPIHPSEGQLKKLAAWDDACRFLANLSIEQWKLGVTRPKVDRKYPSLGDSQKQLTELRKEVPWLKDVPVHIAQNTLRRVETSWQRCFDKVSKAPRWKRKNHDFMSFTEPDPLQWTLKPERGLLSFPKLGNVRVNVHRLLDGKPMSCTIKREGTQWYACIQCELPKTKPTENTSIVGLDRGIVLLVADSDGATVSNPEFLKKSIVQLRRVQRKASRKVKGSANQRKAYQRVAKCHRRVTRQRNHYLHQISKHYAKNHGVIGVEKLQIDNMVKIGRGLARSILDAGWGKLVSQMKYKAEWAGGKVVEVPAAYSSQECSSCGCVDSASRATQALYSCTSCGHTENADLNAAKVIKKRTIRSLLTGEGSAPEAPRRTSKPRLRNRTQGESHTEIGAT

SEQ ID NO: 2278 - protein, 378 aa, Exiguobacterium sp.
VLKGYKYRLHPTPAQAEFLVKTIGCARFVYNKLLEDRIKIHEEAKAGGGPKRKPPTPASYKPLFPFLCEADSLALANAKLHLDAAFAKFFAGTAGFPVFKSRRKSRASYTTNNQHGTIRIEAGKVRLPKVGFIRFTQHRGFDGEIRSATVSMTRTGKFFVSLLVEQDDEPWVPAEHTVGIDLGLVHFATMTNDDLVMEKIANPRNLRKAEARLKWAQRALSRKKPGSRNREKARLLLAKKHEQVRNRRHDFLHKLSRRIVDENQVVVVETLRPREMMQDRRLAKAIGDAGWGEFVRQLEYKCKFYGRTLIKADPWFASTQVCSACGENGGRKGLHIREWTCGACGAHHDRDVNASLNLLRLAEDIMSSGQGLPDELGQ

SEQ ID NO: 2279 - protein, 341 aa, Lentzea sp.
VNGQVRRAFKFRFCPTEAQAAELSRTFGCVRKVYNLALQARTEAWTQRGDRIGYEATSALLTAWKRTEELAFLGEVSSVPLQQALRHLQTGFANFFAKRARYPRFKSRKKSRLSAEYTRSAFRWRDGTLALAKMVEPLNIRWSRSLPAGAVPSTVTVSRDAVGRWFVSLSSEDPSVTPLPTVDSVVGIDVGLDHLAVLSTGEKIRNPRHERRDRMALARAQRALCRKQKGSNNRDRARVKVARVHARIADRRTDYLHKITTRWFPSSKLCSVCGALAAAMPLHARVWTCGCGATHDRDVNAARNILAAGLAVTVCGADVRPQRNPPGGRSAAKQKAPRREP

SEQ ID NO: 2280 - protein, 562 aa, Lentzea sp.
MSACGLREPDAWFDHAFDTIAGVAVDGLRVIAPSFVVPGSSGVAIRTRLKGLTVADERVLRLAGAHLGSLAGRDLKARCAAGLEHSSQAWADRKRGLTPESSSRWAGSITKGSHDQWALARRGQAAHIAGLRAGVAMIERRLALPIGFRGGKREPGGYRSRREWHAKSRRLGVLRARLAAAEADRAAGRVRIVRGGKRLLNTRHNLGAAQLTEARWREHWEAGRWFLAADGEAGKRWGNETIRITPGGEMSIKLPTPLADLANARHGRYVFTARAVFAHRGPEWTERIERNLAVAYRIHHDADRGRWYVTASWQRPAAPGLPLCIVAAGGVVGVDTNDDHLAAWRLDSHGNPLGRPRRFCYDLTGHAEHRDAQIRHALTRLLHWTRRAGVTAIAVEDLDFEQDKTREKHGNRKRFRRLLSRFPTAKLRARLTGMAGEHGIAVIAVDPAYTSRWGAQHWQKPLTTATRKVSRHDAASVAVGRRALGHPIRRRTAPPPRDQSDHAEHRTAQAGPDTRRREETRPRRPGPRTRSAPPGRGQYAGNQDAQHRSERPAEQDTLPLSP

SEQ ID NO: 2281 - protein, 452 aa, Deinococcus sp.
MDPAGQLKEVSVHVPLEARAHQQTSLDELARVTRDLRNALASVTRLKALGVEVTVTQALRGHAPPIPPLDTVGRVPVITRTAACRALMQARQASGWTAMLASATVDELARSFQQECAHLVPGSRVPLAALPDVRYPADQAEIPVGSSITFHALDVVEILGLEDALVPVHLALPVACRQAVLARLHAERADRFGWQEDLLARLPVGNPQQAASLAHLLGRYPAGALPQTTSLPPGPEVLYQGVQALVRRRGTDGQLRWWLRLAFQVAVPPAVYPLVGADLGIRHPVTYASLWGPSGLVTNDWARCWAYPGVGRREGRVRTPFDHQRSRVRWYALLRAALQPTLDAVTVGPHGLLAYEHIALERLNFHDLEGPARFGEFVEVSGVGAAMEILTQLRQPVWVDPAGTSVTCARTGERGLRRGLLFKSPYGWRIADVNAAERICRLAWASLQDQAA

SEQ ID NO: 2282 - protein, 175 aa, Lachnospiraceae sp.
MKSGCVSCKAGRYYVSVLVEEGEEQKKPHLNDLGLGIDSGIKEFAVMSNGTIKKNINKTEEVKKIEKKLKREQRSLSRKYENYKKRSKKKGEATRQNIQKQVIKVQRLYQRIDNIRTDYINQCVNEIVKTKPSYVTIKDLNVSGMMKNRHLSKVVASQNFYDLHKAKKQVQAKWN

SEQ ID NO: 2283 - protein, 272 aa, Sulfolobales sp.
MKEEIIEARILEYGKLKSLYNDIVFFKKYSEILERSGETVGSPPPSIRELQFVQNRIGPLKVVVQGRSAKLPEVNAVVLLPRNGIPKFALADFSNGIKVYLGYEKESLIVGIDIGLRHLFTVVAITRGKLYKTRFFGDKEVIETFTKYLGEEQGVTHLEEIKVKVRGIVKEATSFIKELEPKVVAIEDLREYEGKVGKGLRVLQDMLEKELYSNGVRFRRIDPYNTSKLCSHCGYKKGEVMGSIFVCPSCGYKADRDFNAAYNLALMCYYTC

SEQ ID NO: 2284 - protein, 367 aa, unknown
  TnpB Polypeptide
VYTALKTKLKLTDTQAVLMAKHAGIARFTFNWGLATWRTLYCEGLKPNSLVLKKFFNNHVKPVYPWMKEPGICQKVTQYAFEHLGRAFGSFFSGKTGNPKFKKKGQHDSFTIDSSGRPIPVGGSRLKLPTIGWVSTYEGLPHVTTKKFTISQEAGNWYISFTYEIEPKVTPKSIDFVGVDLGVKQLATLSSGLVIANPQALRKARQKLARLQRQLQRKLHGSQRYQRQKLRLAAAHQRVKNIRLDATHKATTYICKNHAVVAIEDLNVSGMMANHKLAGAVADANFSEFRRQIEYKAQRYGSCVVLVSRWYPSTQLCSNCGQQQPMSLNARVYECSACGFVADRDFNAAVNLAQYARGAKPSLDTEG

SEQ ID NO: 2285 - protein, 416 aa, Synechococcus sp.
MLTLTHEYKLKPTKQQIETIENSLNVCRKIWNYALRERKDWSASRKCPVNACPLHSEYIMAADAPYPNYFFQAKSLTKAKKSSPELKSVNAQALQQVLKTLEKAFKDRKERGFGFPRFKKPGQMHSFMFPQLGKNLLGDGWVKLPSIGKIGIRQSRDYPEGFQVKQARVVKRASGYYVMLCFTSEINVPDAPLAGAVVGVDVGLEYFLSASDGLQVERPRFFVELQRELKLLQRRLRKKVKGSSNWKKLQCKIAKLHEHIKNIRKDFHFKVAHHLCDRGDVIAVEALNLKGLSRGMLGKHMLDAGHGQFLNVILPWVCWKRGKGYLKVDARGTSQECPDCGHVHQKALSDRQHNCVSCGALMPRDIASAIVIKQRAVGRTVQEKACGDGLSGARFALSRQESVNQESPSIPVRLVE

SEQ ID NO: 2286 - protein, 461 aa, unknown
  TnpB Polypeptide
VWLPLGILFSHNGSLSRPFHYASPMILPPSSAVSSGGSRLILSYRYRLYPSPGQLAGFNHVLTELNYLWNYALAERRDAWFGKRRHVSYIDQQTNLKKWRAYDVLGLGAISYDHARDCLQRLDLAYSAAFRRIRERKWAGFPRFRRDTNSFTGVPDFDPWVQTPTGSWRLKIPKIGEVQIRRHRPPPPARVSSVTVSCEGREWYAILQYNVPDPPLPSATQPISPVGVDLGLAHLATLSTGETVETSRFFLQSQRPLKRLQRALSRKQRGSNRYERQRERIVRCHAKIRRRRRYWAHRWTSRWAEDHDLVVFEDFNIASFAEGNRLAKGMLDAGWGLLRQMTAYKEQLRSGRYLEVAAPGTSQTCSVCGQVANPRLRLSTRIFVCPCGLKEDRDVNAARNILNKGLDQLRRNTAEGRRVDGTPPLTKQGRRAYQRKRELKCGEIGPAAVNRSVGVQDPQAL

SEQ ID NO: 2287 - protein, 415 aa, Oscillatoriales sp.
MRTAYQYKLRPGKQQAIELDRWLSMLCAQYNYLLADRFNWYEQNRCPINACPLVCHLPELRDNPDYYSQKKTLPNLKKTHPWYGEIYSQVLQDIVKRVKVTFDRFLKGDSNGKRSGRPRFKSRNHYRTFTYPQMKDGCLQNNLINLPMFGKVKVVLHRSIPNGFKIKTASVTKKADGYYLTLSLEDATVPTIKPDFNPDLITGIDVGLKEFLTTSEGKTVAIPQHYRKSQKRLKVIQKRVSRRKKGSNRRLKTVKQLGKQHKKVADKRKDFHFKTANNLLKKYDVVAVEDLNVKGLARTWLAKSVLDAGWSSFLSILTNKAENAGLLVIPVKASGTSQDCSTCGVKVPKKLHERWHDCPHCGCSLDRDHNAAINIKNRAVGHSVLKAQLTSEAIAGVAEKPTLYCTSVSVGVCHY

SEQ ID NO: 2288 - protein, 414 aa, Halorhabdus sp.
MEKRRTVPVKLDVDSDDAALLEDTVDEFLWAANYVTRHAFSGEYVTTSKTTLHEETYEDVRDETALHSNHVQAARNKAADACKSVVEKWKQGKKASMPHFTSPHLVYDHRTTTFHDEYVSLATVDGRIEADYVLPDDDRYTPHAEYLFSDEYETTGAELHYTNGNWMLHIHTKTDVEPDTSAQDATENSTVLGVDLGVNNLAVASTGTFWTGDEFDHWRREYEKRRGDLQECGTRWAHDNIQSIGRKEEGRFKITLHRISNDLVAEAREYGCSVIAFEDLTDIRERTGASWGHKWAFNRLYEYVEYKAAEYSIDVEQVDPENTSRRCSHCGFTHPDNREGEDFECLKCGYENHADYNAAKNIGLRYLRRNQTGDGGGASVGIALNSGMLNANGEYEPPAENSARAGVHAESPRL

SEQ ID NO: 2289 - protein, 279 aa, unknown
  TnpB Polypeptide
MPEQKTKINKTIGTCRYMYNFYIAHNKELYDKGEKFLPYKKFSVWFNNEFIPNNPEYLWIKEVSSKSIKRSLENANNAFSKFFNHKSNFPRFKKKGKSNVKMYFVKNDDKSIIQCERHRIKIPTLGWVRIKEKGYIPTTKSGLVIKSGFVSKKADRYYISVLIDIPENVVNNNSDKGIGIDLGIKDLAVVSDGTKYKNINKSYKVKRLEKQLKRQQRSLSRKYENLKKLKKGEATQKANIRKQMLKVQRLYHRIDNIRTDYINKTILKIVKTKPSYITI

SEQ ID NO: 2290 - protein, 358 aa, unknown
  TnpB Polypeptide
MPDAYRIERVRLYPTAAQRRQMENYAGAHRWTWNWALAAREAHFAAHQTSLSYSEQGRALTVMQQQPDTVWLTGIPRRVKVGALRDLDKAYRAAFRRVQRGERPGFPHFKARKRGDASFEIPAETRFDGRRVKVPAIGWIRARGGRAIATTTTTARYFRDGAGDWWAALRYTVALSPADVSNVSAVGVHLEPGHALTLSTGQIVNASRFVSRSDRKLRRLKRAVRRTQPSSGNRRRVRRRFARVARHVANQRRDWQHTISRRLVDSYPRLVMQQRGTTVHAADPESQRAVWGDRARKARVSDATWGGLTRLIREKAAAAGCPVIVIPAEVPTDITCCRCGHVRETLPELVNIWLCEQT

SEQ ID NO: 2291 - protein, 430 aa, Succinivibrio sp.
MVELVRLAFKYKLNPKRHQEKILAQFGGCCRLVWNTLLSWREEQYREYLEELEDRQCWGEELSLVKKPTLGKFSFMPKLQRLKQDPEFAFLKQCNAQILQQKALDLYQGFCFTYDNFRKHVKASFPKYKKKGHTSDSFRFPQGFKVDEPNSRIYLPKVGWVRYRKSRDLPDDAKAKNVTITHAADGWFMSVQFEMRHEPEIAKPKTESAVGIDMGSRFFLTMSDGTQLESFNRSLAAIDRRISLLHKKMDRSQLGSNNRAKIIHKLALMYRRKSNIKLDRMHKHSSTIVKEHDVVVCEDLQIMNMTKSAKGTLKAPGKNVKVKSNLNRMSLNESWGEFHRQVGYKMKLKGGIFIKVNPKNTSRTCPNCGYVSKKNRRSQPVFKCICCGYSANADVNAAQNILRAGLSKLESEGSLSKSPLLDENSSCSPF

SEQ ID NO: 2292 - protein, 401 aa, Streptomyces sp.
MARQVKRAFKYRFYPTNEQAAELSRTFGCVRLVYNKALEERTRAWCGEQRRVSYVQSSAALTQWKKTEEPAFLTEVSSVPLQQALRHLQTAFGNFFAQRAKYPRFKSRKKSRASAEYTRSAFTWRDGQLILAKMAGALDIRWSRPLPEGSEPTTVTVSRDAAGRWFVSLLCDDRIAPPPATKNAVGIDAGITSLVTLSTGEKVTNPRHERRDRARLARAQRELSRKAKGSANREKACRKVARVHARIADRRRDFLHKLSTRLVRENQTVVIEDLTVRNLLKNGGLARAISDASWTQLRSMLEYKCAWYGRELVVIDRWFPSSKLCGACGTVAAKMPLNVREWTCDCGAVHDRDINAARNIKAAGLAVSACGDGVRPQGSTPGGQSSVKQEPPRATAGIPRF

SEQ ID NO: 2293 - protein, 417 aa, unknown
  TnpB Polypeptide
MLKAIKIRLYPDKDQVIYINKLLGSCRFAYNQCLSYKIEEYIKTKKSISFGELGKYLLQIKTDNSFLKEVHSKVLQQTLINLQGAYTNFFKNKKGFPKFKSRKDNNQSCRFPVDAIMGIEGNRINIIKVLKDIHFKCSVKDEVYLNKYQNLIKSGTLTKTKSNKYYFSILIDRNDTKILPTSTNIIGIDLGIKDFIITSEGVSYENIKVKRNNEKKLIKLNRQLSKKTNGSKNKEKQRIKLAKFHEKLNNQKDYYLHSIVNQLLNENQVVVIEDLNVSGMMKNHKLAKSIQELSIGRFNQILEYKADWYGKDIIEIDRWFPSSKLCSVCGYKNDKLTLSDREWVCPKCRTKHNRDLNAAINIEKEGKRILLISKNKIGLSSPEYTLVESSSMDDRQEIDLRSTYSMKQEKNIINDIY

SEQ ID NO: 2294 - protein, 412 aa, Streptomyces sp.
MLTGRKYRLKLTPEQGAMCEEFGNICRAVWNTALEQRRTYRKRGAYIDYVPQSAQLTEAKREFEWLRAAPASILQQTLRDLERACRRHGAFKVHWRSKTRWSPSFRFPEPERIKVRRINRKWAEVKLPRIGWLTFRWTRPIGGEIRSATVSRKAGSWHISFLVEDGLLTPDSHDGRPVGVDLGVAVAVTTSAGTFHDRKFASPGERSRYRRLQQRLARQRRGSSNRLKTVAAMRRAMARVTDRRSDFYARTAKHLTEVYGVIALEDLAIKNMTASAHGTVEIPGKNVRQKAGLNRVILDKGWHRLVLAIHSAARYSGSQVLLVNPAYTSQTCNRCKHVDSKSRKSQAVFVCTTCGHQDHADVNAAKNILSAAGYAVPACGDLAVGRSVKQEPATPRGGPHQLALPLAGIPER

SEQ ID NO: 2295 - protein, 411 aa, unknown
  TnpB Polypeptide
MHYAYRFRLDPTPEQRERLDYHRDTCRQLYNNALKQFEQIPDSAGTLNQRVRQVRDQLTDLKEWWDELNDLYSTVAQAAVMRIEDSVKALSELKQKGYNVGSLNWKAPHDFRSFTYVQSGFEFDSKNGQLVLSLSKLADIPIVKHREIPDDVNIKEVTIKKESTGEWYACFAVDSKQTPEKPTDPEHCVGIDVGILKYAHDTDGTAVESPDLSNERERLGRAQRDLSRKEHGSNNWEKQRKVVAKRHADLKRKRRDFSHKLSNYYATEYDLVAVEDLDAKGLVELPGNSLNRASAAWGTFRRLLEYKCEREGTHIMAVDPKNTTKECASCGVKTEKPLWVREHSCPACGFEADRDANAAINILSRGLSKLGVGHSEGTPVETALPVDTSVSAKRVIEAGSPTLKEPAQAGE

SEQ ID NO: 2296 - protein, 485 aa, Streptomyces sp.
VKKFRPQPGFVVQAFRFALDPNAAQEQALRSHCGAARAAYNWAVGWVTASWWQRRAEETYGIPEAGLTEWRLWSLPSLRKAFNAAKHTDPRFATWWEENSKEAYSTGLANASAAFDNYAKSKNGKRKGARMGAPRFKPKRKARLACRFTTGTIRVDADGRHVTLPRLGTIRSHEPTAGLLDHVNAGTARILSATVRHERGRWFVSFQVEVKHDLERVTRPDMAVGIDLGVKTLAVMADSTGEIRTVPNPGHYDAARKQLRHASRVVSRRQGPDHRTGRKPSRRWEKANAQRNKVHHRVANLREDALHKLTAAVAAEYGTVVVEDLNVAGMLRNRRLARRIADAGFGEIRRQLDYKTRQRHATRLVVADRWYPSSKTCSGCGAVKAKLPLHVRTYQCDACDLVIDRDDNAALNLAALAAAAVTGTGVAGDRDIAPAVSKPRGADRKTRATRPRRKAEAGRAGGAALPQQRQTETRDRTQAEALALW

SEQ ID NO: 2297 - protein, 306 aa, Streptomyces sp.
MAGQVKRAFKYRFYPTGVQAAELSRTFGCVRLVYNKALEERARAWYGEQRRISYVQSSAALTEWKKTKELAFLTEVSSVPLQQALRHLQTAFGNFFAKRAQYPRFKSRKKARASAEYTRSAFTWRDGQLTLAKMAQPLDIRWSRPLPEGAMPTTVTVSRDAAGRWFVSLLCEDTITPAPASTNAVGLDAGITSLVTLSTGEKITNPRHERQDRARLARAQRELSRKVKGSANRERARRKVAKVHARIADRRRDFLHKLSTRLVRENQTVVIEDLTVRNLLKNGRLARAISDAAWTDLRMMLEYKCA

SEQ ID NO: 2298 - protein, 588 aa, Micromonospora sp.
VKRFRPRPGFVVQAYRFALDPGGRQEKALRSHCGAARAAYNWAVSWVSASWWQRKAEASYGVAEEELTPWRPWSLPALRKEFNQAKKTDSRFADWWQENSKEAYNTGLAGAAAAFDNYAKSKRGQRKGQRMGVPRRKSKHRARMSCRFTTGTIRLEPDRRHVTLPRLGVIRTHESTRKLERRVANGTARILSATVTFERGRWFCSLQVEVNRNERAAARPGVVVGVDLGVKCLAVMADSAGEVRYVPNPAHYDTALTTLKRMSRRVSRRQGPDRRTGQKPSKRWLIANAERNRAHHRVANLRQDGLHKLTTAITAEYGTVVVEDLNVAGMLRNRRLARKVADAGFGEIRRQITYKTGWTGGVTVATDRWYPSSKNCSGCGAAKAKLPLHVRTYICQTCGLILDRDENAARNLAAFAADSTTGTGVAGDQDAQASKPRGADQKTRATRPSPSRKRETVIRTPKLSRFGDTVTDLPDGNTRNADIPLEDQQRTRTSPGRPGRGSGAAARRRPSRARPPRRSRNRPRRGGGCGAVAHGRRPDPAGCLASAPGRGPRRRRPGAPAPRPASTGRRGGTRAAAPAARRRRTGPG

SEQ ID NO: 2299 - protein, 425 aa, Microcoleus sp.
MLSLTYEYKAMPTGEQVQLIEQTLTVCRKVWNFALRERKDWINSRKCPINACSITSEYIIPADAPYPNYYEQANTLTRAKTQYPELKTVNAQVLQQVLRKLETAFVDMKRKGMGFPRFKNRYRLRSFVYPQLGKAQFLKGNQIKLPQLGWVDYVKSREIPDGFVVKQVRVVPKASGYSGMLTLESDVSVPDPVPWGHPRGIDLGLDKFAATSDGELIDRPRFLKTLQRELKLLQRRLRNKKKGSNNRHKLNQKIARLHQQISDTRKDWHFKLAHKLCDDAGMLLVEDINFISWAKGMLGKHTLDAGFGQFVSILEWVCWKRGVYFAKVNKDYTSQVCPNCDAHTGKKDLSDRLHACPECGYTTHRDVAAAQVIRNRGVESLSAVGRIVDIKEVACGGGLTGTGNSLVKSQRDRKKGYEARLQPAS

SEQ ID NO: 2300 - protein, 413 aa, unknown
  TnpB Polypeptide
MKEQLGYKYRIYPDPVQERLFRRTAGCCRFVYNLFLEQKRLERHRSNPRRLSRIDQINQIPEAKQHFPFLKEVPHHCLQQAVIDLDKAFQNFFKGHAKYPKARRKFRNESFRFPDPKQIKFRDGEIFLPKAGWVRIVMHRPYEGAVKNVTISISGDHWYASVQTEREVEDPIDLLANPDSVELGGDIGVVNALALSDGTVCDLPRMTDREKRKEENLARIVSRRKKGSRNRARAQRDLRRFKARIARRRRDAKHRMTTSVVRRCDVLYLEDLRVANMTASASGTVEDPGSNVAQKAGLNRAILDMSPAETRLQFEYKMRRKGGAVILVPAPHTSQRCSACGHVAAENRPGRDRFVCVSCGHAACADANASANILHLGRQARPTGGLPGMACGSNLDGGRKQEEEGSSQDAPAD

SEQ ID NO: 2301 - protein, 572 aa, unknown
  TnpB Polypeptide
MIISVKVPIRWDSMTDRQKTRLNRITGRDSRVIRAYLGVIERHEDELLTGRKRTKLDASRLDELTLTASKGKAKRSFVPHNFKIRFPNISVNEFQECRDTAIAMWQSYLERGGSKPLRTRGYSTRKIPRFAFTQRFELVYSPELEIRHWLKLRDSLDSVSNGRVRHDRLMIPLSISSYHLNRMKEGDVKTVRIFKDSRRKWWVIFTVTLAVDSIDTIGKPRAVLSIDLGINKAACSVLLTRKRYRHIRYWKQEDKLQRMKTLDDRVASLQREKEQLIARNENPDRATAQLRSLSGKRERVSKEYDKKLVRDISDYIRKMTRDYDLYVSIGRLKGIRNTARKGNYRGRRFRGMIHRWAFTRISGMLEHKLASIGLDPKRFKAVPEQWTSIMCHKCGHKGIRPKQNLFICNTCGLKTNADLNGALNIGKRFIMLIPSLRDENGLGMWLTPRDRAILKARRKKSSSEGKSALPKGTPALLGESVAGSYDQTSLVESVRGKDPAMVNAVETPSAITPTGECESTQRTEAESHRRNDVSVKKGKARDKVNDSGQEQAGDSGREKGGTQEFLTVHSQL

SEQ ID NO: 2302 - protein, 405 aa, unknown
  TnpB Polypeptide
MKRLQAFKFELQPNGEQQRQMRRFAGSCRVVFNKALTLQKERYEHGEKKLVYAGLCKLLTEWRNSAETTWLSDAPVHPLQQTLKDLERAYANFFAKRTEFPRFKKKGRHDRFRYPDPKQIKLDQANSRLFLPKLGWLRYRNSRDARGTLKNVTVSSNGGKWCVSIQTERDVEQPVHPATSIVGIDVGITRFATLSDGSFIQPLNTFKKHEQQLAKYQRQMSRRQKFSQNWRKTKAKVSQLHARIGNVRRDFLHKTTTTICKNHAIVCIEDLQVRNMSASAAGTVEKPGTNVRAKSGLNKSILDQGWGEFRRQLDYKLSWTGGHLIAVPPQHTSQTCPACGHVSADNRLPQAQFACVQCQYENHADLVGALNILAAGHAVLACGESVHQGHSMKQEPTEATHVAAA

SEQ ID NO: 2303 - protein, 374 aa, unknown
  TnpB Polypeptide
MNLTLQIQLLPERDHARTLQTTVERFNEAANWLAGEAFARQCSNKLVLQKLFYAELRERFGLSAQMAVRCIARVCEAYKRNKSIRPKFLRHAAMPFDQRMMSFKGADRVSLLTLNGRVLVAFVMGKYQAEKFTNAKGQADLVFRDNGKWFLLVTVDVPAGTKTPATEFLGVDLGVVNIAVDGDGQKHTSEKIEAKRVRYATRRRRLGKATRGAKRSKRRHCHKAMSRSKKREARYRRDVNHQISRQLVAKAKDTGRGIGLEDLKGIRERTRFRRPQRARVISWSFFQLRSFVEYKAMLAGVMFEAVDPRNSSRTCAECGSCAKANRKSQSEFACRACGHKAHADVNSARILGFRASAAVNRRMGSEQPLIASVA

SEQ ID NO: 2304 - protein, 475 aa, Micromonospora sp.
LSYWVVIVLGVAHRERLSVVQAYRFALDLTARQERAVLAHAGAARVAHNWALARVKAVMDQRAAERSYGIDEADLTPTQGWSLPALRRAWNQAKPVVAPWWRECSKEAFNTGLDPLARALKNWSDSRSGKRAGRPVGFPRFKSRRRCTPSVRFTTGAIRVEPDRKHVVLPRLGRLKLHESARKLARRLEAATARIVSATVRREGGRWFVAFCVEVDRAARTPEQPHVVVGVDLGVKHLAVLSTGEVEPNPRHLDAAARRLRRLARRVSRRVGPDRRTGRRASRRWERARGQLGRAHARVANLRRDGLHKLTTRLAREYGTILVEDLNVVGMLRNRRLARRIADAGFAELRRQLGYKTSWNGGRLVVADRWYPSSKTCSGCGAVKAKLALSERTYTCTTCGLTLDRDVNAARNLAALAAQASAAGSGPVAGRGADRKTRRAGPVAVKRQPGTATAGKTGTVPPQGGTSDQMLTKAS

SEQ ID NO: 2305 - protein, 377 aa, unknown
  TnpB Polypeptide
MKLVSTIKIKANNKALFEMFDKFKSAVQYAIDKGFEAKTSNRFKLHHLVYKDIRQKFNIPADFTIEVIGKASENLKAVKLKKRPIIKQCPVSFNRKLFTFSFDKVRLATFEPRQRIDVPIHIPEYYWKYLDWRYQTLEIINNKGILFFHITFSRDVNTPISCGDKILGVDVGINNLAVCSDGKVFKGYKTKIIQFQYLRKKLQRKGTKSAKRKLKALSGRQKRYMRWVNHNISKEIVASADTIVLENLKGIRKSRNKHMGKRLNRWLNSWSFYQLQSFIKYKAEFQGKRAVFVSPYMTSQTCSKCGKIGSRYSDSFVCLHCGYSSQSDFNASCNLRRLIVTKPNISTDDTKGQLITAVDVRDNDDNKSVKPHTLVCG

SEQ ID NO: 2306 - protein, 314 aa, Proteobacteria sp.
MTITDKNGKIKNVKVDRHLLDYAINDALNRYRSCQTNLKNGNIKHFRLRYLKLTKPNKIIKIEKLAFRENTFYQSVLGDTVKCLSKNFNYSENIKGVAILTKRKNDYYLLSKHNKGLKLNKYKDETIGIDLGTNPMATGYTDLGVVVIGKNMSKQIGKKIKTIDKINNLKGFLSEKKLRITNKKYKRIRDMVNDMQWKVANYLTKNYKNIFIGNLSTKKMGEGKIDKRVKRIGNLLSICRLKQKIKYKGEQRGCKYKEIDEAYTTQVCGKCSYQKKTIGSNKTYKCDSCKITMNRDLNSARIITMLGTQKTNKK

SEQ ID NO: 2307 - protein, 514 aa, unknown
  TnpB Polypeptide
MRAKTSSYVVSTKAQLPESIAKRLEKSLHISNSAYNEALSFGLKRFEALKRNSTYQELLDARRLALKGIAKLEKAEKTAKGLKQQVKCYNKALSGLRKAYSLTEFGLSAHLSQQRRKPGSPYQQFNAGEIQVIAGQAYKTLEKVLFYQIKPHKVRFRSKFDLDVSFRNRVNTTGTRLEPSDKKDIAYRLYIHKASTFVDIPVKAFNKYQQLSLLRSEKIKYVQIIRKTIRGKTVYYLQIVCQGFPPSKVTKGQGVVGIDPGISTVAFASPSEVALVDLVPKNIARKEKLLKDLDRKIERSQRVNNPECYDERGKIKKGARFKRPSNRQLRLRNRRRRVYRSLSEERKKLQGQLVSRIVSQASSIRIEELNVKGLQKRSRDIRINPKTNRPYSKKRYGKAIFRAAPSSFRTALETRATQLGIEFEVISPREVKPSQYNHITQTFEKKSLSTRVYNLSSDCPGIQRDLYSAFLIGHIENGHYQQEHLEQDFPYFYQQMKDFLRQTPKTERLAWYLT

SEQ ID NO: 2308 - protein, 514 aa, unknown
  TnpB Polypeptide
MRAQTSSYVVSTKVHLPESIANRLEKSFRISNSAYNEGISFGLKRFEAMKRNPYYQELLEARRLAKVGIAKLKKAKKKTKGLVQQVKLYDKALFELRKAYGLTEFGLSTHLSQQRRKPGSPYQQMSAGEIQVIAGQAMKTLEKVLFYQIKPHNVRFRSKFDLDVSFRNRVNNEATRLVPSNKKGIAYRLYIHKKSTFVDIPVKAFNNYQQMSLLRSEKIKYVQIIRKTIRGKKVYYLQIVCQGFPPSKVTKGQGVVGIDPGISTVAFVSPSEVALVDLVPKNIVRKEKLLKQLDRKIERCRRVNNPECYKENGTIKKGARFKRPSNRQMRLQTRSRKAHRSLSEERKKLQGQLVNRLVSQASIIKMEELGVKGLQKRRRDIRINPKTNRPYSKKRFGKAIFRAAPSAFKTALETRAFQLGIEFEVISPKEVKPSQYNHITQTFEKKPLSTRSYDLSDSYPGVQRDLYSAFLIGHIEKGRYQQAQLNQDFPDFYNQMKDFLQQPIETERLAWYLT

SEQ ID NO: 2309 - protein, 330 aa, unknown
  TnpB Polypeptide
MVKAIKVMLIPNNVQQTKLFQYAGASRFAYNWALAREKENYEKGGRFIPDTELRKEFTRLRNSDEYAWLLNVSNNVTKQAIKDACSAYKNFFKGLQRYPRFKAKKKSMPKFYQDNIKIQFRDTHVKFEGFSFSRKANKQKLNWVKLAEHGRIPTDAKYRNPRVSFDGLNWWISVCVEFPDCRDRSNHDGIGIDLGIKDLAICSDGNTYKNINKSQTVKKLEKCKRRLQRSVSRKYEHNKKGGSYCKTNNIVKKEKLLLKVNHRLANIRKDYLNQTTSEIVNRKPRFICIEDLNVSGMIKNRHYKCECGNVIDRDFQASLNLKAYGEQFAS

SEQ ID NO: 2310 - protein, 405 aa, unknown
  TnpB Polypeptide
METIINRGYKFKIIPTNEQKEFFLQSFGCARKIYNMYIDELYKQLEETGYQNGFINKKNLYFTNPSKYKTDFEYMNKVDSLALCNAQIDFNNAIKKFNNEYDKKTYTKRSRKREKTLGIKPTFKDLKGFPKFRSIKKNDFSYKTNNQSRGGKWNDITLENSMLKIPKLKTLIKVKQHRPLPKDSIVKNCTISMDNKGIFYASLCVEYVIDIEPKKSEKVLGLDYSQHDFYVDSNGKKANYPHYYRKSEEKLKRLQRNLSRKELKSKNWIKQKQKITTLQKHITNQRLDWLHKESRKIADMYDAVVAEDIDLRNMAQCLKLGKNVHDNGFGMFRIFLKYKLEEQGKQFVKIDKWFPSSKMCHCCGAIKEDLQLSDRWYVCDCGYENDRDYNAAMNIRDCGTRLLAW

SEQ ID NO: 2311 - protein, 395 aa, unknown
  TnpB Polypeptide
VKQIIKSIKVRLCPNNKQLTKLFQYAGCARFAYNWAIAREQENYKQGNKFLSDNELRKEFTQLKKQSEHQWLSEVSNNVTKQAIKDACNTYKKFFKGQCKYPKFKSRKHSSPSFYQDNIKIQFSDTHVKVEGFSMSKKKNKQKLNWIRLCEKGRIPTNCKYMNPRFTYDGLHWYISVGIEVEDSTTIPLNDGIGIDLGIKDLAVCSDGNIYKNINKTTTVNKLEKRKRRLQRFISRRYEKNKKGVIYCKTCNIIKKEKELLKVTKRLTNIRQNYLHQTTSEIIKRKPSFICIEDLNVSGMMKNKHLSKAVQQQCFYEFRKQIEYKSAWNNIPVIIADRFFPSSKLCSCCGSIKKDLKLSDRIYKCECGNVIDRDYQASLNLKMYGENVLKQQSVA

SEQ ID NO: 2312 - protein, 446 aa, unknown
  TnpB Polypeptide
MNQVLTAKLKLLTTPEQFQALRQTQLAYRDALNYVSQYSFAHGKKSNQQWLQRECYDEIRVRCGLPAQMACNVPRQVGATYKGLWTKARKNAEQRKAGRTKKRFKGLDQAPHYVCPTLAYNFHRDYSLKGGQQVSILTLGGRVIVPYTGYHKHVALIERGAKIGAAKLWYDKPKKRFYVLISLEVEVADPTPQTHQRVIGVDVGQRYLAVVGRLDNGASFFAGKEVRAKADHYARLRKRLQKKGTRAATRRLVVIAARERRLKQDRNHVLSRRIVDRHPHSLIGLEDLTHIRERAKHTHGRSASQKQRKANRHASQWAFAELHGFLAYKALLSDSMAVKVDADYTSQACPTCGYTCEANRPKKGLLFECQNCHYTLHADLIGARNVALRTLLLRQDWMSTGVLSVRPGASSPDTSDREAKAARLLRYAELRWSPDASTAPSGLGSN

SEQ ID NO: 2313 - protein, 374 aa, Succinivibrio sp.
METYALGYKFRIYPNRTQENLINRTLGCARFVFNHFLAVRRDEWKENHHSLTYAKTSKLLTDLKKREETRWLSEVDSMALQESLRNLDRAFQNFFAKGSGYPRFKSKHHHSQSYRTRNQANGIRIIGKRIKLPKVGLVRIKQSRAFEGKIQNATVSRTASGKYFVSLCVETDKASLLQTNRGKQIGIDVGLKAFCSDSNGNTVENPHPLKKLQRKLRREQRRLSRKMPKSVNREKARIRVARVHERIANIRRDFLHKISTRLARENQTVAVEHLNIKGMLRNHKLAKPISDASWGELFRQLSYKTELHGGDLLKVDTFYPSSQTCSICGYQNPLTRNLSIREWDCPACGTHHDRDVNAAKNILRKALEDKSKVA

SEQ ID NO: 2314 - protein, 541 aa, Brasilonema sp.
MPRSTKPSFVLELPLRVDSSQNCELQARFNAAIRLYNNVLGEAKTRMELVRNSEVYQTAKKISRNHKKERSSAFSKAREAYRFTDYDLQAYANQAARGSKWIPQKIDAQVQQKLATRAFKAVERVLFGRAKDVRFKVESRFRSVEGKTNKQGIRWKDNRVVWAGLELPAIIDTENVVVQHGLSCPVKYCRLIRRELNGKRRWFVQLVLEGVPYQKPQNYVSDGLIGLDLNVSKIAFVADNHADLLPFADKVPTFGKEITRLQRKIQRSQRGLNPDNFESDFKVRKGRKTVIKKGKPKKGKQQWKKSSNYRKIASLKRELERRKTAYAKSQNRRVVNEILRHGKNIKTENVSVKGWQKRYGKAISAKSPGFVQSELKRKAENAGGSFAKFSTQKTALSQTHLDGSRIKKSLSQRVHRDVMGIPEHHRDLFSAFLSRYVNQDKLVLQDAQNEYLGLEPILLEAHQRYLTRKQVSHCVAERSLSGGFLRSKLRGVPPVVASGEPVRVGASESRKSDSPSERVSNESLIASQIAESGEKLDEDVA

SEQ ID NO: 2315 - protein, 485 aa, Streptomyces sp.
MKKFRPQPGFVVRAFRFALDPNAAQEAALRSHCGAARAAYNWAVAWVEASWWQRRAEESYGVSEAGLTQWRPWSLPSLRKAFNAAKHTDSRFVAWWEENSKEAYSTGLANAAAAFDNYAKSKRGQRKGKRVGMPRFKSKRKARLSCRFTTGVMRVDTDGRHVTLPRLGAIRTHEPTAGLLGRVEAGTARILSATVRHERGRWFVSFQTEVKCGLERVARPDTAAGIDLGVKTLGVIADSTGEIRTVPNPGHYDRARKQLRRASRIVSRRQGPDRRTGQKPSKRWEKANAARNKVHHRVANLREDSLHKLTTAVAAEYGTIVVEDLNVAGMLRNRRLARRIADAGFGEIRRQLDYKTRQRHATRLVVADRWYPSSKTCSRCGAVKAKLPLHIRIYECDACHLVIDRDDNAALNLAALAAVVVTGTGVAGDQDTAPAVSKPRGADQKTRATRPRRKASAGRAGGATLPHQRQTETRDRTQAEPLTLW

SEQ ID NO: 2316 - protein, 466 aa, Phormidium sp.
LLLTYQYRAYPNTNQKLALNHWLRICRYWYNWQLGDRFKWWEENRSDCVVPSGEFCVISCTLPPLELRDNPNYYSQKKLLPMLKEDLVKVGHSGELLDFSEVPSQTLQAVSKKVDEAFTRFIKGDKNGKRSGRPRFKNTARYRTLKIEGQAVKLERIEKNWLYISVAKLNDWIKIRLHRPLPDGFVFKNILLTKKADGWYISLALEDPSVPQFNSDEITPTWDNTLGLDAVLHEDDYLATSDGEKLPSLKSFRKSQNKLAKISQRKAKRKRGSRQRRRLAKKEALQHQKIARARSDHAYKTAHALMRTGKKVFVHEDLNLKNLTKRNKAKQDEEGKYLPNGQSAKSGLNKSWLDAAFGNFFTTLEHIAAKAGARVIAVNPSYTSQYLCYRDEKVFTDCRIREYWDEVEKLLIDRDINAAVNIKRVGLELFLTLNRRSGKISKSFTESTAKQTLETLRLFSEAYTYL

SEQ ID NO: 2317 - protein, 231 aa, Lysinibacillus sp.
  misc_feature (205)..(227): Xaa can be any naturally occurring amino acid
MTKQNKAFKFRLLPNKEQSVLLAKTFGCVRFVYNKMLAERKETYEKFKNDKEALKKQKFPTPAKYKGEFPFLKEVDSLALANAQMNLQTAYKNFFEGHAEFPKFKNRKTKQSYTTNFVNGNIEWKDGHIKLPKLKLVKIKQHREIPKNYKLKSCTISRTNSGKYYVSVLTEYKKDIQPKKIENVVGLDFAMAEFYVSSENEKANXXXXXXXXXXXXXXXXXXXXXXXRVSF

SEQ ID NO: 2318 - protein, 388 aa, Okeania sp.
MLNWTYEYKLKPKASQIKLFENWLEQCRKVYNYALRERKDWYQSRACPINACSIQSEYIIPADAPRPTYSQQCKSLTQARKNIPELKSVHSQVLQQTLRRLETAFVSMWEQGHGFPRFKKQGRMRSFVFPQLGKNPLSQGKIKLPAIGSVKLRQSRDIPEGAAVKQARIVRRASGWYAMLTVQWDVEVPEIKPHGEPLGIDVGLTSFIATSSGLLIKRPRFFVDAERKLKLLQKRVSRKRIGSNNWKKAVAKVAKLHECVANARKDFHWKTAHQLCSEAGMIFVEDLCLVGLSRGMLGKHCLDAGFGQFFQILEQACFKHGVYFQKVDSKKTSQICPNCLTETGKKELSERTHVCQHCGYTTDRDVAAAQVVLIRGCAAVGHTGQDAW

SEQ ID NO: 2319 - protein, 323 aa, Moorea sp.
SSIVRFYDNCQKKIPGKKGFPKFQKRSRSVEYKKSGWKLSPDKKSITFTDKKGIGKLTLKGTWDLWRFDKKQINRVRIVKRADGYYVQFCVAVNVKLNIEHTGEMIGLDVGLKEFYTDSNGCSEPNPRFYRKGEKRLKFCQRRVSRKKKGSSNRRKAVNKLGRQHLKISRQREEHAKRLARCVIQSNDLVAYVRAACRRQDLRVKNLVKNHCLAKSINDAGWYQFRKWLEHFGTKFGRITVAVNPAYTSQKCSDCGEVVKKSLSTRTHTCKCGCQLDRDHNAAINIRNRAISTTGHVGTWVIDPFAKRRRKPIRFRRFSLYCS

SEQ ID NO: 2320 - protein, 362 aa, unknown
  TnpB Polypeptide
LYPTAVQRAQISRNFGCFRYVFNHFLAQRQEQYKETGTSPTRFQQDKILTILKQELPWLKEADSTSLQATLQDLDMAYQNFFRRVKQGEKPGYPRFKSKRAHRQSYKSKCVGTNIKVLEGAVQLPKLGKVKCRISKPVEGRILSATVSQTPSGKYFVALCCTDIDMEPLPSTGAVVGIDMGLKAFAITSDGVSYQNHKYLAKSEKKLAKLQRQLSRKSKGSNRWEKARLQVARLHEHITNQRHDMLHKLSTDLVRNYDLIAIEDLASSNMVKTHKLAKAISDAGWGEFRRQLQYKAAWYGKEVVAIDRFYPSSQLCSACGAQWSGTKDLSVREWTCPQCGAQHDRDINAAKNILNEGLRLLA

SEQ ID NO: 2321 - protein, 383 aa, unknown
  TnpB Polypeptide
MRAYRFRIYPSKTQEKEMQKHLWVSKELWNEMLAFTKEIYNNYQRFPTKRTLREMVKQSGLFSQVGQELVDRLIDALHRKIEMKKNGEKGGFPRFKSFDRMKSLHYPQYETGFWLDKKLKVTPFGEIAIKKHREIKGRIKTLTLKGEASGKWFAIFCVEVPKEIPKENRGAAVGIDLGLKTFATLSNGMKISNPRHLMKHEERLAFISRELSSKKKGSTSRKRAKLKVAKLHEKISNTRADFLHKTSTDLVNNYSFIASEKLATKEMAEQRYGKQINDAGWSMFANMLAYKAEGAGCRVVFVDPRDTSKMCNRCGNIRDDLSLWDRTYACPNCGLSIDRDLNAACNILIRATAGQAGSNACNSLQKERDVAIATSVKQEAHIL

SEQ ID NO: 2322 - protein, 384 aa, unknown
  TnpB Polypeptide
MRTYKFRIYPSKRQEELLNTYLWLAKNLWNELLAHCKQTYEDFGYFPTKNTLQLMVKEYGLYSQTQQEIAHRIYNSVIRVFKLKKKGVKCGFPRFKSFDRMKSLHYPQSTQGFKLYKKLTVTPFGEIAIKKHREIKGRIKTLILKRESSGKWFAVFTAEEEKPTPKENKGEAIGIDLGLRIFATLSNGMRINNPRHFKKYENRLAFIQRKFSRKKKGSTSRKRAKIRVAKLHEKISDCRRDFLHKISTELVNDYSFIASERLASREMAEQNYGKQINDAGWNMFANMLAYKAEGAGCRVVFVDPENTSKMCSRCGNLRKDLSLRDRTYACPECGLTLDRDLNSAVNILTKATPGQGGSNACNSLQKERDVAIATSVKQEAHTYL

SEQ ID NO: 2323 - protein, 346 aa, unknown
  TnpB Polypeptide
MLAFTKEIYNNYEKFPTKKTLREMVKQSGLFSQVGQELVDRLIDALHRKISMKKKGEKGGFPRFKSFDRMKSLHYPQYETGFWLDKKLRVTPFGEISIKKHREIKGRIKTLTLKRECSGKWFAIFTAEEERLLPKENKGGVVGIDLGLKTFATLSNGLKIGNPRHLMKHEDRLAFIQRKFSRKKKGSKNRKRTKHKVSLIHEKIANTRAYFLHKKSTQLVNDYSLLALEKLASQEMSEENYGKQINDAGWNMFANILAYKAEGAGCRIVFVNPENTSRMCNGCGNIRNDLTLWDRIYTCPECGLSIDRDLNSAVNILTKATVGQTGSNVCEAGSPHPLGVGACHRW

SEQ ID NO: 2324 - protein, 380 aa, unknown
  TnpB Polypeptide
MRAYKFRIYPSKKQEKEMQRHLWISKELWNKLLEKTKKKYEKEKKFFTKSELQVMVKENGLYSQTAQGIAHRLHGALKAKVKAKKQGRKWGFPRFKSFDRMKSLHYPQFGFSLDKKLKVTPFGEIAIKKHREVKGSIKTLTLKREPTGKWFAVFCVEEEKKQPKANNGEAVGLDLGLINLVTLSNGKIIKHPHQFRKFEEKLAFVQRKFSKKKKGSKNRKRAKHKVSLIHEQIANTRTDYLHKRANELLSRYSLIALEDLDIPNMAEQGHGKNIYDASWGMFMNILCYKAEETGCRVVFVDPKDTSKLCNNCGTKTEKDLWERVHKCPACGLEMDRDLNSAVNILIKATVGQTGSNACNSLQKERDVAIATSVKQEAHIL

SEQ ID NO: 2325 - protein, 370 aa, Thaumarchaeota sp.
MKIFRAYKTELAPDDAQLAALYRHAGAARFAYNWGLEWKNNVRLFNMLPHPRLKTPTAVDLHRELTTLKKTKLSWMYEVSKCAPQEALRDLDAAFSNFFEHRAGFPNFKSRKRGVGSFTLYGVISVRPGEIHFPRIGWVRLKERGYIPSRAHINSVTVSERARRWYVAVNVVVEESREPITPPGPVVGVDRGLNSLAVVSDGTVLENPRVLRRYERKLKHLQRNLSRKKKGSSNRRKAREALARLHMRVANTRLDAIQKFTTTLANTKPVIVVEDLDVKKMMGNHHLARAIADAAWGEISRQLRYKTLWHRSTLITAERWYPSTKRCSTCGHVKDAMPLEERTFHCEGCGLDIDRDLNAARNLAEWPGVA

SEQ ID NO: 2326 - protein, 502 aa, unknown
  TnpB Polypeptide
MESVRRAVAVELERPPPELYAVEEPYRRIVEEVAAYVAERGTLEKEKYNELYRRFRKQYPLPAQLIQQAINQGVETGRSFLEAKRNGRVHKPHPEARQASIRFAKDSWSYKKTISSTAPVKLALSLPGGRRKVWMKPHRRFWLYWWKTLRREADLASTLVLKRRRNKWYAVFVFDVKPREGPPAEAVAFDVNENSIAVARLNLLATVDAVARWNRRYIDPAVYFTKADFGRLAKRYEAVRNAKLEVKRKYPYAGRDDEEKVQNVTDTREFRKFARRLRERRRKEGRVRQTAREVTKSPAVIVTEELGKNPQEEMIGVEEKRVKKRELRHRVKQTPFRRILRAVEDKAAEAGSVVVYVSPYRNSKACSIHFTLLRDNGSWHTLHCPCGHGVDRDHAAVLNMLRKITPEGAAKAVWWDLRDVKRRLKKGRGLVPKEAVRRRNPLVTWPVAHAVWTSLGAQKASSQWPAVLARAAPMTPAQGADEGGTRAPPRGAGTPARGEEVS

SEQ ID NO: 2327 - protein, 600 aa, unknown
  TnpB Polypeptide
MGKKKKTEETVQPKTTRSDVKQRKELNKDTEFTCVKTSFNSLVENNYLSGGIQEIVLNINKICFLSYQLLNYHFTRIIEENKPLPEITQSLFYQACATVSVMKERKEKIDETDELYISFSHYKENVGELPFRDRMGNLINNLNRQQLTMTENHLKLNFYKRFHKYLEIKTGETRKGVIYKWLKEIYANEYTGKNVFILSMRQWLKYPPTEVNIKIHSSHFVKIYHKILKTFEKYPYSKHIRTFNLLPTKNSFTLSTIEICSSCLKDIIGYFTKTQVPDDFKENKLVYWYEFFKIEKYETKTRKFANTIYTDGKVAVIRLRKPKFEVLKPKDVKKVKYEQYVGIDPGVRSLQTSCNNEGRVLETTTSSYRHDCKMKYACRKREMWYKKWQHYEMWRNIPSFKTTNLQKMRNYFEYVYPNLNTIFQFHLYKNFRGLSFRSYCCGKATMDKLCKSIIDDKKTLVGFGDFSQQHGLVKKHPTAPIQKFKHELRRYCDLIDIDEWGTSKTCNKCFQPIELYKNKIIRKKRDGTHTKARMSLINSVIRCKLNECKLCCMDRDINASKNILFLLQLQKEGKKRPECFNPKNMNNCDTPLWEDKYVVA

SEQ ID NO: 2328 - protein, 367 aa, unknown
  TnpB Polypeptide
MLEFNITNRMAKAVIKTAKNQLKLLKESAQYQFKNLYKRKRSLYKKIQKLKFLLSSSSTSLKQRKLAKLRLFWTQMKLNKVNQLIANGLKLHLTFGTKHLLKNNKRRFLVKRDNQVIYIGDKNETCGNQQFQISFNSKYNRFDYKLRLENQWVSGSDKYISGSFVLKNKEAKVHILKTLFNKKSNPLSYRILKRDDNLYLQMMYRRETSDVTRSHHGVLGVDFNKGFISVSEINSDGKLQSLTRYNYLHRGKATKTKTSMLELVSQLVAQAVRVGKDIVIEDLVSLDSNKKQEKTTSTDYNRMINSLKFGLFKRCLLSKATKEGVSVQIVNPYNTSKIARASYTDRMKLNVHDAASYVIARRFYQYD

SEQ ID NO: 2329 - protein, 312 aa, unknown
  TnpB Polypeptide
LLSKGQCFKLHGFEKVEIKVFTGTDWVWITLPIVSMRKRHMVSTNLGKSPSLIVNYKSCHLSVPFECHPEKVKGAGVVVAVDLGINTTATVSVVSRDGTVIHREFIHPGRDIDRRDKRLKSVSMRAKKTMGKGGKLGIGFCKNTYRKCRNINQQIGHIVSKHITQIAQNYSADAIVFEELKGWKPKGGKKRSNLKQRFHGWLKSLIVDLSQRKWAELGGKTITVIAAYTSKLAYDGSGNVKRDPKNYALATFSSGKRYNCDLNGSYNIAARGWLKLDSRKDYEKRPSKNSGRLPRSWACLCDLWNLNSRKLV

SEQ ID NO: 2330 - protein, 412 aa, unknown
  TnpB Polypeptide
MRSHKVRLKLTKEQERLAWWYSKVSRNFWNLLVDIDKRNNKGEFDEILNKNGNNTYYSKFYNREVYKLNESDYRNLAKFVVAKNCEEESEKWSWYYQPNQSGIYSFISRELVKIRKQNKGSLNFRSVDKIDPNFNVRCDVSSNQKRSSRIYLKDNGKLQIPTIGDVNFGSIRSNFNLSCKKQVANISFDGKYWYLSYTEDIKNKVTNLPDYTDGIGIDLGIKTLATVSDGTTVPNIKTFRRVRILNKRLKRLQRKVSRKYRINKCNKHNKTKNIIKLERQIKLIHRSIRNIRINHIRKFVSKLVKKQPQYIAIEDLNVKGMMKNKYLSKDISNCSFYTIREYLIRKATERRIAVRLVDRFYPSSKTCSNCGSYKKDLKLNQRVYHCNNCQEKIDRDINASLNIAKTDRYVLV

SEQ ID NO: 2331 - protein, 451 aa, unknown
  TnpB Polypeptide
LATKRYTFRLYSTKTQENKLLEARRYHAYLYNACIAHRNFEWKANKKTVTYLEQQNCLPAFKKDWVDFAYLHSQALQATVKRVDLAYNSFFQGLRGKPKFKLVRNYSGWTYPALSGWKVNSDGLHGTVTLNDLGITLRMRGQAKSWGVPTTLTIVYKPSQKQWFASFTVDVPTAETKSGAHSGLRYESIVAFDLGTETALTLYDGERFEELSNPRFTQKSETLVKQASKALRRKRAPNRTKKVKASRRWKKNRKLVSQLQRKVSNQRKDWQHKVTSEIASRYDIGVTEQLNTKAMTRKAKKGSKCKKQKAGLNKSILSVGFGAINTMIAYKIEQKGGVTLMLPTKKIKPSQRCPHCGAVHKEWAELSNRHHVCTDCGFEVPRDRGSVMVMYNVALNQQPGLGTSLVDCRCPSSTDSTKKRKHTGSMKQLGQMKRQKSCSLVDGNPVRLATG

SEQ ID NO: 2332 - protein, 419 aa, Cyanobacteria sp.
MYKTQKNQIRGLSKSEFTALQTLCRLSKNLYNVGLYQIRQFFFLENSFLRYESNYHLCKTNENYKLLNTDIAQQTLKVADRSFRSFFNLIKKAKSGNYQFNQIALPRYLKKDGYFPLIITRIVVKDGFFKVPMSREFKKEYGEVKIPFPQRLNPDKLKEVRIHPKYNCQFFEVEFITEEEPQIVEFKSDNALSIDFGINNLATCVSTNGASFIIDGRRLKSYNQWYNKENARLQSIKDKQGMKGLTKRQGQLLLKRNNQVRDYLNKTAKYIIENCLRLDIGTLIVGVNKGWKQEAHIGSRNNQNFVQIPHYSLLQKLKALCENYGIQYIEQEESYTSKASALDNDEIPTYNPDISTKHTFSGKRVKRGLYRSKEGITINSDSNGAWNIGRKSKHKGFAQVSSGLLTSPLRISNLNASLS

SEQ ID NO: 2333 - protein, 415 aa, unknown
  TnpB Polypeptide
LAARGQCASIRRGRSRPWSGACRLRWSQARQERGKSKGRVEFPRRKRKGHCRDSFRLRNKKGRSATSCIRVGQGHKRSVTLPTIGTVRVHDDTRRLRRLLRPVDHVDPDTGQMVQAARAKVLFATIGRHGDRWYVSLNVQAPDLHPQRRHRPRAFDDHAGWVGLDRGLAAFVVAATADGTEVGRFEAPKPLTRRLRRLRRRCRALSRAQPRSRNRVGAARRLSRQHARIADIRRSFLHEVSSQLVQTHDRLCLEDLPVVNLIRNKHLSRAIGDAGWAEFARQLRYKAAWLDGELVVCDRWLPSTKTCSRCGQVRQQMGLGERTFRCERCGLVMDRDRNAAANLAAWAEAVSRTVTQAPDRQAGGRVTTPLEGTALAIAAAMVEPASVKGEPMPMPPWREPRTAEKAAAGQPSSRG

SEQ ID NO: 2334 - protein, 428 aa, Micromonospora sp.
VLEVNTWRRRRQDAPLTSYQELCRELSASGPGTFGELDSTGGRSVLRRFSDAWFAAAGRRNAGDVSARFPRRRRGLVPVRWYHGTFTLDGHRVRIPTARGTGPLWVRLARKVPYPVEQVRSITLLCEGGRLFLDVTAEVPITVYPPGEEPDPTRVAGVDVGIIHPYAVAGPGGEALLVSGRAIRAEHRMHLADTKARQRAAARRAPNPGQRGSRRWRKYRVRVRRVEGRHRRRVRQAQHEAARTVIGWAVDQRVGMLKVGDPRGVLDLSAGRRHNLRLRQWQIGRLLQILTDKAALAGITVHLVDERGTSSTCPACRKRVSKPRGRTLSCPHCQFSGHRDVVAAASIATRTPGGGSTTPTAVVLPGVVTHRRVGRHLPGAGRSRRDPRRPPGDVRVRMARCGPPHPLVGSRSPKQRGSTTTHRTPGER

SEQ ID NO: 2335 - protein, 497 aa, Streptomyces sp.
VADRGARGHARPRPFVRPARSEVLGLVRSQPVQGLHLPCTARGVPAPEVADAHAVVVVVLRGIGRRRIGEHRAPIHRHPVETSRKAAGGRLVIRAYKFLLRPTAGQEQALAEMLADHRSLYNGALQERRDAWRHASKTTVRYGDQSAQLKEIRAFDPEWQGRWSFSSQQATLRRLDQAFAAFFRRVRAGQAPGYPRFKGAGHFDTVTFPRDGDGCRWNSTPHDAQTRLRLQGVGHVRVHQHRPVQGRVKTISMKREGRRWYAVLVCDQVPAEPLPSTGRSVGIDLGVTHFLTTSGGEHVANPRFLQAMAEELVAAQRHLATFPRRTRQRTKRHRAAARKVAKLHAKIRRQRADFHHKAARALVTGNDVIAHERLNTAGMTRSPAPRPDPDKDGAFLLNGAAAKAGLIRGILDAGWGQFLGILANKAESAGRRVIPVDPRNTSITCPPSRGGCGHVDKSNHVTQAAFRCTACGFAANADHVGAANVLDRAGLVLCGVV

SEQ ID NO: 2336 - protein, 415 aa, Richelia sp.
LPYNFLRNVYTRCGSIRIGGNTMLVFEFKAYGKLKQYSAVNEAIRTAQFVRNSCIRLWMDNKGTGKNDLQKYCSVLAKQFSFANELNSMARQASAERAWSSISRFYENCKKGVVSKKAENAVLGSPQVERFSKTGFPKFQKNCRSVEYKTTGWKLASDRKSITFSDKKGIGRLKLKGTRDLHFFQINQIKRVRLVKRADGVYVQFCIDSERREDIKPTGRTVGLDVGLKEYYTDSNGEVVKNPTFLRKGEKVLKRAQRRVSKKVKGSINKGKARYILGKRHLKISRQRKDHAVKLARCVVQSNDLIAYEDLRIKNMVKNHCLAKSINDASWYQFRVWIEYFGKVFQRVTVAVNPQYTSQNCSSCGEVVKKTLSTRTHVCKCGCVLDRDENAAINILHRGLSTVGHTGTTALDGFP

SEQ ID NO: 2337 - protein, 443 aa, Streptomyces sp.
MLSGRRYLLDLSAEQEEMCEEFGNICRSVWNTGLEQRREYRRRGAWMNYVPQAAELAEAKREHEWLKAAPSHVLQQTLRDLDRACRDHGTFRVRWRSKARWSPSFRFPAGNLVTVERLGRKWGRAKLPKLGGVRFRWSRPLGGEIRSATVSRKAGRWYVSFLVDDQATTPERHAMPDTAVGIDRGVKTAAVTSDGDFHDREFITAGETLRYRRLQQRLARAKKGSANRAKVRARMNRIMGRVTDRRADFCAQVAQQITAKNATVVLEDLKTRNMSASASGTIDQPGTRVARKRGLNRAILDKGWHRLELALTHAARYTGSVVVKVNPAYTSQRCSACGFVTEGNRESQSVFACKAAGCGHRAHADVNAAINIKNAAGHAVSACGDLGASRSVKQEPVSRATGRTPLGESSPFRARRKSSRMGPAHGGIRPRGQGCGDPARGMG

SEQ ID NO: 2338 - protein, 471 aa, unknown
  TnpB Polypeptide
MINVKGFRKGERQMATVSYGLKIINAYPVFDATLRIYRAAVRYLMEIAELRYEELLPITGYVSARGKQVTSQQARQQYLERLVHATADRPDVPYKKFDREFYKFPSYLRRDAINTAIGIVFAYRSALKNWEENGCKGRRPFLNRGRNEMPCFYRKNTYFQEGTSIRLKLYNGHDWIWQIVTVRNTDWQYVQKNLSGWKASAPVLTKRGHRYELRVTYTLANKNFPKYEKDNKVSHVIGVDLGINTDAVCVAMQKDGTVTGQRFLNSPVEKDRMDGLLQTIKKAQQHGNHKTPRLWRLVDHYNTAIAIRTATAILAYARECGAQVIVFEHLEMKRKKRGAKKQRLSLWRKREIQKRVTEIAARKGIRISYICARNTSRLAYDGSGKVLRGREAGFPTNELCRFTTGKVYNCDLSAAKNIAARYYIRVLLKSVSAKKLLLVQAKVPELSRRTRCVLATLIRLSAVLGTSKAGH

SEQ ID NO: 2339 - protein, 339 aa, unknown
  TnpB Polypeptide
VATRRITYRLYPSVQAERKLHLARRMHCDLYNAAIANRRTQYKHFGHGVDYFEQQNSLREFKEVWPEYKELGSHTLQATLKRVDFAYQRFFKDLAKYPRFKAKRRYRGWTYPDKAGWKVHSNMGVNGHLELRDLKLSIHMRGKARTWGKPTTCTIIWINNQWYASITVNCVPERQTGQGSIGLDFGCKVAIATSDGEFIEAPKFQAKAAEKVKELSKQLRRKRRPEKRKTKASRRWKKTQSQIRKVNRQVANQRQDWSHKVAAQIVSDNSLVATEKLNLKGMTRKGKGKRKRQKAGLNRSLLDVAIGMTKDAIKYKVIEAGGVYKERPNTKIKAYPTMR

SEQ ID NO: 2340 - protein, 380 aa, unknown
  TnpB Polypeptide
MKKTFKFRIYPSKSIITKLNRTLELCRFVYNQMLGFRINEYRENKKNYTTFDMKRWLIKHKEEAPELLETIYSLVLYNICDRVNAAYQGFFRRLKKMNKKSGFPRYQGTGRYNSFTYSCGKGFKIENDKLHLSKIGWIKIKQHRSIEGKIKQLTISRSSTNKWYACFSCEVDIKPLRKRKRIESIKLGISTFATLSDGNTIDYPRYYEKAQSSIAKIQQRLSKIKKKSKRYKKNKTAFTKKHERIRNKRHDFLHKQSRKIVDRYGIIILENLNVKKMMAKRWMSKQISDASWSTFIRYVTYKAEWAGRSVIMINPAYTSQTCSKCGEIVEKTLKERIHRCSCGLTMDRDVNAAINIKRLGIQSLAKTTLMVNPKSSRILA

SEQ ID NO: 2341 - protein, 401 aa, Photorhabdus sp.
MAGMKRLQAFKFQLRPNGQQERDMRRFAGACRFVFNRALAHQNENSESGNKYIPYPKMASWLIAWKSDTETPWLKDAPSQPLQQSLKDLERAYKNCFQKRAAFPRFKKRGCHDAFRYPQGVKLDQANSRIFLPRLGWLRYHSSREVISEVKNVTVSQSCGRWYASLQTEYETTEPRHESSSMVGLDAGVAKLATLSDGTVYEPVNSFKTSLHKLARLQRQLSRKVKFSANWQKQKRKIQKLHAHIANIRKDYLHKVTTTISKNHAMIVMEDLKVRNLSKSAKGTTEQPGRNVRAKSGLNRAILDQGWYEMRRQLEYKQLWRGGQVLAIAPAYTSQQCACCGHTAKENRQSQNKFECQACGYTANADINGTRNILAAGHAVLACGGRVQSDRPLKQEPTEMI

SEQ ID NO: 2342 - protein, 393 aa, unknown
  TnpB Polypeptide
VEIKKQTQIDAEKIYSKSRVGRWRQWVLKAYKYRIYPNSEQRIQIAKTFGCCRFVYNQTLAYRKEIYEKEKKSVSKTDCNNYCNRELKKDYEWLKEIDKFALTNAIYNMDTAYQKFFKEHAGYPKFKSKHDNHKSYTTNFTNGNIAVDFETGKIKLPKLKAVKARLHRGYSGQIKSATVSQVSSGKYYVSILVETEHKELAHTNHNIGIDLGIKDLCITSDGKVYENLKIIKKYEKQLVKLQRQLSHKGKRSKNYYKTKKKIALCHEKIRNIRKDYLHKVSHEIISENQVIVSENLQIKNMVKNHHLAKAISDVSWYELTRQLEYKAKWNGRKYIKIDTFYASSQLCSVCGYQNPDTKDLSVRTWICPKCGAEHDRDINAAKNILTEGLRQIA

SEQ ID NO: 2343 - protein, 377 aa, unknown
  TnpB Polypeptide
MKTVNKSYKYRIYPNKEQQDILEFNMGSARFVFNQVKSIYELYRKQLAERGYTLYANRKLFNIILNDLKRHHPFLKEANSTVLQKAYDDLIFAYKMVGKAKHGWVKFKSRKNPVQSFRTLNCKIIDGKLKLPKIKPLIRMKYSRKVQGDILTVTIRRNNSNQYFASINVKNSPVKHLKKTNRKVGIDLGLKDLATFNNGFKTGKIHLKEIDNKIKRQNQILSKKVKNGYNWIKAKTKLNQLYQKKHNIINDFLHKITTKIVREFDEIYVGNVNSQLGLKNRYLARTTSDQHWYEFKRQLEYKSDWYSKHFEVVDEKYTSKTCSNCRYVTGSLDLSIREWICPECGMLHDRDVNAAQNILTVGTTGLAFGKTNKELVD

SEQ ID NO: 2344 - protein, 410 aa, unknown
  TnpB Polypeptide
MTRRVQRSYEYRWYPTDEQAAELARTFGCVRLVYIKALEARTAAWQAEQRRLGYVETSALLTGWKRINELAFLNDVSSVPLQQALRHLQAAFAAFWNKSAGYPRFKAKKRSRASAEYTRSAFRYRDGQLTLAKLEGPLAIVWSRPLPRGAEPSTVTVSRDAAGRWFVTLLVKDAIAPPPPAIHAETGEVQVVGLDAGLTSLVTLSTGEKLANPRHERRDRQRLTKAQRGLARKQPGSRNWERARVKVARVHIRISDRRRDHLHQLTARLVRENQAVVIEDLHVRGMTANHTLARAISDAAWSELRRQLEYKCAWYGRDLVVVDRWLPSSKTCSVCGRLAVAVPLAVRAWACQACGAQHDRDVNAAKNILAAGLAVAACGAGVRPQRESSRKGRPATKQETQWTTTGIPRI

SEQ ID NO: 2345 - protein, 456 aa, unknown
  TnpB Polypeptide
LSLGLFIYTVSAMAIIRSDRLRLHADSPAQRDALAETLALYRRLVRDLMTVAFTHWPTVGPAKGNEAVAVIEGLVHPTSKRPSVRYRYFQNRYYKFPSYLRRVAIMDAVGQVRSFMSRYGDWLDGQRRHAHSRPPRLTASTSTFPSLYGGQCIKLNEAATQAFIKVRYRNDWVWMSFRLSGKLRYRGRGTAKSPLLTFNGKQWGLSLPEQFTPATPVRTPTRVLAVDVGINTAATWAVVDDQGTVHARGFLRRSDKDREHRLMQRIRSRARAHTRHGTRLPAGFCGRDQLRLKRLADNQAHQISRQLINLALAHDCEAVVAENLKGWRPKAGRRRSPMKARFHRWFHRRLVDRVQSKAQEAGLRSVLVYARGTSSQAFDGSGPVKRDASNYSLCTFASSKRYHADLNAAYNIAARGLVYFQGGRRKPTARAGQQKSARTPGTPVTLSVLWSTANAA

SEQ ID NO: 2346 - protein, 399 aa, unknown
  TnpB Polypeptide
MIRSYKFRMYPTSKQEDLLRAMLDDHRELYDAALQERRDAWKRSRIGIKYYGQTAQLSDIRAKDPDFARWSFTSQMATLRRLDRAFQAFFRRIKAGEKPGYPRFKGAGYFDTVVHRNGDGAKWDSHAAQKRVYFKGVGHVKVNQHRPVTGRVKTVSVKREGRQWYVVLSAEQELPAPMPKTGAVVGIDLATGPNGLAYTSLGERIDNPAYAHAAAAKQADAHRGVARTKLGSNRRRKAEKRLADVRRKVRNQRNDYLHKTAHRLVAAYDIIVAEKLNIADMTRRAAPRPDGTGGYLPNGGSSKTGLNRSILDAGWGIFLNMISAKAESAGRQFIQVNPAYTSRTCSECGHRDAANRNGKVFLCLSCGHRDDADINAAVNILRAGLALRDTAQSRVTRSL

SEQ ID NO: 2347 - protein, 489 aa, Bacillus sp.
MEIATEKEVNKNYITQQIWIKKGHRMYGYFQNMTQNAKNMFNTTNFYIRQVYTGLTSNKALQPLQIEVLDTITNNIDKMNDSQLLAYHKRVEKQKSKPKDKQKEIKCHLFEVPFKESPYVDYNFLDSLFKKIAQNDYRSLPTQSSQGIMQTVFQNWKSFYASLKDYKQNPTKYKAKPKIPKYSRAKEKEVLFTNQDCVIKNNKFLKFPKTKQQLNIGKLGLSNGKLKQVRVIPKYNQYVVELVMDVPSEPIEKEDNGRYMSIDLGNDNLATIVTNTGRKPTLIKGKSVKSINQYYNKMKAYFLGIIRHGKQTNEGPFTTKRLEHLHQNRFLKIKDVFHKASNIVVKLALEENIHTIIIGQNKGWKQEVNIGKRNNQTFVHIPHRLFIEMVKYKAEQQGIQVYVSEESYTSKASFLDGDEIPTYGENNEKKIFSGRRIKRGLYRSKHGLLINADVNGAANIMKKAVCRLKKDSFFNIETINLWNPQSIII

SEQ ID NO: 2348 - protein, 487 aa, Bacillus sp.
MSKKENEQAITYTGIILNPCMNASMILDELMRKFQSAKRYLRERIFDGLDRKQAVAKAKPLFLNNSRYMRDAFLDAESSISSQTELLPLYIEQYKTSIQKIEKKIEKLQKSTLSNKKDLILNKQSRIKKLTKKMNYYLFHLQNGSIPKVIDGTKKRLTLLKKHKITKQEWMDSRTNALFSRGETSKGGNENIKLCYIQDRSVEMNVLNPLSSKRNDRLCFVVQFPEKYIMTILTNLSIGKAYSVRILREDGKYYVHLTFIQKLNSSYDFSKGCAGMDINPDNLAVTIVYPNGNFRTSKVFWMKDVNSVSSTKRDWMIGNAVTSAIDWVKSNGIEVLAIEDLYFKNDLSKNTKFNRMSSNFVYRKIITTIISKCIKEDVSLANVPAYYSSLIGRVKYQKTYGLSIHQSAALVLARRAMGFNEKIPNQLMSVLFAVEAKKGHQVSDLFKHWKKVQTWISGIKDQVYHSHEQYKHWFIDDFVNYANMQEA

SEQ ID NO: 2349 - protein, 439 aa, Calothrix sp.
MFGVVPMRKQALKVRLYPSDKQIQVLDQHFGCARWWWNYGLNQCIETYKATGKGLSQSGLNSMLPKLKKDKETEWLSECYSQVLQSVSLNLSRAYQNFFEGRAKYPRFKSYHHRQSIQYPQKVKQVNDCLKFPGKVGIVKAKIHRPLDGTIKTVTVSKCPSGKYYASVLMEYDGDNPTPTDSLHKSGNPPMQLSSTTDGKVVGIDLGIKDFAITYDGDKTSKYANPKHLYKYQKKLAVKQRIAARKEKGSNRKNKANKITARVYEQISNVRQDYLHKLSRKIVDNNQVVVVENLNVKGMVRNHKLAKAISDTSWGTFVNFLSYKLEKEGKVLVEINRWFPSSKLCSNCHYQIRDLPLEIRAWTCPSCGTHHHRDGNAAQNIRAEGIRLLALSAAEMSSSGMGEANASGEDVRPTRGRKSKMRQSSVKLEANTHPLGECG

SEQ ID NO: 2350 - protein, 478 aa, Janthinobacterium sp.
MHMVVFAIHFYQARLEVGANLREHPAQTFDGIAIEHFAAIFRYKDQMNMHLKNAVSTFTNFVVITHRPKYNRSMKRLQAFKFELQPNGEQQRLMRRFSGSCRFVFNKALAMQKALYEQGEKKLGYAGLCKALTGWRNDPDTLWLGDAPVHPLQQTLKDLERAYTNFFAKRADFPRFKKKGMGDVFRYPDAKQFKIDQGNSRLFLPKLGWVRYRNSRDIVGVAKNITVSGCGGKWFASIQTEREVEQPLPTATSAIGIDVGIARFATMSDETFIAPLGSFKKHQQRLARYQRRMSRKVKFSNNWKKAKARVQKIHTGIANARKDFLHKTTTTISQNHALVCIEDLQVRNMSRSSKGTSEQPGKMVKQKSGLNRAILDQGWGEFRRQLDYKVAWNGGMLLAVPPHNTSRTCPCCGHISKDNRQTQAKFLCVDCGYENNADVVGAINVLERGYRLLACGESVQSGRSVKQEPTKATQAVFV

SEQ ID NO: 2351 - protein, 372 aa, Methanococcoides sp.
MLKAYKYRLYPSESQIEILVKHIGACRFTYNWALEQKNKAYEVDKKYLSRFELQHRLVHDLKPNNEWLKEVNSQSLLNTLINLESAFTRFFREKKGFPNFKSRKNPVQSFQIPQHYSVDFETDTIKLPKLKQPIKAKLHRKFEGKLKTATVSITPTGKYYISILVDDGKELPEKEMFDEKSTLGIDVGLTHFAILSNGEKIDNPKHLRNSMDRMKILQKRTSKKQKGSKNRNKARLAVSTLHEKIRNQRTDFLHKTSYKLISENQAIAVETLNISGMLKNHCLAQAIGDVSWSVFFRQLEYKAEQYGKTLLKIGQFEPSSKLCNVCGFHNGKMTLKDRYWSCPECNTEHDRDINAAINIKKFALQNQNLLNI

SEQ ID NO: 2352 - protein, 548 aa, unknown
  TnpB Polypeptide
MGGGGMECVRRAVAVEVENPPPELSAVEEQYRRIVEEVAAYVAERGRLEREKYSEIYRRFRELYPLPAQLIQQAMNQGVEIGKSFLALKRNGRVHRPRPEVGRVSIRFAKDSRSYKKAISSVAPVRLGLSLPGGGREIWIKPHKRFWLYWWRVLRKEAELASTLILKRRRNKWYAVFVFDVAPREEPPAGVVAFDVNENSVAVARLSLLATVDAVAQWNRQYLDPAVYSIRTDFGRLAKRYEAVRNAKLEELKRKYPFAGRDEDERRQNVTDTREFRKFVKRLRGEKRKEGRIKQVAREVTKCPAVIIAEELGKNPQEEMIGVEKKKVGKRELRHRIKQTPFRKLIGTVEDKAAEVGSVVFYVSSFRNSRVCPIHFARLEDGGDWHVLHCPRGHVVDRDAAAVLNMLWKSTPTGWVKGVWWDVKETRKRLKKGIVPREAVGKANPIIPRPIIHAAWVSLRSLKAGGKWPAVLARAAPMTPAQGADEDGARAPPRPRGTTALQGGVEVSACRAYTPGAPPWRAIGGISPPRRLWRGRPSAPPPASCRRL

SEQ ID NO: 2353 - protein, 396 aa, Acidobacteria sp.
VRAYKYKLRTSKRIAEAFQHTLGLCCDLYNAGLQERRDAYKLGRKSISYAQQCVELTDVRESDAAVASIYSQVTQDALRRLNNAFLAFFRRVKAKQTAGYPRFRSKSRYGSFTYPQSGFRLEGDKLHLAKIGSVRLRLSRPVEGKIKTCTIKRQADGWFVIFTAETEPELLLERCEQVGIDVGLLSFATLSDGTEIDNPRWYREAQARLRRAQRKVARRKKGSHRRRKADQFFPQQAATFEKQNSVTLSQQAARNVPAEIQLLARTHLHIANQRRDFQHKISRWLVNNYQVIAVEDLNVKGLAGGMLAKSVNDAGWSAFFNMLTYKAEDAGRVLKKVNPNGTSQTCVCGASTPKRLSQRWHQCWSCGLSANRDHVSAQVILQRAGQSLLAVTQPLG

SEQ ID NO: 2354 - protein, 394 aa, unknown
  TnpB Polypeptide
MARCRTFRYLLQPTSRQKAALALLLRLQCELYNAALEERRGAWRWGRRSISYIDQTKTLTALREVRPEVLASGVTVCRGTLQRLDRAFSAFYRRCREGQRPGYPRFKSARRFDSLQWEDRSGWRLDEEARRLWLLGIGHVKVRQHRSLRGVPKAITVKREGRRWFVSVRCTEVPARPLPPTGKEVGIDLGICALVATSDGELVTEGRFAKRAAGKLACAQRAFSQKRRGSKRRERAAVAVGRAHRKIANQRRDLHHQLSRRLVDAYDFIVVEDLRIAQMVRRPRPRPDGTGGFLGASAKRGLNRSICDAGWGQLVAFLGYKAEEAGRQVLVINPRYSSLTCSSCGHRAQGNRLTQAVFSCQACGHGAHADVNAAVNILRAGRARQASACEGSGN

SEQ ID NO: 2355 - protein, 283 aa, Thaumarchaeota sp.
LTGSIHITSSIQLPTFGAVKLKERSYLPHGHHVLSATIAGKAGRWFVSVGVRKRIKVQKNKGPIVGVDFNVKDNVVSDGTVFENPKKLVGTARRLKRLQKAIERKMKGSNNRWKARLRYQRLNMRIADARKDGLHKMTTWLARTKSVVVMEDLAVRNLTKNHRLAGAILNGAPAELRRQLEYKTKWYGSRLVVAPRNFPSTKMCSRCHAVKEEMPLSERVYTCEVCGLVMSRDLNAAKNLEWYATVAGSSPETLNAFRRQEVTANLAVPAVITGGSVYGHKRP

SEQ ID NO: 2356 - protein, 443 aa, Escherichia sp.
  misc_feature (365)..(410): Xaa can be any naturally occurring amino acid
VKRLQAFKFQLRPGGQQEHEMRRFAGACRFVFNRALALQNENHEAGNKYIPYGKMASWLVEWKNATGTQWLKDSPSQPLQQSLKDLERAYKNFFQKRAAFPRFKKRGQNDAFRYPQGVKLDQENSRIFLPKLGWMRYRNSRQVTGVVKNVTVSQSCGKWYISIQTESEVSTPVHPSASMVGLDAGVAKLATLSDGTVFEPVNSFQKKQKTLARLQRQLSRKVKFSNNWQKQKRKIQRLHSRIANIRRDYLHKVTTTVSKKHAMIVIEDLKVSNMSKSAAGTVSQPGRNVRAKSGLNRSVLDQGWYEMRRQLEYKQLWRGGQVLAVPPAYTSQRCACCGHTAKENRLSQSQFRCQVCGYTANADVXXXXXXXXXXXXXXXXXXXXXXXXXXXXXXXXXXXXXXXXXXXXXXVLWSYSERKSPVTKSIQMPGMWIYSERRCKWRS

SEQ ID NO: 2357 - protein, 369 aa, Kistimonas sp.
MTHDEDYVQAMLRLQAYKFELRPDGQQERDMCRFAGSCRFVFNRALALQKELYEQSEEKLGYAGLCKRLTGWRNSLDIPWLADAPVHPLQQALKDLERAYSNFFAKRAAFPRFKKKFQNSSFRYPDPKQIKLDQANSRIRLPKLGWIRYRNSRSAPGQLSNVTVSQSCGKWFISIQTRREVDQPVPQGGAIGIDMGITRFARLSDGQFYDPLDSFGRHQVRLCEAQRAMSRKTKFSNNWKKAKARIQKIHSRISTARRDYLHKTSTTISKNHVMVCIEDLQVSNMSRSAAGGVDKPGKNLQAKSGLNKSILDQGWFELRRQLDYKLAWNGGHLVAVWPRNTSRTCPECKRCIRRQPQDTSAVQVCGMRL

SEQ ID NO: 2358 - protein, 432 aa, Moorea sp.
MRAAYQYRLRLTKSQEAEIEIWLDMLRHQYNFLLADRFNWYEQNRCSINSCPLVCHLPELRNNPDYFSQKKTLPRLKQDRPWYKVVQSQVLQDCVKRVDIAFKRFLKGDINGKKSGRPRFKAKNRYKSFTFPSLSNNPISGNVLTLPKFGKVKMIYHRPIPEGFKIKTATITRKADGYYVTLSIQNDSVPDIIPVDSVSNPIGIDMGLKSFLVKSDGSEVPIPQYYKKAQKRLKKIQKAVSRSKKGSNNRKKAALKLGKAHKKVADTRKDFHFKTVKELLDSHDLVAHEKLNIKGLAKTKMAKSILDAGWGQFLSILSVKAENAGLIAKGVNPKNTSQNCSNCGTKVPKKLKDRIHSCPHCGYVANRDVNAAINILNLAVGHSVSSKACRATEGIPGVGKKPALSLSGQRREYVTSIDSSTSGSAIGTITNQ

SEQ ID NO: 2359 - protein, 397 aa, Aphanothece sp.
MFVLEFKVEGQPKQYQAIDNAIRTSQFIRNKCLRYWMDNKGVDKYDLSSYCRVLAHDFKFADELNSQARQASAERAWSSISRFFDNCKKKIPGKKGYPQFKKFSRSVEYKTTGWKLLNPKTINFSDKKGIGTLKLKGTWDLGYFQESDIKRIRLVRRADGYYCQFVLSCEVKEDVKPSGKCIGLDVGLTCFYTDHEGNKIDNPKFLRKSQKRLKRLQRRLSKKKKGSSNRQKARARLAKVHLKVSRQRKDFAVKLARCVVHSNDVIAYEDLRIKNLVKNHCLAYSINDAAWYQFREWLEYFGVKFGKITIAVPPQYTSQNCSNCGETIKKSLSTRTHQCKCGCVLDRDENAAINILKKGLSTVGHTGSKAWGEKASTLMEEILSKQTISVNQESTRL

SEQ ID NO: 2360 - protein, 398 aa, Geobacillus sp.
LFVTRVEQHQIKRTHPLWQMCDNLCFKSKNLYNYANYIIRQEFVNHHKWVRYNSLDKMLKQEAVYKELPAQTSQQILRLLDKNWKSFFQAMKEWSKNNKYLGKPKLPKYKKKNGRNIVIFTNQQCKMKDGYIKFPKTDLKLKTKVAEGLQQVRIIPKGSIYIIEIVYKKEIPDMIHESNRVVGIDLGLDNFATMVNNIGETPIVMNGKGIKSINQYYNKQKAYFQSILKKQNGLDWSKRLERLTLKRNNKMKDFMHKASRYVVNWCVERRIDTVIIGKNNHWKQEIHLGKRLNQSFVQIPYDMFIQQLQYKCEEVGIKVILTDESYTSGTSFLDGETPTKENYDKSRRIKRGLFKSNTGILINADVNAAYQIIKKVSPNAFANGVEGVGLHPVKLNVA

SEQ ID NO: 2361 - protein, 377 aa, unknown
  TnpB Polypeptide
MIKSYKIRIFPTKDQEQLIYKHIGCCRFIWNYMLDLQNTRYKNKEKYLSAFDMIKLLTPLKKQKEYEWLNEVSNKSLCNICRDLDKAFQNLFKKISKHPKFKSKKASRLAYPLRCDGVYFKSSNTLYIEKLGKVKCKTDFNFPLGRDIKITNPRLINQNGKWLVCFGMESENQASTLTDKPMGIDLGVKELMVVAYGDEEIIFHNINKSKKMRLLEKRKKHTERTISRKYRTNNSYEKTNNIIKEENKLRKLCAKQTNIRNNYIHQCTHTLVSLLPSRVVMEDLNVSGMMKNKHLSKTIMEAKFYEIIRQMQYKCEWLGIPFLQVDRFYPSSKTCSRCGTVKHNLKLKDRIFTCESCGLTIDRDYNASLNLQRYTIQ

SEQ ID NO: 2362 - protein, 384 aa, unknown
  TnpB Polypeptide
MIRNFQYRIYPTGKQKRQMESVLIACMRLWNYFLEQRDTAYKTDKTSISYFAQMKEIPKLAIKDPSIKEVYSQTLQDVPKRLDKAFQAFFRRVKVGETPGFPRFKNRDRYNSFTYPQNNGSFKLAEEGKIYLSKIGHVKIEYHREAKGTWKTCTVKRTPIGKWYVVISSELPDVAVEKSIKPAVGIDLGLKEFAVMSDGSKIKRARFFKAEEDALAKAQRKFDKQKKGSPARHKTRKIVARIHERITNKRKNFTHQNSRKIVNKYGTICLEDLNVQNMLQKSTILVDGQQLSAKPTHRSINDVSWNEFVRQLKYKAEEAGSSVILVDPKNTTKMCSVCGKLVNKDLSDREHNCSCGHSEDRDLNASKNILAVGLHSLGVLKKAS

SEQ ID NO: 2363 - protein, 404 aa, unknown
  TnpB Polypeptide
MRKVVHGEVWFDEETKVQIFHFMKLQCSAMRTAYNHKTLPVKDLRDLITHKYPELLDGLRRDAILKAEMLNQDNACFGSKHLFKTRSTNLISKQEFNLRRNNQLYCRGDKSRQGNRNIRFKQDNTIITLNLAKKTSFTGKAYFPPKFRNFDKTCYDARLIYDLDKDQFRIILSYKTETILPIYKTETILTIITSPQNGVLGVDMNPDCVAVAELDYNGNIKKHLNLNAQRLPFARADKRQSDINLLAKLIVDLALETVKPIVIESLFFDTKRTKARPLYKKFNRMRHNFTYRKLSNAVLSRAYKNQVKVFEVNPAYTSLLGIINYQEKYSLNRHTASAVAIGRRGMGFKERLTASTTPITKLPKSYFNKRKNKPVPTTGIIIASSTQEHFLTEKSYNWIKTFIK

SEQ ID NO: 2364 - protein, 387 aa, Bacillus sp.
MLVNKAYKFRIYPNKNQEILIAKTIGCSRFIFNYFLAEWNATYKDVGKGLSYSSCSGKLTQLKKELPWLKEVDSHSLQSSLKHLADSFHRFFKKQNNAPKFKNKTNKIQSYTTNIEKKNQLPNVSIVGSRMKLPKLGWVRFTKSREVEGRILNATIKRNASGKFFVSILTESESLEIKKTGSSVGVDVGLKDFAILSTGEVFVNPKWFRILEKKLTNAQRILSRRKELALKNNRRLDESKNYQKQKRKVAHIHEKITNSRTDYLQKISTHIIKNHDVVGVEDLQVSNMLKNSKLSKAISEVSWYQFRTMLEYKTKWYGKEIVTVSKNFPSSQLCSCCKYQNKAVKDLKLREWDCPSCGTHHDRDINASINLKNEAIRLLTVGTTGIA

SEQ ID NO: 2365 - protein, 393 aa, Deinococcus sp.
VAHIESITLKAFRYRLYPTKAQETALDTTLVLCQRLYNGMLEERRGAYRKAGKSLTAYDQMKALPEVKAALPEYAGVNAQVLQDVAKRLDKSFKGFFRRVKAGQKAGYPRFRSKDRYDSFTYPQPSQNSVSGDGKHVYLPKIGNVRIKLHRPFCGKLKTLAVKREGREWYAILTCEVPRSEALPQTGSQVGIDVGTTWFYVTSDGEFCKNHRLFQRSSKKLRVAQRSLARKPNKRSNRRRKAKERVAKLYRKTARQRLQLHHEEARKLVTAHDLICHEDLNVKGMTRGNLGKQIHDVAWGQFFQILAAKAEEAGRRVIAVDPRYTSQRCRVCGHTERGNRTGQANFRCLSCGHSENADLNAAQNILSKGLAFVAQRISTETACHEKPRPLGLG

SEQ ID NO: 2366 - protein, 406 aa, Kitasatospora sp.
MAATHVKRAFKYRFYPTDAQAAELSRTFGCVRKVYNMALQARTEAWTLRRERVNYNATSAMLTGWKKAEELAYLSEVSSVPLQQALRHLQGAFANFWLKRAKYPTFKSRKKSRKSAEYTSSAFRFRDGRLTLAKMSDPLDIVWSRPLPEGSVPSMVTVSQDAAGRWFVSVLCEDRPSMPAAVNAAVGVDAGVTSLVTLSTGEKVANPRHERRDRERLAKVQRDLARKAKGSNNREKVRIKVGRVYARIADRRRDFLHRLTTRLVRESQTIVIEDLSVRNMLGSRKLSRAISDSSWTEMRSMLEYKADWYGRDLVVVDRWFPSSKLCSACGTLRGKMPLNVREWTCNCGTTHDRDVNAAKNILAAGLAVAACGDGVRPQRSTPGGRSLVKQEVVPPPRRRAAAQPRG

SEQ ID NO: 2367 - protein, 434 aa, Halanaeroarchaeum sp.
MGEEATKTIQTRLHVASGKRSWLHDARLASREIFNDTIRLTQQGYTRTEIQEAVDRDDFLRNNKCAVVGKALQTWDSYQSLLDWWHEQHDPDGGKPTPPSTDTSGAYPLVMAHTEGYRLTVDDDTNRVQVRISPKPYKKVKGNLRGEQDAMDKLRDAITSDGVDVGQAELLYRDGVYYLHVTVTREFDVPDPDNSDTLVGMDINERTVALTALDRETMRTKGTLVLDYGRVKQERQRYHTITKRCQEHGKTSIHRKLGDKEERFTEWVLHRLSRAVVEFADQFSNPVIVFEEMSGIREEIKYGSYMNRRLHKLPFHTFETFVSYKATWREIPTDTVDSYYNSKTCSCCGERGYRQGRRFRCPNDECDVMQDHADRNASVNIAWREKAKLDGNESDYRTHKTQPQVRLVRLSGSGRVSRPTSSRSLAEQGVLAHS

SEQ ID NO: 2368 - protein, 466 aa, Halanaeroarchaeum sp.
VSDRPQRTNTYTAEPISERYRECLFDWLAAHAPLWNQITYRRRQQYFDEDGDVWDAEYTDLYEQYGPLLGKATCQQVVRKNSEAWRSHFELLSQYREESNQTVTEKPSPPGYWGNREDGYELHGLVRNDLYTFDWNEQRSTVEFGVGGVLEDRYDFAYNERVTLQVRGDPQWRGDDSRLELIYDEHTDQLRVQHPVRIQSENLREQRQDAFTQTLDPENTTQSAAIDVGANNTLGVVTETGDTAVYHARPEFDLFQQHSERIATLQSELPDDQYTSNQIHRVYDERSRQRDHSRDAAVKHVAEWLLERNVDRVYVGDLTDVLSTHWSTDVNEKTHAFWSHRQLVDRITLTLGDVGITVLETGEYESSSQCPVCGSDAVTRSGDSFRCDTCGLEAHADVAGAWNILQSEVGPMARPAGLSAERGRDAPADGAYWQWNDHEWTPADFGEQSWSLDQPSVSEPASSQPG

SEQ ID NO: 2369 - protein, 437 aa, Halanaeroarchaeum sp.
MLEVHRTHRAKIRNHPRVAESLDRHGWSASKLWNVANYHSRQVWEETGEIPDHKELKNELKTHPKYKGLHSQSSQRVLEELAEAFNSWYSSDDDRDNPPGYRKKNYYDQQGRRVHEEHPRSTVTWKQNGIKHDTKNNRVRLSKGANHKEHPKAWEYILVEYKTRPGVTVENLQQVRAVYDQQKERWELHLVCKDEIETPTAPGNGTAGIDLGISNFVAVAYSTEDADLYPGNRLKQDGYYFPKEIAKCNDSGGDRATRLHHKWAERRTHFFHALAKHIVKRCVEKGVGRINVGDLEGVREDENDESKNWGKHGNLDLHGWAFNRFTNILDYKAKVEGIEVVEVNESDTSRTCSECGRKEDSQRVERGLYVCEECDAAFNADVNGAENIRLNINESNSESASSLDEDRSTGWLAQPGVYLHDLSRGFQPRAEVVDCKP

SEQ ID NO: 2370 - protein, 437 aa, Halanaeroarchaeum sp.
MTATTTKTLEATLAPPTAHKERKLCDLLDTYRAGLHEAFEAECETMNATSDVVTPYDLPYQAKAALCNYVPQLHGTYDAQELDDDHPVRLTNQAAEFDHSPERDYEFTWWVPQPGRGTNFWIPLRINPAQEELWHDLVDGEASAGQLRLQRHRTSWTIHVTVEFPVKEPDYEPTDEDVTPVGFDIGEAHLLAGCACEQGTPTDPLLINGGRARHLRKEMHTTLKRLQERDAVEWRIDERFDYYQNALTDIIEKASRQAIEYVCRFEKPVVVLEDLSDIRDDLDYGEWMNRRLHAWAFARLQERIEDKARESGIPVEYVEPSYTSQTCHECGHVGYRDGDEFRCTNDECWVSEYHADINAAVNIADRHDPWGESLPLKPAGDDIPRGGSACDSVPRNRRFLVCERDALRLVNAATPTEQSQPRQMTLGEVGSEPSAGS

SEQ ID NO: 2371 - protein, 406 aa, unknown
  TnpB Polypeptide
MLIYEYKIDARKDQYQAIDNAIRIVQFIRNKCLRLWMDGHGVSSNDLQVYCSTLANQFDFAKNLNSQARQASADRAWFAISRFYENCKNHVSGKKGYPTFQHDNRSVEYKVTGWKLESDGHHITFTDGCGIGRVRMIGSRDLATFPLPRIQRVRIVKRADGYYVQFGVHAYREVEHVLTGKHVGIDMGLNAYYTDSEGKTVDNPRYLRKAEKRLKRLHRKHSKCAKKSHNRKKAQKRLAKAHLKVQRQREDFARKQANALITSHDLIAYEKLSIRNMVKNRHLAKSISDAAWGMFLKWVNYYGGTHNIPVIAVAPNFTSQNCSVCGTRVKKSLSVRTHMCPTCGLVMDRDQNAALNILDKASRTVGQTGTASCSQEDNASGQLASTAVSRDAVSKRTGGKKNSPLS

SEQ ID NO: 2372 - protein, 386 aa, unknown
  TnpB Polypeptide
MSKQAYKFRLYPTSKQVQTLTWTLDRARELYNAALQEREDAYRMSSKSITYYDQANQLPEIKEIREDYQAIYSQVLQDVLRRVDTAMKAFFRRCKAGEKPGYPRFQGRNRYDSFCYPQDGFSLTADNRVCLSKIGSIKVKLHREIKGTIKTCTIKREGDCWYVVFACEVEASPKLAYTDEAVGIDLGLTHFATLSTGDTIDNPRYFRKSEKKLAKAQQNLSRKKKGSKRRKKAVKLVGKLHRKVRRQRQDFLHKQSRQLVDTYEIIVLEDLQSAKLIKRPKPKQDEGGKYLPNGAVAKGGLNKSITDAGWGQFQQFCTYKAANAGRVVLFVNPKYTSQLCSGCGTVKKKDLSERWHSCECGTELDRDHNAAINILRLGQSLQGIYP

SEQ ID NO: 2373 - protein, 407 aa, unknown
  TnpB Polypeptide
MLVKGVVFHLGSDLPPEAKALLEDFRLAVNSAVRAGIQSRVTSRNALNKLAYRDFRENHTGMYSQHLVSAFGVAAGVLKNHRRRTRNGADIKTPYVERLMMKAENQAYKLDREHGIVDLPIRAGCHVKLELQVSDYHRRYLDDPSLKLGSLTLLPDRVIVAFRKEAPRLYVPESALSLDTNERSMDGVFVKSGEATAVKAEYQEIAIIQQRHHDRRKRLQKKKAHDRRTSRRLCRREGNRENHRIDHRLQQVANAVLSFAEDRKSAIVLEDLKGFRPRWSKELNRRLSLWPRRKLHEIIEYKAQWRGIPVVKVDPRYSSRTCPICGRIQDSRMGAEFKCACGRHLDRHINASLNLLQTAVSKGLEVAGGLRFNPGAFQHDVMMILYEPAMAARSEPNGTSCVGAVSS

SEQ ID NO: 2374 - protein, 406 aa, unknown
  TnpB Polypeptide
MKRAYKYKLKPTMRQQQMLLQHFGCCRFIYNWGLDRKKNAWTNEKKSIGYLQLARELTLLKNDGEHGWLKNVANESLQQSLRNLDNAYTQFFKAKKGFPKFRSKKHSKNVCKFINNVRFDFDKWKVRIPKMGWTKLCHNKAFDLSKCKIGTLTVSQDKCGDYWCVIIVEDGEKPKPKAKISEKTAVGVDLGIKDFAILSDGTKYGNNKFLEKGQIRLKKLQRRFSKAQKGSKRRERLKIKIARQHRRISNRRSNFLHKLTTDLMCKYDTICLENLNVQGMMQNHHLANAISSVSWNEFVRQLAYKAEWNGKNVIFIGRFEPSSKTCSCCGYIKKDLSLKDRSWICSKCGASHDRDVNAAINIRNFGLHPQSQVAIENKIPEVTGINTDGEGNGTSHPVKRQDNKPC

SEQ ID NO: 2375 - protein, 542 aa, unknown
  TnpB Polypeptide
MITRKIKITYCSDFDFIKDKVKSYSYAMRLMCKMIDESSDNNFIAKFKTRFNLTDIEYRSLVADVKAKITSMETTNESKKKKIEELNKRLYEDKILTKREKYKIFNKVAFLTKSLENNLVFGGRNLLQKITREYNKKSDKDEKLLNEYLTEYRNKRNGIPCFITGEANQKGNRFFDFSGLGNSKVIYKPFKGKRIEIEFKLPKKFKNDFLKLSEMVGKKEISLTVSLGLEYIYFTFDEEKLNGYAIDEIERRLDVKEIKRQGYPKEIETLKIKEVYKEYYDRQRERKLVGKIKDRCVAVDLNPTNIGFSILDKTDENISIIHCGWFDMERFCVKTGNASDSKEQRYLNNKRKYELTVVLKKLFNIARYYKCSQFIMEDLDGDFKNKGKETNRKVKNVWNRNLIENIIRRRCNENGIELIKINPVYSSFIGNIQYGYVDAVNASIEIGRRGLFKYTKGTFYPHIRYKDLDTVEAKFGVDVPNGTSSDWVTMYKSLKDLFPDGNEFSHRLRTALNDIPKNKYSMFSMSSHYSKVNYIRFNIKNY

SEQ ID NO: 2376 - protein, 499 aa, unknown
  TnpB Polypeptide
MESVRRAVAVELERPPPELYAVEEPYRRIVEEVAAYVAERGRLEGERYNELYRCFRKQYPLPAQLIQQAMNQGVEIGKSFLELKKDGRIRKPRPEVRRVSIRFAKDSWSYKKAISTAAPVRLGLSLPGGRRKVWMKPHRRFWLYWWKVLRKEADLASTLILKRRRNKWYAVFVLDVAPERKPPAEAVAFDVNENSVAVARLSLLATVDRIASWNRQYINPAVYLIRTDFGRLAKRYEAVRNAKLEELKRKYPFAGRGEDERRQNVTDTREFRKFVRRLRERRRKEGRIKQIAREMTKSPAVIITEELGKNPQEEMIGVEKKKKVKKRELRHRIRQTPFRRILRAVEDKAAEVGSVVVYVSSYRNSKACPIHFTFLRDNGSWHTLHCSCGHDVDRDHAAVLNMLWKITPEGAAKGVWWDLKNVKRRLEKGRGLVPKKAVRRRNPLVTWPVVHAVWTSLKSLRAGDKWPAVLARAAPMNPAQGADEDGTRAPPRGAGTPAL

SEQ ID NO: 2377 - protein, 412 aa, unknown
  TnpB Polypeptide
MPAVVKDWMLVRGVVFHLDSSLPTEAKILLEDFRLAVNNAIRAGLQARVTSRNALCKVAYKDFREQHPRMYAQHLVSAFDVAGSVLKNHRRRVRKCVACRIPYVKRMTMRTENQAYRLDRKAGIIDLPIRAGCHVELRLIVSQYHRKYLDDMALSLGSLTVLPDRVIVAFRKVAPKPFVPESVLSLDTNERSLDGVFVEGDVAKAIKAEFPEVAIIQQRHHDRRRRLQRKKAHDRRVSRNLCRREGAREHHRIDYRLHQVADSVLKFAKERRSAVILEDLKGIRPKWNRELNRRISLWPRRKLHQIIEYKAQWRGIPVVKVDPRNSSRTCPICGRIQYSRMGTKFVCDCGWRLDRHINASINLLQTAISRGMAGGLRFNPGAFQHDVMMILYEPAMAARSEPNGTSGVVGVT

SEQ ID NO: 2378 - protein, 369 aa, Lentibacillus sp.
MLNNKKQGGEIMSQTITVKIKLLPTKEQDLTLTNMSKMYISTINNLVSEMAKEKKVTKKSSKNIDVPLPSAVKNQAIKDAKSVFKKAKKTKFETVPVLKKPVCIWNNQNYSFDLTHISMPIMIDGKAKKTPICALLVDKDNRNFDLLKHKLGTLRITKKADKWIAQISVTIPTVQGTGVKVMGVDLGLKVPAAAVTDDEKVRFFGNGRQNKFKKRKFRSVRIALGKKKKLNAIRSSKDKEQRWMEDQDHKISRAIVNFARDNKISVIRLEQLANIRQTTRTSRKNEKNLNTWSFYRLSQFIEYKANLEGIKVEYVNPAYTSQTCPDCSEKNKTKDRKYRCKCGFTKHRDLVGAMNIRYAPVVDGNSQSA

SEQ ID NO: 2379 - protein, 191 aa, unknown
  TnpB Polypeptide
MYRTLGRIRRFQREHGSAQTQGRWAYTKRLNTELGKKIAGAIVRYAEENHADVIVFEYLEMQGKISGKKKQKLHLWRKRDIQKCCEHQAHRKGMRVSRICAWNTSRLAYDGSGAVTRDWENHSLCTFQTGKRYNCDLSASYNIGARYFIRELLKPLPATERSLLEAKVPPVKRRTSCVYADLRNSIQKWNV

SEQ ID NO: 2380 - protein, 330 aa, unknown
  TnpB Polypeptide
MTGIKKSPELRTPNEVEVLHDVFTGIQKANKAKDSKYQKDLEKYNKGLLDKHPKRPKHFPYPTTKEWFLTYNVLDAVFKYTNNEVYYSMNSQLNQNAIRKIAVAWKGYFKILKDYQKNPSKYKERPNMPGYLRNSQYVAWFSNQTAKYSVEKDGRAYLRFTKNKDLFCIGKASLYIGLRYVKTEIKPQHGCYLILVTFDDGIELPKVPEKPKRVIGIDPGVDNLAAVVNNFGVHPFLINGGAVKAANQRFNKKRASLFSAVTTGSDSRHSVKNSHSLSALSRKRDDLLRDIFYRAAWYICRFAVRHQVDVIVIGHNKDQKQEINLGKQNN

SEQ ID NO: 2381 - protein, 193 aa, Lebetimonas sp.
VGIDFGLKTFLTLSDGTQIQAPRYYLQTLKELQKLQKQHSKKKKSSNNREFARKKLAKLHKKVANSRRDFFHKLANKLAKEYEYIAIEDLNLKAMQKLWGKKIIDYAFSEFVNILSYKVNVIKIDRYYPSSKTCSNCGYVKEDLNLKERVWICPVCKTKHDRDINASINICKVGASTFGIDGVRPIIKQATIA

SEQ ID NO: 2382 - protein, 215 aa, Desulfitobacterium sp.
  misc_feature (2)..(5): Xaa can be any naturally occurring amino acid
MXXXXKYHGGKWFANLTAEIPDVAPVENPSQAVGIDVGLNHFAVLSDEKVIDNPKYYRKMEKKLAKAQRRLSRKRKGSHNRGKAKVKVAKIHAKIANQRKDFLHQASVRVVRSYDLIVMEDLKVHNMVRNPRLAKSIHDAGWGQFRNYIRYKCERQGKQFILVDPKGTSQSCLCGESVPKDLSVRVHECPSCGLVMDRDLVSSKLILARGLSKIA

SEQ ID NO: 2383 - protein, 410 aa, Thermotoga sp.
MTVTLTCRFKLELSKDQKQQFLDIATAYTNAVNYVLEQNLKDKSTNVKKLHRLYYKTIREDFDLPAQMAINVNRDVSAMYKTLWAQFKELKRRKPDSKAVKKFWDKPPKRKSLIVKYTYNRTASFKKINGEWHASLSTLQGRIKWIPMKGWSKHFEYLKSCKIGDPILTYDKSSKTFFLLVPVTLEVQEHQPKEIVGVDVGERHIAAVASTKGTRYLIDLPEEFKQRKQHYQRLRSELMSKGTRSAKRKLARISRREKRFTENVLHIIAKKLTTSHPGARFVLEDLTQIRANRITYRGKDKEARRQSEQWPFASLQQKIEYKAKLYYGVQSEKVDPSYTSQTCPRCGHVSKENRPDHGERFVCQSCGYEEHADIVGAINIALRVLAKDQQVNLEKLLGAVVSRPDAPRLG

SEQ ID NO: 2384 - protein, 390 aa, unknown
  TnpB Polypeptide
MAHSIAHLRTFKYRLYPTPAQEHNLLRVLKCARNLYNMALAERKYAYQVEGRSLKLADLEQLAKRYRAMFPYAMQMFSQTAQSVVKQVNAAFQAFFRRVKAGQKPGYPRFKNAMSFNSFEFKQYGSGARIDGRRLKLYGIGRLAIRWHRPVEGTIKTVRIVHKAGCWYVTFACELSEPAPLPKTQRTVGIDVGISALLTTSDGEKVANPNYYRAGQITLRILQRKLARAKRGSKNRRKIVRVVQRQQEHVANQRRDYLHKLSTQLVQTYDRIALENLRVRNMVRNHHLSKSILDSGWTILKDMLTYKAESAGRQIFFVDPAYTSKKCSNCGSIFAGMTLATRWVKCNCGLSLDRDHNAAINILKKSGWDAPVPDNVERSQAHASVRSPRL

SEQ ID NO: 2385 - protein, 203 aa, Allochromatium sp.
VVALDPGLRTFLTGFAEDQAFKLGDGDFARIARLCHHLDRLLSRIAKARCRQKARLKTAANRLRWTIRDLVDELHFQAIRFLLDRFDLILLPTFETQEMARRSKRRIRAKSVRSLLGYAFFRFGQRLEAAAKRIGKVVLRVNEAYTSKTASWTGEIQPIGGAKTITSGGVTVDRDINGARGIFLRALVDTPSLRNECACVGAC

SEQ ID NO: 2386 - protein, 488 aa, unknown
  TnpB Polypeptide
MSKDSISTFQTRIDSYPALQAYADRHNLVEHKLYAQILAGKKPNKLKQAFLVKYGITARQFNAIERNLRGKISSVQELRKDHKKETNYRIKDCERKIEFVKDNLKQHNLKRRLHGLKTRLARLEQMPKSLCFGSRKLFNSQFGPEIDHDVWSSDWKQSRSSQFYVLGSHEETSGCQGCVATVQDDGSLTLRLRLPDALMAIHGKYIEIPGVYFNHGHEHVLQALALGNTPTNYRFKLDGIGWRVFVSVHVIEAKIVTRDSLGRVGFDLNEDHIAVTETDRFGNIINTFNEPVITTDLTTHQTLAVLGNAVKNIVAYAKNVQKPIVIEKLDFQKKRAELRGRGQTAKNLSSFAYSKFRSIVVSRCQREGIKVYNVNPAYTSIIGRNKFALRYGLTVHNAAALTIARRSMGLSENPNKKCYQGTSFLPVRNRTEHVWRYWAKLAKAQARDWATRSSKPDANHVSCDSRKPALGPISDSLPVYCSGNVTHS

SEQ ID NO: 2387 - protein, 404 aa, unknown
  TnpB Polypeptide
MIRQTKHSLKFITDKKKNKLDDLFIEYQRVVNEFIKIFWHSDKIPMQINSSIYKQVNSWMMGKAMKCAGNQASKIVRSAWKINSKLTYKKYKHVFNLCKKKDKNINGILDYKWSEWSKGKYFKKRNTLPFFNGNTIELNSDLVSIQNSKKSSEFDLWVRIGSVFGNRFSLILPTKKHYNFNILIEEGFQLKKSLAIRRTTDKYYISLFLEKTEEVKPVIKNKKLGIDLGINKLLSLSSGEFLGVDIKRLLFKLNKKTQKSKSYNRCLNEIKHYIGECVNKIPFEKIDLIVMEDLKGITKNTKGRTNKKLRKQLGHWNLELVYERIQNKCELNRVWFAKVLSEYTSQGCSICHLIDKRSRKQEKYECVHCGNIMDADTNASINILQRYLGQVLTVPDSTKEIISI

SEQ ID NO: 2388 - protein, 518 aa, unknown
  TnpB Polypeptide
MFVSLQFKPELKKEDKEKLIKLMRKQSSAIRVAYNTLKELEKEKTKNPHSQIYQRLRQLFPELPTRYIDSAIYKAKQYPTDKPVVFGSKKLFEKLCKNNLTGKTRERLKKQWREMRQGTLISIGSKSDRGNRLTRFEDLNGQLHLRITTGNREFIYAKVLREPSNSKDKWLTFMAMLLDSWQTQNCFPYTVELKLRDGEIYGNVSFEIPTPEVKCTKENGVIAIDTNASPIHLAIAEVSKTGELLSYQTIKLHHLLGLSQNSKDHQEWILAHQIMNLAIEKGKAIAIENLKKLKKGKRADGKAKLRKRLHQWNAKKLLQKLKRVAMIRRVEVVEVNPAYTSVIGMLKYAPQLNIDKDIASAYVIGRRALGFKEDMPENYEKLLKDKTYLEFALKRYEEREKELRELIENESSEYERNALKSELRNVEYAKKLLVNLIQSLQSESSFREGAYGRSPEQGRVAKTTLQSAWQVLKVALLFPVLGQILPRDLSPLKPVLVEGVWDRVRKGLAPLEAGGASR

SEQ ID NO: 2389 - protein, 370 aa, unknown
  TnpB Polypeptide
MKLTLKIKLLPSETQSRLLLDTIKEANAACNRISDMVWKDKVFTQFNIHHHCYNEIRKDFNLSAQMVVRCISKVADAYKLDKKSKRNFRELGCISYDSRILSYSENAVSIWTIGKRQRIPFVCHNTNYLPYIKGEADLVFKKGKFFLFQTVEVPEEDVEDIEEFIGLDFGITDIVSTSEGKTYSSDTLNRYRERQRMIRGSIQSKGTRGRTRQCERGCARLLKRLKGRERTTATIINHTISKRIVAEAKQRGVGIAIEDLKHIRRTSKRRNKTFRTKLNSWNFSQLREFLAYKCRLSGVKLIVVQPEYTSQTCHKCHHIGIRSNKSFKCNHCGCDMDADINAAKNIALLGAVVNQPEKSGMLSCALHTSA

SEQ ID NO: 2390 - protein, 387 aa, unknown
  TnpB Polypeptide
MRRAYKFRLYPNREKVDALDRTLMLCRHLYNAGLEQRITAYERGFKVSFTKQSDELPRLKVELPEYNEVYSQVLQDVLHRLDKAYANFFRRVKQGNEEPGFPRFKPSTRFRSITYPQSGFEVLPDGHLKLTKVGIIRMFRHREIVGTIKTCTVKRDAVGDWYAIFTTELPDVPRREPRTALGIDVGLKTLAMLSTGESIEPPKFLRASEETIKIRQREVSRKVKGSNNRRKCVRRLAYAHRRVERQRDDFLHKASRSISRKADVIVFENLNITGMQKNHHLAKSIGDASWGKLMELTRYKAESAGGSVQFINPNNTTQICSKCGTTVKKSLAERTHLCPTCGFSADRDLNAAFNILQRLHTDSVELYKTPVETAPPQLLSGGCERGR

SEQ ID NO: 2391 - protein, 380 aa, unknown
  TnpB Polypeptide
LQIYVNYIVDGILPLAKNLSSKLLPIENIEHSRYRQLIYKQASEIVRSQMKKSSDNRFKTYKKVYFYFKEQGRQASFTSKKFSELSLSDVIKTRYFTTPVVKNITINLDERFFDIKFDSIEFDGFVKIILPFFNEKKTRAIQIKIPLRHHKHSIKFSNGGFEMKKVIQLKKTDGRVFMNLVWEKEVVPKEISGKSIGIDVGYRQLIATSDGQMIGKEMMDIYKKVVDKQKNSNAQKRVFRERDSLINYFVGQIDFSEVSKVCVEDLCNIKYKSKYNNKTNDLMARWTYRPLLDRIEMTCEAKGILLVKVSPAYTSQMCSSCGHVSKENRNGDFFVCMNCEMKMNADLNAAINIRNKGAMVPLSKKELNVNLSSLKDKCYD

SEQ ID NO: 2392 - protein, 454 aa, unknown
  TnpB Polypeptide
MEKKKTFVNFRLENLTNKVLKYNKRIPLYNTFISKKIITTKCAYGISNHNERKIKKNKHAVTFTNNISPSVEYVKCKQVILNIEQSYKKILLGYFDDYIKMYNTVIYYFNNFKWTTDKITINFRNIRKIHSKEKKKYNTPSHVLDGAIKLACTSFKSATTNMDRKHIKKFNLKPIKLTKKSKVIDIEQCYFKDEYIFKRFLKKKITNSENYKYSNIKCDSKLHYDVTKDRFTLLIPIKTKIETTATENQISIDMGERTFITGLTDNKIIEIGTDISNQLIKHIIRIDKYNNIIDNNKNITTKNYFDKMACARKTRNQQLKKRVRNIRLKMRNQIKDVQWKIVDYLTKTYQNITIGNWSTKGCIKNGTSKLAKLKKRILNGLSVYKFKEKLKYKSESRGINLQFVNEAYTTQMCSYCSNLYPKIGASKIYNCEKCKKQLDRDVNSCRNMQMLGLV

SEQ ID NO: 2393 - protein, 206 aa, Okeania sp.
LIVDGKYLKSVNQWYHKQIATIKDNKPQGFWSKKLANITEKRNRKMRDAVNKATRLVINNCLENGIGRIVFGWNKGQKNAINIGAKNNQKFVQIPTAKLKERISKLWELYGIDFIATEESYTSQVSFLDDDFLPNYGEKPERWKPSGKRVQRGLYQTKNGLSLNADVNGAANILKKVATTLEFSLEGVSRGMAMCAGIFTNYIMSG

SEQ ID NO: 2394 - protein, 435 aa, Natronococcus sp.
MGEGDINHSFTTNCPEYLITAMWYDYRYRAYPDQTGVTAEVERHIDIHRQAYNHTRYEYTTLDTDTQNVGTAYQHHKRLPDWKDMWPIFSEVHSKALQKTVKRFYDNLGILSEKKKNGHNVGWLKWKSPREYQSITYSQSGFELNNTSGRTATLWLSKIGDVSIRYHRPLPDNVTIKEVTLKKETTGEWYVTFGLDVEDTALPEKLDVDDLDIEDCVGVDLGIQNYIYTSDGDSMDWLDLSDEYDRLRREQRSLSRKQCGSSNWENQREKVAEIKRRIKRKVEDFQHKLTTWLVRAYDAVFVEDLDVAGMLQSEGNARNKQDAAWRSLIGMLEYKGDLYGTYVEQVHPRGTTKECAECGVETNKPLWVREHSCPSCGFEADRDANASYNVLARGLQELGLGQAEVTPVETATTVDAEDSSSVSASRVVETGSLGD

SEQ ID NO: 2395 - protein, 365 aa, unknown
  TnpB Polypeptide
MSDCRLAYRYRLYPTKAQETLLKETLETCRLVYNSLLNWRKHDYEVLGKSPSKFAQQAAFPKWKKEHPELCNVYSQVLQNVAARVDLAFDAFFRRVRSGETPGLPRRKGEGYDSFTYPQSGFGFQQGRLRLSRIGDVAVRLHRPIDGTIKACTIRRVRHKWYACFSCEVGPELLPASEEQVGIDVGLKTFAALSNGEMIENPRFFRKDERALAKAQRKLSKQKRGSRERRKAKQVVSRIHERVRHRRHDFVHQTVRRIVNRFGVIVVEKLNVKGMVQNHCLAKSISDASWSMFRNVLSQKAERAARVYAEINPAYTSMTCSGCGHIAKKPLSQRQHDCPMCGLSLDRDTNAAINILSVGQYRVAA

SEQ ID NO: 2396 - protein, 404 aa, unknown
  TnpB Polypeptide
MLVRGVVFRLDSDLPTEAMFLLEDFRLAVNNAIRAGLQARVTSRNALAKIAYKDFREQHPRMYAKHLVSTFGVAGGILKNHRRRFRKGVTCKTPFVKRLMMKADNQAYKLDRKSGIVDLPIRTGCHVELRLIVSQYHRKYLDDTALTLGSLTVLPDRVVVAFRKATPGHYTPASVLSLDTNERSLDGVFVEGDVAKAIKAEFPDIAIIQQRHHDRRKRLQKKKAHDRRTSRNLCRREGEREHHRIDYRLHQVANSVLKFADERKSAIVLEDLKGFKSKRSKELNRRLSIWPRRKLHQIIEYKAQWKGIPVVKVDPRNSSRTCPICGRIQYSRMGAEFKCECGWHLDRHINASINLLQTAISKGMAGGLRFNPGAFQHDVMMILYEPAMAARSEPNGTSGIVGVT

SEQ ID NO: 2397 - protein, 372 aa, unknown
  TnpB Polypeptide
MILAKKVRIYPSKSQEQKLWQSVGTARFIYNWSLAKQEENYKKGGKFIADGVLRKELTQLKKTELSWLNEVSNNVAKQAVKDACDAYKKFFKGIANKPTFKSRKKSKKSFYNDNVKLKVKDGKLVLIEKVGWIRTNEQIPIGVKYCNPRISYDNKYWYLSVGVEQEKIQEELTDVSLGIDIGVKVLAVCSNGAVYKNINKNNAVKKTEKRLRRLQRNVSRKYEMNKEGNRFVKTSNVIKIEKRIQLLHRRLSNIRKNHLHQSTNDIVKTKPYRIVMETLNIKGMMKNRHLSKAIAKQCLYEFKRQIQYKCEKYGIEFLEADKWYPSSKMCSSCGSIKKDLKLSDRTYECVCGHKMDRDLNASINLAHFQLAN

SEQ ID NO: 2398 - protein, 293 aa, Scytonema sp.
PVKKGYPRFKKDSRCVEYKVSGWKLHPSKRRITFSDKKGIGELKLLGKWDIHTYPVGLIKRVRIVRRADGYYVQFCVKADVTTEPRSEDGEIGLDVGLEYFYSDSNGHHQENPRFLRKAEKVIKHAQRRIYKKEKGKNNRRKAIRRYARKHLRVSRQREEHAKRLARCVCKLNSFVAYEDLNVKGLVKNRHLSKSISDVAWTSFRRWLEYFALKFNTKVVAVAPHYTSQKCSNCGQTVKKGLSTRTHDCPHCGTVLQRDVNAAINILCKAKSTGGHPGSNAWGVGISTLLGAT

SEQ ID NO: 2399 - protein, 384 aa, Scytonema sp.
VVKGKKTILVDNLETSFRDELIKSLNSQEWQQYPLISRWVRQYYKRGHTWVDNQIVINATGNTMKGKVSRKGKVTTYQIPGFMDGKKVAWISIPILTGRVTPKAGRLRFLINNSGIVELHYPKTTKIEVSPNKDSLGVDKGFTEGFYGSDGIAYAEGLGSVINDASDRRTKKNKKRQKLFAISRKVDPARRQRILENNLGRKKAGKLDSKKRYYITQLIRTDTNKIFDSYGEVVAEDLSKYIKGKNRAKAVNRRLNEWSKGELQKALDEISLRKGGVVKLVNPAYTSQVDHRNGTLLGKRLGDQFLTFDGVVLQADQNAATNIKIRGSDLQITRFMKKEQIHRILLERTALFLAELGHSLESAVSMGWLDEKHHPQGKPPRRRR

SEQ ID NO: 2400 - protein, 437 aa, Burkholderiales sp.
VYSIKAYRIELRTRPRDEALLRRFAGAGRWVWNQALAEQRARHARGEKYASYVDMAKWLTAWRNDPDTAWLSDSPVHPQQQVLRRLDEAYKRFFSAAKAGLAGGRGRTGPPSFKRRGEEPSIRYPDPEQFTLDEANERIKLPKLSWLRLRMSQPVEGALRNVSVSREGSAWFVSIQVQIAETVPALSVAPTLGIDLGLAKFAAMSDGTSVEPLKALTRQQKRLRRYQRSVSRKVKGSANRRKAVTRLGNLHRRIAHQRSDWLHKLTTDLADAHPVIALEDLRIKNMSASAKGTVESPGKNVAAKAGLNRSILDAAWGEFTRQITYKVQWRGGQVILVNPAYTSRTCRICGHEAAENRKTQSVFACVACGHTENADVHAAKNILAAGHAVWLKEETQRAAACGGEVSREAPERQARVKRAAPMKQEPTEATMREVSHA

SEQ ID NO: 2401 - protein, 259 aa, unknown
  TnpB Polypeptide
LHVPKIGDIKIKRLTIRKAATGKWFACFSVDIEDLPKPPWKDGSIVGIDVGLASFATLSNGEKIPNPRFFRDEEKELARVQRKLSKAAKGTLDRKAALKVVERVHERIANKRYEFVHQVSRGLVNRFGLIAFEDLNIKNMLQNHCLAKSISDVAWNMLVTVTSYKAENAGSIVVLVDPRNTSKMCSRCGILVEKTLADRVHNCSECGLSLDRDWNAAINILRLGLQSLPINGKKPRPSRRGEVTQALLTSRPFLRRWVA

SEQ ID NO: 2402 - protein, 444 aa, Streptomyces sp.
MELGSRAACALGSGRSTAPGFAEQCRQLTESRRENAWLGAGNADVQQQALKDFAKAKSARFTSGFGEPTWRKKFTHEGFRVIGTDRLPEFTTTGAPKLNAKGKQVMARSVVVQKLNRRWAQVKVPGCGWVRFRLSVQGKGRELPQAKTLRVTFKNNQWHIAFAVIPEPVDKPALGEVIGIDRGVTITAALSDGRHLNCPQLTIKERAQVRKHERRAARAPKNSEQKAASYEKVAQLKAREANRRKGWCEKTSTMLARTYGLIRFEQLNIKNMTASARGTIERPGKRVRQKAGLNRLILAQGWGLLRRRTEDKAPGRVEDVPAPYTSLRCSACGRIEKNSRKSQAEFVCVSCGFTCNADENAAINVAAGQGGIPRPRRSSAGAGGATTARGRSNAREPQPLTRVGIPVPQRGRMSMPSAVPRGRRHDGAVRGGRQGAAGGAAALR

SEQ ID NO: 2403 - protein, 425 aa, Cyanobacteria sp.
MQKVERHIIKSNDARFDELDNLSWQSKNLYNAANYVIRQNFLYNWGYLTYNRMASLMKSHRAYQSLPAKVSQQILMILDKNWLGFFEAIKAYKNEPTKFTARPKLPKYKDKVKGRNLIVYTLQAISRKQLKKGIIKLSGTDIWIKTTVNPDKICQVRVVPKCDCYIIEVIYNEPESTINQENFASVASIDLGLNNLVALTSNQPGFIPLLINGRPLKSINQFYNKRKSQLQSQLKGNLKTSSRIQRLTRCRHQKVDNYLHHASKLIINILSQRQIGTLVIGKNPQWKNSINLGKQNNQNFVSIPHTRLIKMLEYKALLVGIKVIIQEESYTSVSNFLALDPIPVYGESDGDSVEFTGKRIQRGLYKTIDGLLINADVNGSYNIMRKALPKALSNGIESCVVQPRRVNPLKVKAKGEGLHASHVMS

SEQ ID NO: 2404 - protein, 402 aa, Streptomyces sp.
VIRAYKFLLRPTARQDQALSEMLRDHCSLYNGALQERRDAYRHPSKTAVRYGQQSAQLKDIRAFDPERQGRWSFSSQQATLRRLDKAFQAFFRRVKAGEKPGYPRFRGANWFDTVEFPKDGDGCRWDSIPHNPVTRVRLQGVGHVRVHQHRAVKGRVKTVSVKREGRQWYVVLACDEVAAEPLPTTGAVTGLDMGVTHFLTTSEGAHVENPRHGKRNADALAEAQRELKAFGRRKREGRTAKHRRAVEKVAKLHRKVRRKRLDHAHKTALTLVRDYDRIAHERLSIANMVRAPNPKPDPETPGAFLPNGAASKAGLNRSILDAGWGVFLGILAQKAESAARVLIPVDPRNTSRTCPQCGHVDVQNRAGEKFQCTTCDHRDHADRVGAWNVALRAGLVLPDVA

SEQ ID NO: 2405 - protein, 409 aa, Filamentous sp.
MRTAYQYKLRPTKQQVIELDRWLYMLSAQYNYLLADRFNWYEQNRSPVNACHLVCYLPELRDNPDYCSQKKTLPQLKKTHPWYSEIYSQVLQDVVKRVKTTFDRFLKGDSSGKRSGKPRFKARSRYRTFTYPQMKEGCLQGNLINLPMFGKVKVVLHRPIPDGFKIKTASVTKKADGYYLTLSLEDKTVPEIKPDFNPRSITGIDVGLKNFLTTSEGETVAPPQYYRKEQKCLRTIQKRVSRRKKGSNSRLKAIKQLGRQHKKVADKRKDFHFKTANWLLSKYDVIAHEDLNIKGLARTRLAKSVLDAGWSSFLSILTNKAENAGLLVVPVSAHNTSQDCSNCGEKVPKKLHIRWHDCPHCGCSLDRDHNAAIVIKNRAVGQPVLKAQLMSYAIAGVTEKPTPYCTQLV

SEQ ID NO: 2406 - protein, 402 aa, Escherichia sp.
MKRLQAFKFQLRQDGQQERQMRRFAGACRFVFNRALALQNENHEAGNKYIPYAKMASWLVEWKNATETQWLKDAPAQPLQQSLKDLERAYKNFFQKRAAFPRFKKRGQNDAFRYPQGVKLDQENSRIFLPKLGWMRYRNSRQVMGVVKNVTVSQSCGKWYISIQTESEVSTPVHPSVSMVGLDAGVAKLATLSDGTVFEPVNSFQKNQKKLARLQRQLSRKVRFSNNWHKQKRKIQQLHSRIANIRRDYLHKVTTTVSKNHAMIVIEDLKVKYMSKSAAGTISHPGRNVRAKSGLNRSILDQGWYEMRRQLEYKQLWRGGQVLAVPPAYTSQRCACCGHTAKENRLSQSKFRCQVCGYTANADVNGARNILAAGHAVLACGGTVQSDRPLKQEPTEMIQATA

SEQ ID NO: 2407 - protein, 420 aa, unknown
  TnpB Polypeptide
MLRAVKIRLYPTSFQATQFNKLLGSCRVVYNNALDYKIKQYKEHKISENRTSLSHWFHHELLINPDFVYLKEQNTKVLKCAINDMLTAYKYFFNHHKGYPKFKSKHDNKQSCRFERAAISRINDYTSYNLSLANIKNVKFRCSKKYAEYLQKHKASIRQATLTKLSCGEYHLSILVDGRLTHKGVQDTDKCVGIDLGVKNFVITSEGEVFNNLHFHKNETNKLKRLQKQLSRKEKGSKNRTKARIKLAKANKKINDKKQYYLHSVSNSLINENQVICMEDLNVRGMLRNRKLAGSISEMNFGEFRRMLEYKAKWYNRKIVFVDRYYPSSKTCSHCGYKYKELTLSVREWACPECGTKHDRDINAAVNVLHEGMRLLGSSTTEFTLVDYPPMDDRSEMSLKSSDRLKQEANKEQGLTMFEF

SEQ ID NO: 2408 - protein, 433 aa, Bacterium sp.
LRPRGLGRRKDEGITYLANLTSKMTKEIRTVEFVVLPATKVKAKKMFQIAGACRYVWNHFREKNLADYQAFKKGKAERPQTSYFSLGVEFTKLRHETDWMLELPANPVKHTLKHFADALKEAMAGKKGFPKPRSRKRTAPSFTIPGSAGVRIRKVNEKYSSLLIPLVGWVTLTRRGGNPWESGTPKQAVLRYDGHRWRAFVSFEIEVEEKMGDGEVLGVDMNARQIATSDGHFYFLPDLKKKEARRKRYQRRMARQVKGSNRRKDTKKKLAKASREIANVRKNWVHQTTKEISGKCGTMVVEDLKVKNMTASAKGTVENPGKNVKQKAGLNRAMLDTAFGGIRRNLEYKCGRLIEVNPAYTSQTCSRCGYAEKENRKTQARFQCVSCGFVSNADTNAAINIRRLGMAQLHGEERSGSRQTPANREIDTRLHDG

SEQ ID NO: 2409 - protein, 454 aa, unknown
  TnpB Polypeptide
LCVLKHTHMLLTHQYRIQPSIAQQAQMNWWCELLRRHHNYALGQRLDWLRRTRCLADRCSLISEPMGEIPGASPNYYLQAGELKQTKVLFPDYRNIYHDVQQQNLKRLEKAWERWVKPDNSGRRGGRPRFKKKGELRSFTFPRVNSEKAGANIRGGLLTLSKIGSMPIILHRPLLDGFTLKTCTIVKQADGWYASISLEDQTVPALIPLDNIKSAVGVDVGLKEFLTTSDGETEPVQQNFRRDQKRLARHQRRSCRMQKGSNNAQKQKNRVARIHQRIKRQRKEFHYKVAHKLVKAYDLIGVEDLNIKGLARTKLAKSILDAAWGEFLTILEAVAVKRGVRVVKVKPHGTTADCSTCGWKVPKTLEIRTHDCPKCLTVLDRDLNAAINILVRAIQAVGLTVSACGGLLSWVTRHADHLVKSVEARSVGGGSFPRRTSSGMSSCEIGSPDYTACG

SEQ ID NO: 2410 - protein, 361 aa, Paenibacillus sp.
MQRTYKFRLYPTKEEQENIHFVLQRCRLLYNRLLGERIAAYKQTGLSLTYYEQKATLPVRKQYIPKLKNVHSQVLQNVVERLDKAYQAFFRRVKNGEKAGFPRFKPESQYSSFTYPQSGFSLEGKHLQLSKIGNVRIRLHREPQGTIKTCTIMVKSGKYYACFSCEVESKYLSASEKQIGIDLGVSQLAVTSDGDRIRSPKFLRKSEEKLKRKQRAVSKKKRDSNRRRKAVGELARLHEKVASQRKDYAHKESRKLVNEYGLIAFEDLNIRGMVKNHHLAKSIADSGWKQLVQFVTYKAESAGRQVMQVNPYQTSQRCSNCGEIVKKSLTVRVHQCSCGYRADRDENAAINILKLALQKIS

SEQ ID NO: 2411 - protein, 372 aa, Fictibacillus sp.
VILAKKVRIKPTKEQEHQLWKSVGTARWAYNWALAKQEENYKQGGKFISDGILRKELTGLKQTEEYAWLYEVSNNVIKQAIKDACDAYKRFFKKQAVKPRFKSKKKSKPSFYNDNVKLKVKKNEVLIEKVGWVKTSEQIPMGIKYSNPRVSFDGKYWYLSVGIEQEIQPTELTDVSLGIDVGVKELAVCSNGMTFKNINKIKTIKQREKRLRRLQRQVSRKYEMNKEGNRFVKTSNIIKLEKRIRHLHRRLTNIRDHHIHQATTAIVKTKPCRVVMETLNIKGMMKNRHLSKAIAQQKLYDFKVKLQYKCEKYGIAFIEADKWYPSSKMCSCCGQIKKDLKLSDRIYRCECGHEMDRDLNASINLSRYGLAN

SEQ ID NO: 2412 - protein, 487 aa, Moorea sp.
MMMPKKVGATKRISTQIVPVVGMTESVEAELLSIMRKLGIVRSESYNKLGSISQWGLDWKKAYPEVRSFRTPDSLGLPSKLMEWTVSDVAKAITASQAACIDAVTRKIYKRFPGKENQKTRKELCKQLKSLIFLENPLLHRLVRKEFQRGHSWVKNQIVYQQGGYKCKRLSRNTYQLELAGLRRGKRNRIVVRSNRKIKGQIRLIYNQILQRFEIHFLVDHGTVEIPSERRSVGVDKGYTEAFYDSEGQAHGKGLGQVTTKKSDRICAKNRNRGKLWALHRKLEKLDPAKSARILENNLTRKTENRRYRKNQSELTAIIGAASKSLFNGESLKVFAEDLTQRIRNKRQSKAMSRKLNSWMKGMIRDSLQKWADWTGSVVTEVQPSYTSQVDSRTGTLLGERTGDNFTGFDGVVLQADYNAAKNILARGTDKEITRYTSRTEVQAVLLRRTARFLKGMGLSLLDAVELGWLDSKHTLTKAFKKLLNGI

SEQ ID NO: 2413 - protein, 378 aa, Methylococcaceae sp.
MKIMKAYKFRLQPTPEQVEQLSKEFGCARFVWNQGLIRREYAYQQWGVSLSSAYDISSQITGLKKLESHEWLKEATAGALQQKLIDQDKAFDNFFKGRASFPKFKKKSHAQSIRYQMDQRQVLNNYRAGELIKLPKLGELKVKWSQVPGGIPKMVTVSKSASGKYFVSFMCEVEQALKPVTGKVIGIDVGIKDVIVSSDGLHSGAPKFTYKYQRQLKKAGRKLSKKKKGSNGWHKQRIVVAKIHEKIANSRKDFLHKLTTNLVSENDVICVEDLNVAGMLKNRKLSKAVADVGIFELNRQIDYKAEWYGKTVVKISRWFPSTKTCSSCGNIRIMKLSQRVYECECGLIIDRDLNAAINIKRAGEALSGAIYQPEKVAA

SEQ ID NO: 2414 - protein, 376 aa, unknown
  TnpB Polypeptide
MKSKRAFKYRFYPTDEQAALLAQTFGCVRFVYNSILKWRTDAFYEDGESINYNAASAKLTALKKEFEWLSQVSSVPLQQSLRHQQTAFKNFFEGRADYPTFKKKNRRQSATYASSAFSYRNGQLFIAKSKEPLAIRWSQALPCAPSTITISKDRADRYFVSCLCEVETETLPVVAKTTGVDLGLKDLFITSDGFKSGNPKYTKKYAVKLAYLQRQLAKKAKGSRNRAKARLRVARLHAKIADCRRDATHKATRTLINENQVVCVESLAVKNMIKHPTLAKAIADANWGEFVRQLLYKGAWAGRSVVQIDRWFPSSKRCPTKGCGYINDKLPLSVRTWTCPSCGTTHDRDIAAAINIKAAGLAVLASGATGSGARAV

SEQ ID NO: 2415 - protein, 296 aa, Haloarcula sp.
LHVNVTNTEQTVRDKQDSRTVVGVDVNEDNVALTALSEDGIEDSLVIDFPEIKFERHRYFTMRKRVQNAGKDSIHDTLEGREERFVRDRLHKVSRHIVEWSRQFEKPCIVFEDLKEMRDSIDYGTRMNRRLHHLPFRALQFYTSYKASFEGIPTAWINPEYTSQRCPMCGHTERANRNKKRFNCRDCGHQDHSDRGASVNIAVKGVKKLDWNVPALNSLPVVRKVRRRASGAVDAPTVTQPTARAIRPMVGWECPTKPREASGLDPEAVHTVPSQAGKRRYGTMKSNRNMNRRMRP

SEQ ID NO: 2416 - protein, 396 aa, Acaryochloris sp.
MLTLTYEYKLAPTAEQASIFDGWLETCRKVYNYALRERKDWVNSRKSAVNACSIKQEYILPADEPRPTYARQCKALAVAKKVIPDLAVPHTHVLQQALRQLEAAFVAMWERGHGFPRFKKRMRSFVYPQLNQNPVQGSMISLPKIGLVKMRLSRPLPDGFELKQVRVVKRASGFYAMLCLQSEVSIPESSPSGHPIGIDLGLEHFLATSEGELVSRPRFFVDGQRKLKSLQRQLKRKIKGSKKSRQLQQRIAQHHEYISNARKDFHFKTAHHLCDSAGMVFAEDLNLKAMSAGMLCKHTLDAGFGQFLNILSHVCFKRGLHFAKVDASRTSQICPSCQTHTGKKELSERVHDCPRCGYKTNRDVAAAQVVMQRGVLAVGHTVSKLSEGKVNGLPQT

SEQ ID NO: 2417 - protein, 380 aa, Tolypothrix sp.
MCDKHQIIEERNEGKLSRSVLKTSGTGDSLAEFNNRCPIDRCPLICHIPELKEKPNYYTQKASLVQLKKDRPWYKEIHSQVLQEVPKKVEITFDRWLNGDSNGKKSGRPRFKSQGQYKTLTYPSFKRHHFANNKITLSKIGEVKVLVHRPIPDGFDIKTVSVTKKADGYYVTLSLNDKTVPTIKPDFDSNNIVGIDVGLIDFLVNSDNERIGAPKFLRQAERTLKSLQPKVSRRKKGSNRRKKAITQLSKQHKKVADTRKDFHFKTAKTLLQKYDVVAVEKLNIKGIAKTRLSKSINDAGWGQFLSILSNKAENAGLKVIAVNPNGTSQECSNCGHKVKKPLSQRMHNCPICHISLCRDLNAAINIKNRGASGLKARAIR

SEQ ID NO: 2418 - protein, 482 aa, Bacillus sp.
MEGIKEYRTYQIRIKKGHKLYEYFDKLCMNSNNLYNTTNFYIRQVYTAINNKKNLQPLQKEVMETIYQNLNKMNDKQTIAYFKKLRKEKTRPNEIRKEMILNLFEAPSKEKSFLGYNFLDCLFKTIKQKDYYSLPGQINQQTIKNVVQNWKSFFSSLKDYKENPHKYKERPSIPGYLPKGSRKEVVLSNQICKIVGEKFLRFPKTKTQLNIGKLVNLKGTFQQIRIVPKYGDFIVELIYLVGDKREVVAKKEHCMSLDLGVDNIVTAVFNLKIVPILFKGGKIKAINQWYNKLRSLYYAAIRNGKGPKEGGFHSKRLVKLERDRHLKIKDLLHKVSFNIVKIAKAHQIDTIVIGKNKEWKQNSNLGKVNNQKFVQIPHTLLIELITYKANAKGIAVIVTEESYTSKASFLDGDHIPTFNPGNKEPHIFSGKRVHRGMYHSKHNILLNAHVNGAANILRKVVPKAFANGIAAVCSQPLVVNVQ

SEQ ID NO: 2419 - protein, 437 aa, unknown
  TnpB Polypeptide
MMTLNYTYRLYPDSSQVFLLNEWLETCRVSYNYALRELKDWIASRKCPIDRCSLESEYIMSADYPFPGYHQQQNNLPKAKEAFPRLAAVPSQVLQTNIRRLHDAWDFFRHRGYGFPRFKKYGQMKSILFPQFRTNPLTGWQLSLPKLGKVQINLHRPIPDGFVIKQIRLIKKAMGWFATISIASDIEIPNYSPYGHCIGVDVGLLSYLATSDSFIEPGHKFFKETYRRLKVLQHRLSKKKKREESFGRNNSPQKCRSANYEKARLKVEKQHNHIAFTRKDYQYKLAHKVCDMADSIFVENIDFRIMAKGFLGKHTVDAAFGQFRSILKYVGWQRGKFVGEVDHRGTSQTCPNCRTSVRKALEDRWHSCPECQYECDRDVASAQEICNRGIEKTYRGTPEKQEIDSQVVLSGAMSLDKWRRGVMPNSDIGSPRSTLLE

SEQ ID NO: 2420 - protein, 353 aa, unknown
  TnpB Polypeptide
MLIKTTKAYRESCNYLSVIVFKTKELNQRTLNDLYYQELRSRFGLKSQMAQSVIKTVIARYKSAQVGGHDWNLVKFKLPEYDLVWNRDYSLNSNMFSLNTLDGRLKLRYEKQGMQHFFDGTWKFGTAKLVYKHKKWFLHIPMTKEFPELDFADVNHIVGIDLGMNFLATTYDSQNKTTFYPGRTVKHKRGQYKALRKQLQMRQSPSARKRLKQIGSRENRYVTDVNHQITKALVETYPKSTLFVIENLNHVRSVTEKVCVRHRYVLVSWAFHQFRQLLEYKAQRNGQRVIALDPKYTSQTCPKCGHIERANRNKKTHTFECRSCHYCSNDDRIGAMNLYRKGIEYIGTVTAGV

SEQ ID NO: 2421 - protein, 400 aa, Sphaerisporangium sp.
LIGMSRYRLQPSPAQEAALLEHCGHARFVWNLAVEQHAHWKPGRKSAPGFAEQCRQLTQARQANPWLAAGSVMVQQQALKDFHQALANFFGKTHKRPTWRKRGQGEGFRIVAVRSGDVRRLSRNVGEVKIPKVGWVRFRWSRPVPEDAKSFRVTCDPAGRWHVAFAVIPDPVPAPGTGQVVGVDRGVAVSAALSTGELLNTPALRDTEKTRLLRLQRKLARARRGSNRRGRVKLAIAKLKAREGDRRREWVEQTSTSLARRFDVIAVEDLKVKNLTRSAKGTVETPGKNVRQKAGLNRGILAAGWGRLVERLEHKAPGRLMKVNPAYTSQRCSACGIVDAKSRESQAVFACRSCGYAANADVNAARNIRHAAGHAVSARGGPALAEPVNREPQRNLLLVR

SEQ ID NO: 2422 - protein, 465 aa, unknown
  TnpB Polypeptide
MGQASRTTKLLLDLGKRDQGGANSEKRAALSATADLLNQARAFYLDFFLAHADKLAERVTYYSEEHLEMRERLISAHELLSWAETCTVETTAHPHPWTGWNFSERFPGMPFAYRRSVIKDAIGKARSYLSSLSNWEKSGKKKGKPGFPGARDHPTLYQGCHELNLEVLDTKDAFVRLNVYTGQDWTWMHYPVRSSRYTLARLLEADWKRQSPTLVLRPGCTELHIPQVKKIEAKKVMERKQDPKLVTVAVDLNVRNLAVITVRRLGIIVETIFVTDYGLDAHRYRHLKRIARKQWQSGRPVTGEHSNRDLWRHVDRLNEDAAHKVARQIAQVCARYPGCILLFERLRKIKPGAGSKSRRMNRRRANQLRGKINQHARQKAYLHQVVTVEVNAHGTSQYCSRCGAKGERFSYQNGSRLAVKWGKLFFCPRCHYEANADFNASVNVHHSFYREWHWQFRKKPPPSVA

SEQ ID NO: 2423 - protein, 451 aa, Glycomyces sp.
VIRAFKYLLRPTVKQQRALEAMLKDHCELYNAALEERRTAWSKCRERVGYFDQCGQLKDVRRDDPEGQGRWAAGSQQATLRRLDHAYTAYFRRCSAGRKPGHPRFRSARRFDSVTWPQHGNGCGWDPNRDDPVTRVRLLGVGHVRVHRHRPLEGRIKTITVKREGRRWYIVLACEIAVPEPWPKTGRAIGLDLGITRFATTSAGEHVPNPKHLEASAAKIAEAQRALAAFPARVPYSERTKRHRLASERAAKLHRRVARQRTDFAHKTALDLVRRFDVIAVEALNVQGMTRRVEPRPDPDRPGDHLANGAAAKAALNRKILDAGWRQFLNLLAYKAAWAGREVKAVNPAYTSQKCPRQDCGYTCGENRHREVFHCTRCGYHDHADRVGAMNVASRAGLVRFDGAHVPPEEVEPMWRTRRDGVIIGADRGSGGYLTHPARCPAGGQSEGTKL

SEQ ID NO: 2424 - protein, 429 aa, Glycomyces sp.
VFLRYRFRVYPTAPQRVALARSFGCARAVFNDAVEARRRARRDGTAYPSTATLSKALIIEAKRTAERAWLGEVSAVVLQQALADADRAYRNFFASLAGKRPGPRMGPPRFKRRTGLQSIRFTRNARFCVLGNGRLRLPNVGDLKVAWSRVLPSEPTSVTVSKSPTGKYYVSFVVAVEDCAEELEPIADPDAETGIDLGLKDFAVLRGGRVIENPRFFRRLERRLAKAQRVLSRKTKGSANRAKARLRVARIHEQIKDTRTDWVNKQVKALVSENQALYVEDLNVHGLSRGRVAKSVHDAAFGMFLTRLESKAARAGRTFVKVDRFFPSTRLCSTCGVLSGPSGLEGLKVRSWVCGCGAVHDRDVNAEVNIRREGKRLVAGGHSDTQNASGGDVRPGTPGRLRNPRQGKNEEPARSRTAPADREPGISVR

SEQ ID NO: 2425 - protein, 474 aa, unknown
  TnpB Polypeptide
MSVGATSVDRGTVTPVSSPKPATVTSTESVRLRLKPTNAQAAVFLRAAGARRFAFNWALAQIKANHDQWAAEATYNIPKAGRTRPFSYFDLVRAWDATKNEASPWHQEQSVWTFRYGIHAAHTAHTDFLQGKSRFPKFKARRRDRTRFTTTGPGVQLQPGRLRVAKYGWVALAAPCRAQAKLRRLLARGRARILNVTLSRDAGGSWYAAVCFERTPTAKPQAYSRPAGATVGVDVGVKTAAVVATSDRTPAASLEASRALRDALAHIKHLQRALSRTQEGSANRAKARLALGRAHARVGATRGSRLHQFTAELAKSHAVIVVERIATANLMHNHHMAQAIGDQGWGELARQLCYKTTRAGGTTLPAPRWFPASKMCSACGAVKPKLSLAVRTYRCDVCALVVDRDINAAANLAAWGEQRQGTRPAAGTQAGDRHPGGPSVQLAEHACGGSNEPVTLTAGALVEAGTSRPRTRAA

SEQ ID NO: 2426 - protein, 370 aa, unknown
  TnpB Polypeptide
MRKTFLYRLCPTNGQKTKLKASLDACRWTYNKTLEIRKKAWEERQESVSLYDANHFLPQWKEDNPNLTNAFSQCLQNAQLRVDLAFKAFFRRVKAKKTPGYPRFKGRDRYDSFTFPQSGFRLNDDKLSLSKVGSVRIRKHREIEGSVKTLTVRRTPTGKWWAAFSCEVEPEPLPKIEAVVGIDVGLESFATFSTGEKIENPRFFKTEEKTLAEAQQKLSKAEKGTPERTKKRKIVAHVHERIANKRKDFAHKLSLKLVQMFQLIAFEKLNIKDMMSNHTKVFEYKLNKSIGDVAWNQFIQFTTYKAEEAGRTVVFVDPRNTSKICSRCGQLVEKTLADRIHHCSCGLVLDRDYNASLNILRLGMESLASA

SEQ ID NO: 2427 - protein, 401 aa, Clostridia sp.
MIIKKSFKYRLRLTREQESLCSQTAGSCRYVWNRALALKKELWEKKKENLSCFDLNNLLAEWKEELDWLSSPPSQSLQQVNKDLDQAFKNFFSGRGYPKFKKKGVNDSFRLPQGVTLTKQLSKKVGQVNLPKLGIVRFTKTREIEGRIRHVTISKSCKNWFISFNCEDIPQPKEIPQSHIGIDRGIKIFAQCSNREAIPTVSPLKKNLKRLARLQRQLSKKKKFSSNWRKTKQKIQKLHNHIANLRNDFLHKVSTQLAKSHSLIVMEDLKTKDMAKSAKGTKEKPGTNVKAKSGLNRSILDQGWYTFQNHLSYKLNWRDGRLVLILPKNTSLECRICHHISKENRINQEVFQCQNCGHTENADLNASINILAAGHAVIACGVEALASTAKQELLIRKPAMV

SEQ ID NO: 2428 - protein, 231 aa, Bacillus sp.
LYLGVDRLVSCATNTGDTFLIDGKKLKSINQYFNKMIRNLQQKNMDNGISKRVVTNKMAALWHKRERQINGYISQTVGLLFKKVKACSIDTIVLGYNAGWKQNSDMGKKNNQKFVQIPFHKLIAAIENKCIKEGIRFLKQEESYTSKASFLDKDPVPVWSKDDSKQYHFSGKRMTRGLYQSKSGKCIHADINGALNTLQKSKVVELDESLKVKTPILLEVQKRKAVASCIA

SEQ ID NO: 2429 - protein, 400 aa, unknown
  TnpB Polypeptide
MLTRWRFRIDFTPDQTDYAELIGAACRAVWNTALEQRREYRRRGAWMNYAPQCRELAEAKVEHTWLSGPPCHCLQQTLMDLDKACKSQGTFNVHWRSSRKWVPSFRFPEGGKMAIEKLNRRHARVKLPKFGWVKFRLTRSTSGMTVRSATLLREGTHWYVSFLLEDGVEMMDSHSAQGGAVGIDRGVNTAIATSGGDLIDRDFVTVGEPRRVVNLQRKLSRAKRGSANRCRARRDLARVLRRERDRRKDFCAQTASRLAQANALVVLEDLNIQKMAKSAKGTIPNPGTNVKRKSELNRAIMSKGWYQFEKCLRSSARYTGTQIIKVNPAYTSQRCSQCQHVDPKSRESQAVFRCTNCKHSEHADVNAAKNILAAGLAVTACGDFLPLGTSTKQEPAGTRK

SEQ ID NO: 2430 - protein, 381 aa, Marinobacter sp.
MAKRAYKFRFYPTPEQEVLLARTFGCVRFVYNAVLRYRTDAFHERQERIGYAAASAKLTALKKDPDLAFLNEVSCVPLQQSLRHQQTAFKNFFEGRARYPRFKSKRYRQSAEFTRSAFKYRDGQLFLAKSKEPLAVRWSRALPCEPTTITVSRDSAGRYFVSCLCEFDPRVLPVTPKMTGIDLGLKDLFVTSDGLRIGNPRHTAKYAAKLAKAQRRLSRKKLGSRNRAKARQKVARIHAKLSDCRMDNLHKLSRKIVNENQVICVESLKVKNMLRNRSLAKSISDAGWGEFVRQLEYKADWAGRQVVAIDPWYPSSKLCSGCGFVMEAMPLTIRHWTCPDCATEHDRDINAAINIKAAGLAVLALGESVSGMESVSVSSSR

SEQ ID NO: 2431 - protein, 482 aa, Leifsonia sp.
MAQKIKLIGFKLDGAAFTGFDADGSPSFAQSGIATAQWLADTSRLRFNQRRSTRQRYSYRDGERAVDADGSAVLVPIGKVATDLSNKEARQEFPFMAAVPEEVLHYQVRQEDTEWWSAVKRRATLMASGRKAGAMPTFRSRKRSDQTFGVYSRQAQSAPKVAIHRTGRRSAVITFGGRNPVGMRAAGHTRSWTLTVRVRLTPKFELTPFTSMQVNLTSRTVILTSPVPTRVRDMTGAVIGIDMGNTVHIATSDGHLLNPPPTNHLLVTRKKAQRKMARSRRAAIAAGRNFWEVSAYQQAKKRAARATTRQNNILTQWRHQTTHDLVRDYDQIFIERLAVSNLNRSAKGTIDRPGTHVAQKRGLNRGLAHAAPATIAGMLAYKTIASGSDLTRVNPKHTSQRCNQCGHIAPENRESQAVFRCVNCGHAANADTNAALNILERGLGTWVGTHAQRGRRQKTDMPLGMPAGIDTTPKSTPAVNAA

SEQ ID NO: 2432 - protein, 193 aa, Moorea sp.
SSITRFSENCQKKVPGKKGFPRFQKHCRSVEYKQSGWKLSPDKKSIVFTDKKGIGKLKLKGTWDLWRFDKKQIKRVRIVKRADGYYVQFCVSVDCKESLKPTGNTVGLDVGLKDFYTDSNGHTESLPRFYRTGEKRLKFYQRRVSRKKKGSANRRKAINRLGRAHLKISRQREEHASAIRWLETENIGGLTAG

SEQ ID NO: 2433 - protein, 498 aa, unknown
  TnpB Polypeptide
  misc_feature (437)..(438): Xaa can be any naturally occurring amino acid
  misc_feature (451)..(451): Xaa can be any naturally occurring amino acid
MRTIRRITLKLNKAKWQALNELAKRYASEKDKHLLVYNSDQRFAQSVSERKQRDKLVARKYVNPNGLQARMWKMAHKDAYETVSRQWSAIAESLRSRVTCTVSKRVWNDDQKHYAFWLLKSPLRQAQLVCGFADVPTHFEISSTDQQPVRNYLRRTSRRQRGARPRVKIARSICLDECMYEIITHNGRQYIKIMGLKPRQRIIIPLTGNTPIRGNIRIVLDFENQRVEVHYAASVKATPRLTGAVCGLDAGVSEVFTDDLGNQYGLGFGQTLGEMSKKLNDKGRKRNKLHQLAKKAKAKGNWKKAKRIRKFNLGQKKLNRTRRKAKAELSRRINTSVNQVLKQRQPSVMVTEKLDIRGKAKSKRLSRLVSLWTRGILKERVEFKASAGGSRREQVNPSYSSQMCPSCGYVHRNNRKGDVFQCVRCKHADHADRVAAXXLKARKDDPEIFLXTPKERVKAILLARFTARLETDLGTVSGRTPDTVTGHSESETAQAILC

SEQ ID NO: 2434 - protein, 426 aa, Desulfotomaculum sp.
VIELARKKKSSNNAPMQTFTARAKVVNLSDRDALLLGLLGFVATKLWNVANHHRRIVWNETGKIPGFAEQCRELKNNRWYRLLPSQSSQEILGEQDDSYRSWFSHRKNGDKKAHPPGFRKKDTLSTVTFKQNAFEMLPDNRVRLKLPKTYGTREIVLEYQLPPDVTLGKVQQVKLVYEPRTGNWYLHITYRVSVKYKETGNVMALDLGIVNIVAGLISDGFSFIVPGGELLALDRYFQKEKARCTRSTSRRCIELNTRWGRQRNHYLHVLSRWLVNLAIAHNVSVILVGELKGIRADKDWGDAGNQKLHAWPFSKIISLLTYKAALAGIRVVKVPEKSTSTTCPVCGRRVKKARVHRGLFVHCGVALNADLVGAHNILQRYLREAGLALPDRSGVVGALARPAVNLFVWRKATPLGREQGTFRQAA

SEQ ID NO: 2435 - protein, 455 aa, Desulfotomaculum sp.
MVKSKISFKRQVNTMLMTEKVLLDPTPEQREWLWEMSRTATRLYNLALEQRRWYWLRYHHTRPGITYQYQNAQLVELKEAFPEFKVLYSLVAQEVLRLAQKDFNSFFGRLKNQKKNGNEITARPPRFKSSKYFFTLCYVQSGFAVKDGKLILSGGMEPCPDKKGRVRYRQRKEAIQIIGYRKLPDKVHSLTVTYDRKTGNFYANLVYEVEPLKADTVQPLKIAAFDPGVKTFLTGADNCGRIIIFDSLVKRATGYFDRQIDKVKSIRDKCKKGSRRWMYLNEVLDDLYRRRSAQIDNELHATAKLLAGGEWDIVGVGNPDKQGMVSDDPDKGRGNQTINRAVQNNWPLKKQNKFLDYKLEYQGKLFLPLDEKYSTQECSNCGHRMKLDPSVRVYRCPKCGMVMGRDENSSINLLNRVIAGTAQRRVNYKDFRVRIIFHRTLCGKWTHREELLKPA

SEQ ID NO: 2436 - protein, 477 aa, Desulfotomaculum sp.
MQQTVRQKSLPLNNEKWAKITETAEAYARQKDAFLVEYGHVKYLHYLGEKRKLRDELVSAGFVSPFGLQARQWKLALEDALYTLERQWEVAVVEVKERLYRHEELTDEEKHYAFWLLYRYEKHSRNWKRIQAVFTGEDIVSEEINLDAEGRARVRKYLKRVFRRVLGRKPRVKKARSFAVDQQMYRVFATEKRQYIAVATLTPGERVVIPLAGVHAIEGNLRVILLPDERAVEIHLTREPRTYPPGEGEAGIDLGVTEVFTDDTGRKYRPEYGEALQEMSDHILDKSRKRGKLRALRRKFLEQDPNKARRILKHNLGLIKQTKRNKKYRTRCENEINRAFNEFYKERRPKIIAYEDLAHLRGKAGSRGLSRKVSGWQRSIIKERLGYKNYIYSVTDPGPVNAAYSSQTCPVCGWVDTKNRCGDVFKCRKCNFEADADNVAALNLKLRLHDEKITRYMPYKKVKELLLQRYYQKQQAN

SEQ ID NO: 2437 - protein, 567 aa, Desulfotomaculum sp.
MKKPKKKATINPDESIKYTVCGEWFPESFPARRSLRWGRGGEDPLATEMRLFCSCQRWAFNRLQEGRSREELKREGQKLFGINSRFCDDAVLKAKAIIESQRGLLALEIEETETKLARARKKLGWAEKDLGKAVEANDPVKIEKAERAVHGRKARVKRLKTKLDELKTHQNNGTIPTVVFGGRSLWKRVCRGRATKEEWRNARQDRLYARGDETKGGNPNIKISYRSGEFALSVTISHLSEQTGTDSRGRPVMTRAPRVEGKLWLPEKHRLKVWELLLLGTPYTVELIRGRDGRYRVHISFAITAPEPVTSPSRGYLGMDTNPDGVALANVNYFGQPEPWPEGFTVPHPKALHKFAGEFQVTVQPNGFLYIKIPELAYSRGYRRTYLIGVLAKVVVDIAKFLGKPIALEDLDFGKDRLDTDRKFNRIAANFPFKKIIEAVMRRAFKEGIGVEPVWPAHTSTIGYYKYMERYGVIVHHAAALVIARRAIGFRECITSELKQKIRVIKEKLNQKVDSLPGEGRGMTRKVKRLFKRLEGKIPIHNGLTRFKQESFYSVWHELMQLVLSSR

SEQ ID NO: 2438 - protein, 433 aa, Desulfotomaculum sp.
MKRCNIVRVLFSKVQAKVLETLGDRCAALWNAANFRCRRAFLKGEPVPSYATLCAEFQGHPAYKALPSDIAQEVLKKLRKAWNSFFALLRLWKEGKLEKRPGLPRYWKDRRTGKRLVKLIPVKSPRSYSLDARTLSLTLPKDLRDGNSRLVLHTKGILRFHGAPKTLELRYDRAKKRWYAHQVVEIPEPARKTRPEKYAALDLGARVLAALAIEGLNRQILFSGRKIWKDFLYWTKRIAEEQSRLNRAGRKTSRQLRRLYQVRARRLRHAFIALAAEVVRVLKRHRVTTLFLEDLTGIREDMDFGPKNLLVHNFWAFRMLRNLIEAACARAGIRVVPVEPRGTSSRCAVCGSPVKRLVRHRAVCERCGRVWHADANATVNILHLGSSKGHGAEATPQKPLALRWNRHRWVSRFESAAGTPKATSGSRMAARAA

SEQ ID NO: 2439 - protein, 440 aa, Desulfotomaculum sp.
VSWAKKKGKKRENRLYLTRVVPLSLETWLPVFDAPMLAATKIWNSCVWHSREARENGEKYPTESELKEKFKSYESWKQLHSQSAQAVVEEYFEAVRSYAKHKDNGHEEMRPPGFKPKTTLRTITWKRQGFEYRDGRLTLKLSRKLDDIEVPLPEGFDTLELPDGTVLKGVPVEVKVKAVYRKNKVAGLELHVTWDFGVVPLVLAGKVSAYDLNSPLVARASTEGTQQLIVCRELLALVQYRNKVIAEFQQKMSHLKEGSRKWKALLAAKRDKLKKLDRRIKHLTNALTKLMAELDRAEDITFSVLGDLTDIRRKARTGDKNKKANQKINQLPYAQIEQQHSYKSLLRQVCPDKASEKYSSQTCSHCGARNKSYRVHRGLWRCNNCGAIMHADLNGANGILKNYLFGRCDMGQVLKLKPPEVYRWDKRFNRFVKVSPRAAA

SEQ ID NO: 2440 - protein, 416 aa, Desulfotomaculum sp.
VSRCKNNAVKEPKAHSLEQAADILVEKFPLHLNPEQTLLARNLQMEAARVWNAACNIHRTIYGRYGYWLSEGAIKALLKGKYGLHSQSVQAVVETYFECCERTRELHLQGYTEWKYPYRRKRFFTVTWKKAAITHKGRILKLSNGWGREPLMVKLPKRLTNAAILQAQLVWHRNQYWLHVTVEKPALLKVQGDVCAAIDPGEVHALTITDGNDALVISGRLLRSLNRLRNKVLRQLQRAISKTKEGSRKRRKLLAKKYRFLNWIERRIEHTLHAISANAVRWCLGRSVKTVYIGNPEGVRERDCGRKHNQRMGQWALGKLRDLLAYKLKRHGIELIPVDERGTSGTCPVCGEYTRQTGRVYRCGNATCGFTGIHRDVLGASGILDKALYGGFTRGRRLPGKVEYLRPQVLAPKRAA

SEQ ID NO: 2441 - protein, 441 aa, Desulfotomaculum sp.
MPHLRGFIKTFRYNLLMPASAEEQAACTIMQYRQVVSYYLQVFQEHQEIIGHSQWLKMAENLTHRTEDNPNAEYPFDEEFPNFPSGLRRNAIAEAHGKALAWRTSYEKWEERKRKHEERNARRIAAGKKPIEFTKRPPQYPEGDNCWLSYYGTEYKWEDSHHIMLKMFTGRSYTYRKIALLQPFVVPPGYAAGSPMLVKKPTGWELHVPIVRVAKLNLKKIEKLVKDPSLKICLVDLGMKRHAVMTIQDTKGRVYAAKFISGAKDNHLRKRYLEKIVNLQMQTGVIPKGERFAKDLWNKVSNLNDDIAHRVSREIVDFAEHHGAKIIVFEYLDDLKPEKGTKSHYLNQKFNYWVKGRIFRYTRYKALHEGIVTCRVPAKNTSARCPYCGMLTIRRYNKGRDGKEVKGVDLAKCTNCGVRDINSDFVGSLGIGTAFRLKYCL

SEQ ID NO: 2442 - protein, 406 aa, Desulfotomaculum sp.
MQQTVRQKSLPLNNEKWARITETADAYARQKDAFLVEYGHVKYLHYLGEKRKLRDELVSAGFVSPFGLQARQWKLALEDALYTLERQWEAAIAEVKEYLYRHEGLTDEEKHYAFWLLYRHVKHGRNWKRIRAVFTGEDIVSEEIKLDAGGRARVRKYLKRVFRRVLGRKPRVKKARSFTVDQQMYRVFNSGKRQYIAVATLTPGERVIIPLAGVHAIEGNVRVVLIPEENCVEIHLTREPRTFPPGEGEAGIDLGVTEVFTDDTGKKYRPEYGEALQEMSDHILDKSRKRGKLWALRRKFLEQDPNKARRILKHNLGLTKQTKRNKKYRTRCENEINRAFNEFYKERRPKIIAYEDLAHLRGKAGSRGLSRKVSGWQRSIIKERLGYKSQTVFDILKRGNSQCPPT

SEQ ID NO: 2443 - protein, 489 aa, unknown
  TnpB Polypeptide
MSSLTYIKGLPTPEAELNALGFSEMEAFLTTFAPTFRLAAIETVNHLLSADAFDKSKWNTHLQIAYTINKRHANGVIAYAKGKVDGAKEQRNLHIKTLQGKAKSIELWLGKSEKKLKAANKFYAKKKWRTGKTGCRFPLSCFIDSKQTNWQSLRSSIHQKRRKLFLIQNKLVALKLAPIRVSVPHDQVFLVGSKDETLGNQVAQWDGSILTIRVPACLEGRFGKHISANIGNFDRGINRLPNDGAKSWHLFRKDGSWKVAVQFTPSPVPRQSKDRDHGGIGIDMNPGSIGWAYVDHEGNLKAKGQLPLQMGLPSGAQQAQIVEACLQLAALAIAFQCPVVCEELDFADKKQRLGEVSRKYARMLSSWAYSEFYKQLGSILCNRGIELITVNPAFTSIIGLFKYMRMYGLASDEAAGLAIARRGMRLGERLPDSITAYVEVNSAKHVWSQWAELNRKTKQSGKVNRRHDYFTVSNWSSLANLKDEEAATH

SEQ ID NO: 2444 - protein, 295 aa, unknown
  TnpB Polypeptide
MKVDYDEKSVRITLRPGEYVEVSWNGRWFARRVEGWRVGEVILKDDRILIPFETAKVVDVKDVIGWDSNELSLDGFSPRVGFIKVDLRPLQSMKIVYERKKRIAQSKGLKYVYEKYNARERNREKDFINKLASGLTKLFPNSVHVFEDLEKENLVSRREPKGRRKRNARTPWELIQGKASERAVIERVPPENTSRTCPRCGYVVKTRVGRVFRCPRCGLELDRQKVAAVNIYLRYLRMRGFPHSYDPERVKGELWVGVALRGRSPVIWAPMKGALRAVKPREEGLISSYIKPNEA

SEQ ID NO: 2445 - protein, 643 aa, unknown
  TnpB Polypeptide
MKRKERVMGLQVVKTIKIPVHYDVTRRKLLILDRLTARTAYGVWVWSNLFKKHGLNGSYGDRRQFYEQVKREAKLGTMAQCCFDTAAWMWSSYREAHKAWRREVTIARREGEWKWLRKLLRREPQEPFTNGMQRKVPIWFDSRFGVIEKSKHIKLFSYVARVSTLRRGVKLTIPLNPAKHHLDMLEKGALKSFQLVKRDGKYYVHVKMESHVPTQPVHAVHGVDLGVKRSIASVMLRPHQPLRSSDFAIQTDGLKRDRLNRLEKRIAKLQQARKWEPLKWIRHKRLHISEYCDRLAAKQVAASSQNSLVVVGYPKGIKYDNARGNGKPWQRKHLASWTYGRMVQYIQQECAKQGIPSEASDELWSSQTCHRCGSRHTERLTQSIFHCWNCELIYNADYNAAINIGSRFLASPLIRQATDDLAYARNEQAREIVACEPRSPHPFMGGSKSQAVDAPSLRISIQDKTIDMAEIWKATFRLENEEEAKRFQDFLSQQLRQPNKSTASGTNIVIESPDENESFVAAHWSKNKNPVGPVLYSVKGYDGEQRVIFDSGCPVCRREKNAGKSRTAHWEHKVRGKQATKPSPILATAQQPVQRELLSSAKIAADGRIRLNSRVLKKLNVKRGQVLDIWYENGKVMLQRESE

SEQ ID NO: 2446 - protein, 404 aa, unknown
  TnpB Polypeptide
MKIIRGYKTELDLNNKQKTACLQHAGTARYAYNWAVAKKIAAYKKGEKVPTAIDLHRALNKLKQTELSWMYTVSKCAPQEALRHVDNAYDNFFRKVKLKKQGKYKGKLGFPKFKKKRKGIGSFRFTTGAIKVFPHAIQLPRLGKLRLKEHDYLPTDAHVLAVTVSEQAGRWFVSVQVEEEQQEPVNTATTAIGVDLGVATLATCSDGTTFHNPRSFKHNLKKLKRLQRAHSRKQKGSKNREKSRQKLAVLHARIANVRKDALHKFTTHVCKSHAHIGIEDLHVAGMLKNHHVAQAIADSSFGEIRRQLTYKARWYGTQLVVIDRFYPSSKTCSVCGYVLEKLDLKVRVWQCPNCQTVHDRDDNASKTILAASSVERLNACGAGSSGLFSEQVKLAVLKQEQNSM

SEQ ID NO: 2447 - protein, 381 aa, unknown
  TnpB Polypeptide
VNLGSVDELYALVENDPFADGEIVLKMVIQGAWYRLIFDFDNKRFTEGKVARPLIKVQDGEPVFIFTVVTDNPVVQFSGDYTIGVDVGINNYATVVVREVATGRIVCETTLSQRVHSLWNSVRASQRQVRDLRKKAATLLHDRQERMSDLDEAQFHREAASRKKRELAILAAQEIADLSHLRGNAVVAVEDLGWISNTMSSGRWNRGELVRWLTHYVSQNGGWVVSVNPANTSQKCHKCGVRVSHPAHEVSVCTEHGVMDRDVNAAANIAARAVPRVVKARATRAKNRKLRPQAPLKTPVARASLKYPGRDRTKNKPTEKRKNHHRTVREVNLPLRPARAQASCLVARVLADQGACVALGTSKAALKQGNVAYECRLYSLI

SEQ ID NO: 2448 - protein, 532 aa, unknown
  TnpB Polypeptide
MPRAKSDIYTPTYQTRIHSSEMEDEVLCAFAALFGTVQRSLFADLARGKLVNDCKSSYIKKYGITARHFNAIKVGLEGNIASAKALQQLRVKTLRNQIESLEHFLKKLSKKDPRVVHQKKRRLSCLTSRLHRLEEDVSLGRIHLCFGSKKLFRAQFALLNNGYQSFEEWGEEWRGSRSNGFFLLGSKDETAGNQSATASIQEDERISLRIRLPDALRTYGKYLVLKDLYFSYGHDRIVAALKNEVSPVAISYRFVLDEKGWRVFATLPITKPQVTTQKGRGVIGIDINADHLAVVETDRSGNPIQHIRVELNTYGKSSGQTKACIGDAVKTIVHQALLVQKPIVLEDLSFDQKKCELREIGNPRYARMLSSFTYHEVTQFITSAAARNGVEVGAVNPAYTSVIGRAKFCKRYGLSIHESAALCIGRRFLGVSERLPRHLNEIADGKGGFVTLPLPVRNRGRHVWSSWQQVRKKLPAALVAHFRAVKNRSSGQSNLACCDTKTVLDFVGGTPARESAAELLGCRVFGRVLNSL

SEQ ID NO: 2449 - protein, 254 aa, unknown
  TnpB Polypeptide
MSKVNLPGYMKKGNRRELWAVLRKDQYRVEGDRIILKGLGAIGWIELRYKGLIHLRGKQGRLEIHYDKARRRWYAHIAFEASEKAVRGEWTPIPTKPKGNLTAGIDIGVNNLIAVYIESGLAKLVNGRPLKAISHYWRSRISGYQSKLNKCGSKTSRRLKAKYSRWRSHVKSYVNSKVRQTIEWLHKAGVSVVKVGYPRYIAQENGNFNNTHVWTYRYQLKRIKEVAEEYGMTAVYMGEAYSSTTCPVHRDGNA

SEQ ID NO: 2450 - protein, 130 aa, unknown
  TnpB Polypeptide
MKKITNTKTDFLQKLSSQLINENQVICLEDLQVSNMLKNHNLAKAISEVSWYKFTTMLKYKAQWYGREIVIIDRYFPSSKLCNICGWKYHDLSLNIRKWICPECKTNHNRDINAAINILKEGLRLLNYNT

SEQ ID NO: 2451 - protein, 418 aa, unknown
  TnpB Polypeptide
MENHRKGVIIMQKVIKLQSVELTHKKQSELSDARTEAKRVLEKFILPNIDSCEDNGQLQQLVYDNIRKESFLPSQVLLNLIRTSFHLKQKPPEKRNIDRITLDYNIPRACKMFVLNDKKLCFAITLKPRHRIVIPIESNGSVGRFQKQIAAGWKIKQVGLTAQNEIIATIEKKKIRKDYKNILGIDTNSNNVSVTALTPKGKVLKQLYLGKNLYDKKAKILKHRAKLQSHADKGSSKANEKLRKLNRKVGNINKNAVGEISKQIHEIAEKYQAKIVFERLHKFEANKGKTFNRKVTLLPFKMLAMTVAIRSVDTGVPMGYVDSYHTSKWCSGCGSVNPPHDSRNYAIYRCGNCGLVVNSDRKASLAVAVKKFAERKEYFQFSAKRVPVNALFRGDESNAIQATENAFALSDPKEAVCL

SEQ ID NO: 2452 - protein, 301 aa, Hyella sp.
LLLLKKNPFGFYISLPKIGIVNVRHHRPLPDGAVLKQAQIIKKADGWYINLRLEDKTVPNFASEITPTWENSLGMDAVLHEDDYLATSEGVKLPSLKSFRKSQSKLASISKRKSTQKKGSKSRRKLAKREAKLHQQIARARKDHAYNTAHALLNTGASVFFHEKLNPARLSRRNKPKTDDEGKFLPNGQKAKSGLAKSWSDAAFGQFFNILKFKAEKAGAYVIPVNPQYTSQLLPYRDEFIFTDCSIREYWDEEYQLLIDRDLSAGINIKRVGLDVFPTISAIRSPETSYEGDWGLLLSNQ

SEQ ID NO: 2453 - protein, 457 aa, unknown
  TnpB Polypeptide
MLTGIRTHFYPERELAETLSQWIGCARVIYNAKCDEDAYLRTFAKKYLPVGTFPDINKSTSQYKDKELTPWLYDCPSQILRNSATIWARTYQRFLKGLGGRPKRKNKSRGNYIWVTKELFRIRWEGCVCILSLGTEANPVGSVRIKWNKKRIPTSPPASVWIKKAAHRWYISFSYDDGHILEDVSNKDHLKHLRQFSEAELETMITSVDRGVAKPLHTDSAIYFLSNKEKRRMAERERKLKRYQRKMARQVKGSNRRRKTIQQIARLHEKTANVREDFWHKTTRSLVDNSQVVVIENLKLKNMTKRPKAKQCEKTGKWLKNGASAKSGLNKAMLNVSLGRFEVLLKYKMEKVCKPLFRVAPHHTSQECACCGYTHPDNRENQSDFKCRSCGHQDNADHNAAIVIRKRAIKLILDSGTELVGTDKNILQSRTNVNSRKTRGAKVPVATNCLSKEKIAA

SEQ ID NO: 2454 - protein, 426 aa, Sphaerospermopsis sp.
LFGCQQVLIKTDKETQAIIEYLCYQSNNLYNCAVYYARQIWFKTGKIVSGFDLTAQMKTNKHFNAGYASSMQQTCLNVGEAFKSFKKLLSKAKKGELNQKPKPPKYRKSGGLFTVTYPKRWLKLKNGLVRFPLGNRVRAWFGISDFFLPLPTNLNWSDIKEIRILPRNCCFYAEFVYKSSVKPIKLNKSNVLGIDHGLNNWLTCVSNVGTSFVVDGLHLKSLNQWYNKSLAKIKENKPQGFWFKRLAKITEKRNRQMRDAVNKAARIVVNHCLENNIGTLIFGWNEGQKNSSDMGKKNNQKFVQIPTAKLKNRIEQLCEQYGIEFAQTEESYTSKASFLDTDELPKHGEKPDGWKESGKRIKRGLYKSNKGYLINADCNGAANIIRKVATKLGLELSGISRGALSAPKKVRLWTLQKSPRLQTGEA

SEQ ID NO: 2455 - protein, 195 aa, Nocardia sp.
VHPQNPPGPTRRCERTWRPGNYGPAGSKRRERVAAEPIRFRKDAAQPFDDRCLSWQLDARTVSIWTVHGRARNIPFACSAEQAKMLADHRRGESDLVYRGGHWYLYATCEVPGPEFSDPSGGFVGVDLGIANIATTSDGARYAGNTSTRSGTATGASANACNGKQRNQRSGYCAGSPAARSGSPPTPTTVFPRRS

SEQ ID NO: 2456 - protein, 352 aa, unknown
  TnpB Polypeptide
MRYLLACIRERVKAESREHYERHEKACPPGWLQKEIAQPLHRKLGLPCDALSVVKVVQTVRQSFLNWWRRPDHYRAPARRHPDRYPANIYVHNQRLEVDPERGRVRILGNKVGWMRWRGGRWPAGKIMSGRVSYRGGRWYLSIQFDAPAPEYSRPKVEAVGIDPGIRAMTAHDGERSMQFRRIPERSKKRRRRLDRKLSRCKPGSARYRRLRTTRARQQEYQANIRRDTSHKATRALIDHAGIIGYEDPSAKAWQESKMFGEASREAAAGEFCRQLRYKGEWAGRKVVAVPESEASTQTCYECGERTLHMLGVALFHCNHCGHSSGRDSNAAKNIRRLAIEGARAAPPEGVG

SEQ ID NO: 2457 - protein, 252 aa, Clostridioides sp.
VYCGQHIKLPKLGMVKIRDKQVPKGRILNATISKEPSGRYYVSLCCTDVDIEVFENTNNQIGLDLGIKEFCISSCGDFIENPKYLKKSLNKLAKLQRELSRKTIGSLNRNKARLKVAGLQEHIANQRKDFLQKLSTTKLIKENDIICIEDLQVKNMIRNRKLSRLISDVSWSEFIRQLEYKANWYGRQIVKVGKFFASSQICNKCGYKNEEVKDLNIREWICPSCNETHDRDINASINILKEGLRLITIQNK

SEQ ID NO: 2458 - protein, 450 aa, Clostridioides sp.
  misc_feature (312)..(312): Xaa can be any naturally occurring amino acid
MYPNKKQQELINKTFGCCRFVYNKYLAKRIEVYKNAKETFTYKQCSSDLTNLKKELKWLKEPDKFSLQNALKDLDNAYKKFFKEKAGFPKFKSKKINRFSYKTNFTNGNIMYCGQHIKLPKLGMVKIRDKQVPQGRILNATISKEPSGRYYVSLCCTDVDIEAFENTNNQIGLDLGIKEFCISSCGEFIENPKYLKKSLNKLAKLQRELSRKTIGSLNRNKARLKVARLQEHIANQRNDFLQKLSTKLIKENDIICIEDLQVKNMIKNRKLSRLISDVSWSEFVRQLEYKANWYGRQIVKVGKFFASSQICXLKVARLQEHIANQRNDFLQKLSTKLIKENDIICIEDLQVKNMIKNRKLSRLISDVSWSEFVRQLEYKANWYGRQIVKVGKFFASSQICNKCGYKNEEVKDLNIREWICPSCNETHDRDINASINILKEGLRLITIQNK

SEQ ID NO: 2459 - protein, 223 aa, Erysipelotrichaceae sp.
MRYAVSWTQGVLSWRVSSLCAEEKDSLSNALHRVSVFQSLHGSHDSGRLWNIAKRRNKNLAHQVAREIMNFAIANECDVIVMEYLDTRGKKRGSKKQKLTMWKHTDIQNTAESLAHHYGIRVSHVNARGTSRLAYDGSGRVKRGREVSEDTPYDVCVFKSGKTYNCDLSASYNIGARYLIRVLFMESPDLMTKVSGIGSGTQRTLADLWKINRAMCSLLPAAV

SEQ ID NO: 2460 - protein, 323 aa, unknown
  TnpB Polypeptide
MPGNKSNALSRITSQNPRSQSGKRNIQTSLQFTLRSYRMSHNGLPGSRGRDGMTASRIPSLVSTSTMPARTSASKIGDIPIVLHRPIEGNLKTHTIRRSATGKWYACFSVEYEPAPAREKDTVVGVNVGLESFPPFSNGEKFEDPGFFRTDEKALAKTQRELSKTEKGTPERKKARKIVARIHERIANRRLDFAHQTSRQLVVRFGTIVFEDLNIKNMQKNHHLAKSIADVAWNQFITVTENKAEEAGSRVILVNPRNTSQQCSRCGMIVKKTLSNRVHSCPHCGLVMDGDQNAGVQHYEIGAAISRVVSRMPPTREGGAVTL

SEQ ID NO: 2461 - protein, 410 aa, Herbidospora sp.
VRLRYNFRLSPTAGQRQALAQAFGCARVVFNDGLRLRQDAHAAGLPYISDGDLPKRVITEAKKTPERSWLDEVSAVVLQQALADLNTAYRNFFASVSGKRKGPKLAAPRFRSKKDNRQAIRFTKNARFSITAGGKLRLPKIGDVPVRWSRDLPSEPSSVTVVKDAAGRYFASFVVEVVKQSLPPVEAETGIDLGLGHFAVLSNGWKIDSPRVLRRAEKKLKRLQRALSRKAKGSNNRAKARKAVARQHAKVADARREFHHQESTKIIRDSQTVIMEDLAVNGLARTRLAKSVHDAGWSAFVDMLEYKAALYGRTFHRIDRWFPSSKLCSACGARAESMPLNVREWTCPCGAVHDRDINAAINILAAGWAERLNTSHTSGRDGTRRPGGGPVRPPLAVAQPREAGSRRCAA

SEQ ID NO: 2462 - protein, 227 aa, Pseudoalteromonas sp.
MIGGDLGVKRLIILSDGSFVEPIDTSKQTIRIKRLQKQLARKVKFSSNWKKLKAKITTFHTKVANIRHDKLHKISTQLSKSHAIIVLEDLKIRNMTKNSKGNSEQHGKMVKQKSGLNRVILNQGWGMFKEMLKYKQDCLGGQVIFVDPKHTSQTCPACGHQSKDNRLTQSKFECAKCGYQDNADHVGALNILARGHRVLACGEIDISQLVEAGTCLMSDHKAPMVLN

SEQ ID NO: 2463 - protein, 505 aa, Pseudoalteromonas sp.
MAIRGFNIEITDKMSSKAATHFARWIGGSNVMRNQKIEESLELIRADKGSDIDQKYAGIKAKPELSFLKEIPPQILRNAASMLFSDINACRSGLRKFPKPKGRNRKRSCVVTKEMFILEPLNEGRALLTFYEKASKKPARMFSIKLDYEPDQLAKQFRISRQGRRFYLSGSYNDGVESATNEELLKGFVAQSLSDDELLSQITGIDRGVKLPIATSDGLRKAYSPETTERLKRLVQKKARYQRILARKKRQNNNKNTRRVESNEQQKLADKIANFDAKTARIRHDFLHQTSKEVVLSAKSIIALEDLKLKNMTKRAKPKRGKHGRGYARNNANAKSSLNRSLLNVALGKLGDFIKYKANDYGKAVVEVSPAGTSQTCHMCGEKNTIRPQQDTLICLNGCGTFHADDNASIVVAQRAVPYIQESTFAEKAKTRKKTAVRKKAVTPPLGSELASTEKSGELETASTDVSLVCSRTQADVRPSSTASLVQRNSLTTMDASVTGVLETR

SEQ ID NO: 2464 - protein, 427 aa, unknown
  TnpB Polypeptide
MQRMDPVNRKVTYRLYPSSKQEAVMLETLRLHQRLYNVALEQRRSAWQRVQKGVGFADQCRQLTELRAAFPEYAALNAQSCQVTLKRLDLAFAAFFRRVKCGDEPGYPRFKALDRFSGWGYKTHGDGWTLLPGKAMQHGQIRLSGIGKVRMRGKARTEGEPVTCEIMRKNGKWYASVTVECSPVRQCGDRAAGFDWGVETFATVAYDDGAVEMMENPRHLKRSADVLAVAQQALSRKQGPPMRRVPSNRWRKAKARVSRIQEKIACQRRDFLHQTSARIISDVALLAGEELAIKNMTASARGTIEEPGRNVAQKAGLNRSILDTAPAMWHSMLSYKAEEAGAMYLESPTRELKPTQRCHACWNVERKSLSDRVHHGSNCGTVCGRDENSSKVNLRWAIAHTGWEPARHLETAPAVSGCETPAIARSL

SEQ ID NO: 2465 - protein, 411 aa, unknown
  TnpB Polypeptide
MSTIQRAYKTELDLNDQQLTACRKHAGAARWAYNWGLARKQDAYRKTGNSPSAIDLHRELNALKQTEVPWMYKVSKCAPQEALRNLDRAFAHFFRRAQLKQQGKLHGKLGYPTRKSKKRGLGSFRLTGAIVVFPGVIQLPRLGRLRLKERGYLPTGGVKVFSATVTEQAGHWYVSLLVEHEHVVPENSGPVVGVDLGLKRLATLSDGAIAENPRHLKTRLRKIKRLHRAVTRKVKGSQNRKKAARRLGTAYRTVANQRANTLHQFTSRLAKTKSVVVIEDLNVAGMLKNHSLALAIGDVGWGAFRRQLTYKAAWYGCRVVVASRWEPSSKTCSGCGWVDDTLTLADRVFHCEACGLVLDRDVNAAINLAQLAGSSPDSLNACGGDGAGLGRTAQVKRSSAKQEPDTFSTPV

SEQ ID NO: 2466 - protein, 395 aa, unknown
  TnpB Polypeptide
VVIAIIKTIRVMLIPNNKQKTKLFQYANTARFAYNWALSREQENYKNGGKFISDGELRKEFTQLKKTDEYAWLNDVSNNVTKQAIKDACDAYKRFFKRNSKFPRFKSRKHSIPSFYQDNVKIQFTCTHMKVEGFAVSKKKNKQKLNWIKLAEHNYIPTDCKCTNPRIKYDGVSWWLTVGIEYEDTTKTSSNEGIGIDLGIKDLAICSDGNKYQNINKMQKVKKLEKRKRRLQRSISRRYEKNKKGASYCKTSNIIKSEKELLKLNHKLTNIRHNYLHQTTSEIIKREPSFLCIEDLNVNGMMKNRHLSKTVQQQGFYEFRRQIEYKAEWNNIPVIIADRFFPSSKLCSCCGNIKKDLKLSDRIYKCECGNVIDRDYQAALNLKRYGENVLKQSVA

SEQ ID NO: 2467 - protein, 392 aa, unknown
  TnpB Polypeptide
MFCDFAHKSKNLYNHANFLVRNEFVKKNKWLRYDKMDKMLKTDLKFDDYKQMPTAQSAQQILRLLEKDWKSFFTTIKDWSKNKDKYLGRPKLPKYKAKDGKHILILTNQNVKLKDNILVFPKTFCGFVMQPQFIKHDNFVSFQQVRFIPNYKSFIVELVYNIEVPNKVLPDNKRYLSVDIGLDNLATIVNNVGLKPIVINGKGLKSINKYYNKQISHYREIAKRMNNRDYTNRMNNLTMKRNRKIDDYMHKASKYLIDYAITNNFNTIVIGNNKAWKQESTMSKIVNQTFVGIPHMRFIEMVKYKTQNVGINIILTEESYTSGTSFLDNEEPVKTNYNKFRRVHRGLFVSNNGTKINADVNGAYQIMKKVFPNAYVDGIQGVVLHPIRVSVA

SEQ ID NO: 2468 - protein, 379 aa, Clostridium sp.
VGYRYYSQEQLNHFLGIKGIETKKVIGYCRVSSHKQKDDLERQEDNYKNGGKFISDNDLRKEITILKQDSLSWLNEVSNNVAKQAVKDGCDVYKKFFKKLADKPRFKSRKKSKPSFYNDTSKLKVKENSVLIEKVGWIDIKKNTMPMNCKYTNPRISFDGKYWFISVGIEKENPIVELTNESIGIDVGVKDLAICSNGMTFKNINKTKVVKQLEKRLRRLQRRVSRKYLKNKEGSKFVKTGNIIKIEKQIKLLHRKLANIRSNHIHQATNKIVKTKPSRVVMETLNIKGMMKNRYLAKAIAKQCLYEFKRQMQYKCEFNGIEFVEADKWYPSSKTCSECGHIKSKLSLSERTYICEECGCVIDRDYNASINLSRYELVG

SEQ ID NO: 2469 - protein, 363 aa, unknown
  TnpB Polypeptide
MKIIRSAKCSLKFANEIKLAKLSDVLDEYTRVVNLFIESFWRECPSKAQLLKPIVDSVLPSWLSARLRKVAAREAIDMIKAARERWGDDAVRPTHHGKRMCVSSTIATLGASKTVDFDRWLHLASLGDKLCIDLPIKLHKQFHKWDSKGKRLESYVVTNEYIQFAFEVETGPKKPKTVCVGIDTGIKALASLSTGEQLGTDVEEHIERIHRCTHGSKGQRRASRALRQRMAEVAKEACDKASLVVVENLTGITKNTKLKRRLNKSMRRSIGRWNVRFWLDRLRMTCEEMNVSYRSVSPYQTSLKCSSCGCVDRRNRSKENFLCRNCGHADNADINASKNILERFLTGPYGAGCKPLSRQLSTE

SEQ ID NO: 2470 - protein, 328 aa, Enterococcus sp.
MYPTDEQKKWLIQNFGCVRFTYNHLLLSRQETYKQLGVIDYSLTPAALKKRYSFLKEADSLALANAQLNLDRAFRNYFKGRASFPKLKSKKSMWQSYTTNNQGHTIYLEGNQLKLPKQKKLFNVHVHRPIEGTIRSATISSRYNEEFYVSFLCEVPLNKRQKTNEWVGIAYCPKGLVETSQKIEVVAPKLLVTNQKIAVAERKLSIRAKAAQQRKKALERAKNYQKQKRKVLNLYQKQKYQREDYLEQLSAILVNKFDYLFIESLPDEKLASDFSVQDWHKLLTKLRYKAEWYQKTFILINTQDIHSHSAQEKSRLLERIGKQLLFDV

SEQ ID NO: 2471 - protein, 403 aa, Nocardiopsis sp.
VNRAYKFLLRPTKRQQAALTRMLRDHCTLYNAALQERRDAYAHPSQTKITYGDQSGQLKEIRAFDPQRQGCWSFSSQQATLRRLDKAFKAFFRRVKAGQEPGYPRFKGAGHFDTVDFPKDGDGCRWDSTPTDRVRRVRFQGIGHVRVHQHRPVTGRVKTVSVKREGNRWFVVLACDRVPVESAEQTGQVAGIDMGVASFVTTSGGEHVANPRFLQSSADELAAAQRELDQFPKRIRAGNRTRTHRAAQAKVARLHAKVRRQRLDHHHKAALDLVRRFDAIAHEDLNIAGVTRAPKAKPGSDGRHLPNGAAAKAGLNKSILDAGWGVFLGILAYKAESAGRVLVPVDPRDTSRTCPREACGHTSADNRRTQDKFRCVRCGYTEHADRVGAINVGIRAGLVLPVA

SEQ ID NO: 2472 - protein, 382 aa, Nocardiopsis sp.
MQLRYQFRVYPSAPQRTKLAKAFGCARVVFNDALRARQDAYNSGAKRPTAAELSKRFITEAKKTKERNWLDDVSAVVLQQSLRDLETAYSNFFASKKGTRSGPKTGPPTFKKKTSRQAVRFTRNARFAITADGRLRLPKIGDVKVRWSRTLPSEPSSVTVIKDASGRYFCSFVVETEDKPLPELDLDETETGIDLGLSTYAVLRGRKITAPKFFRRAERKLKRAQRKLSRAQKGSKNRRKAKLALAEVHARVADQRRDFIEQHTTRIASESQAVYLEDLNVKGMGKGRRARSVRDQSLGRFARTLEAKCARYGRGFAKVDRWFPSTQLCSACGSIEGPKGLEGLKVRLWTCSCGAAHDRDENAELNIRREGRSIVAEGRPDT

SEQ ID NO: 2473 - protein, 266 aa, Nocardiopsis sp.
MAEPLDIVWSRPLPDGTTPSTVTVSQDPAGRWFVSLLCEDPAVEPLSATGGAVGVDAGLDHLMTVSTGEEIADPRHERKDRKRLARAQRALARKARGSGADRAEARRRVARIHARIADRRRDHLHQVTTRLVRENRTIVIEDSNVRTPLKNRKIAGAISDAAWNDLRSMLEYKARWYGRELIVVDRWFPSSEPCSACGALATRMPLRVRTWTCDCGTAHDRDVNAAENITAAGLAVSACRAGVRPQRESSRTGRSAVKQESSRREP

SEQ ID NO: 2474 - protein, 398 aa, Streptomyces sp.
MPPHVKRAFTYRSHRTHAQAAEPSRTSGCVRRLYNMALQARTEARTLRSERINDNATSAMPTAWKKTGELAYLDDVSSVPLQQALRRLQAAFTNFPGKRAKYPRVKSRKKSRTSAEYTTGAFRFRDGKPTLGKTAEPLDIVRSRPLPEGSSPSAATVSQDAAGRWFVPMLVADPTVKPLPANGHSVGADAGLDHSPTPSTGEKIADPRHERKDRARLARAQRELSRKARGGGANRAKARREVARVHARIADRRRDHPHLLTTRLVRENQAVVIEDPTVRSMRKNRAPSRAICEAAWPEFRRMPEYKAAWYGREVIAVDRWFPSGKLCSACGTPQERVPLNVREWTCDCGTVHDRDVNAARNILAAGLAVSACGTGVRPQRSTPGGRSAMKQETPRREP

SEQ ID NO: 2475 - protein, 415 aa, Halobacterium sp.
MAIQVTRTYVGDVQNHQQVQSDLDSLGDAASKIWNVARWTVDRVWEATGEIPDEGTLKAYMKAQHCWKNLNAFSSQKVIEELSDAFQSWFDVRHKDETANPPGYRKEYDTRPRSTVTFKDNGFKHDPKHNRVRLSKGANLKDGWGDFVLCEYDTRNDIDLSTVDTVQNVRAVWNGEQWEVHFVVRETIETPDSPGKGVAGVDLGVSNIAAVAYPDEYVLYPGNTIKQDNHYFQRKEYNTEGENGPSQQAQRLRQKRTRRETHFYHTLTKTIIEECVDRDVGTLVVGWPEDVRSEDLGKTANKWLHTWAFDRIYQYLAYKGENHGIEVLKENEWNTSKTCCKCGDTTDSNRVERGLYVCGSCELVANADCNGAENIRQKITPNPSVDRSSGCLAQPSTYLFDRESGTFHTREQAVS

SEQ ID NO: 2476 - protein, 369 aa, Nocardia sp.
VQQSALSRAFGCARVVYNDALRCRQEAFAAGRPATDAEIQRAVVTLAKRSPERAWLSGVSSVVLVQACQDARSAYRNWFDSLAGRRKGPLLGRPRFRSRKDQRQSIRLTRNGFILRPNGKLYIAKIGELTVRWSRRLPAAPSSITVVRDAAGRFFVSFVVDVPGAPLPEVDSEVGLDLGLTTFAVMSNGRTIESPRFFRRAERRLRKRQQALSRKADGSRNRAKARLRLARAHARVRDTRNDWAQKHSTAVIRENQAVYVEDLCVAGLARTNLAKSIYDAGWSAFVRMLEMKAQRYGRTLHKINRYYPSSQRCFACGKIDGPKPLSIREWQCASCGVAHDRDLNAARNILAAGRAERLNACGEAVSLPA

SEQ ID NO: 2477 - protein, 372 aa, Clostridioides sp.
VIAVKKAYKFRIYPNKKQQELINKTFGCCRFVYNKYLAKRIEVYKNDKETFTYKQCSSDLTNLKKELNWLKEPDKFSLQNALKDLENAYNKFFKEKAGFPKFKSKKTNRFSYKTNFTNGNIVYCGQHIKLPKLGMVKVRDKQVPKGRILNATISKEPSGRYYVSLCCTDVDIEVFENTNNHIGLDLGIKEFCISSCGEFIENPKYLKKSLNKLAKLQRELSRKTIGSLNRNKARLKVARLQEHIANQRNDFLQKLSTKLIKENDIICIEDLQVKNMIKNRRLSRLISDVSWSEFIRQLEYKANWHGRKIVKVGKFFASSQICNKCGYKNEEVKDLNIREWICPSCNETHDRDINASINILKEGLRLITIQNK

SEQ ID NO: 2478 - protein, 560 aa, unknown
  TnpB Polypeptide
MFLDIRYLMERRECVMRTWKINIQPTKDAVLCDYFAENTTAAKCMYNVANFYIRNTMTGIRKSPEERTACETEVLHYVFTGIQKANLHARENYEKKLKKYQDMHTEKGDKLAADLKCKVFPYPTKEKWFLSYGALDAIFKYTDHPTYRRMNSHVNQNAIKKAVKGWKSYFKSIKDYASHPEKYKARPRIPGYKHATKMTAAYTSQTAVFSCQDGHAYLKFVNHKQPVRIGKESLYADMTYAKTEVKPQYGGYTILVTFKEDLVLPEVPKQPKRILGIDVGVSNLAAVANNFGDTPFLIKGGALKSMNQKFNKQRAKLLSAVTKGSDSTHSKKETKQLQALSRKRDAFLRDFFYKTAWYLVRYAKEQRVDVIVIGHNEDQKQNICIGKQNNQNFVSIPFCLFIKILRNTAAKVGIPVADREESYTSKASLLDLDTIPTYRKGNTQAYTFSGKRVHRGLYKTNSGCVINADINGAGNILRKEYPYAFDGQDMSYLYKTTKVVSYTDIYAGAKSVCKEKYNQKSHEPGLGSRVNHRYRQDTRLIYRKLWGRSTFVWTGKKKTA

SEQ ID NO: 2479 - protein, 353 aa, unknown
  TnpB Polypeptide
LIQKTFGCCRFVYNQTLTHYIELYRTQEKSMSKFDCSEYVNKVLKPQYEFLLEPDKFSLINSVWNMEAAYQKFFKEHAGFPKFKSRHNHKKSYITNFNNNNNIEVSFERNQIKLPKLRWVKARLHREFIGKIKRATISQNPSGRYFVSVLIEQEYLPLLKTGSAVGLDLGIKDLVITSDGKKYANPKTLAKYEKKLAREQRRLAHKQKDSRNREKQRIKVARIYEKIHNIRLDYLHKTSNEIISENQVIVSEDLAVSNMMKNHKLAKSISDCGWYELTQQLEYKARWNERQYVKIGRFVPSSQVCNCCRYQNKETKDLSVREWVCPSCGTKHDRDINAAKNILDEGLKLLKIS

SEQ ID NO: 2480 - protein, 393 aa, unknown
  TnpB Polypeptide
MSTHRKAYRFRMRPTKAQEQALNRMAGARRWVWNWALGRRREHYKTFGKTLSYKALAAELTALKTRVETAWLKEADSQALQQVIMDVCQAFVNFFENRARFPKFKSRKRDRARFRIPQRVKVIAGMVLVPKIGAIPISQSQSVDLPTKSATFKRDAKGHWFVTLIADFEMPDMALPQPNPDNVAGIDLGLIDFATLSDGTEPIPTPKFYRRRERKLKRAQRTFSRRWKGSKRQAKARRAVAKVQQRTANQRKDFLHKLTTDLVRDHDGLCIEDLSVRGLVRTKLAKSMHDASLGEFRRQLTYKSQWSRKHLVPIDRFFPSSKLCYACGAINHNLTLSDREWDCDCGAHHKRDFLAACNIRDEGLRLLAVGYTESRNAQGDTVRPGTSGLVSLN

SEQ ID NO: 2481 - protein, 404 aa, unknown
  TnpB Polypeptide
MLVKGVAFYLGSDLPTEAKFLLEDFRLAVNNAIRAGLQAQVTSRNALNKLAYKDFRREHPGMYSQHLVSAFEVAGSALKNHRKRAQKGVTGRIPFVKRLMMKAENQAYKLNRKSGVIDLPIRAGCHVELRLIVSQFHRKYLDDMSLSLGSLTVLPDRAIVAFRKDAPKPFVPESALSLDTNERSLDGLFVQGDVANAIEAGFPEIAIIQQRHHDRRKRFQKKKAHDRRTSRNLCRREGAREHRRIDYRLHHVANSVLKFAEGRKSAIILEDLKGIKSKRSKELNRRLSMWPRRKLHRIIEYKAQWRGIPVVKVDPRNSSRTCPICGKIQYSRMGTEFKCECGWHLDRHINASINLLQTAISRGMAGGLRFNPGAFQRDVMMILYEPAMAARSEPNGTSGIVGVI

SEQ ID NO: 2482 - protein, 393 aa, Chroococcales sp.
MQTISVKCKLQVPPELRGEIDRTLEGFADACNQILLVAKAEKCWNATKLHHKVYKKVREETGLKANHVCQAIRRVLGNAKAVKQIHKFRPTSISLDSRTFLYDEEQQTVGVTLMCGRRSFKLLIGNYQLALLRGQQPTSATLNKTKQGEYYINIAVDLPTEPTGKTPRVIGVDLGRRDIATTSTKKAWNGSQLQKVRDRYSKVRTNVQRKRTQSSRRLLRRLSGRERRFQSWVNHNISKELVSDAKNLGAALAFEDLTNIRESLNEKPRNKTERRRTNNWAFYSLRLYTQYKASIAGVPIVLVPPAYTSKTCSGCHAIGVRNGKKFSCKRCGLEHIDSDLNAALNIAALGVSVNTPEIPGIACQIGCDNYRCCQLVAKSGIKPLLEPAGFSGG

SEQ ID NO: 2483 - protein, 391 aa, unknown
  TnpB Polypeptide
MLRSLKFNLKFANKRKIQLLQELELEYKKAVNYYLKLLSNNRYFLSQEEIKSFNSPLSYAFKQCAERQAVKIWKSWRKCKKRGKLPEFDGTLILDQRFITIERSKTLTFDYWMRVSTLNKGKRTLIPFRSYNYANKYFTEWKLVNGGRIKRDGNNWFLLLTFEKETPKKKKEGKIIGVDIGIKKLITTSEKEFLGKDIERLMNKIQKKQQGSKAFKRALKERDYYINKIAKQLPYNDTKVIVMENIKNIKKNTKKEKKLRKEFRSKFQRWSYAKLLSGIKQLCELNGVHFHTINPAYTSQTCSKCGFVHRLNRCGEMFSCRNCGYTEDADFVASENILKAYLAQEPMVPGRVKAQMSNHFSKGYNQCREEMLRRIEESGDTHPVMDGRSIR

SEQ ID NO: 2484 - protein, 258 aa, unknown
  TnpB Polypeptide
MQIISSYGVELRKQNIPIRQTLEIYRSAVSYLIGIYVQVWEELAEIPDAKRRFNAAEHLVHTTKKNHACFDFDIRFPKMPSYLRRSAIQHALGTVSSYKTRLDLWEKTDGKSGKPKLVYENHAMPVFYRDVMYREGAEGKDEAYLKLYDGHDWKWSCVRLDHTDMEYLRKCWSGKKASAPTLEKRHQKYFLRFSYKEEVTLTKTPVKEQIICSVDLGINTDAVCTIMRADGTVLGRKFIDHPSEKDRMYRTLGRIRRF

SEQ ID NO: 2485 - protein, 571 aa, unknown
  TnpB Polypeptide
MKRRKEAMQEKIPDLKQFRKESNRHVLVLEAQVSEQDKYKLIHLSNNVLRTAGNDLTGVMKKNYDQLVRTKRYRHLRSLYGKAKKVGRDKEMKAVGAEMKQMQEEYHVTWEFCRQSMIKINKQYHLNSIFALTQAEDVWKGVEACLYREGKTLHFRKYGDHPEIRAKQAVRGIIVRLDGGSLNFRIGDITLFPIINKPGHTKTRRGHDTGVEESHDLFAEEEIAAVCHYLENPETADRAALELFRKKGELMDTYRPCYASLCFKEIRGRVRVFIHLTIEGLPKPKRRKDGSRRHQLGRGVVGCDIGPQTIACTSKKEVILKNLAERGMSIKNREQKEAAIQRKMARSRRAMNPENYREDGTIRKGKKTWKKSRRYRKLQKQYRNLSRIAAENRHFAINEDVNHIRELGNVFVTEPGNAKKLQKRAKKTERQEELSEVKQKDGTVKMIHKYKRKKRHGRSIQNRCPGYFQAQVKAKFERSGGVYIEVPFDYRAKASTTIPVAAISKSSCRRGCTACPTAPGCRGTGIPLFFCSVSGTAWTRSADINVRLILRPCTGCTWHWSSISLRTISGS

SEQ ID NO: 2486 - protein, 322 aa, unknown
  TnpB Polypeptide
VCYCRIIRKAYPEGWRYFLQLVLEGPSPVKVKPETGELLHIMGKGCVGLDIGPQTLAFSANKDVGLEELAEGVQLAQDEIRRIKRSMDRSRKDSNPKMFTADGQIVRKNKLPAECLNSRGRRIWVKTNRYKKMEILLRSLYRKQAALRKHMHRRMANQLLAMGNEFYVEDMRWKALAKRTKETRRNKKGKILSKTRYGKSIANKAPAMFLAILEQKVIASGGSFQRIVTWKAKASQFSHETGKYNKKKLSQRWHYLEDGTKVQRDLYSAFLIQHTNKNLESFNLRTCEKDFPIFLKMHQEEIERLQSLDKRMPSSMGIKKAA

SEQ ID NO: 2487 - protein, 395 aa, unknown
  TnpB Polypeptide
MIKAHKIRLYPNNKQVTYFKKACGVKRFAYNWALEESRRLYEEEGVRTSGFDLSNRLNAVKHEEFPWMLEVTKWAVQMAVYAAHEAFKNWWNPKLNHRAPKFKKKGKSKDSFHLGLNAVKADGKRIYISRLGYVRTAQELRLSGRLLFATVSRTADKWFISITIDTLTEPGEPEVQGLLGVDVGIKSLAVTSDGEVFENPKALKRCEKKLRKLHKSFSRKKKGSNNREKAKVKLARQHYKVACIRADAQHKATTAITKSCSTVCVETLNVAGMMKNHKLAKAVSDAAMSEFLRQVGYKAKWNGVTALKADRFYPSSKTCSACGAVKDTLTLNERTYRCEECGLVLDRDLNAALNLKQLAVGYTESINACGDGSSGPDLVSGVKLLSVKQEGGVRD

SEQ ID NO: 2488 - protein, 389 aa, Kibdelosporangium sp.
VKVVVQVKLLPTAVQAAALAATLHECNTAADRVSVVAFERKVFSRNDLHKLVYPGLKAGGLGAQAAVRTIKKVVDAYTTLRANLRAGNLGRAGSKRRAKAESKPIAFRPDSAQPFDDRMLSWRHDARTVSIWTTTGRLKDIRFAGHPDQLTLLAEQRKGESDLIGRDGTWFLLATCEVREPEAFEPVDWIGVDRGIANLATTSDGMNVSGRRLSRYRRWHARKRRELQAKRTTSATRRLKRRARRETRHARQVNHKIGKEVVAVAQRTGRGIALEELGGIRDRVRLRRDQRATHTSWPFHHLGSVIAYKARRAGVPTVTVDAHYTSQTCPRCGHVARANRSSRDHFLCRRFVVEHGERGCSSTHPHPHRPWVDASRTPHPVAHGECDPA

SEQ ID NO: 2489 - protein, 558 aa, unknown
  TnpB Polypeptide
MTSVAVAALGNGGAPATPVANRFFNASLEPFYRSCLLPARWSGRVPAHALRSTCYERRDDDRSGFLQRDFVPPPRRCRSPGASRPAEPFAPPPPAPDDGAEPAAKKQKRRKRELVGQLRTYRVRMIPTTEQRRELRRCFSAARHAYNWTVAQVEKHDARPNFYDLRKAYRESDTQPAWAAPVATRIVAGAVEEATNAYKSNIAKRQKNPGQHGAFHVHFRSHKKTQHEVIRIEGKGENGTSPLLALKPVPVANNAALRDECLAFFGSNLKSVGGIRLQDKPHVIARLRTEGPKGQGDGVINTCRIQYDKRSDSFHFLYVYELAPLPDPDPSFKTKRVVATDPGVRSFQTWYSPTSGRYGELFVDGRDALEARCRAIDARTSLVAQRGERYAEVARDRRRRQRQGTFRRMKRKLAKERRRLTRWMEAGHYAAANHLLRSHELVIAPTLRVAEMVPKDGRVFGSKTARAMLTWSHGRFERRLEAAAYRHPGRHVIVDSGEPGTSKTCTNCGHWNAGLGASRIFECAVCGVHVNRDVAGARNNFFAAYGRAMGVGWDRVER

SEQ ID NO: 2490 - protein, 397 aa, unknown
  TnpB Polypeptide
MNRRGTTGIGVMRRTYQYRLYPTTTQATTLTQWLTTCRILYNNGLAERKNAWETHKKSVTYNEQANQMKDAKKTNQFLKTVHSQVLQDTLRRLDKTFTNFFRRIKKGEKAGYPRFKGKYRYDSFTYPQSGFAINYKKKKLRLSKIGSINIKLHRPIPSERVIKTFTITRDVDHWYACFSVELPDPALQTHQRALQKAIGVDVGLKSLLTFNNGETIVNPRWLRHSEKKVAKEQRRKDRKQNGSYNRYKQTKKVAQVHRKVRNQRKDFHHKLSRQLVDNYDLIVYENLQITNMVKNHVVAKSISDAGWGQLMHFTEYKAEEAGTVVEYVSAYNTTQLCSNCGKLVPKTLATRIHRCPYCGLMLARDHNSAITILSRSKYYVTSRSSASSGQGLPVEPV

SEQ ID NO: 2491 - protein, 637 aa, unknown
  TnpB Polypeptide
VLVRGGTDEKTGEALSATVMAERVAWCAALVQGMACGLAALHWDADDLQMLASGQDEAGRSLPAQAWMALRRLGWAAAPPDGVKVNDRIARMAQEQAGRLLRSALWRDALTMAVTSTWPLADPSKRTPEEWDAVRAAVPGGEHLPSAVIRARTRQAAHHLQDHGRLPSGVTELEAPPRVPAMLILAAVDRQQATIERHETDPRRALLRLQLPNRPDPRGYGDWAWVAVPLFLPPTVPAAAKLHLPTLRVSGSRIMADISFTQQVPQAHRAGHTIALGIDWGLNTLMSAGTCRLSLDGTITALGAGAQYRAGGVLARQHRLRRQGEALHAKLDRYQQLASECDDHPLTAKAAVLRDEARHVASRRSHLNDALAWSAARWAADQAIAARATVVYVEDLRSMEARGMGKALNTRLSQTVRGQITEHLRHIAAEQGIAVVTVPPHGTSKNCPRCLAPLRHCKSPEQPTVAGWKWAWCPGCGWQGDRDMGAWQRIAARGLAHQDKTAVSRDADTMAVRAIDDTLEARAVVAPYASGRDRSKTGATPRRSTARRAPRRRAAPSPPRSPRGGQHPEGHVTPARRLPRAVTRDQRVNATCTQLARCPHRARGAALGAGFHRNAHATPPNGNETPAFRGHRITDDR

SEQ ID NO: 2492 - protein, 430 aa, Ignisphaera sp.
MRRTSVVELIVDREAESKLKVLCTLSSKLWNEVNYARRRMFFETKRVDLKATYKLFYEKYKVLIGSATAQQVLNKNDEGWGSFFSLLKLKKEGKLPPLITRVNPPGYRKKSGKRVLWTVLRKDQYKIEGDKLVLKGLGAIGRIELGYKGLIHLKGEYGRLEIHYDPDRRKWYAHISFEVSEKAVRGKWGEVPKHPIGSLVAGIDIGINNLVAIYVENGLTKLVNGRPLKAISHYWRKRIAEYQSTLNKYGLRTSRKLRAMYSKWRLQVKSYINSKVRQVVEWLYSAGVSAIKVGYPKYIAQENGDFNNVHVWTYGYLLRRISEVAEEYGITVIYVNEAHTSSKCPLHGENCGKRIMRGLFKCTTLNKVFNADLVGAYNILIAPSPERGRGNGRETPPGAESPPRGDVAPNLPALAGALALQGGEEVRSVE

SEQ ID NO: 2493 - protein, 391 aa, unknown
  TnpB Polypeptide
MERGFKYRIYPNESQRDQIARTFGCCRFVYNRALDVKKTAYSETGKSIATNDLIKMIPAWKRDPETSWLAQVDSMALQQSIRDLDRAYKNFFRRVREGGKPGFPKFKSRRHARQSYRTNGGKVLDRNHIALPKLGTVRAKVSRPLQGRFMSVTVSLDAAGRYFATFLCTDVPSKDTTATDREVGIDLGVETLATLSDGTKIENPRKLKKYERKLAREQRRLSRRKGARKGEKQSRRYLKQRKRVARIHAKIADARTDALHKVTTMLADENQVLCMEDLNAKGMVRNRRLAKAVSDASFGEFARLLEYKCAERGRTLVRVDRFYPSSKTCSVCGHRLDALPLSVRSWDCPACGAHHDRDVNAARNILAEGKRILSNTEGTAGHAGTVAAVVA

SEQ ID NO: 2494 - protein, 253 aa, Bacillus sp.
MEVKQMMINKAYKFRIYPNHAQATLINKMIGCSRFVFNHFLPLWDHAYKETGVQEFLKTQSYIGIGVGLKDFALLSDGTPHKNPKFFRSLEEKLAKVQHVLSRRTKGSSRWNKQRVKVARIHEYMTNARKYYLDKISTEIIKNHDVIGIEDLQVSNMLKNYKLAKAISEVSSSQFRTLLEYKVKWYGIQVIVVSKTFASSQLCSCCEYKNKDLNLRKWDCPPCHTHHDKDINASINLKNIAIRLLTARTVEIA

SEQ ID NO: 2495 - protein, 416 aa, Halorubrum sp.
MEYSHRYSVYPTRQVAAELDRHIDIHRQAYNYTLYEYENVDADDIVSAYKHHSRLPDWKDEFPVFSDVHSKALQRTVTRFYQNLTGLFEQKQNGRKVGKLNWKSPREFQSMTYSQSGFELKNTSGRRATLWLSKIGDIKIRYHREIPDEAAIKEVTVKKETTGDWFVSFGLETDEADLPEKPDVDSLDTDNSVGVDLGILNYIYTSDGATVDWINLEDEYERLCREQRKLSRKEHGSNNYEKQRREAAKVKRRIRRKVLDYQHKLTTWLVREYDAVFVEDLDVKGILEQSHNARNKQAAAWRQFITLLEYKGELYGTHMVQVEAAGTTKECAKCSVETAKPIWVREHSCPSCGFECDRDVNAAMNVLQRGFAELGLGWPEDTPVETALPTDTTSVSAKRVVETGSPTLNEAAPAAE

SEQ ID NO: 2496 - protein, 492 aa, Thermus sp.
MRRFSAALRFAYNRLLEGEKREDLKKEDGPLCTLFGLNTRYADDALLKAQALLTSQKELGENPRKVVFGGRKLFRQLSRLKKSNLPLYERRKREWREKRKGTLYARGDRSKGGNLNLRLLVRDGALWLRINLVHRPAWALVRTSHPRLHELLSRVYTEEPYNVELALREGKVYALFTWEERLPPLVVNAQSGVLALDVNADPYGLALAIVNPDGSLRRYLTLSLEGVDQAPNKGAKELLLWQIAHRIVSLAWEEGVALATERLKHLPKGRRGDGLGKTFRRNAHRFAYRSLLRKVHTLAWRRDIQSLEVNPQDTSTIGMLKYAPLLALSKDIAAAYVIGRRALGYREEVPRHLRALLQDPSFHEHTRRFYEGRIAELRTKRRQERNPYLKRRLGRELYQARKALATLQSPQGEPGSPEGSTGGRNPWGGNPWRALRVGTLLPLLGRRVPRDLSVLKPILHGSWEGWRGGLDPHPGGGSAITGPPHVEVGSGG

SEQ ID NO: 2497 - protein, 367 aa, unknown
  TnpB Polypeptide
MPSYCLELKLKVKKDSDRNYLQNYFNAVAKLGNEIRRFAIRQLGHLKQDKNYKSLLAEYVKVKGDKDSPERERLSKELSVIVGSYGLTKYGLQKSACQMRKHLKYVHSDVYQKLSDSIWRSVEKYLYGNGKQIHFKKWDDVMSFENKKNSTGIIYADGKVYINCTPKKPKGGIVLDIILPRNKESTHYMYETTCLADRTKYCRIVRKMFPSGWRYYVQLVQEGIPPQKHETGKGRVGIDIGTSTIAAVSKDGCILEELGDPASSPAEECLLQRKLDRSRRAMNPNNYKEDGSVKKGKKTWKKSKTYQAVQNQLKSLRRQKAARLKQWQEAEANKIATMGTRSLWKRWILKLCRSVQKIPNDRNRRPL

SEQ ID NO: 2498 - protein, 535 aa, unknown
  TnpB Polypeptide
MDLDNNAHSVFLLHYHLVLVVKYRRQVFDDAISGRAKEIFAYIAPNYNITLEEWNHDKDHVHILFKAHPNTEISKFINAYKSASSRLLKKEFPQIKKKLWKEHFWSQSFCLITTGGAPIEVIKKYIESQGHSLAKSHTRTCFSILLNCNRKSGTNGPKKEVTNMANKAYKFRIYPDDAQKVLFARTFGCVRMVYNHWLARKIRQYEENKTTVTYTVCAKEMAEMKKTEAYAFLREVDSVALQQSLRHLDTAFQNFFKQPKTGFPKFKSKKQNKKSYSTICINGNIAILNGYLKLPKAGQVRLKQHRAVPKEYKLKSVTVSQTPGGKYYASILFEYENQVQEKEMRRFLGLDFSMHELYRDSNGNEPAYPKYYRNAEEKLAREQRRLSKMQKGSNNRSRQRIKVAKLHEKVSSQRKDFLHKLSRQTADAYDCVCIESLDMKAMSQMLNFGKSVSDNGWGMFTGFLKYKLEEQGKKLVKVDKFFASSQICSVCGYRNAETKNLAVREWDCPQCGTHHDRDVNAAVNIRNEGMRLVVA

SEQ ID NO: 2499 - protein, 421 aa, unknown
  TnpB Polypeptide
VTDASASRTTGTKPAIRHVGIRTRLYPNATQAHAMEACAEALRNLWNLLLGHCIRHHEEHGRAMTPKEREAFARQWNQATGHTYPANSVYRIAREVGDAYRNWHRGREAGRDIGLPAFRRRGNPRGLYIHNESLRFDGTRVRLPKFGWMRWRGGSLPAGRLPGPKRRGTRGLLSGRLWRDAGERWMLSCAFECEPVDAVAPATDAVGVALGTSDLATVCDSRGRITVVRSEKWLRRAEKRLKRLQRSVARCKRGSNRRAKAKRRLANLHRAIRNQRLDRIHKATTTIIRMAGQITIEALPIREMMGDPRLAKALADSGLGEFLRQIRYKAEWHGRTVTEASLSFAGAQVCSTCGHENEDGQGLERETFSCAKCGYDTDRALNAARNFLRYGEARRNRGPAPQTHGETEAAGASAPGPVAEP

SEQ ID NO: 2500 - protein, 340 aa, unknown
  TnpB Polypeptide
VRYVGWRCRLYPNASQGAALLRCRNALRELANTLLANSQLSYTETGRRLTLAELRKVTRDWRGEALDQGCPASAIYRVAADLDRAFRNWFAKSGGRRRKGFPEFKAIGREPGIYVSNQAVRFEGNRVRLPKFGWMRWRGGNLPPGRLAGPSGRKTRGLLSGRVWLDAGGRWMLSCLFECAPLAPVEPRADRATVREKDGEITVSVDGGLGRVIRESGALRNARRRLARLERRLARCEFGSEGRKRALALMRNQARKVRNLRADLLHKATTGVVQEVREIEVEGVGAELLRQLEYKAEWHGRKLKVRRGPPEPGNGKPRRARRPGSRSRKRESRTRRPEAL

SEQ ID NO: 2501 - protein, 347 aa, unknown
  TnpB Polypeptide
LASRRLRRGGAPTSRSGCGTRPARPGGLDPARRRRPAHPEPAVIGTLALVEETRRLRRMLDKGRAKILFATVRKTGRGRWTVSLNVEAADLHPDRQHQSPTPVVGVDRGLSNYAVAATATGAEVARLTAPKPLAGAQRRLRRANKALHRNKPGSANRGHAKAVVARVHARVCAVRSDYLHRVTTDLAKTHSLVAVETLNIAGMLRNQPLAKAISDAAWGTFARLLGYKLGWRGGELILADRWFASSKTCSACGTVVDDLPLSQRVFTCPDPACLNRHGLCRDTNAAINLAVWASRQLATRAGEPTRPSPTSKAETRNARGGTSSTPPPPGGAPRPDEAGTGQTATAA

SEQ ID NO: 2502 - protein, 394 aa, Glycomyces sp.
VQCGVAVTTSVLLRYRFRIYPTDPQRAMLARTFGCVRTVWNDAVEARRTAYRQGLPYPSAAVLDKALITEAKRTTARCWLADVSNVPLQQSLRDCHAAYRSFFDSLSGKRSGGRVGPPRFKCRTGSQSARFTRNGFTLRPNGRLYVAKVGDLKVAWSRDLPSDPSSVTVMKTSTGKFYASFVVTVDDGAEALEALTDPEAETGIDLGLKDFAVLRGGRVIENPRFFARMERRIRKAQRALSRKAKGSMNRVKARVALAKAHERVKHARSDWIDKQVKTIVAENQGIYVEDLNVKALVQGRHAKSVHDAAFGMFLTRLSSKAIRSGRTFVKVDRYFPSTQLCSVCGALTGPKGLAGLKVRRWACGCGAVHERDVNAEINIRREGKRLVAEGLADT

SEQ ID NO: 2503 - protein, 463 aa, unknown
  TnpB Polypeptide
VKVTRTIFSDVPPQLAAICKTAGYIRADIWRRYGALGNVGVSASAVRTEIVKKGIYDNLPIDGTIRAETTKDIVNDILTYKAAAKLKVRQAIAKRTNDESERRRLYTLLKRDEWLTNPFLHRQMRKHFRHGKSEVANQFIVRSDRYLTDVLNGRLVITIRIARKYGNDIALTTTTNGKNVELAGSNLRIIVKNGFAEIHYATDKGGGRECGDQVLGIDKGYTEAFTDSDGDHHGQKFGKVMTEYSDKVAATGKQRNKLHALEKKHREAGRFRKADRIKKNNLRCKKIHARKEKTQKRLRTIAYQAAHSIVDKAGIVASEDLTAVIASKHQWKRFNRRMSSWAKGVLAEALDSVCEQRVAKHTLVNGAYTSQMDSTTGLLEGKREGDKFYRVSGDVLQADHNAALNVLARLDDSEISRFTPYKEVRRILLARSPAQLSVKRVELGTSASQPTADKSYAQICATF

SEQ ID NO: 2504 - protein, 369 aa, unknown
  TnpB Polypeptide
MKAFKTRIYPTIEQSELIEKTFGCCRFVYNKGLECKKLAYEKEKTTISAYDLIKKLPQQKKEFEWLKEVEAQALQQSLLDLQSAYTKFFCEHKGFPSFHKKGGKESYRTLSPKYSSRHSIYIPKIGIIKTAERIKKKWIIKNATLSKRAGLYFVSILIEYTPPKIIKSGEVAGIDLGIKDFAILSDGTKYKNIKSLKQQENKLARLQRQLSHTQKGSSNHKKLRIKVARLHLYISNKRNDYLHKISTEITNRYSLIAIETLNVKGMMHNHKLAKSIADCSWSEFVRQLDYKANWYNCEIRKIGRFEPSSKLCSVCGYKMAEMPLDIRKWKCPNCHTIHDRDINAAKNILKIALSGREEEPVDTCATKAH

SEQ ID NO: 2505 - protein, 346 aa, unknown
  TnpB Polypeptide
MIRRVQLNISYANKSKLNLLDEIFEESNKVINEFINIFWLKQDFKSKFSSIKVNTWLSVRLQQCLGKQALEIVRSQIKKLKKSKPVFNSYSIILDQRFLDIQFDNNSFDIWIKIRSIGNNKILKLPSRKHKHFHKFNDWEMKKSLRLRKIEDKYFIDFYFEKDKPELKTNGKEIGLDCGYKKLLISSENQIFDQGLEKIYDKISKRKQGSKNFKQSLIERNNKINESVNKINVNEIKTIVVEDLKNVKKNSKGKINKKFNNKLQRWSYSKVLNKLSLICEEKGINLIKVNPSYTSQMCSRCGSIYKESRNGEKFKCIDCGFEIDADLNAAINILHRGVYSPLLTKI

SEQ ID NO: 2506 - protein, 624 aa, unknown
  TnpB Polypeptide
MKKKKKEETTIKNPKVKVVRDDVKQRKEDNKNIDFTCIKSSWKSFCKNNLLADTIVEDILPRINTICFLSYKLINFHFTRLLEEHKPLPEIKQNLFYQACCMVSQLKYTKDTTDTTTELYESFSQMKEYITDDLPARDYLCLGYITNLNKLQLTMTNNHLKLNFYNRFRKYLKLRTGETDNAVVYHWLKDIYEPTYEGKNTFILYMREWLKYTPTEANIVKYSNHFVKIYYSILKEFEKYPYTKGVRTFTLLPHKHGFTQSHITICNAGLENTLKYIAKKLKVENSDVESGLDVKQFAENSEKYWRELFNINKYETKNKKFGWTILTDGKSVVLQMRKPTQSEKPVSDYTEQQYDNFLGIDPGVRMLITSYDTNDKVIQVSTKEYRHKSKMIYACKKRVGWYKRWEDYEEWKLIPTIKTSKTSVMKEYFKYVFPRMRTFTEFHTEKGFRNLNFTSYCRSKSTLAKICERIGGKNVKTLVGFGDFSQQHGLVKSHPTTPIIRLKRELRKYCKVIGIDEYNTSKTCSSCNNPIELYRNRIRRKKMGVLEPIARMSNIHSVIRCKTNECKLCCMDRDINASKNILGLLLNQYKGEERPVCFKPEKIAVKPRKSDKRVKACDSPLLTC

SEQ ID NO: 2507 - protein, 352 aa, unknown
  TnpB Polypeptide
MFSKTFGSVRFIYNKMLGDRLDYYKETGKKLNNTPAQYKEDFPWLKEIDSLALANAQMNLNKAYNNFFSNRKHFGKPHFKSKKTGHCSYSTNNQKGSVRLEGNKVKLPKVGWVKLCLHRPLMKNSTIKTVTISRTPSGKFYISILVEYENQILHIIPKKFLGLDFAMHGLYVASDEDDANYPNFLRKAEKRLAQAQRKLSKRKKGSHNRDKQRLRVAVLHEKIANQRRDFLHKKARYLVDKYDAIGIEDISVKAMAKRKKGGKFSFGKSVADNGWNMFTNILEYKLAWQGKQLVKIDKWYPSSQLCHVCGFQNDATKDLSVREWTCPKCGSHHNRDKNAAINIREEARRISA

SEQ ID NO: 2508 - protein, 381 aa, unknown
  TnpB Polypeptide
  misc_feature (355)..(355): Xaa can be any naturally occurring amino acid
MLKVVKVRLYPNKAQRHAIHKTFGSCRYVYNILLDAKIKAYECGDNLSAYELKKRLVPMKKAQGGEFLKEVDSTALQNSVLKIDIAYKNFFRRVKQGEKAGFPKFKSKHHSHQSYQASTASIKSNRLYLPKIGEVKAKFHRGNIEGKIKTVTISMEAGQYHASINYEDGLNEVIGSNNGKSIGIDVGVKVFAYSSDNEAIKHVNLKKEISNVIKAQKVLSRRKKGSKNRVKAKQKLAKKHLKLKNKRNDFLHKTTKKLSENQTIAVENLMIKNMSKKAKGSIENPNMRSSAKSGLNRSILQQSWGKFFELLEYKLKRNSGQLVRVDPKYTSQKCSCCGHISKENRQSQAKFECVXCGTQKNADLNASINILNAIGTIAKAS

SEQ ID NO: 2509 - protein, 438 aa, unknown
  TnpB Polypeptide
MLRAYKYRIYPTDEQKVMIAKTFGCCRYVYNWALEMKELLYWKHNVIVSMFDMKSMVVHELRQKAPWLKEVSQNALAYAVADLYEGYTNYFQGRAEKPTNRIKRGRQHYHDRGVGLKVDFKNGLIFVPKLKGIRCVFHRRFKGRIKQVGIELLTSGVYNASLLVDDGNPMPKKAPVDPDKTIGIDMGMKHYVVTSDGLTDEPVHYAKEQKRKLKLLQRRMDKKVIGSRKFCIYKRRIAKLHQHVANKRHDHINKLTHYLAYENHATTICVEDLDIAEMKQNKHLAYNLEEVSIGEFYRQLKYKCDWAGKNYIKISQYAPSSKRCSKCGYIYRKLTIDDREWTCPECGTHHDRDFNAAVNIKHFGLSEQQTLPSVRRKVKPVEQPLVDDRSHECRVHSSDPKEPCCCASTRLDREDKRQLSLRNRKTSSSGRNRKSDGL

SEQ ID NO: 2510 - protein, 419 aa, Microcystis sp.
MYKAYKFRLKPNTEQEIALAKSFGCCRWFWNYSLNLCQETYKTTGKGLTRNYIQGLLPSLKKEYEWLTDAYSQCLQVVALNLSQAYQNFFEKRARLPRFKSKHGKQSISYPANVKFEGDYLKLPGKVGLVYCVRHREFAGTIKTVTISKNPDGKYYASILVDDGQSPLPPLIRGVPKAGGSTLNQGGDEGGGIDGKAIGIDLGLTHFCITSNGSKYDNPRHLAKHQRNLKRKQQKLSRKKKGSNNRQKARGKVAKVHSKISRCREDFLHKLSRKIVNENQVIAVENLNVKGIVRNHNLAKAISDCSWGVFCTMLKYKAEWEGKTYIEVDRFFPSSKTCHVCLNQVGSLSLDVRIWTCEHCKTIHDRDINAAINIRDEALRILVLSKAEVLSLGTSDTAYRGDIRPKAGRKSVLRQSPVK

SEQ ID NO: 2511 - protein, 409 aa, Okeania sp.
MYAIKLELKLNNKEKTLMSQCAGYARFVYNYGLNIVNGTKGMTKVNKRGKKVNLSYNQRINEAKKVFTNYVKKQPEYTWTNNYSSRIYQSAFQHLGEAFKRYKEDTSKYPRFKRKKDQQSFTVYDGNGKTIIKAGNCIKIQTLGTFRLASPVPYMTASQTFTISKTAERWFVSFAIEAEKPPVHPLLDQRHQEVFGIDVGIKQFGTVASLKENSVIALPDSIKKEQLKLEMFQWRNRNKQLGGKGKKPSKNAIKYYKKLAKCHARIANIRSDFIEKTTTDLANNIKHVCLEDLNVKGMMHSRKLAASVARQGFYQFRERLTTKIVTNGGTVVLADKWFPSSKTCHHCGHIHQELTLSDRIYNCPHCGTTIDRDLNAAIVLSQYGEVNQKTRVGCTRIYACELEGADSLD

SEQ ID NO: 2512 - protein, 599 aa, unknown
  TnpB Polypeptide
MQKCFFSTYTKPDKMASIKNDMEYYNSMKRYAFSLIVKQGGDGPVPGGTSIHNHLKEKFNVNDHFANAAKNEASAAYRSAMECLQLNVETLESRIRQETKKLSSEQKRLDHLKKEKDSLINRSRKLKSGSKKKLKFRSYRGGNETEAKDGTFRVRKGRKVTVYENQYLFEVKYLDPEIKRLKQRIHNIEQRKTRHEHELLKVKAQLDSGHPSVCFGSRKFFKQQDTVYAGRHEEWLKKFRSRRNHGMTIPGRSGIIQGNCVVRYDTGTKTLFYDSMTRIPVKTKSRKTKKEAVLRAVTYEIDRVVFPYGQDLVNEALNSTDRKAVAWRFEDAGNRILVKCMVSIDQGLSRKNEYYADGCIAFDTNVDHLAVAETDRHGNLIYHKVIPFNLTGKTSEQREQILSLALEKVYKRARERYKPVAMENLKDIKNESMYGNKEVNRKLSEFAYTQITRLAESKSYKYGIGLCRVTPAFTSQIGKIKYMRHYGISIHTAAALAIGRRAMGFKERPPKDIRHLIPQANKDRHHWSQWRFLARYLKGQPPYKFYRKIPYSEFECITDMNKYMKEEFCNGQDRNCFLKKLTVILNQMAARKQGNATTI

SEQ ID NO: 2513 - protein, 426 aa, Tolypothrix sp.
VFGCQQVLIKIDKSLEAILKFVCEESAKLSNCGTYYARQLYFKTGKIPSKYDLHKLFKNNSHFQAMYSHVAQQCLTTVAESFKSYIGLLKAVKKGTVNQRPKLPGYRKGGLVLATFPGADVKLKDGLLRFPLGSKVKIWFGLDAFYLPMPSNLNYADIREIRILPRNQCFYAEFVYKMNDVEQAPVKRKNVLGIDPGINNWLTCVSNVGTSFIIDGKHLKSMNQYYNKRVSTLKENRPQGFWSKQLAHVAEKRNRQVRDGVNKAARKVIRHCLENKIGVVVFGWNKNQRQNINLGTKTNQKFVQIPTARLKDRIAKLCEYYGIEFVETEESYTSKSSFIDNDLLPTFGAKPEGWQPSGKRVNRGLYKTAKDYKINADCNGSANIIRKVAMKLGLVLNVISRVQLSAPLKIRLWEIQESPNFLIKRA

SEQ ID NO: 2514 - protein, 397 aa, unknown
  TnpB Polypeptide
MKMIQKTYKFRLYPNKEQEKMLANYFGSVRFVYNHFLAKRKEQYEQTRKSSNYYEQAKELTAMKKTEAFSWLKEINSQTLQHALRHLETAYVNFFKGRTRFPRFHSKKHGGSFAIPQHFKVEGNRIFIPKFKGGIRFAKSQDVQGELRNMTVSVTPGGKYYVCIMAQVEVGNLEKTNLSVGIDLDLKDFVITSDNDRYSSNKFIKKYSKKLATMQKHLSRKKKGSGSWNRQRIKVARLQEKIMSCRKDKLHKISIDLIHRYDVVCCEDLNVKGMVRNRHLAKSVSDASWSTFVTMLEYKAKWYGKTLVRIGRFYPSSKTCHYCGHVKEDLSLSDRYYTCPNCGELIDRDLNAAKNILDEGLRNISAGTVDYTDGEGVRLACKHSLKKSESHKSLACG

SEQ ID NO: 2515 - protein, 414 aa, unknown
  TnpB Polypeptide
MQRTIKIVLLPTSEQAAALLETLRQSSECFNAVCEYGWRKGEKNGVELHKATYYPLKAEHPKVPCQLLCAARVKATEALKSAFSLRKKDSKVACPKGQQVPIRYDARSYRLLVNKGIASLASVNGRQEVAYRLYNHAAKAFAEATGFDSADLVYCKGQWHLYVVLTLPTPEFRDNAQAVGVDLGLNRPAVTSHRKFLGKRHWREISNRYFRLRRKLQSKGTKSAKRRLQALSGKTARFRKDCDHVLSKQVVQSVLPGTTIVVENLTDIRTGTKQRGRQSRRRLHSWSFAQMRCFLTYKAEAKGCQVVGVDPRYTSQRCSRCGYIHRGNRKSQSVFLCKECGYELNADLNGSINIARKYLDALGMPECVGLLSESPLSQPPVSAAVVSPPEKGIDAASGLEYGLGTSPQHSCGGI

SEQ ID NO: 2516 - protein, 327 aa, Escherichia sp.
VKRLQAFKFQLRPGGQQECEMRRFAGACRFVFNRALARQNENHEAGNKYIPYGKMASWLVEWKNATETQWLKDSPSQPLQQSLKDLERAYKNFFRKRAAFPRFKKRGQNDAFRYPQGVKLDQENSRIFLPKLGWMRYRNSRQVMGVVKNVTVSQPCGKWYISIQTESEVSTPVHPSASMVGLDAGVAKLATLSDGTVFEPVNSFQKNQKTLARLQRQLSRKVKFSNNWQKQKRKIQRLHSRIANIRRDYLHKVTTTVSKNHVMIVIEDLKVSNMSKSAAGTVSQPGRNVRAISGLNRSILDLGWYEMCRQRTQASVARAVVIQRTPM

SEQ ID NO: 2517 - protein, 294 aa, unknown
  TnpB Polypeptide
MKTRRVTYRIYPNKAQCDQLHWARKMHCELYNAAIANRRTQYKRFGHPVNYLEQQNCLPEFKKVWIEYAELGSHTLQATLKRVDFAYKRFFKGLAKYPKFKAKRRYSGWTYPDKAGWKALSNGKNGYLELRDLGLKIQMRGQARTWGTPTTCTIFFRNGLWYASITVQCNPIRQTGTGSIGIDLGCKDAVTLSTGEKIAKPDFIKEGHKKVKVASKRLRRKRPPNRNKKVKGSRRWKKEQKRISELQGKISRQREDWLHKTTSEIVSGNSLIGGEQLNVINEVSRCSSLPIIGV

SEQ ID NO: 2518 - protein, 382 aa, unknown
  TnpB Polypeptide
MLIYEYKVDGSLAQYTAIDEAIRIVQFIRNKCLRLWMDERGISKNDLQLSCAVLAKIYPFAARLNSQARQASADRAWVAISRFYEQYKAHQPGKKGYPKFQHDNRSAEYKQTGWKLDPDGKHIVFTDGCGIGRLRLVGNKKQKIATFPVKHIKRVRIVRRADGYYVQLGIKIERVITHVPSGKEVGIDVGLQSFLTDSEGHTVENPRPYRKAEQKLKRLHRHLSRKKKGSQNRKKARKALARGYLKVQRQREDFARKQANALVSSHDLIAYEHLQIRNMAKNRHLAKSIHDAGWGLFLRWLNYYGALHDIPVIAVPPHYTSQDCSACGMRVKKTLSVRTHICPDCGVVLDRDHNAALNILQEALSSIRGGTVGHTETGRLAL

SEQ ID NO: 2519 - protein, 449 aa, Massilia sp.
MLLAHCIKLDPTEAQSDHFARAAGTARRVWNWAVGECLRRAAQGLPLRIFELKKQFNSIKYTDPAWLDEDGLPWLRGIHRDAHSQPFANLKKAYARYFEHIRNGVRAYRPHFKKKGRCREAFYVANDKFRLDGKTVVLPKIGRVAMREQLRFEGKVMGATVSREADTWYLAIQVDVPDKQAQLPRSADGVIGLDLGITTAVTLSTGEKITGPKPLQKAQRRLRIRSRRHSRKIVAGRKKTISAEDASDQGAKKGSANTIKAAQILARLHARIKHIRTDWSHKLTTRLCRENQAIAIEDLNVQGMLGNHKLARAISDIGWYRIRSQIAYKAQRYDTLVVVADRWYPSSKLCEACGAKHASLTLAIRNWSCIECGACHDRDVNAANNLKRLATGALAARTALPEASLTATSGTAAGTLPAVGGKVTPVRHDHGQQDGSGQEEDAEHICSRL

SEQ ID NO: 2520 - protein, 254 aa, Nitrososphaera sp.
VAEIECIAIAGVDRNLANVTYGNEEKIITFDASKAVQVAENTRSAIRSFKRNNARIRKNIAGKYGLRRKNRVNQLLHNVSKAIVQRAKEQKAAIVFEDITFIRRLYQRWNYQGRDHRGKMNSWPFHELKRQVEYKAAWAGVKVITLTKGQTRGTSQLCPRCGKRLQGAEHHDFVHRRQLWCQECNKWMDRDVVAAMNIAKKGADAFQRSKGLADEAMVQKPSSKEPAILKVDASKLSFCQQLSKVDRVAHQPET

SEQ ID NO: 2521 - protein, 330 aa, Nitrososphaera sp.
VLNYKYRLHPTKEQELVLDQTLDGCRWVYNYFLSVPSMSEYDMNYALTELKEQHPWLRNYHSKMLQMVGKQVAAARRTARGKLKYRRDDDYNAFTYNQTGFRFDSRGVLILSKIGCIKIVLHRQIVNVKQVTVCRKNGKWYAVAACEILHRSCSNIIYKKPVGIDVGITKFAHDSDNHVIENPRFLTKMLKPVKRAHRRVSRRQRGGSNHSKAKHMLARLYEKINNRRRDFLHKTSTYYCSRYDLIFLERLRVANLMRNHKLARKILDASWSTFNTMCQYKANRIVEVEPAYSSIDCSRCSHPVPKSLAVRTHSCPKCGAVLDRDSTILP

SEQ ID NO: 2522 - protein, 303 aa, Nitrososphaera sp.
MMVVFLKVPLGDRQYFDIPLNNHVSGILSDPSVKVRSITLTASNTVSICISKEVTEEVECTSIEGVDRNLRNLTVGNYENVMQYDLSKAVDITENTWSIIRSFKRNDVRVRKKIANKYGKRRRNRVNQLLHHVSKAVANKAKNDKAAIAFEDITYIRRLYQRGNGQGRNYRSTLNGWSFAEIKRLITYKAAWEGVRVIQLSVKETRGTSQLCPRCGKKMTQKDRKARQLWCAECKRWMDRDVVAAMNLSFKGLARFASSKGAACEAMKGNPGEAMPVILRVDAAKLSHCQQPKVDRVVHQPKT

SEQ ID NO: 2523 - protein, 460 aa, Moorea sp.
MIIIEFKAYGKPFQYQAIDEGIRTVKFIRNSCIRLWIDNKGTGKYDLSKYCKILAKEFPFANELNSTARQAAAERAWSSISHFFENCKKKVPGKKGFPRFQKHCRSVEYKQSGWKLSTDKKSIVFSDKKGIGKLKLKGTWDLWRFDKKQIKRVRIVRRADGYYVQFCISVDVNEQLEPADATVGLDVGLKEFYTDSRGNTEPNPRFYRAGEKRLKFYQRRVSRKKKGSSNRKKAVNRLGRQHLKISRQRVGEACAKRIEHAKRLARCVIRSNDLVAYVRAACRRQDLRIKNLVKNHCLAKSINDAGWYQFRKWLEHFGDKFGRVTVAVNPARPRQNCSECGEVVKKSLSTRTHVCKCGCELDRDHNAAINILKRALGTVGHTGTWIIDPNSCGESTSTLPDSGLVEQVGSMKQESPRLMTGECQLVTVHHRIHHNGARYQYNIAHHQVSPIRYTFPELYK

SEQ ID NO: 2524 - protein, 277 aa, Lactobacillus sp.
VTEPTMRNGSVRLNDSHHLRLPKLGRLRFKGLPSKILDQTDDIRIGTTTVLMDAVGHYFVSMQLGSEYPFVSEQSVIKSKVGIDLNLTNFLTDSNDQVIDNPHYYRTIRGKLAKAQRKLSRRARRAKKSQRRLSASKNYQKQRLLLAKLQLKVANQRKNFLHHVSTALIKNHDLVVAEELRGKNMLRNHALAMSISDVGWRTLLGMLAYKADLYGRKFLTIDPRNTTQTCSDCGHVMAGKNKLTLADRKWTCPNCGVFHVRDHNAAKNILAKGLATL

SEQ ID NO: 2525 - protein, 447 aa, unknown
  TnpB Polypeptide
MIKEQMISRKFTVVAQLHEEQNHDLIEYVDTCFATYSKAKRESFHVIKRDTDFNKSAFNTHLQTKYGVLRRTANSIILDAQGTLNALKGLKQYEKSQLEHKISSLETTINKLELTVANNKTLLRLNDKSVSLVRHRNLKRKLVAKKNHLNHKKQKLENLQYQIEHNIYKLCFGTKHLLKRDYEQFIEHRDSQLSFVGEKAKKACNQLLQLSYNKQNNQFDVKLRKDIGGFKDQRGLYVTGKVHFNYHKKELISILTNHNSPLSYKIIKKNGRYYLYCTFEIQRDDTSFVTRSSHGVIGLDFNKGFVTLTETNQLGHMVDTDLMLYRFKQGDATQTDLETIATVVKKRALATGKDIIIEDLNFKDTKAKTVTKTGKKYNDMLHSLAYRKFIDIMENICHRNYIHLRKVNPAWTSWVAKQKYCPTMKLNIHAGASFVIARRGQGYTDNV

SEQ ID NO: 2526 - protein, 418 aa, unknown
  TnpB Polypeptide
VGVTESDLTPSLSWSAYSLGKAFNAVKEEVAPWWRDVSMHAFRSGIADAAAALANFSDSLKGRRAGKRVGFPNFKSRNRSIFSVSFVEINHQLSWFHPDRHHIRLMLPRSPLDSELKRRSGNLSWIHTTESTRRLYNLIESGRARIQKVTISLRGGHWQAAFSVRYLVGLPIRRPVGRSARQGGTVGLDSGLLHLATLDRVVPGLTDADGHIANPRILESQLKRLAKLNRACARTERGSKNRAKLRRRRARLHGRIAKTRSLYLHHLTNALVDRFDAVAIEDLNLAGMANKKSRLGRSVADASLGELRRQLEYKSADRGTTLVVVDRFYPSSKTCSCCGAVRAKLLLNTRVFECDTCGASIDRDVNAARNIAKEGARLLLGRSSQEEQHVAGLRPETQNADPRSQKTSGADAPMAAIA

SEQ ID NO: 2527 - protein, 461 aa, unknown
  TnpB Polypeptide
VSGCALIKGHRVFSVLRSYSLEHECGDELLPLLLAHRDVVNRILEELWSHIEWKKRKLPGKKQWRLLPKYKVDIHSGEYKKELRDSLLQEWPYAAHWVDSVIKTAYSIFKTWRKNYVKGERKRRRPTAKRLFARAKQTLIKLEGEKLRVTIKPDEYVYLELSKRYFSLPGEVSSAGLGEPIITPEKVHLPVHYGDGNQGGNPSVAWDFNLLSLDGYSPETGWVRIDTKKLASVHISSFEKRRSVQRKASRSKKAKRVLSKYSNRERNRARKHQLEIARVIQSVAGVVGLEELKKQGMHTRSRIWNRRISRSDWRGIAKILEGRMGEAGVKELDPYGSSSYCSRCGWHNRDLNGVDVFVCGGCGLRIDRQLNAAINLYMRLRFGYTVKRVGGKKRVQLKMEGASQREWWDTVVLPSLLGGCVLTGAERKTPDELVRGLYDALKPKLYYAYDRYADAYLRTPT

SEQ ID NO: 2528 - protein, 405 aa, Limnoraphis sp.
MLVFEAKLRGTSEQYAILDEMIRTALFVRNSCLRYWMDNKRVNRYDLNKYCKILREQFEWCKKLSAQACQASAERAWSAIARFFDNCKKKVSGKKGFPKFKKHQTHGSVEYKVDGWVLSDDRLTITFRDGFKAGTFRMWGTRDLHFYQKKQIKRVSVVRRADGYYVQFSINQERKEQHNPTNRMVGIDVGLNHFYTDSDGNKIENPRFLRKAEKSLKRAQKRVSRRTKGSKNRLKAIKKLGKTHLKISRRRKDFAVKTAWALILSADLVAIEDLKVRNMVKNHNLAKSISDASWTLFRQWLEYFGKVFDVPVIAVAPHYTSQNCSNCGQEVKKTLSTRTHKCPHCGYLDDRDTNAAINILMKALQGNAQLPRGTRKVTPGDEMTHYLEGEIPKSKVARRTRKPRQ

SEQ ID NO: 2529 - protein, 412 aa, Limnoraphis sp.
MMGNCQVRFLGGRDAATYALLPDNKAVRLWRDERDVDKSRISRLCKELAKEFSFAKKLNSMARQASGERAWNSISSFYRRCREGTKKKGYPQFKKHCRSVEYKTTGWKLSSDCRSINFTDGFKAGKFSLFCNLDVRKDLLTLKINRVRVVRRADGYYAQFCFDANRSEPGDYTGKVVGLDLGLNYFYKDTNDNAAIYPKYLRSSEKRIKKLQRRLSRKFVESKKPQSNNYHKARKRLGKAHLKVQRQRKDWAVKLARCVVASNDVVVYEDLKIQNMVKNHHLAKSISDASWYQFTQWLDYFGKVWDKAVVSVSPHFTSQDCSNCGFRVKKTLSTRTHRCPKCKTEICRDTNAALNILKKGMSILGAEFNQYSTEGHSESASDEETLGETSISVDEEKSDSISRVDEPRISNS

SEQ ID NO: 2530 - protein, 506 aa, unknown
  TnpB Polypeptide
VARPSHVLDLKGELLDTELAMSQLVSEVRDISAYAAYVVRNDTKLGSALAGVTVSAPAEAGRQAGVTMPDFLATGRTGRSRKEKLLQHNAVTAFRSWQERIDAVNGISSKYVSRGWKRTMNASAPTYGEDVVNLGAVDKQYAVIENNPAADGEIVLKMVIWGNWYRLIFRFDTTRFPEGKVTLPLVKVENGAPVFIFTVVTDNPVVQFSGDYTIGVDVGISDYTTVVVRNSATGCIVHETTLSQRVHSLWNSVRASEKQVKQLNKKADKLIYQRQAHMSTLDEAQFHREAASRKKKELAILAAQEIAYLSYQYDNAVVAVEDLGWISNTMQNGRWNRGAFIQWLTHYVSQNGGWVVSVNAANTSQVCHICGGKVIHPKYKVSVCSKHGMMDRDANAAANIGGRAVSKVEKARKTRAKNRKLQRQARLKTPATRESLKYPGRDRTKHEPTPKRKKHISEGVNLPLSPARVDMTRVLADCGTHGVAETSKAAINQEYVARECRLCSLN

SEQ ID NO: 2531 - protein, 317 aa, Moorea sp.
MLEQKDGTNIKNELVIKKLPYGLTGWKQQDDLFFMNEVSCVPLQQGLRHLQNAFTNFFAGRAKYPNFKKKRNGGSAEFTKSAFKWKDGQIYLAKCKEPLPIRWSRQLPANCNPSTVTVSLDQSERWHISIRFNDPRDLSLPLTDKQIGFDLGISSLITTSDGDKITNPKHFKRLKKRLGKYQKALSRKQKGSNNREKARLKVARIHAKIKDARRDFTHKLTTQLVRENQLIAFEDLAVKNMVKNHKLAQVISDANWAEIIRQVKYKSEWYNRKAVSIDRWFPSSKLCSACLNCVGSLPLNIREWDCPSCNTHHVRVA

SEQ ID NO: 2532 - protein, 203 aa, Cyanobacteria sp.
VNKQSQFLLLKVDNASTSSRRVRYCSKHRRKAINRLGRQHLKVSRQRKDWAVKQARALVMSSDLIAYENLQVRNMVRNHHLAKSISDAAWSVFIDWVKYYAQIFGKVQQPVPPQNTTIDCFDCKQPVQKSLSTRTHVCPHCGSVRCKDENAAWNILEKGLRLVGINTVGHTEIKQLVWTSRLGEGGTPRCMRSISVGRMSVFR

SEQ ID NO: 2533 - protein, 422 aa, unknown
  TnpB Polypeptide
MELVTWKCKLKHLTSQQYEYLREMCHLSKNVYNESVYNIRQHYFAEGSYLRYEANFGQMKFSENYINLGSNVSQATMRKADQSFKSFFGLLKKSKQGMYENWKIELPHYLKKDAFYPIEFIHAGEADLSKGRFKIPASRYFREKYPGLKLYLDIPKHIQDKKVHTISIVPKFSGRYFEARIVFENEEHMKIDLDKDKALAIDFGVNNFATCATSERKSFIIDGKHIKSINQWYNKENARLQSVKDKQKIKSCTKRQNLIANKRDRQIQDFIYKSAKYIVKYCIDNDIGNIVVGYNDGFQDRVSLGKVNNQQFVMLPYGRFKSRLEYLCNLYGIRYQVQEESYTSKASFWDRDEIPKWNPLNPKQGDFSGKRIKRGLYQTKSGRLLNADVNGALNILRKSSVVSLDTLYSRGEVLTPTRIRLT

SEQ ID NO: 2534 - protein, 402 aa, unknown
  TnpB Polypeptide
MITVTRFKLYPNKETEDKLFSNLRICSFVYNWCLEHNIWNDSVLPQLKEVYPDVKEVHSIVLQNTVHQVRDNINALSKKKQKGQKVGRLRHKPRHSMIYEQTGFKMDGNMLRLSKIGAIPIIISRPIKGEIKQIIIKHNKTHNWFAIVVSRTNEIDDWFAFRKTYRKPQSFKAVGIDLNVSNFSTDSDGLVIEHPKNVKRAGKKLRREQRKLSRRKKGSRNRNKQRRIVALVHEKIENRRNDFLHKVSRYYVNNYDLISLEDLSIAEMVQNGNSGLSKAILDASWGKFDDYVLYKAENAGKLAVQVIAKGTTQDCSICGKTVPKDLSVRVHSCPYCGSVMPRDYNSSRNINLRGIEMVGWGTVKPSSLDMGRLNTLAEIRTSILDINNPEQVFIDEARISWL

SEQ ID NO: 2535 - protein, 376 aa, Firmicutes sp.
MILAQKIRLYPNDEQAQKLWQSVGTARFVYNWTLARQEENYQNGGTFISDNELRKELTQLKKTDLVWLSEVSNNVAKQAVKDACLAYKRMFNGLAQKPRFKSRKRSKPSFYNDNEKLKVKFQSVLIEKVGWIKIKEQIPIEGKYTNPRISHDGKYWYLCVGVEQEFEQPILSNESLGVDVGIKHLAVCSDGTVFKNINKSQTVRKLEKRLRRLQKQVSRKYENNKKGSQFVKTKNILKLEQQMKLLHRRLKHIRMNHLHQVTNQMVKTKPSQVVMETLNIQGMMKNKHLAKAIQKQGLYELKRQLMYKCQKYGIAFIAADMWFPSSKKCSHCGAVKTRLSLSERTFDCEACHFTIDRDLNAAINLSNYQFTSSLKR

SEQ ID NO: 2536 - protein, 415 aa, unknown
  TnpB Polypeptide
MISTKLVSLLSMQRKLPLKAYKYRIYPTDAQVVFFAKTFGCCRFVWNKMLEEKQGAYKKKEHIPRPTPAKYKKEFPFLKEVDCFALVAVQNHIENAFRNHFKNRKQFKLPRFKKKRDKQSYTTYNVHNSIKVDFERSLLYLPKLREGIKIELHRKFDGKIKSVTISKTTDGKYYASVLVETQNPRNKVVEPKSKACGIDLGIERFVTVTNDFGSYKVEHPKYLHRGEERLKRLQKSLSRKQKGSKNQEKARLRLARQHAYIANARNDFLHKLSKTIIDENQVVVVEDINVKGLLKTRLAKSVADSGWSKFLNYLKYKAEWYGRTFIQVDRFFPSSKLCHRCGHKNDDLALHDRTWCCPACGEVHDRDVNASINLYLVGLGRPEVKPVERALVTNRSHHASKQEAQPQKIEQSAKG

SEQ ID NO: 2537 - protein, 417 aa, unknown
  TnpB Polypeptide
MASGVEGLLTLSIGMRVSPEPEAVELLKRYNTALNYAINKILRLDLKKIGEVHSALYRELREWFGLPSRVAVDCYRDALANAKSWRNNPRRGRRPRVRKLSMLLHPGSGYSVKEGYVEIIGGIKLKIIGWDGRYDGYENGEARLVYRDGKMMLWISKKVPKPQPYQPRDAIAVDINERKIVYGDDKIIKERDTEIDEAHRWKKLAEDLQKRYSSPRYPAWRKRKAILNRIRSYHRKARNILEDWARKTSLEIVMMAKRLRYAVAREDLTGLINSLRKIKNKDHRTKLIIMGYKRLGKWIDWQTMKHGVPLAIVNPNGTSSECPQCDSKLEENGYRRLKCPQCEFEADRDIIGKLNIRKRALKKLKIKAIPGGSLTTPTAPQMTDVNPNRWGEPMNRPKGNLRPLGRGGGQSQGAMLD

SEQ ID NO: 2538 - protein, 367 aa, Eubacteriaceae sp.
MLKAYKYRIYPDNEQKVQIAKTFGCCRFVYNQTLAYRKEKYEKEKKSVSKTDCNNYCNRELKKEYEWLREVDKFALTNAIYHMDSAYQKFFKKHAGYPKFKSKHDNHRSYTTNFTNGNIAVDFEKGKVKLPKLKEVKVKLHRDFSGQIRSATVSQVPSGKYYISILVETEHGGLLHTKREIGLDLGIKDLCITSDGKKYENPKAIKRYEKKLKKLQRQLAHKKKGSNNYYKKKKQIAICHEKITNVRKDHLHKISHEIISENQVIVSEKLQIKNMLKDHHLARSITDVSWYELTRQLEYKAEWNKRKYIKIDTFYASSQICSVCRYQNIDTKNLSVRKWVCPKCGAKHDRDINAAKNILAEGLRQIV

SEQ ID NO: 2539 - protein, 380 aa, Pseudonocardia sp.
MGSKMVRRAYRYRFHPTPDQAAQLARTFGCVRYVDNRALAEGSQAWAQQRRRVTHAETDRMLTAWKRDPDTAWLTEPSKGPLQAALRHLQAAFVNFWTRRAGYPRFKRKGKTTGSATYFRGCFTYRNGRLTLAKQDRPLDILWSRPLPAGAVPSQVTVTRNARDQYHIAILVEEAITEHAPIDSAVGIDAGLTSLVTLSTGEKIPNPRHEHRDRARLALAQRRLARKAKGPNNRAKARLRVAKVHGRIADRRRDLLHKLSTRILRENQTVVLEDLAVRNLVRNHSLARAISDASWAELRRMLEYKAAWYGRQVVAIDRFYPSSRTCSACGAIVEKLPLNVREWTCPCGAVHDRDVNAAKVIRAAGLAVLACGDGVRPLRA

SEQ ID NO: 2540 - protein, 377 aa, unknown
  TnpB Polypeptide
VKAFSYRIYPTNAQARAMQRQLDVARELYNACLEERREAWKHAVSRTYYDQANQLKDLRLLCPDVASVNFSMLQAVCRRAHRSYEAFYRRCKAGEKSGYPRFKGRDRFDSITFPRYGDGCKLTARLYLQGVGDIKIKLHRPTEGPIKTVTLKREGRQWFTIFVCDAPTHPLPATHQSVGLDLGLTHFVTLDTGETIANPRSLRKAQAKLRRAQRSLSRKKRGGSNRHQARVRLAAQHRTVRNTRRDFHHKETRKLVDRFDVICHEDLAITNMVKNHCLARSINDAGWNQFLHLLHAKAVDAGRVCVAVNPAGTSQTCLCGVRVEKTLKDRWHSCSSCGLSLPRDHVSAMLIKREGHSRCGGTERNTAPVPQEAVCLS

SEQ ID NO: 2541 - protein, 274 aa, unknown
  TnpB Polypeptide
MLLSELNTKIASDTELKDYDLLVELRCYDSRGKRVKLAIPLKRNEHFNKWNSKGKLAKSIIVTDKYIQFSFEVEQAKKAEGSIIGLDPGAKHLLTTDEGTHYGNEMWDLLLKLRRKKTHSKQWSKTKEEIKEYVDRSCKSLPYNELRKLVLEDNKNIKKNSKVRGRLTKNMRSFLNGWVIGRIDSRIEQLCQENGVSLARVPAYNNSIMCPACGCVEKANRASQETFRCIKCGHVDNADKIGSLNSLARFALGAYGSEFKPLFYQKHPKYKLGV

SEQ ID NO: 2542 - protein, 368 aa, Thiothrix sp.
MTISTASSFLKTLKVRVKDKHTPILERMAFEVNQVWNAANEETAYYAHLPIPEIGWLHIYLSAYDLAKSQAALRKERGFLIHSQTVQEVTEAHEKARKQFKKSKLCWRVSSGSKRSLGWIPFKKGAAVWKNGQVRYAGHYFKVWDSYGLSQYEFRSGSFSQDARGRWYFNVVVEVAGIETTAQGQVGIDLGLKDTATCSNGLKLESKQFYRELESKLGIAQRANKKQRVKAIHAKIKNRRLNSIHQFTTQVVKDNSLIVIGNVSSSALAKTKMAKSVLDAGWYMLKTQLKYKASMRSGVCLEVNESYTTQACSSCGCISPNSPKGRAGLRIREWSCSECGALHDRDVNAAKNILALGHERLAAGIPVL

SEQ ID NO: 2543 - protein, 442 aa, Hapalosiphon sp.
MLVYIKEVKQMYGCQQNLINPSIELKAVLEFICSESHKLTNCGIYYARQLYFKTGKLIGKYDLEKEYKTNKHYQVLHSQVAQQILRSVAESFKSFKELDKKYSKGELHFKPRLPKYRKGVGYALVTYPKQALKLVGDNIKIPLGNTVKRWFKLDSFTIPMPSNLLFEDIKELRILPRNQCFYAELVYEKEPVPRYYINPNNALAIDPGINNWLSCVSNVGTSFIVDGRKVKSLNQWYNKRVSTLKEGKPQGYWDDQLAHITEKRNRQMRDVVNKAAKLVVDHCIKHQIGTVVFGWNKGQRQEATLGKITQSFVQIPTAKLKERVKQLCEEYRIKFVETEESYTSKTSFLDGDFLPTFGAKPEGWTPSGKRVKRGMYRTGTGKLINADLNGAANIMRKVETQLGLNLVKVCRALLTVPTRFRLWETKTKKRNRAALAPCVATV

SEQ ID NO: 2544 - protein, 387 aa, unknown
  TnpB Polypeptide
MLLVERHHIQGNHEIVRLCELSKELYNKCNYCMRQAWFSSELLPDINLLVQLVKHETSFKNLHNTKTAKQTVRKCLTDWTNFKKALKAWKKDKSKFLRMPQPPNYKEKMAQVIFYKETIKGGQGKKKLDTITPTNSCFGIKSVRDYKQVVVTPKRFGFIVDVQYEQNVPNKSTAKGVACVDIGLNNLCAITSDQTTPILVNGRIIKAINQKFNKYKTKRESRKRYFRIENYFHHVSKLLISWCQEHKIGTIIIGKNDGWKQGQKHGKRNNQNFQSVPFFKLIQKIEYKAMLSGIKVIFTEEAYTSKASFLDRDVIPAYDKGNNLKFNGSRVKRGLYRSGDGTLVNADVNGASNIGRKVIQNSEFLGRLDRSLAARPVRINPLKVFCV

SEQ ID NO: 2545 - protein, 410 aa, unknown
  TnpB Polypeptide
VRTAYQYRLRPTSSQVATMGDWLNLLRWQYNYRLGERFNWYEQNRCDIHACPLICHLPELKDHPDFYSQKRDLVNSKALFPQYKTIHSQVLQDCIARVKKTFDRWMKGDCNGKRSGKPRFKGMNRYHSFTFPQMKQDCIEGKLIKLPMIGKVKLIQHRSLPDGFKIKTATVTRKVDGWYVTLSVEDASVPEITPDLPVMENTIGIDVGLKSFLVDDSGNEVEIPQCYRKSEVKLKKLQRSLSRKQKGSNRRKKAVKRVAQTHLKVARQRKDFHYKTARKLVSQGKHVAHEKLNIKGLAKSRLAKSVNDAGWGQFLSILGVKAERAGLLAIAVNPNGTSQDCSGCGTKVPKKIQDRWHSCPDCGCSLDRDHNAAINIKHRAVGHSVLKAQVTSEAIAGVTEKPTLYASASV

SEQ ID NO: 2546 - protein, 422 aa, unknown
  TnpB Polypeptide
VKLKMLFKGVVFRLDSDFPPEAMFLLEDFRLAVNSAIRAGLQARVTSRNALTKQVYKSFREEHPRMYAQHLVSSFEVAAGILRNHRRRVNRGNATSIPYVKRLMMKAENQAYKLDRVAGVVDLPIRGGCHVKLGLVVSQYHRKYLDDDTLTLGSLTLLPDRVIIAFRKEAPKAYTPESALSIDTNERSLDGVFVIGDNAAAVKADYRDVSTIQQRHHDRRRRLQKKKSHDRRTARSLCRREGSREHRRIDYRLHHVANAVLSFAERERSAVVLEDLKRFKLISSKGMNRRLSMWPRRKLHSIIEYKAQWRGIPVVKVDPRYSSRKCPICGRIQDSRMGTEFVCECGWHLDRHINASLNLLQTAISNGMAGGLRFDPGAFQHDVMMILYEPAMAARSEPNGTSQTGVLARAGHTTRKLTEPGL

SEQ ID NO: 2547 - protein, 380 aa, Nocardia sp.
VSVQVVKRSYRYRFYPTEEQKDQLARTFGCVRYVYNRALAERSRAWFQEQRRISYAESSRMLTAWKRELGTTWLAEPSKGPLQAALRNLQAAFDKFWRKQTGYPQFKKKSKSKDSATYFANCFTYRSGQIKLAKQSQPLNIRWSRPLPAGAVPSQVTVSLDAAGRYHIAVLVEDTVVKHAPTKAVLGVDAGLTSLYAFSSGEKISTPRHEREDRVRLARAQRALSKKEKGSRNRAKARARLARIHARIADRRLDHLHKLSTRLVRENQVIAIEDLSVRNMVRNRSMARAISDASWAQFRMMLEYKADWYGRNVVAVDRFYPSSKTCSVCGRINDSMPLQVRNWMCPCGASHDRDVNAAKNIRAAGLAVLACGDGVRPPRS

SEQ ID NO: 2548 - protein, 683 aa, Streptomyces sp.
VWRRAKDAPVSVIRLPLVVGDVDVRRRVEQLFSAMWQVKRALQRDARDVVDAYWAGEVRRERDVNAWRAELGLSRTGLERRAYQHLERSGWLSDHVSKALVMHQADEVWAGVVRHLHPDASGRRAGRPKAGIWWEYTRIPGRARSHTTDRKWETFRLHGTLAGHLDTFRHPALPPSVAIPAQAAGLVPGVRVLAQPHRMPALARPTGRVPTGTTDALGRGRSRAATWFDHTGPLAVVFAGGPTGGGEIVLPVRLAQGAGRWPYLLHYLNDPSRWHKIDLVRRRYPAAPGGWAYEAHLMVLAPGYASPATRARRREAAALQRVGGVDGNVSNLAAVSLPATLNPEDGGVRSDRITLTEQEQHTLAAGRKKARGRQRALDRSRRATNPQQYQRSRRQKARDERRQAAALPPKAVTVPAGPRRTTATGRPRQAYRRDTLSAGYRNLRARHSAAAASAAEASHHRAKKIAAALVAAHGPNLTVEDCDIRTWFRLWGRTCSATTPGRLIAALAAECTATGGRLLRASTFTTALSQHCLCGRRVPKSLRQRTHHCDPAEDGCGLRGDRDLVSAALAAFTTLTDPDDPTTARLDHTRARTAQILFVQGLQEALAESTAPKSAPSDRTRAAAAPHGNTLPRQRTASARRNAGPCSVATPDETRPAPQRPKAHAGTTRPHTGRPRTHIRDKS

SEQ ID NO: 2549 - protein, 231 aa, unknown
  TnpB Polypeptide
MYFVKNNPKDCRCERHRINIPSLGWVRVKEKGYIPVTKDGYVIKSGSVSMKAGRFYVSVLAEIPDSKITTNDYSEGIGIDLGLKDFAILSNGKTYKNINKSARLKKLEKRLIREQRCLSRKYENLKKGESTQKANIQKQKLKVQKLHHRIDNIRTDHINKAIAEIVKTKPSYITIEDLNVSGMMKNRHLSKAVASQKFYEFRTKLKVKCDDNGIELRIADRFYPSSKICHC

SEQ ID NO: 2550 - protein, 540 aa, Nocardiopsis sp.
VRTIADPYLVPGPTGVAVRTRLKHLTVQDEKVLRLVGAHLGSLAAADLKARCAHGSNHDSASWAARKRHLTPESSSRWAGSITKATHDQWALARRGQVAHLRSVEAGITTIRHRLSLPVSAKGTKKKPGGYRSKREWHAKTRRLATLQDRLATVRADFEAGKVSVVRGGKRLSRHRHHLDAAQLTETAWRERWQAARWFLQADGETGKRFGNETIRLTPQGEVSIKLPAPLAGWANAPHGRYRLSGTAAFAHRGGEWAERVAANRAVAYRVHLDVDRGRWYVTASWQIAAPSQIPPRAALTEGVIGVDMNSDHLAAWRLDTHGNPIGDPRRFDYQLSGSATHRDAQVRHALSGLLRWAQSCGVKTIAVEDLDFTDSKSREKHGRRKLFRQVISGMPTAKLRARLTSMAHATGITIIAVDAAYTSRWGAQHWQKPTTSKKRQTSGHDAASIAIGRRAQGHPIRRRTTPPRTHRSDGYGPRTVQARPGARGGEEIRHPGWERAPDARTPTLGERERGGPAHPTPFGTRAAPGAASDVTPAHC

SEQ ID NO: 2551 - protein, 508 aa, unknown
  TnpB Polypeptide
VSTIAAQSCKSAQGWKHYPYCRRTQRSLDALWFSVHRNALILARPCNRGGRSGRRWQRRRVAGFGKQYLLDVRQALRATPHQTQNRNHRQLVEGCEGRRAMRLVEQHIIERGDPRLALLDAAAFASKNLWNAANYLVRQSFIFEHVYLDNVKVFHLIKSHDAYKALPAKVSNQVLIQLHTAWKAFFEATAEYGEHPEKFVGRPKLPKYKHKEQGRNLLVYEFKAVSKRALKRGMISLTGLGDLVKTKQSRATIEQVRIVPRSTHYVIEVVYERAEQQATGDPALFASVDLGVNNLAVLTSNAPGFVPVLVNGRPLKSINQEYNKRRAALQSKLAKQDRFTCRQLEQLTDKRNRRIKHYLHVASHRLIGVLVEAGIRTLVIGKNPLWKQEVEMGKRNNQSFVQIPHARFIEMVQYKAALVGIQIKITEEAYTSKASFLDLDPIPSYDPNRTEQPKFSGRRVSRGLYQTSSKRLINADVNGSFNIGRKVFPTAFGLGIAASAVRPRQLAI

SEQ ID NO: 2552 - protein, 350 aa, unknown
  TnpB Polypeptide
MEITKTLKVRIKDKHVPLLNQMARSVNFVWNYCNELSGRSIRERSNFLSAFDMHPYTKGAGKELGLHSQTLQCIASEYVTRRKQFKKAKLNWRKSGGVRRSLGWIPFNTGAAKWKNGQVFHNGHHFNVWDSYGLSQYQFRAGNFSEDSRGRWYFNVAVKIEAVQSKGKSSVGVDLGCKKTATDSNSNGITGREYRASEKKLAIAQRAKNKKRVKAIHAKTKNRRQDDLHKYSRKLVNENAAIFVGNVSSLGLVKTKFAKSVLDASWSLLKTMLEYKCAHAGVVYEEINEAYTTVTCSCCKKRTGPSGLEGLRIREWTCAQCGNTSDRDVNAAKNILAAGLSRLTGEKVAA

SEQ ID NO: 2553 - protein, 202 aa, unknown
  TnpB Polypeptide
LIALTSLKLNPRRVRSRSFDFGIKTFLTCSDGSKIESPQFFKQSLNAIRKASKHLSRKQKGWANRERARKNLARKHEDIANRRSDWFWKLAHELTDKFDVLCFETLNLKGMQRLWGRKINDLALREFLQILEWIAKKKGKLLVYIDQWYPSSKTCNNCGHVLESLELSVREWRCPNCHSVNGRDENAAKNNLCSGGIHCRVR

SEQ ID NO: 2554 - protein, 362 aa, Acidimicrobiaceae sp.
MGGEQKPPRGSPRTPRRRTTSRNCTSPRPANYFAGRAKVPTFKSKGKSESFTLAGGSTRLVDSHHVRLSRVGEVKTYESMRKLYRHLERGGARIMSVNIAERRGKYTLSFTVEMSRVIPAPRAPERVIGIDVGLTTLYTGATPDGAQVLSVANPRSYQRSEARLARAQRVASRRQGPAPGKAPSNRWKSSNARTQKIHADIANARKNFIHETTTMLTENYDRIVIEDLNVVGMLKNHSLAKHISDASWGEFVRQLEYKAPCYGSTVVKVDRFFASTKTCSSCGAVKAKLPLEIRTYHCETCGLTIDRDLNAAVNLVRWTSQATSAGTRSVAGRRGEVRPRRTRAVKARPDEASTETPALVGA

SEQ ID NO: 2555 - protein, 510 aa, Streptomyces sp.
VRPPVRAQGREEPRRARRGRDDQRGRRVKKFQPQPGFVVQAYRFALDPNAAEEQALRSHCGAARAAYNWAVSWVRASWAQRAAEATYGIGEAELTPWRPWSLPSLRKAFNEAKRTDPRFAGWWGENSKEAYSTGLANAAAAFDNYAKSKNGKRKGKPVGAPRRKSKRKARLACRFTTGAIRVEPDGRHVTLPRLGTIRVHERADALRERIAAGTARILSVTVRHERGRWFVSFQTEVKRDLVRVARPDVAVGIDLGVKHLAVMADSAGEIRYEPNPKHLDGSLKLLRLHSRRVSRRQGPDRRTGHKPSKRWEKADRERNKVHHRVANQRADALHKLTTKIRAEYGTVVVEDLNVAGMLKNRRLARKIADAGFGEIRRQLTYKGRRNATHTIVANRWYPSSKTCSNCGAVKAKLPLHVRVFDCDACPLVMDRDENAAHNLAALAAAATTGTGVAGDLDAVKASKPCGADRKTRTTRPGRTAGTGRAGGATLPHQRREEARDRTQAEALTLW

SEQ ID NO: 2556 - protein, 266 aa, Streptomyces sp.
MPSWNFDTRTVSIWTLDGRIKNVPFACSPGALKQLAEHRQGESDLVFRDGKWFLIATCEIPEAPRFEPKGFIGVDRGITNLATTSDGDNHSGRRLGRYRRWQARKKVELQARQTRSAKQLLKKRARREARHATHTNHKIAKTVVAVAQRTARGLALEQLTGIRERVTVPRDQRARQSSWPFHQLGSFIAYKAKRAGVPFIEVDPAYTSQRCPRCGHTERANRPTRDHFHCRRCGLAGPADHVAGANIAQRGATAWVFVNMPDPAPA

SEQ ID NO: 2557 - protein, 344 aa, Competibacteraceae sp.
MIKTFRYRIKDSTNGAKLDEMARAVNFVWNFCNETQEHALRWNLRWPTYQDLCKLTAGSGKELGLHSQTVQAACEQYAIRRQQFKKRRLRWRGRRSPGWIPFKASGVKVDGDAVRYLGQGFRFWNSRELPGAIKSGSFGQDARKRWYVNFAVDCPEDQPTTGTKHIGIDLGLKTLATCSDGTKIEAPRWYRNRQKRLAEFQRKRKPRKVRNLHAKIANRRRDFLHKESARLVNECELIVVGDVSSAKLTKTNMAKSVNDAGWSMFRNLLEYKAIARKVVYREVSERFTTQTCSCCGAIGGPKGRNGLEVREWVCGECGAVLDRDVNAALNILRLGHQSLLAEVR

SEQ ID NO: 2558 - protein, 332 aa, unknown
  TnpB Polypeptide
LKEPGTKASWMGIKTSIISSLPEWANVAPYQVRSIAVKEACKAVSNAKRKYVETHKSTEVRFRTRKATKQSCYIPKSAINEKGFFTKVLGVMQYAEQLPIIEYDCRLIYEYGNWFVSVPFKRTVNIPKTKELIVSLDPGIRTFQTYYSLTGAGSIGQHAWEKILGYCYELDKLTTKLSASHGARRQNLKRAAVRLRYRVTCLKNELHTKVAVWLCKNYKLIVIPEFSAAEMSGRHKRKLTRKTVRAMLSLGHSQFRTKLVQFAELYGSNVVFVNEAYTSKTCTKCGHIHEKLGGAKVFKCPACGMTVSRDINGARNIMLRAMLDQTTSEKLA

SEQ ID NO: 2559 - protein, 211 aa, Fischerella sp.
LGILKVIVHRPVPDGFDIKTVSVTKKADGYYVTLSLDDKTVPTIKPDFNPDNIVGVDVGLIDFYVASDNTRISAPKHLRKAERKLKSAQRRVSRRKKGSNRRKKAIQKLGRQHKKVADARKDFHFKTAKALLNKYDVVAVEKLNIKGLVKTRLAKSINDAGWSQFVTILSNKAENAGLKVIAVNPNGTSQECSSCGHSFLLLKMGNPRKAA

SEQ ID NO: 2560 - protein, 421 aa, unknown
  TnpB Polypeptide
MGIYCVQSNVIRGLSKEQYDLLREMCRYSNNLYNVALYNIRQHYFNTKQFLTYESNYHECKTNENYSLLQAGISQQIMKVVDRSFKSFFNLLKKCKLGDYRYHDVNIPHYRPKGGMFNLIMSTNAFAIKDGCLYVGMSRTFRTLHESVKEIAIPFPARLSGKIIKEVRILPCNNGHYFKIQYVYEAEQESVNANKNNMLSIDLGVDNLATCVSTVGTPFIIDGRRLKSINHQWNKETAKLRSISMKQGLKTTARIQRNTTKRNNQVNDAIKKSARYIANYCIENNIGTLVVGYNADFKRNSNLGKTNNQNFVQIPLGNLRQQLDFLCWKYGIEYIEQEESYTSKSSFLDKDVLPEYKPEQPYIGVFSGNRIKRGLYQSKNGTIFNADVNGAANILRKCKQNVDFDKLCKGLLTSPKRIRLS

SEQ ID NO: 2561 - protein, 417 aa, Brasilonema sp.
MLITYCYRIKPNPEQVVIMDNWLELLRRHYNYALGQRLDWLRRTRCQIDRCSTVSQPIGEIPDKVDYYTQQSDLKQTKQLFPNYKNIWAESQQVNLQRLDKAWKKWLFPDKSGKRGGRPKFKKSGQMRSFVFPRVNNPKAGAFLENGVLRLSKIGPMPVIMHRPLPVGFNLKQATIVKKADGWYVCLSLEDDTVPSPLPLDEVKSTVGVDVGLKEFLTTSLGETVPASKPYRTAQNHLARQQKFLSRKHKGSNGYKKLQNKIARIHQRVGRVRENFHYNTAHKLVKRYDLIAVEDLNIRGLARTPLGKSILDVAWGSFIHKLEAVAVKCSVHVVKVNPHGTTVDCSNCGAKVPKTLSMRTHECHKCNAVIDRDENAARNILQRALNAVGLMVSAGGGLGDAQPMKPEAWGWNGVQTT

SEQ ID NO: 2562 - protein, 384 aa, Streptomyces sp.
LHGLRKRCEEELRAAQAHLRRSEGAVEPGGPGRPARREEDLRRLRDAEGEPEGREPRETRLEAVPQGHREAGRLPAGGRAALRRPDAVLADRRTPGLHLDRAGPGQGRGVHRHPRAAGHPGPVPPGRVRPGMPGRHVVPPGHLRGTRSNAEHGTGGLPRPRPGLGVVNTATTSDGEIMAGRGLNRIRVRERTLRTKLQKKNTPSAKRRLKRRRRKESRRARDINHKIAKHVVAEAERTGRGIALEDLTGIRERVRLRKPQRATHSSWSFAQLGAFIAYKARRAGVPVVHVDPAYTSRTCAECGHIDRANRVSQAWFACRSCGFVDHADRWGHLPLERSREWGRLPQHPRESVGVVAKRGAVNRPCPTTTSAWRWDWTQTQRHRQ

SEQ ID NO: 2563 - protein, 444 aa, unknown
  TnpB Polypeptide
MQKRKFTVVTQLHEKNNRDIIEYIESSRHDYAKAMRETFYAIKHNSLNKSQHNTYLQHKYSIVKRTANSIISDAQGRFNALKEFTEYKKKQLEHKIAHLEYTIIPKLVKQRNYNSTMLNSDRFISLVKQRNLRLKIVAKKAKLNRLKQKLNNLSYQLESGKLKLCFGTKRLLKQNYNRFIEQRDGQMAFLGARGEKSCNQILQLTYNRKDNQFLIQLRKDFGGYKSANSKDKYAYGKVYFNHHKDQLISILRFKTSPLSYKIIKKDGRYYLHCTFELQMAKNDFVTRSEHGAIGLDFNKGFITLSETNKYGHLIQTQFLPYRFKSGNKTKTDLQDIANHVMKLAHQTGKDVCIENLDFRTKKSKTETKQDKKYNEIIHSLAYRKFSDIIENITYRNKVKLTKVNPAWTSWLAKQLYCPTMKLNSHVGASFVIARRGQGYKDALN

SEQ ID NO: 2564 - protein, 370 aa, unknown
  TnpB Polypeptide
MELAYKFCIYPTKEQEKIIQNTFGCCRFVYNYFLHERISKYKETGKSPTRFQQDKELTLLKKKFAWLKSADSSALQESLHNLDDAYKNFFRSIKSGIYGGYPKFKSKHNHRQSYRSNWKFNNIRISQNKIRLPKLGFVKCKISKNVKGRILFVVVSQNPSRKYFVSICCTDIECKPLQKTGMSVGIDMGIKSFAVLSNGVEYKNYKFFENSQKKLARLQRQLSRKSKGSNRREKARVRVARLYEHIANQRNDYSQKLSTDLIRKYDIICLEGLNVQDMLKNHRLAKHISDTGWGNFRQQLIYKANWYGKQVVVVDRFFPSSQICSNCGYQFEMVKDLSVRDWTCPICGAFHNRDINAAKNILNEGLRLLA

SEQ ID NO: 2565 - protein, 394 aa, Epulopiscium sp.
LIAVRRQVLKRTDKRFNELDNICFLSKNLYNATLYEMRQSYFKTKTYLKYETINKKFTHENQVDYRALPAKVSKMTQMLAEQGFKSYREKKKKGDAKARLPKYLVKDGRQVVNYTKQALSFKKKGCVKLSGTEIYIEIGELDVNFVRITPRGNHIIVEIGYEIEEKEIQNNERYASIDLGINNLATITSNVFKPFIINGRALKGINQYYNKNLAIQKSKLEKINLKTSKKVKNLHIKRNNKINDCLHKATRLLVNYLVSKQISILIIGYNKGWKQNTDMGTENNQKFYNIPFYKFKKMLKYKCKVEGITLIEQEERYTSQASFLDKEKVSKKINFMGKRIKRGLFETKNKILINADVNASYNILKKYLTKKGVWNEKIFSDCIEVYSTPLLRNF

SEQ ID NO: 2566 - protein, 491 aa, Caldivirga sp.
VPRVVPPKRGFLALDEPVGRYPTVSTTLGTLSSFPPKLKGRGGKSRSEEMRTVRLRLLPSGAQERRLRKLADAAAKLWNGLNYARLIQFRASGKIDFKGTEHELYHKYKSVLGVNAGQVINLNNGAWMSYFKLKEMYEQGKLPRFYGKPSPPDFWRDRLLGRRKLVILVRNDRYYLEQVNGGEGYLVLKDWGLRVKYAGRIKWAGKQGMLTIKFEDDRWFAYVPITVGEKPARSNPKGYVKGIHEKIRIENPKGGNKAFIDVGLNNLFAVVFNHTDTAILIKGSTIKAEYYWWKRETKTYQAIRDWLRNHSFNAWRKYHAFYLHAVYKKRERLRHYYRTAVRFLARAMHEMGVDEVFIGYPYLVSQDDGNEYNTNVWWFNKIIKWLGDVLEEYGIRLHVINEYGTSKQCSICNANHENGRIKRGLYICPVTGIEINADLNAARNIAKRAGYETLMPKKILSFIITTNGVKPLTPKEGETTKTPKINPTSPR

SEQ ID NO: 2567 - protein, 390 aa, unknown
  TnpB Polypeptide
LRAVKGVKFTYKPTPQTIKLLSTFREMVNEAIRICLSEKIRGRLRLRDRIYREFQEKFGVLSCFPYCVAEVAWSVVKKHRHWQRKPYAKRLMLKMDAANYSLNYSILSLPFKRGERLLIPLKYGEYQRSFLMDKSLKRGSVTMTESSIVIAFSKEVALSEPSRRVGYDLNEKSIVGSDGTTHDLAEVARLHALYGIRRSSFYERHPKDRRLKKKFASSRREKERVSQALHRVSTVIVEKARANNEAIILERLKGIRYAHQRGNGEGTTRRRRIALWPFRMLQSYIDYKARWAGVPIEYVSPSFTSKKCNVCGFINRKLMLTERSWLCPQCGAKLDRDLNAAINIERRGKIRCLGEAHPGARGRDEAVKGNETTMAPILRAEAPKPNLQVP

SEQ ID NO: 2568 - protein, 374 aa, Anabaenopsis sp.
MKTLKFKLYQHKRNRYLKRMINAAGFIYNHCIALHKRYYRRWGKYLSCAKLQSHIAKLRKRNPFWQSVGSQAVQDICQRIEKAYQLFFKHNKKGVRPPGFKKVKKYKSFTLKQAGYKFLGSNRVKIGQRVYQFWKSRQIEGTVKTLTIKRTPLGELFMVVVVDEGNKPEIEVKTGKIAGFDFGLRTFLTCSDGTKIESPQFFKQSLNAIKIASRQHSKKLKGSSNRERARKNLVRKHEDISHRRRDWFWKLAHELTDKFDILCFETLNLKGMQRLWGRKISDLAFGEFIQILDWVAKKKKKRVVFIDQWYPTTKTCSCCGYVLESLELSVREWRCSGCQSINGRDENAAVNIQMVGASTSGLGDISRFETAIAV

SEQ ID NO: 2569 - protein, 355 aa, Natrinema sp.
MRRTNSFEVVPQSEQADIVLRRLLDASASLWNQLTYDRRQRFFAGESVWDCDSYYDEYVDVLGSATTQRSPASTTPPGGRSSRQSRSPTGRSVRPAYWGNQADGRDLRTYIRNDAYTINWGERSRLEVPIGSQLKDEYGFGQFERHRVAVRGEPHWQGKQGRLHLTYDDVDETYCAHQPVTVTEAEEATPTGADVAALDIGANILVACTTTAGDQYWYSGQEPFRQFQETTERIADAKAKLPDGQQTSKRIQRLYRKRSRRRDHAVNALLRDLVERLHDDGVETIYHGDLTGVLGEYWSVEANLKAAYLLGTSTVPQPTRDRLRGVRHRRGINLRGVDLPDMSGVWRARADAPAS

SEQ ID NO: 2570 - protein, 394 aa, unknown
  TnpB Polypeptide
MIKTYKVMLLPNNKQRTKLFECAGVARWAYNFALATQQENYKNGGKFLNDGELRKRLTELKKQEKYAWLNNYSNNITKQAIKDACQAYKNFFEGRTKFPKFKSKKRNRPSFYVDTAKIKITDTHVKLEKLTTSKKSNKQKLNWIKLAEKGRIPTGNNIKYSNPRVTFDGVKWWLSVGVEEVETKHQNYTEGIGIDLGVKDLAIVSSGQKFKNINKSKKVKKLEKRLKRLQRKLSKKYELNKIQIEGGEFRYRKTNNIKKLEFLVLKTHRRLKNIRHDYIHQITTFLVKTKPEYVVMEDLNTKGILQNRRLAKAVQEQMFREFIRQMEYKCQWNSIRFILADRFYPSSKTCSRCGSIKEQLSLSERKYKCNQCGFEIDRDLNASINLKNYGKSIA

SEQ ID NO: 2571 - protein, 441 aa, Acetobacteraceae sp.
MNAVAQKKTSLQENEFYRVIKLRLHPSAAQAAVLRSWMAAKRTFYNQAVDCINHSRQYLAFEDWPSFTDLRVHVREIIETEHPWASKVSSQITAGATTAAWAAYETNLAKLRINPQHRFRLQMQSLKRIDITPTEVFDCGVPGPRSQGLFKGFYPSASFRMVGGSRMDAECRFGGGMPGTIRVTDSSATILKLLEEKVPKYAPNVLWDKRTRRWYLAVKHVVQRPADTKPPSEREVLALDPGARKFNAFYRPDGTHGELLKGAESYIRMMCRKAASLQSKEAASTNHDTYKHYREQKLRTFAKLRNWTRSAHYEAIHTVFTLGDFIILPLFESQRMVRRSQRVFGNETAQKLYTWSHYSFSQRLYSKVQTTANKQIAFTREPGTSKTCDCCGHWVGSLGGAETFRCGSCGYAADRDHHGARGNLLAALGAALIVGPDGVDR

SEQ ID NO: 2572 - protein, 224 aa, unknown
  TnpB Polypeptide
LYAGIDIGIDNLATVTSNKVGFVPRIVNGRPIKSVNQFYNKYKAKLQSKLGHTGTTKRMEAVTNYRTRRINHYLHTASRRIIDLLVSEGIGTLVIGKNNGWKQDCNMGKRNNQQFVSIPHGRLIDMLTYKAELVGIIVKVTEEGYTSKASFLDGDKLPAYDPKREEKPTFSGKRIKRGLYRAEDGRLINADVNGSYNIIRKVAPKSFGDKGVAGAVVHPIRLAV

SEQ ID NO: 2573 - protein, 355 aa, Ktedonobacter sp.
MLEIVKQQYEDKGTFPTKYDLTAHFKGRGGAHVPATTVQMLADRLSKSLKRFLAAKELGIPDVGFPRFKKPNRWHSIQLRQYGTSRDVWLDADNKHLHVPAKIGKSLKIKLHRPIEGLPKTVHLVHRADGHWYALVVCETEPHTEHDPMTCEHPAIGIDVGLKSFLTDSEGHTVENPRFYRTSQKTLRRKQRQLCRRKKGSHRRRKAARSTAQTHLKIARQRRDFQYKTARQYTEQYQVIAVEKLQILNMVQNHSLAKSIMDASWGAFLDILEDKAARAGHQVIRVNPRFTSQKCHKCGEIVQKSLSVRTHICPFCGYVADRDVNAAKNILLKARAWPSGTVSDGSPVELRSPQL

SEQ ID NO: 2574 - protein, 282 aa, unknown
  TnpB Polypeptide
MFKSCYTNYTEGNINSFNVKSLSSERRRQYIVLEPQNFKNNSFAFKTMKEIESSKEINDMKIKHNVILQYDKVNKTYFLLVPTDIKINENLKRNKKCGINVGYRTFIALISENKCIEIGSNICNHIYKRNKRIDKLNSLKDTNKIKNRQYKSKTNKLRSKLANKIEDLHKKTANFLFKNFETINIGKLSTKSMVSNLTGNIKEITKRRLFALKHYKFRDYLKLNCKKYNTKVNEVSEYMTSKTCSSCKNIKKDLGANKVYNCDKCKLVIDRDINASINILKI

SEQ ID NO: 2575 - protein, 363 aa, Methanoculleus sp.
MLKTYRYRLYPTKSQVTLFERTLEICRWVYNDTLALRKNAWEREQRSVSLYETNKILTGWKREQPELKQVHSQVLQNVQMRIDLAFKAFFRRLKSGEQPGYPRFKGKGRYDSFTYPQSGFHLNESRLNLSKIGDVRVVLHRPIEGTNKALTIRRSATGKWYACFSVEYDPDLAPRKETTMGVDVGLTSFATLSNGEKIENPRFFRTDEKALAKAQRRLSKAEKGTPERKTARKIVARVHERIANRRLNFAHQTSRQLVNRFGTIVFEDLNITNMQKNHCLAKSIADVAWNQFVTITTSKAEDAGSHVILVNPRNTSQMCSRCGMIVKKTLSDRVHACPYCGLVMDRDQNAAVNILRLGLQSLG

SEQ ID NO: 2576 - protein, 296 aa, Caldisphaera sp.
MLLDAITKARREGKKITPKDTQAMIKELKVEGKDLVYSKALQMINNTLWYNIGALHELKKKGKRVGRLRYRKILKFTNYNQSGFKVEGDKLILSKIGSMKVLFHRPLEGRVKGVLIVKNSTGWYAIFQTEVEKKPLPSNGKRIGIDLGIEKLVTTSDGIVIENPKVFDKVEKKIRLVQRVLSRKKKGSKNYEKVRIKLAKLYEYAKNVMNDYVHKITTWLVEQYDEIYIEDLETKQMVERSKNNTFRKHILHSISLFLHHLFYKADRAGRKVVKVNPKNTSKTCARCGYVKKRSNT

SEQ ID NO: 2577 - protein, 192 aa, Caldisphaera sp.
VLKDFNLEIQFAGKVRWFGKQGRLEIHYDENRLFSKLYRRLIHLYRNLASHLMKTSYEIGVLTIIVGYPYDIAQDKGNKFTSNMWSYSKLFKALLLKAQDYGIKVVKVIEYNTSRVCAFHNVEVERKPQGIITCKMGHKLHSDLNGAINIMKKAIGKMVKEVKKPLSFFVDHNRVAPIKESNTQDLNGILTL

SEQ ID NO: 2578 - protein, 432 aa, unknown
  TnpB Polypeptide
MELKRAYKYRIYPTKPQRIMLAEWEAQLRWLWNLANEQRVSFAKRTRADRAKAFEQGIKPPDYFSQSKEMTSLVAEDARLAAVPSCVRQEILRDLEKAWQRFRKGLGGKPHFKRRNDAMRAYAPDKTGWSLTMPDGRFGSIRFRGIGNVQARIDRPLEGVASSCILVRDVGRSVNEHEWYAIILCTSTIHDPAPSKLPPVAINRGVHVLAATSEGILHENPRFYEKKMDLLARRQRQAARKAPLPGQPASKNYLKALHRVARLHQKTRRQRAHVIECLSKQLVEHHGLVAIEAYDTKGMLEKKIEDKPAFVSRAVHRGIADSAWGMLGIKITNKSVPLGVRVEKFSPVDKSRKCNKCGHVDEASMRGREFRCTKCGHEDHIDVNHAKNGLEDALAAANSPPAAPKTRKKTSIPGRRKASATSGPLPDADSGG

SEQ ID NO: 2579 - protein, 452 aa, unknown
  TnpB Polypeptide
VGGRSLGWSDRRGTFQGQRGSNPVFLARMHSRRYSRQSHARGEFGMVCRIEAQENQWRSCPGVQVPQTRPPVFRMLAQPEQDRQRIYHQVSRKRGVVVITGTVKKEFRKPDETGCRWTLSIHVRVSQPIRDYTSVAVNWTERTLAFTNEPSPIRRNATGKQTGIDRGCVHTLTLSDGTMLDMPQPSEREKREYLRLQRKLARQDMTNSRRGGKTAKFQSKRRKLTLKRMSSIRRRINNRKDDWVAKTTTRLVEDYDLIALEALDTRQMTRKPKPKHDPNHKGRYLRNGSAAKAGLNAVSSATVGRTSRTNSNTRHVSPGPSSYWSTRRTRPRPATVAAMSQRRTVRAKRSSDASTAAIRTMRTSTRPRTSSTARYTQPAWTMPRAWRDTHPVKPVFHGKVPLKRQPLPRVREDPSNEERVSYATGIPPASAVGRKSKCKYLPRTRGDKPTGE

SEQ ID NO: 2580 - protein, 308 aa, unknown
  TnpB Polypeptide
LKKIDGWEWIMVVQTLTYGIRLHPSPAESDLLDRTCTAYLSCCDHVSRVAKSNRTLSQRKLNDLAYRHLRETYHVGSQMAQSAIIRVIGNYRTVKESLGDPWKTKRPLQYTSSGYDLVWNRDYSILSDGRLSVNTLKGRVKLQVDWKGMPEQYRHGRFGTARLLKKRGKWMLLIPSTVELTDPQRPQNVMGVDLGMRFLATSYDSSHKTTFHSGKEVTHKRAHYKALRTGLQKRGTRSARRRLKSIGNRENRWMRDVNHQVSKALVDECEQPTLIVLEDLKGIREATERVAKADDTCRFPGRFSNCGR

SEQ ID NO: 2581 - protein, 409 aa, Alteromonas sp.
MKRTLRYNYRLNPTTVQEAKLIEFGATARGIWNLLLSENRRRYEYDKTFLFYKDMASLLKEIKPFEEFEWIKAFDSAAGQQVARDLETAMKNAFSKGRLQRFPKHKISYKKKKLHNDSFRAVNNSNCIRIEDGAISIPKVGKVPIVLHRELVSNIKTVTVQYRHGKWECSITQEVECKTAKQVLETLTGFDINSKQTVVGSNGFVADNPKFLKHSKEKLNQLQRQLARRTKGSNRWQKTKQRINKLHGKISRQRLDFAHKVSRQIINETDIACFEDLNVAAMQKFNGSMVVDNVMGLITQLSKYKAELEGKLYHEIGRFEKSTGICSECGQRHVLSLNDRYFTCLSCGTYQNRDLSAAKSIARTGELDLIAAGIVAKVLKPISQQKYSIKMKVFELSKLDCGSEKREAA

SEQ ID NO: 2582 - protein, 288 aa, Methanosarcinaceae sp.
LHLFDKFGAIVYDQRVLSFKGLDKASITTLEGRIVVPMVYGSYAKLKMSRIKGQVDLIYIKGDLYLCIVVDVPEEIPLTPEGVLGVDMGVVNIATTSDGVIYSSDKCNEVREHFSKLKSTLQSVGTKSAKRHLKKISGKERRFKTNTNHIIAKQIVQVAKDMNRAIAVEELTHIRSRTTVKKAQREQFGKWAFSQLKLFLEYKSKLIGVPFVSVNPRNTSRECSVCGYIDKNNRTSQAEFKCLDCGHTEHADYNAAKNIAARALVNMPIAVCPKGNLNRKPTPLVVGY

SEQ ID NO: 2583 - protein, 434 aa, unknown
  TnpB Polypeptide
MRKVIHGEIYSSNFDNLNKLVSDWSSGYRFAFCRFQKDNLSFDECRSKTKIKYPSLNTRQISDAVMQAQGLYKRIKNKKVVFGGKKNQNKLVKKEISNQEWKNKRDNQIYARGDITKKGNPNIRLLNKSGNFYLRITIGNRKFEEYKLFVPAKFQKQALFLSGLEKPYNVRLLKKNKQYYKVVVDYEIENPNIIIDFSSGVIGVDVNPDRIAVSNISPDGSLIKSISLLNNRMFFGSTNKRNYEMVCIVKQVINYALENNKGVVFENLKFKKEFENQGRKFNRIKSNFVWKKLLTLLERKCVENGIQYKKVNPAFTSVIGKFKYQKMYNLPIHESASYVIGRRGLGFNEKLSLYKYPSEIVKEIVFDHVGDKTKRIHSWALWKKLRDNYKTVLTGLQSRLFNLKELNDNLCYEGENPSGKVVPLKLVEEHLSVN

SEQ ID NO: 2584 - protein, 397 aa, Moorea sp.
MEFKAILKSPQKLAINEAIRTARFVRNKVLRFWMDNRGVGKKELYRYNTQLRDDFGFVKDLNSHACQASVENVERAIKRFFDNCKNKVPGKKGYPRFKKHSRSVEYKQSGWKLSPDKKSIKFTDKKGIGKVKLKGTWDLWRFDQKLIKRVRIVQRADGYYIQFCVKIDNSEPLEATGFTVGLDVGLKEFYTDSDGYSEPNPRFYRKGEKRLKFYQRKVSRKKKGSANRKKAINRLGRTHLKISRQREEHAKRLARCVIRSNDLVAYEDLRVKNLVKNHCLAKSINDAGWYQFREWLEYFGQKFSRVTVAVHPAYTSQNCSDCGEVVKKSLSTRTHICKCGCQLDRDHNAARNILTRALGTVGHTGTLLNAWGDLSSTLPGSDLVEQDGSLIQESPLL

SEQ ID NO: 2585 - protein, 299 aa, Escherichia sp.
MLRATKVRIYPTPEQTEFLNAQFGAVRFAYNKALHIKKQAYQRHGVSLSPRKDLKPLLAVAKKSRKYTWLKEYDSIALQQAVINLDVAFSNFFNPKLRACFPSFKSKHGKQSSYHCVGVKVLEGAIKIPKIAPIEASLHREITGTLKSITLSRSATGKYYASILCDDGAETPAKPTLISVVTGLDMGLSHYAIKSNGVKIPNPRYLINASRNLRRKQKSLSRKKKGSANRRKALIQLAGIHERVTNTRADFQHKLSRTIVDENQAVIVETLKAANMMKNHYLARAIGDAGWAGFITKLE

SEQ ID NO: 2586 - protein, 412 aa, unknown
  TnpB Polypeptide
LYKNIYDKETDQINNSMKQLLAYKYRIYPTEDQQVLLSKTFGCKRVIFNHYLVEQQVRYKNKEKNLSNFDINKDITQLKDTKVWLREVDSIALQMAAEDLSVAYDNFFKSITGKRKGPKISLPKFKNKNSRQSYRTRGVRINEDGSLQIPKLKAVKAVVHREIPVDSVIKSTTISKNPDGRYYASILVETEVSLQPISLKEIGCDLGLKDLLITSDGVKFKRPNDLPNIVKTKQLLKVNQKQFARTDKSSKNHELLRLQVARLYSKLTRQRNEYYHLVSRYLVDNYDSIYVENLSSKNMLQNRKLSRAIHEVAWATLTNMISYKSNSAGRTYHRIDRWYPSSKTCSSCDHKLEKLDLGTREWTCPNCGTHHDRDINAAKNILRVGQLDCYGEAMKSQATGDLENSIGPTEND

SEQ ID NO: 2587 - protein, 436 aa, Thermoplasmata sp.
MDTIRTYRAKILNHHQVKNDLDRCGFSASKLWNVGRHYIEQAWEETGEIPNGYELKTELKYHERYRDLYSQSSQQVLEELAEAFKSWYNSNDEDDNPPGYRKRGNQHPRSTVTWKKDAIWHDEHNNRLRLSKGFNHKTKRDDYILCEFETRPDVTVEGIQVVRSVWNGDVWELHIVCKKEMDVENKTKSFVNRRNLSKFLRNEKPNGKTAGIDLGINNYLAVSYGNGGTTEIYPANTLKEDKHYFTLKEYNTEGENGPSEKALRLRRTLARRKKHFLHTLSKHIVERCVEEDIGKIAIGDLSYIRKEEDGESRTWGKSGNKKLHGWEFEKFTDLLEYKAEEEGITVERIDENNTSKTCSSCGVVDGSNRIERGLYVCSDCGGVMNADVNGAENIRKKITQNPERDMSNGCVAQPSTYLFDRTAGIFKPKEQMSCRP

SEQ ID NO: 2588 - protein, 260 aa, unknown
  TnpB Polypeptide
MMVMKKMIKTIRVMLIPNNKQKTKLFRYANTARFAYNWALGREKENYKNDGKFLSDNDLRKEFTQLKKTEEYSWLNEISNNVKIQFSDTHVKIEGFVASKKKNKQKINWIRLAEKNRIPVDCKYSNPRIKYDGINWWITVGIEYEDSVTVPSNDGIGIDLGIKDFAICSDGNKYKNINKTKKVRKLEKQKRRLQRRISRSYEKNKQGKEYCKTKNVIKKEKLLLTLNHRLTNIRHDYLHHSKRFILGWIFNPSKSCHNDC

SEQ ID NO: 2589 - protein, 362 aa, Deinococcus sp.
MSLKNRNITYHVLPVARSAYPYLRQAVAQRQLQPSDEQLRVMQKGQVYRPVSALLSAQTLVHDRQLQLGDLTISGDFYRLPEQEYCSIITASNGYSQYPDIKPLMTALLAPMTQAEEAAWLAGVRAAAAQGRQPSTAVDLIDDIWVPTTWLRDRTRLVLRGKEWFVVLYGQAPSGSTPAGHGVIGVDIGLRPLATAAWGQRHETTWDIAQPTVPAGESAEVQALARILNYTAARAALEALMVPVLAEAGTLVLEQLDYGGFRNNFPNAARRHAVADWHQSWLPQRAHARGIRVVRVPAAFTSQLCSQCPGATRGTRRGRVFTCPRGHALDAHLNAARNLVRRYRGELLRAQQLRARAAAGVP

SEQ ID NO: 2590 - protein, 479 aa, unknown
  TnpB Polypeptide
MAVMRKSESMGAYIPGYAVGATGTTMYICAIMVSCKQESPADIRTLHRTEIASLVPDTHHPTIEAPETVHRTVRLRLYPGDAATGILLTAIAGACRHVWNHMLADQERRFRLWQAYRIGPKPVPTFFTLGRRFTQLRNDPDHAWLKDYPFACVRYSLKYLADAYQRYFKDPQTEGKPRFKAKHFTVPAFTMPEAVRMDGDRLRVPKVGWLRLAGSNPYAGCQPLTVRVRMEGTEPHPKWYAYVCYAVPVEQVRQGATDGALGLDRNVGQATDSEGTVYALPDTDQLDANIKRKQRELSRKQGWGPKDKRPQSNRGRRVNGQLQKLHRTRKRKRDDATHRASRTLAETAHTVVVEDLNTKGMTASAKGTREEPGTHVKAKAGLNRAILASGWGQLERKLAYKAGQVVKVDPAYTSQTCSRCGHVGQANRPSQAVFACQACGWALNADHNAAINILVRAGLPSVPVPARGTGAAARGGAIP

SEQ ID NO: 2591 - protein, 396 aa, unknown
  TnpB Polypeptide
MRVYLDSQCDYRRYCWNKGLEVWNDFYDQRVISLPNELKLKIKESLNNKSVQFTEEEMILRMEFPSPTERHVRNELVASKDDWEYANSSRVLQLAVKDLSDTWVRFFKKSHDSAGKPKFKSGKEPKQGFKTDRARIKNNRLLLDKPRAYAGQWEPIRFKGYEISDSTIKMCAITRVKNQYIATLSIETATNPLKSTGNVTAVDANVDHFDYTDGVCTLRPDRLNHLYNKVKHYQRVLDRKRKVNSKSGNRSKSYQKTRTKLQMTYLDIKHLQNDLLHKFTTMLYENYDTIVIEDLSVKKMQMSKKAKGLHRSLFGRFRLFMEYKSEKFEKELVIADRYYPSTQRCSSCGYVKTGDEKITLVGNQKHNTRHDEYCCYQCGYKGNRDYNAVLNLLALT

SEQ ID NO: 2592 - protein, 608 aa, unknown
  TnpB Polypeptide
MNQNAKVANLYYLNQMDKEQLQKLKKKRHQEASKFVDKFEMFTTEKDAIALFKIANDLRHFGNELSHWVNNNYFQMKRIKQYRNAMKQYTKCQKKLNGLTKQKNKKEYDFWTNRLEEVKNELTEIRKRFSLTWEDLRVKQKELGKNTHYAYINSIFKLTKAEDVWNGAQKVLFGNGKRLHYRQSNELPIIQSKQLGHSITHKFDKNDNLIITIGCSKTCNMKPINLELKPIKKDDLFLQDEYAQLYYYLRNVKELEYIAITEYIKNKRIIDIHKICYFSIKCEMIRGKKRIFLMPTVEGKPCTKKRIIKNFNGTTTITKRHHFYNGKEKRRIAFDEGPQSYAFVTSDKVELDNIGERNKKIIKTNERKEQLLSRALGRSRMINNQQNYENGKIKKGKKKWHKTKNYIRKQKEHQKLCRANALSKKYAIHELVNRARTYANELVIEPSNFNALKKKAKVSKETEKTKEITTKDGKKITIKKKTRRKRFGKSVNRRSPGYMHSRLVSLFTSTGGTCIIVKNTVKASQYDHELDQFIKKKLSQRFHIFIDGTKVQRDIYSAFLLYCVDEFGEKIERQRCLDFFNKFYIMFLELEDTIKKQKRQICNSGYKF

SEQ ID NO: 2593 - protein, 551 aa, Streptosporangiales sp.
MGGRLREIAAPFAVAAPAGARVRTRLRVSAADAEVLAAAGAHLGSLASADLAARCAEGRLDAEGQARSRAERKKALTAASSSRWAGAITRTSEDSWQLADRNLRAERAGLRARVRKIESRLEIPAGTGKGRLRGYATRAERFRKQQRLQVLRARLARVEERLAAGRASVCRGGRGLAKARHGLGAAGKTQEQWRREWEVSRWFLTADGEAAKRLGNETLRWDPDTGWLEVKLPSPLARLANAPHGRYRLECQVEFPYRGGEVAAQAASGAVRYDVSYDPGRDRWHLDASWKVPARPVPSLEDLRGFPLLAVDLNDGHLDAWAVTPDGNPAGPPVTVPLNLAGLPSSQRDGRLRRAVTALIALARDSGCRAIAVENLDFAEARAEGREHAGRRPARGRKGRRARAVTAGLPTGKFRDRLVQMCFNAGLSVIAVDPAYSTRWSAEHWLKPLREREQVTTGHHAAAVVIGRRAHGHKARRREGVTGPDQRIRDRGTAARAPKTRRVSRESGTSGARRQPPRRRKTAPASRGHPPDQAAEDRSRPPAEPPLTDAQ

SEQ ID NO: 2594 - protein, 229 aa, Lactobacillus sp.
LLKSDEPFKEKLPKTYSQVGYDLNTENFLTDSNGNIIDNPRFYRSVKGRLAKEQRKLSRRARRAKSEGRKFWKSKNYQKQRRLVAKLYAKVRNQRKDFLHKLSTTLIKNHDLIVGENLKSKNMLKNHALAMSISDVGWRTFIGMLEYKAPMYGRTFVEVDPAYTTQQCNECKFRMGTNNTRKLTLKDREWTCPNCNAHHIRDWNASKNILAKGLIELTKPLTEDSPIYK

SEQ ID NO: 2595 - protein, 326 aa, Nonomuraea sp.
VAQVVKRAYRYRFHPTSEQAEELARTFGCVRLVYNKTLAERTRAYTSEGRRISYAESSATLTAWKKTDELAFLNEVSSVPLQQALRHLQAAFAHFFARRARYPAFKSREKSRASAEYTRSAFTWRDGRLTLAKMRQPLDIVWSRPLPQGAQPSTVTVSKDAAGPEHERADRRKLARAQRDLARKEKGSANRQKAKLKLARVHARITDRRRDFLHKLTTRLVRENQTVVIEDLTVRNLVKNHGLARAVCDASWRQMRSMLEYKAAWYGRELIVIDRWFPSSKLCSACGALQGEMPLAVRVWQCACGALHDRDVNAAINILAAELAER

SEQ ID NO: 2596 - protein, 489 aa, Paenibacillus sp.
VKRGEILSVPALGYRTYQVWIKPGHRLFAYLDALGQCAKNLYNTANFYIRQVFTAKGQLSACQPLQQQVMNTLSAHLDAMNERRSVKNRSRPFTLPSPEQPFLSYSFLDALFKVMEQPDYRSLPAQSSQGILKVVFQNWAAFFASMKAYRQHPETFTGKPKIPGYARSKVKEVVFSNQDCVIKDRKFLKFPRTKLRLNIGKLGRTDGKFMQARVVPRHGHYVIELVFTCPMEEQNTEGEQVPDVSHSNFIMAIDLGVDNLATMVTTTGLQPVIVKGRIVKAINQYYNKMKAHYTSILRQGKNPREGTHTSKRLERLHLQRHRLIKDLFHKASHHIVRLAEEQRIGTIVIGHNAGWKQESAMGRRNNQSFCHLPHKQLIAMIQYKAAAKGITVILTEEAYTSKASFLDQDPLPRFGEGGTYLFSGKRIYRGLYASQAGVIHADVNGAANIMRKVFPNVSAKPSDGIEGLDGNQSINVSTPRVLSILKPSG

SEQ ID NO: 2597 - protein, 490 aa, Mastigocoleus sp.
LYKTIPVNGNFNDWENDYWADQCRNANSLINCAIYYVKQKHYAALAEMDNSRSLYWRGDELRNGWKTYQCKDISYAKLCADLKENPHYKALAAQAAQQTLKSVGESITSYNGLVRAYYKGEVNRPRLLRYRKAGGLAAVTFPAQALAYKDGRVYPSVSKETKPHLIDQISFCLPEFIDFDWVKEVTIRPNLGEFWIDWVIDDGKQPITHNPNLDYSQAWSYDHGGSNWLTGISTQGKSLIVNGRKLRSMNQGYCRLIAKYKQGKSDFYWDANLDRVQRKRNNQMRDAINKAARFIVSRCLDDGIGNLIIGWNDGQKQRSKMSKRSNQNFVLIPTGRLIERLKQFCPEYGIVLTITEESYTSKASFLDNDSLPRYGEKPKNWKPSGTRVKRGLYKTGSCFLINADCNGAANIARKVAAQLDLDLTKVVRGALTLPQRYDLFNDLTKSYRKRCLSRTLSEKLTIVEDVSHSQQLRSPDSIRRSNISLESPVF

SEQ ID NO: 2598 - protein, 505 aa, Solobacterium sp.
MYTVRLAINTSDYDNRFFEKCFYYGCVISNLVTRHANNALTSLSRMREYKVAREKYGRRYAGKKAKELNKEQKAERECLIKIMNNYQMRYPLTANALEKYARVARQQYTNYLSSHQVQWIADQVAKSVKDYLYGNGKQLHFCKNEQFITIGQKAADDGVTFLNWHKIRFMKCIFYLDVPSTPYMQAVIAQHDKVKIISLKRIEFNSRWKYYAIITLDGDPPIMHKKSEEQNAVGIDIGTSTYAAESNKFVKLENLAPDTSKYEKQIRHLQNLIDHKLRVANPDNYDSLGRARKGRHRWVISKKVKQVQRKVRVLYRKESMYIKCSHRRQINQLLENSSTVVIEPMQFRHLQKRSKKMARQEKLSTIKKKDGSTIQVKKFKRKKRFGHSIKNRSPSFFQSELKRRATLYGIPFVQIDTAKYKASQLHHDTGEYIKSSLNERYKTISGCKVQRDLYSAFLIRHSDSSLCRPDFETCNADFRHFAETQDALLSEMRANKISNIPCWGF

SEQ ID NO: 2599 - protein, 303 aa, unknown
  TnpB Polypeptide
VQRLQAFKYELKPTGEQQRDICRYAGSCRVVYNEALVLQVARYERCEKKVGYAGLCKELTAWRNGSPLPSGRVASWLAESPVHPLQQALKDLERPYANFFSKRAAFPRRKKKGQHDRFCYPDPKQIKLDQANSRIFLPRLRWLHYRNSRDVRGEVRNATVSLSGGKWYVSIQTAREVIEPVPRATTISNNHAMVSIEDLRVRNMSRSAAGSVETPGKNVKAKSGLNKCILDQGWFEFRRQLEYKLAWNGGWLIAVPPQNTSRTCPACGRVSADNRGTQAKFACVACGYEAHAYKDFPFFASWV

SEQ ID NO: 2600 - protein, 402 aa, unknown
  TnpB Polypeptide
MKVNCAYKFELILKPEQRAKCAQFVGNCRYVYNKAVEIQLRQLETKQPFVSYKELASQLVGWKKDDSSIWLSESPAQTLQQTLKDLDRGLMCFKQRKGGMVRYKARGDGDAFRLPQLLDGDFDEANARIRIPKIGFVRYRKSRDIQGKVKNLTISIEAGRWYVSVCTEIENFQPQATRDGEVGIDLGIVRTVQLSDGTVYQLDVNEIKKLEDRIADYQKQLESNKTSRQKLAKLGKVADFDKKVPSRKRRRLKEKIANLHRRIRNIRKDFMFKAARAIAQKYGWVAIEDLQVRNMTKSARGTIEEPGTNVKAKSGLNRSLQRVAPGAFWRILEWQVFKAGGYVDAVAPQYTSQTCPHCGHVASENRPTQALFCCVKCGLTSNADVVAAENILRKSRAGSDRL

SEQ ID NO: 2601 - protein, 393 aa, unknown
  TnpB Polypeptide
MRKAFKYRLSPTSEQEQILFWTLARCRELYNAGLAERKEAYRMAGKTISYYEQKRDLPEIKNVLREEYQNIHSQVLQDVLLRLERAFQAFFRRVKAGEKPGYPRFQGCNRYNSFTYPQGGYTLEDGRITLSKIGSIKIKLHRPLGGTIKTCTIKYEAGQWYAVFSCACEANAPLPVSEEEVGIDLGLLHFAALSDGTFINNPRYYRKAEKTLERRQQVLRRKKRGSHRREKARRLVAKAHRNIRNQRRDFLHKQAKRLVVRYQTIVFEDLQTEHLVKRPKAKQDENGKYLPNGASAKAGLNTSILDAGWGMFVDLCSFKAACAGRNVVKVNPYKTSQVCSACLRECPHKELDERTHICIHCGVVLDRDTNAAVNILRLGSSQRGETCVEAPCL

SEQ ID NO: 2602 - protein, 315 aa, unknown
  TnpB Polypeptide
MDVKKDMKGFLPIWCQAIPFQIKGIAIKEAHNAFFKAKGHPKFRSRKTSEQSCFIPKSAITQAGIYPRISGAGLYFHEKLPENISDSRLIWRHEKWWIAIPTKERLSRTENQGRIVALDPGVRNFITFYAPNYSGFIGYGNFGRIQRLCAHLDNLLSQRDKAINKQKKKAMAKASHRMQAKIKHLISELHFKTAKFLVDNFDVILIPTFETKNMVLKAKRKIRKKTARMLLSLSHYQFKKILKWKGLTAGKLVVDCCEAFTSKTNPETGLVKNIGSAKWVKLSNGSRISRDIIGARNSMIRTLSFGRSSHERSCN

SEQ ID NO: 2603 - protein, 399 aa, Methanococcoides sp.
VSWGLKAVPLLNFYAKCIYIVKTIDIIMLKAYKYRLYPTGSQKEILLKHIGACRFTYNWALEQKIKAYETDKKHLSRFELQSCLVHELKPENTWLKEVNSQALLNTLINLESAFTRFFREKKGFPRFKSRKVPFQSFQIPQHYVVDFENNTIKLPKIKQPIRAKLHRKFEGKLKTATVSFTKTRKFYISVLVDDGKELPETQKFDNNSTLGIDVGVTHFATLSSGKKIDNPKHLKNSIKRLKVLQKRLSKKQKGSQNCDKAKLKVAKLHERIRNQRIDFLHKTSSKLVSENQAIAVESLDVSGMLKSHCLAQSISDVSWSEFFRQLEYKAQWYGKTLLKIGQFEPSSKLCNICGHYNGEMTLADRKWECPDCSTKHDRDINAAINVKKFALQNQNLLNI

SEQ ID NO: 2604 - protein, 413 aa, Anabaena sp.
MYGCQQIRINPSSPQKGVLEFLCSESVKLANCGTYYARQLFLKTGKIPGKFDLHRELGNNPHFSSMYSQAAQQCLTTVAESFKSYIGLLKSFKKGTLTQKPKLPGYRKGGFNLVTFPGQAVKLKDGNLRFPLGSKVKVWFGIDAFYILMPSNLEHKNIQEYRILPRNNQFYLELVYKISPIKADLNIDNVLSIDHGLNNWLTCISNVGTSFLIDGRKLKSMNQWYNKRVSVLKENQPPGFWSKQLASITEKRNRQIRDAINKSARIVINHCLGNKIGTIVFGWNTGQKDTINLGSKTNQKFVQIPTARLKDRIAQLCEQYSIKFVETEESYTSKASFLDNDILPKYGEKPDWWKESGKRVSRGLYHSQDGTKINADCNGAANIFRKVAVKLGLNLSGISRGVLISPLRLFIWS

SEQ ID NO: 2605 - protein, 380 aa, unknown
  TnpB Polypeptide
LEVFRRMVNESIRIGMANKVSSLRKLSLFSYNQLAHYDSPSCYKLCAISRAAGILASRKKSLKRGFATRTPYAVRQQLVSCYSFKAKNGGLEIPLSRGKRLSIPLTKHMINSISQPGVEVRSFTLTQNRLCLSIARDVARVECASTVGVDRNLRNLTVGNDEETRPYDLSKTVRIASTTMRIVASLKRDDARIRTGLASKYGMRRTARTGHLLHTTTKTIVALAVQRRQAVVLENIRGIRCLYRKGNGQGRRYRGRMNGWSFGEAQRQIEYKARWRGLPIIHLTRRETRGSSVTCPRCGERLQSDKRLARKLWCGRCRVAMDRDRVAAVNLARRGRVRFARSRPPIVEAQGGAVEAVKGNPTTTVIPGVDAPKLTQPTTS

SEQ ID NO: 2606 - protein, 331 aa, Shigella sp.
  misc_feature (331)..(331): Xaa can be any naturally occurring amino acid
MRRFAGACRFVFNRALARQNENHEAGNKYIPYGKMASWLVEWKNATETQWLKDSPSQPLQQSLKDLERAYKNFFRKRAAFPRFKKRGQNDVFRYPQGVKLDQENSRIFLPKLGWMRYRNSRQVTGVVKNVTVSQSCGTWYISIQTESEVSTPAHPSASMVGLDAGVAKLATLSDGTVFEPVNSFQKNQKTLARLQRQLSRKVKFSNNWQKQKRKIQRLHSCIANIRRDYLHKVTTTVSKNHAMIVIEDLKVSNMSKSAAGTVSQPGRNVRAKSGLNRSILDQGWYEMHRQLEYKQLWRGGQVLAVPPAYTSQRCAYCGHTAKENRLSQSKX

SEQ ID NO: 2607 - protein, 403 aa, unknown
  TnpB Polypeptide
LRSVIRTLKLKLVLTEGQKGSLRRTMELYTEAFDHAARWGYEHQRCGKLDLQYAIYYEMRRAVPGLGAGLVQSAKDTACEALKRCRMRTVPARRPHSAVRFPWKEAKVYFGSGTVSIYSVDGRIHAPVVIYDHLKKYAEWRCKLSPLVWDPAGREFYLSVAVESRTPVEPARGDVLGIDRGLNNVAVCSNNMFFDSSRINATRGRYAKNKAELQAKGTRSAIRRLRKQSGRERRFMACENHHISKVIANTEFAVFALEDLTSIGKERWLGRRLRGKLRTWAYFQFERFLSYKAEELGKTVVHVDPTCTSQWCSRCGWIDRRSRKGSDFHCVRCGFQLNADLNASRIIARLGRSEASRLPVYQPYAAGDEGDVSGVHSRSPSPAASPEPMGNRYSEPRTQGNDH

SEQ ID NO: 2608 - protein, 483 aa, unknown
  TnpB Polypeptide
MYFNHKKQEGMVEFICPMGIKLTGVEATPEFMENLKIESKMLIKFSKLFESWVKDGLVKEISGNYVHFNQPIWDAKYPESKKPEKLDTHILSLRHVRLQPEVKKIINSTLTESQLKNLDLSLLGAKLWYVVERYKSYVNRNSKGKAKKFPKKGIELKTNKAVYFKEKGLKIDHENNLVIVKTLEKKKYMKLPFESSILDRAKLLDSKWKGGNIVLNSLDLEPDNLTVFQEKIHSFHKLPSVFIGIDVNRTCERWIACTEPFKNGKKTIEKPQSIQELEVKRDEYNRKLRPSKKDKVEYKLNSEQKRKMYGRNQKVERHRKMICQSYLEPELDLFKDTHGENFVMCIDGVATGRDTNSFGQEHVRDVIANWCKKNNILCIIVPPQYTSQRCPKCGEFHKQNRTNSNNYFCPSCGYFNESCDDVGALNIREYGKFLIKHFGLTSPQWSTKVSIMNPDAKKNPDKPKQISLESIYKKALKESFSLP

SEQ ID NO: 2609 - protein, 447 aa, unknown
  TnpB Polypeptide
MCQSKNKKIKQTLAETKERRKSQKCFVFKTKINKQKLNAVQREQINQLFIEAKWFYNHAISFMQTHKLSELDTKVKSVATLDKNKQLVERKFTALSAAMKQSIKAKISDSLSALHELKKNCHKVGKLKFKKEVNCVIYKQFGVTHKINSLHRVKLQSIDGSLYVYGLDQFYTNPNAEIANAQLIRRNGDYYIHWTVYIDKKHIPSIDKNGKTIGIDFGCATSFTLSDGCKIDFKLQETESMRKLHKKIARQKKDSKQYEKSCELLRKKYDKLGRIKDDFAYKFVKELKQYDKVVIQDENLKGWHKGSHAKAVQHSVLGRVKSRLKKQSNTHILSRFAPTTKMCFNCGEIHKDIMLWDRVFECDCGVRMDRDVHAAQCMVWMADNGYENINKKSKKKKNTAGRGDVEIQTSTVKDYGGDIIADPCCAYCSDSKFVSMKHETHRSLDRG

SEQ ID NO: 2610 - protein, 423 aa, unknown
  TnpB Polypeptide
LNDKNKQLLKRLCILSRDIYNTALQNIKSHYKKTGKFLFWIDNAKLVKNLPEYKEIGSRYQAIILEADKDFLTYQTTIDYESECGNRWQIFNPPKKLIPPRAKKYFFPLICNDFEQRDGKIKLPLSRLLAKEYPPIYFTLPPDIKDANVVRFVIKPKYGFSAYEIFLTYEVQKQPQDLDNTKCLAIDFGVDNFATVCDSEGKSFIIDGRYLKSIIQGFQKQMAKIRNVKRKQSIKGYTKREMRITDRYQRRIDDYLNKSAKYIADYCLREKIGNIIVGCGYSFAKGPNLFYRIFFQIPYRKFLQKLDFKCQKFGIRLIKQNECYTSKASFIDNDPIPEKISRRKYVFSGKRLFRGLYVSREGIKINADQNAALNIMRKANEKYKLVSPEKIRALQRRGAIVPPTRINVLKHSCKKDKTLKLNQ

SEQ ID NO: 2611 - protein, 529 aa, Enterococcus sp.
  misc_feature (192)..(325): Xaa can be any naturally occurring amino acid
MEQLKAYKFRIYPTEEQEIFFAKSFGCVRKVYNLMLDDRKKAYEEVKNDSSKKMTFPTPAKYKKEFPFLKEIDSLALANAQLNLDKAYKNFFRDKSVGFPRFKSKKNPVQSYTTNNQNGTVALIDSKFIKVPKLKSLVRIKLHRQPKGIIKSATISRHSSGKYYISLLCKEEIIELPKTNSTIGIDLGIMDXXXXXXXXXXXXXXXXXXXXXXXXXXXXXXXXXXXXXXXXXXXXXXXXXXXXXXXXXXXXXXXXXXXXXXXXXXXXXXXXXXXXXXXXXXXXXXXXXXXXXXXXXXXXXXXXXXXXXXXXXXXXXXXXXXXXXXTNSTIGIDLGIMDFAILSDGQKIDNNKFTSKMEKKLKREQRKLSRRALLAKNKGTNLFEAKNYQKQKRKVARLHEKVMNQRTDFLNKLSTEMIKNHDIICIEDLNTKGMLRNHKLAKSISDVSWSKFVTKLQYKADWYGRKIIKVDKWFPSSQICSECGHKDGKKSLEIREWTCPVCHTHHDRDINASINILTEGLRLHSMGLA

SEQ ID NO: 2612 - protein, 539 aa, unknown
  TnpB Polypeptide
MPQEANHSPHSAYVINYHLVWIPRYRKKVLVGSVEARLKELLAEIATQYGFEIMAVEVTPALACGASVTDHVHLFVSAPPKFSPAEIVRLFKGIPSRRLKKEFESLRRQYWGKNATLWAEGYDVGTAGHVSAETIKRYIEESQKKSFQGLRYQNNCATFSSMKLIAQVKLLPTPEQANALRQTIEQANAACQFVSDTAWETKTFRQYDLHHRCYQAVREQFGLSAQVTVRAIAKVADAYKLDRKRKRAFKPTGSIAYDDRILSWRLHDNTVSIWTIAGRQRIPFACGERQFELLQTRQGESDLGLCNGMFFLSATCEVEEPEPIDIEGALGVDLGVTNIAVDSDGQVHSASHINNVRHRHRRLRRKLQAKGTRSAKRKLKRLSGKERRFAKDTNHRISKKLVAKAKDTNRAIALEDLQGIRSRVTVRRSQRATLHSWAFYQLRSFVTYKAKQAGIPVVLVDPRNTSRTCPACGHIDKANRPNQSTFSCVVCGFAGFADHIAAVNISRRAVVNPPIVAHHEAKANQSLELRQSAVTSHLL

SEQ ID NO: 2613 - protein, 436 aa, Streptomyces sp.
LPERREQRRRKGFADSGRTYRLHPSPEQAERLQEWGHTCRAVWNMALEQRIYVHRQRGKTLRSGEQCRFLTQARRDFEWVADLPSQAPQQVLRHLDRAYDNYWNPDHPAEFPRFKKRTSRVAIPLPGQAVRVTKLNRHWASVRVPKLGEVRFRLTRSLGGEIRNVSIRADAAGRWSIAFGVRVPARWAPPNGKPPVGVDFGVKHSAYLSDEEAPRLMDRTLTDGEKRRLVGLERRRERQIKQAKQRNGGKYSNRLKKTLRAIAEPRARQARRRLDFTHKLTTDLAKSHGLVAIEDLRVRQMTKSAKGTRDLPGTRVAQKSGLNRAVLDNTPGERRRQLAYKCPAYGSVLVLVPPAGTSQTCGACRARDAASRVSRDAFVCTSCGHTDNADHNASVVILDRVPAHRPRTAGHAVHSTQRQPLVGGPSPAPARARVNP

SEQ ID NO: 2614 - protein, 357 aa, unknown
  TnpB Polypeptide
LPSGFRRSAIAEAYGLALAWQSNYRKWQTRKAKAGEKSVRRLAVGKSEINFMERPPVYPDKTVSWPVYYKTEFRILDERHMLLKVFTGNAFAYRKVVLMSPLFVPTGYTAESPMLVRKKHGFELHVPMVQESRCDLQKATVLAQDPSLKICAVDQGINNHAVCTIQNAKGRVLASLFLSGAEDNHLRKLLLEKVARLQRETRIIPEGETFAADLWRKIRNMDDDIAHQVSRRIVNFAKAHGAKVIVFEHLGSFSPAKGTRSRRQNLKFLYWLRGRIFRFAQYKALHEGVVVVRVNPKNTSRQCPYCGCLEITRYTFGRENSTKLARCGSCEIDGINADWLATLNIGQKFQKKHKRPA

SEQ ID NO: 2615 - protein, 352 aa, unknown
  TnpB Polypeptide
MKSFLSLSKKAALGQYPREKVKIPKYLAKDGYGQIPCSTNAIAIRNNYFCIPMSRHFIQENPGLKIGIRIPDRIAGELIKEVRLNPLYGARYLEAEFVYKPKKGSAQPERTPGILAIDPGVATLAAAISTVGTAFLVDGQRLKAQNQWYNKERARLQSIKDLQGIKGGTAMLAAIAYNRGNFIRDYLSKAGHLIVQHCLDNGIGRVVVGVNPLWKQEINIGRVNNQNFVQIPFWKFRRFLKHLCEKNGIEYAEIAEGYTSKASFLDRDTIPEYDPHRTEKPMFSGKRVKRGLYRSATGRAVNADLNGAANILRKASPGIDLTLVDRALCANPARLYPLATTKKRTFKSKAAA

SEQ ID NO: 2616 - protein, 506 aa, unknown
  TnpB Polypeptide
MPLKVDTTKKISTQVVPVVGMTKSVELELLSTMKKLGVVRSESYNKLGSISYWGLDWKKAYPEVRGFRKPGSLGLPSKLMEWTVSDVAKAITASQAACTDAVIKRVYKRFSGKKNQKVRKELCKQLKTLAFLDNPLLHRLVRKEFQRGRSWSKNQIVYQPGGYRCKRLSRHTYQLELAGLRRGKRNRVIVRSNRKIKGQIRLIYNQLLQRFEVHFLVDHGTVEIPSSRRAIGVDKGYTEAFYDSDGQAYGKDLGKLATKKSVRVAWPFGHRICAKNRNRGKLWAIHRKLEKIDPAKSARILENNLSRKTENRRLRKNQSELKSIIGAASKSLFKGESLKVFAVREAWPTALDLTQPIRNKRQSKAMSRKLNSWMKGEMRDSLQKWANWTGSVVTEVQPSYTSQADSVTGTLLGNRSGDSFTRFDGVVLQADHNAAKNILARGTDKEISRYMNKTEVQAVLLRRTARFLRSMGLSLADAVELGWLDFNHSKTRAFKELLAGMQGAPR

SEQ ID NO: 2617 - protein, 395 aa, unknown
  TnpB Polypeptide
MKTIYKAYRFRLKPNVGQGRQLARIAGVCRLVWNLCLEQRETVYTSRRITLNSYRQLPDVTILRGEYDWIREIPSQVLQQKVRDLDIAYRNFFEGRASFPERKKKGKSIDSFRFPQGFKIDNRRVFLPKIGWVGFCKSRDIQGEPKHMTISRSGKHWFVSICCEVEIANAVPKNKAVGIDRGIAKLCALSDGTVIENPACFGRYKRKLAKLQRRLARKRKFSRNFYKAKAKITALHSRIAHTRRDFIHKTTTGIAKNHGLVVLEDLHVKAMSKSAKGSIDNPGKNVRQKSGLNRSILDAGWSEFRRQLEYKVDWANGIVVYVDPKNTSRRCPICGHTAKENRLTQADFICVSCGYSGDADITAAVNILRAGHARLACGEIGAVRPLGEAGTLKAA

SEQ ID NO: 2618 - protein, 415 aa, Microcoleus sp.
MQLVSKQIIDRNHWLYKQLDNLCFLSKNLFNYANYIVRQKFISSGEYLDYYKIQKICQGKTDYLALPAKVSQQVLLRLHESWKSFFVATQEYKLHPDKFKVRPKIPRYKHKILGRNVLTYTAQAISQEWLKKGIINLSLTQIFLTTKVSQVNQVRIVPKTYHYSIEVVYEPKAVTVSSSGVEGIAGIDIGLNNLATITSNQNGFVPLIINGKPLKSINAYYHKKKAVLQSDLKGERQTSIKIEQLTHKRNVKVDNYLHNASRFIINHLAANRIGTLVIGKNDNWKQGINLGKRNNQNFTAIPHARFIEMLTYKAQLVGIVVKLIEESYTSKCSFLDNEPCVKHSEYKGKRIKRGLFRAGDGRPINADVNGSANIVKKAFPNAFAEGIQGVVVRPVRVTPYKMVARGNCNICLENL

SEQ ID NO: 2619 - protein, 381 aa, unknown
  TnpB Polypeptide
MKQRSQYVYIPEEATVRARFTVKGSEANWLLLTMARFKAGTQKALDVAKQGGTRFTDLVRASMSVIGNNRYARGSAKIVQGIIKSIKALQKLGENISLNDVELGDWWMIQSIGARNDASEKGNRNIRLVGGNTVEVLVFDGTSWRRIKAEYRASTRYNMILNEVAKLGMENKLGYLARIILLNYSHHRAYCELQVTIPWSLYVSHLPVKICVHGDNICGIDVNLDRINLAIVSKQGILLDTYTVRFPELKMQGLSRERRISTMMKAIHKALNYAVNHGCSLIVLENVKTLGYLRWAWIKRGDRRNSTWNRRVSLFTIEIAERISWYASQYGLKTYYANPSHTSKLAELIAKDMGLDRHTASAYVLALEYLGLNPRVICQNL

SEQ ID NO: 2620 - protein, 487 aa, Glycomyces sp.
  misc_feature (303)..(379): Xaa can be any naturally occurring amino acid
MAIIFIGRLLCAARVVPGRYCCGRGQAGGGREAAAVAGAGGGAGADPACGQRGGELGLDCGLCAWPATGVRAAPAHLQRVEGARARLADRATGHQENLPRLRDHRRFDQGWSAARQAGRESDGETGGIPARGGAGVRRPVPLLADGRPRRERGIRFAGHPDQLKTLERYRKGESDLVFRGGKWYLIATVEVPDAEMNTDPADFLGVDMGIVNIATASDGDNYEGAGLRRYRQRMAKVRSELQVKATKSAKKKLKARARREARAVKDVNHRISKQLVAQAERTGRGIGMEDLAGIRDRVRLPAXXXXXXXXXXXXXXXXXXXXXXXXXXXXXXXXXXXXXXXXXXXXXXXXXXXXXXXXXXXXXXXXXXXXXXXXXXXXXLNAWSFYQLQAFIRYKARRAGVPVVVVDAANTSRRCPRCGHTAKANRPIRDDFACRRCGLAGAADQVAAVNVRDRARMTWAVVNQPIVADTPRPAADTSDKPRIFRPE

SEQ ID NO: 2621 - protein, 200 aa, Methanoculleus sp.
MLRAYKYRMYPSQEQVASLMQHIHACRFVYNKAIQKLARCHEKVSNQRNDFLHKLSNRVVGENQAIAVESLNVSGMQKNHCLAQSISDVSWSAFFTMLEYKCQMHGKTLSKIGRFEPSSKICNWCGYIKQDLVLAEREWICPDCGTHHDRDINAAINIKKFALQDQNLVGVSGVERAEGPVDSLPMGRGMKQEAPPASAG

SEQ ID NO: 2622 - protein, 527 aa, Anaerostipes sp.
MKKCLASRYIKKADLQPEENERISQDLFAFNSMKRTSFLWQRQGRKFLKDDGKELSHQLKLKEVFACNDYFANSARMTAVGMIKSGQELAKLYIEDAKEDIKAIRKVLRKKKKYRKKLLKIKTSIIKHTKDPKKPLKGSVNIRYEKDGSVTVQFFQKVWTYETLYLFEHQWLDRKLRQLKAQIANMEYKLKRLEIKHQRLKDHPLKVRFGGKKLTKNRTIPERHRALEKRRNQRMQISGRKDCRYGNWVFRYDIETKTLEYRSMTDWNGDRICFPDVTFPYGQEWIESWLHERKGAIAWEIIDCGNAWQIRCILTKEAEDMNGYYGDGAIGIDINYDHIAMTETDQSGNLLYHKVFHYDMKGKTSGQIKHQISEVIEKVFQYADQQHKPITAENIKSIQRKKFYDKHRKKHRHISMFASACILELLISKAVKHHIGVKFVHPAYTSKAGKMRYLRRYGLSVHEAAALCIARRGQGFKESIPFYLKPYLKDEKVRALIPQQWGSLTKLINKVTTQDLLSYQDPVLHRN

SEQ ID NO: 2623 - protein, 403 aa, unknown
  TnpB Polypeptide
MRLGIHYLLLYNSISEITKKGGLTMAQMSITAKIQVVASDEDKALLDETMSVYREACNYVSDYVFRTHDLKQFSLNKALYPTLRAEFGLKSQMTQSVFKTVIARYKTILENQKEWIKPSFKKPQYDLVWNRDYSLTQDRFSINTLGGRVKLPYFAEGMSKYFDRSIYRFGTAKLVNKHGKYFLHIPVTYDVEESNLSDICNVVGIDRGINFVVATYGSKHKSGFVRGRSIKQKRAHCSALRKELQMRHTPSSRRRLKRIGQRENRWMQDVNHCVSKALVVNNPAHTLFVLEDLSGIRHATERVKTKHRYVSVSWAFYDLERKLIYKAKQNQSSVIKVDPRYTSQCCPVCGHTEKANRNKKIHLFTCKNCGYKSNDDRIGAMNLYRMGINYLYDSQVPDTVAAE

SEQ ID NO: 2624 - protein, 478 aa, Bacillus sp.
MTNNDKHYKTMQIWLKSGHRMYPYFKQMCENSKILYNTTNFYIRQIYTALKSEQVLQPLQQEVLDCLQQQIEPMNSVQREAYAKRVEREKQKSIDKQKEVKLNLFTLPSPESAMVNYNYLDALFKSMKQSDYDSLPKQSSQWVMKTVFQNWKSFFALIKDWKKNPSGFKSRPRIPNYSRALQKEVQFTNQDCFIKDGKYLKFPLTKERLNIGKLGFTKGKLKQVRAIPKYGQYVVELIFEVPMEPRSTSPKERIMSIDLGIDNLATITTNTGHIPVLLKGKHVKSINQYYNKQKARYTSILRQGKKTTEGPFTSKRMERLHKLRNRKIKDIFHKASRYITDLLVQENIDTVLIGQNKGWKQKINIGKQNNQSFVNIPHSMFISMITYKAQEVGIEVIISEESYTSKASFLDDDIIPTYGQTTDTPIFSGKRISRGLYQAKDGRLINADVNGSANIMRKAVNTIKKETVKVSQEFTIIM

SEQ ID NO: 2625 - protein, 442 aa, Mycobacterium sp.
  misc_feature (345)..(434): Xaa can be any naturally occurring amino acid
MPKFEVPDGWTVQAFRFTLDPTEDQAKALARHFGARRKAYNWTVATLKADIQAWHASGTVTAKPSLRVLRKRWNTVKDDVCVNTETGVAWWPECSKEAYADGIAGAVEAYWNWQTSRAGKRAGKRVGFPRFKRKGRDQDRVSFTTGAMRVEPDRRHLTLPVIGTVRTHENTRRIERLIKAGRARVLAISVRRNGTRLDASVRVLVQRPQQPKVVHPGSRVGVDVGVRRLATVATADGTAIEQVENPRPLGAALRELRHVCRARSRCTKGSRRYRERTTQISRLHRRVNDVRTHHLHVLTTRLAQTHGRIVVEGLDATEMLRQKGLPGARARRRGLSDAALGTPRXXXXXXXXXXXXXXXXXXXXXXXXXXXXXXXXXXXXXXXXXXXXXXXXXXXXXXXXXXXXXXXXXXXXXXXXXXXXXXXXXXXXXXXXXXRASPGRWL

SEQ ID NO: 2626 - protein, 309 aa, Geobacillus sp.
MLMLRGQKVFFRASKADLDRLYACNRESARVWNECLHLAKEQFLQHGCWITKNELQKQTKRKFHLHSQTIQAVCHQYLFARQAAHQAIQQGHAARYPYKKKKYFPTKWAKDGFKVYENGKMGLSMGIHHGKREKPIVVYASHLPKGTIKEIECCWDQGLYLAVTYEDGQKATAYKPVSSIGVDLGEVHTICAFCENGQALLITGRKIRSLHRLRNKKLADIQRRQSKCQKGSRRWKKYERATQYVLSKSERQLRDALHKTTKQFIDWCLKQSASDVYIENVEGVQRNTRKKSGQAATLELVIRENEAVS

SEQ ID NO: 2627 - protein, 396 aa, unknown
  TnpB Polypeptide
MIKTVRVMLVPNNKQKTKLFQYVNTARFAYNWALGREQENYKNGGKFISDRDLRKEFTKLKKLDEYVWLNNVSNNVTKQAIKDACGAYKNFFKRLAKFPKFKSRKHSTPSFYQDTVKIQFTDTHLKVEGFSTSKKKNKQKLNWIRLAEHSRIPTDCKYNNPRIKYDGINWYITVGIEYEDSDAHKSDTHQSNEGIGIDLGIKDLAICSDGNKYQNINKTQKIKKLEKRKRRLQRSISRQYLKNKKGESYCKTSNIIKSEKELLKLNHRLTNIRQNYLHQTTSEIIKREPSFICIEDIDVSRMMKNKHLSKLVQQQRFYEFRRQLEYKANWNNIQVIIADRFFPSSKLCSCCGSIKKDLKLSDRIYKCECGNVIDRDYQASLNLKIYGENVFKQSVA

SEQ ID NO: 2628 - protein, 411 aa, unknown
  TnpB Polypeptide
VIGLSSKLSNTSESRNRRSEVNLVANDKVSYRAIKYRVYPTEGQSEKLSQTFGCARKVYNDALSMQRGLYEAGMAPFSKNELNAYCNQVWKKEFPFLVEVDKFALTNSLYTLCAAYQNFFEKRAGYPRYKSKCGKEQSYTTNYTNGNIAVITQKGHYGYIKIPKVGKIRASIHRAPKKDWVLKSATVSMQVTGKYYISVLFQLPEVAVAPAPLPTEKTTLGLDYSSPKFFVDSNGNDAETPHWYRKAETRLAKEQRKLSHCKKGSNRYAKQKARVSKLSRIAANQRLDFCHKLSRKIANSYDAVCVEDIDLRAMAQTLNFGKAVSDNGFGMFRIFLQYKVEAQGKYYIVISKWYPSTKTCCHCGNKNPDIQLGQMEWVCPHCGVVIDRDLNAAINIRNEGLRVFYEERVPA

SEQ ID NO: 2629 - protein, 386 aa, unknown
  TnpB Polypeptide
MLTYKFRLYPTKTQEKKLEETFETCRRLYNRMLDDRLKNHTAFFEQKKKLVELKKEDKYLKEVHSQVLQDVVLRLDKAFESYFAGLSKFPRFKRKGRYNSFTYPQHEVGFRLIGNRIKLGMIGKIKMRIHRVIEGKIKTATIIRDVDQWFVALSVEKQANNTNTNTLNQNAKAIGVDLGITNAIALSDGALIQGRPKFLRKAEERIKKLQKILSRKKRGSKRGEKSRILLAKAWRKVRRQRDDFAHKVSNKLAKEYGTIVFEDLSIRGMVKNHSLASSIMDACWGKLRQFTVYKAERCGGRVILVNPAGTSQKCSGCGEMVQKPLFERIHICPKCGLVLDRDVNAARNILAAGVEPALAEAEPLLIRRRISKFGQGSEKPTGFSRG

SEQ ID NO: 2630 - protein, 324 aa, unknown
  TnpB Polypeptide
MSYAVMDAVGALKSNMAKWKKNPKHHFELHYKRTNDKMAAITIEKTAAKILESALLFYPSYMEKLPIRCSKIPPLIPRGKPQCDNRLSVDAMGHFYFHIAIQETPSELHASSTPRQSVVALDPGVRKFLTAYSPDGWIAHLGTKHDTGRLAFLKRRVQTLVARTKALPRKQRQKKYRMKKAAQRARNRIKHFVLDMHCKITNYLVKSFSVIVLPDFRSQQMSKKKRPNGKKRQIGRGTVRLMQTLSHYSFRTRLLQKAARTPECSVLICSEAYTSKTCGLCGNVNSKLGSSERFRCTCGASLDRDVNAARNILLRNLHSMEAAQ

SEQ ID NO: 2631 - protein, 367 aa, Anaerolineales sp.
MKLTAQVKLLPTPEQAAALKRTLETANAACDFVSSLAWNEQVFKKYHLHHLCYQAVRERFSLSAQITVRVIAKVADAYTHPGHQGKLDKKSHHKFKPTGSIAYDDRILSWRMGDTTVSIWTTDGRQRISFVCGERQWEMLAARQGESDLSVFREMFFLYATCEVEEPNPIETTDALGVDLGVKNIAVDADGEIHSASHINKVRYRHRRLRAKLQAKGTRSAKRKLKRLSGKEHRFAKDTNHRVSKQIVAKAKGTKRAIALEDLSGICQWVTVRRCQRATLHSWAFYQLRQLVEYKAKLAGVPVVLVNPRNTSRTCPECECVDKANRKTQSEFSCVVCGFAGFADHIAAINIGRRAAVNQPNVARVDA

SEQ ID NO: 2632 - protein, 419 aa, Actinomadura sp.
VLRVKLLPTLDQLAALSGTLHTCNALANRISSQAYEKKVFSRAGLQKLTYAELKAAGLSAQPALHVIRKTADAYTTLHAQIDAGLLGGRHSKRRRRAQSKPITFRDQAAQPFDDRCLSWQMDARTVSIWTIHGRVRDIAFTGRPSHLKTLAEHRRGESDLVHRDGMWFLHATCEIEEAVPFEPVDWIGVDRGIVNLATTCDGTDYQGKGLRRYRRAQARRRAELQKKKAAGSRSAARRLARRKAREGRHAANVNHTIAKKIVADAQRTGRGIALEELSGIRDRVRLRRHQRATLSTWPFHQLGTAIAYKAQRAGVPFLEVDPAYTSQTCPRCGHVARGNRPSRDHFCCRRCGLAGPADHIAAVNVRQRARTAWVFVSMPGPPSAQRAGDAISARQPVATGSATRRERPSRGLGCSRPRS

SEQ ID NO: 2633 - protein, 388 aa, Xenorhabdus sp.
MMYSATKVRLYPTEEQRQALEKQFGAVRFVYNKALHLRSHVYKYHGVSLNNRKDIQPLLPVAKKSRRYAWIANADSHALQVSLQNLDRAFVNFFQKRARYPRFKSKHGKQSSYHCSSLKVTAESIKIPKISAIKAKIHREISGAIKNITIIRSATGKYYASILSEKPETAPEKPTKIATVTGLDMGLSHFAIQSDGHKVANPRPLLRNSRNLRRKQKALSRKQKGSANRAKARLQVAKCHEHVANTRADFQHKLSRTLVDENQAIIVETLKIKNMMKNHQLARAIGDASWHSFINKLAYKAEQKGVHLVRLEQGFASSKLCHCCGYRMPDMPLRQRLWSCPECGTAHDRDINAALNIRHKGILALQAAGHVVSAHGGLRKSVVPTVAA

SEQ ID NO: 2634 - protein, 378 aa, unknown
  TnpB Polypeptide
VILSYKFRLYTTLAQEAALTEMLGAFCDLYNAGLQQRIEAYRRRGVSLRYGNQAAELKAVRAEDERLAGYSFSGEQQVLRRLDKTFSAFFGRVKRGAKPGFPRFRAKARFDSAEMRVGDGLTIRKSKRLGIVGIPGEIKVRWHRPLPPGAKIGAAVISRKAGKWFVCFQIQMPDAEPINRPFTPVGIDMGLTSLVALSTGEMVPPPQCTKNAAKALRRAQRAVARKRRGSKRRTKAKLRIARVSAHVANQRRDFSHKLARRLVNEHSHIAFEDLNIKGLATGMLAKSVNNAAWNQLIQHVTYKAANAGGIVVLVDPRGTSQTCPECGTIKRKTLAEREHRCDCGCALNRDVAAARIVLMRARFQSGTGCQAPSQRIAA

SEQ ID NO: 2635 - protein, 322 aa, Thermincola sp.
LIAVARRKASLQEKPTQTLTVKAKAVTFKQKAFRILPDNRVMLRLPRTYSRREIILEYRLSPKDFLGEVKQVKLVFSSQTSDWYLHIVHRVSVKYREPGNIMALDLGIVNIAAGILSTGQTFLVPGGALLALDRYFHKEIAKCRSSSSRRSRNLNRKWSRQRKHYLHALTRWIVDYAAGNNVSVIVVEELKGIRSDANWGDRGNQKLHAWPYRKIIRMLTYKAALKGIRVVDVSEKDTSITCPICRRRAKSARVMRGLFRHCGCLFNADMVGAYNILQRYLQEAGQPASGVVGGLARPAVNLFVWRKTTPQGREQGTFRQTA

SEQ ID NO: 2636 - protein, 440 aa, Thermococcus sp.
LTRTVVLESYPLTRRKFRAIKEVYDKYSEILEFLTEYAVENRIKSHLKLRKLFYAKLKEEHDLPTHYYYTVCQDAVTRAKSFLELKKKRRARTGKPEVRKVSIWLDDVLWDYKRFPKFNTLKGGRKILVIGLTTKLGRIKLPLKPHKLFFKYLNDRWKVKAGVKLRIIEKERKVLAYFVFEKEFDEKGLSGNFLGVDYNADNVSFGTHEFLIQVRTELGRLTRFYSNVRKRIQESHLVGWKRKPSSRKGKELLRKFGRRKMNKRIDLQRKLAKRLVELAKELNATIVLEAVPKNFNQRVTKRRRKNERRLRDTLHNIGMNGFQRFVLEKAIEYGVSVVFVNPSYSSQVCPHCGAFKIKPDDDALRQRVFECPVCGFSLDRDFVAVLNLLGLFPFSPKARELPVEGSVSSMSLVVKANLLHHKNSLVIVGQGLKISAGGNG

SEQ ID NO: 2637 - protein, 440 aa, Thermococcus sp.
MKRSVTVRLQPSKEQEKILFELAYSTAVVWNKLNYKRLRQFKEFGKIDFNGTEKEAYHEFKNWIGGSTVQQLARKNAEAWRSFFSLNRKKKNGELPEWFKPRPPKFIREKNRRKLFIIPLRNDQYQVKGNVLELRRLGKFGKLKIQFKGRIHLKGKQGRLEITYDSVKRKWYAHVSLTVEERLESEEWVALSRTPKGDLSAGIDLGVNNLMAIYVENGESFLVNGRPLKSIDFYWRRKIAEYQSKLNKSGAKTSRKLKKMHDKAKLQTEHYINTAVRQTVRKLYELGVSKIVIGYPKGIARNSNKGKKQNFLLSHVWRFNYAIKRLTEVAEEYGIQVVLVNEAFTSQSCPLCGQRHSNGRIFRGLFKCHREGVVMNADLVGAFNILKKVVKTITPSLPALSGGRGNRGKALPEGFEEPALTGSLVKTPQTSPPTARVPTV

SEQ ID NO: 2638 - protein, 460 aa, Thermococcus sp.
VKIVLTYKMMHDWNVGELLTEYQKLLQRAIDEIWEHTTWKEKKVKHRYSIGNGRYKYYETTRLIPYFPKSNEFKRELRNKLLKSWPFAKHYVDSTIKTAYSILESWRQNYLKGRRKKRKPVVKRKFVRVKTTLMKVEGSKIRITVKPREEYLELDYSGEWFYERIKDWKVGELIIREEEIYLTFSKEVEFSRRIKIGIDSNLTSLDVYHPEKGWIKVDLSELHRIAETYDEIIDRLKSIQRKAPKRISRLLKKYYARRRNRIEDYLNKLVVQLSKEFPDAVFVFEDLNKFSMFNGNGRKFNRKLSRSTWSKIVQKLSYHVPVEFVNPAGTSSTCPRCGSRLESRNGLVECSNCGFKADRQFVGAFNVFVRGLGVALSGGEAGDLLPNEPGGELRLMNPKSVVRVDLNGRTLTYPPKTHDGQTPAEKSLMSRKARIPAKSGARTQLFTMSTRSFLFTCSPL

SEQ ID NO: 2639 - protein, 372 aa, Deinococcus sp.
MLRAYRYRLYPTKAQETVLEGQLRLCRNLYNAALQERRDAYRKAGKTVTGYDQMKCLTEIKAALPEYAGVYSQVLQDVLKRLDKAFKAFFRRVKEGSKPGYPRFQGRDRYDSLCYPQSGFSVSEKTAFFSKVGNVRIRLHRPMEGKLKTATIRRECGEWYVSYVCEVDAQPLPATGSAVGVDVGTTWFAVTSDGESVENPRHFRGAMKRLRVAQRAVSRKKNKRSNRRRKAVRRVAKLHRKVSRQRLDFHHKTALKLVRENDLIAHEDLNVKGMGMGNLARSVHDVGWGQFFALLSQKAECAARRVIAVDPRYTSQACSQCGHTCRENRVSQAKFRCVSCGHTANADHNAALNILGRAAPSGVNVAHSASVA

SEQ ID NO: 2640 - protein, 291 aa, Clostridium sp.
MKKLKRAYKMEINPTDEQKSKIHQTIGVSRFIYNFYIARNKEIYEREGKFVSGMDFSKWLNNEYIPNNQDKKWIKEVSSKATKQAIMNGDKAFRDFFKKAKGFPRFKKKKNQDVKAYFPKNNKTDWTLERHRVKIPTLGWVRLKEFGYIPKNSVVKSGTVSQKADRYYVKISNEKTYIKISNPNNEGVGIDLGIKEFAICSNGNKFKNINKISTVKKIEKKLKREQRKLSRKYESLKIRNKKEKEGKATIQNIQKQVVKVQRLHQRLANIRTDYINKTVFSIVKQKPSYIN

SEQ ID NO: 2641 - protein, 374 aa, unknown
  TnpB Polypeptide
MKIRQKFRMYPNKEQERILNQWIGCARFVWNKFLEKNNDRYKNEKKFVFYNEMAAQLAQLKNDEEYAWLKDAESTSLQQKLRDLEKALKDSSPKKKNPKKYPHFKAKKTDESGIRITNLNGHFQEGKIHLPKINTLVKVVFHEPLKGKPSSVTIIKDKCDCWFVSYVIEWNCDIECIQPSEFKTGVGIDLGVKTFAVTSDGEVFESPKYLRKSEKKLKKLQKKHNKKHKNSKNREKSRKRLAKQHKKVANKRKNFIKQTASSIAKMNDIVVCEDLNVKGMVKNHHLAKSISDSGFGMFLLEMEWQCKKRGKIFHKVSRWYPSSKTCNCCGYVNKTLTLNEREWTCPQCNSILDRDYNASMNILNQGLRDLKIDL

SEQ ID NO: 2642 - protein, 408 aa, unknown
  TnpB Polypeptide
MIVLRAYKTELDLNNTQRVICQRHAGAARFAYNWGLAQKMAAYQAGEKVPSAIDLHRRLNALKQTELSWLYEVSKCAPQEALRNLDCAYANFFRRVKQKKAGKKVKAGFPRFKSKKKNRDSFRLTGIIHIFENAIQLPRLGRLRLKERGYLPTENARVLSATVSQRARHWFVSLQVEQEIPGSRLAEDRPVVGVDLGIHRLAQLSDGTVFENPNALRSSLKKLRRLNRALSRKKRGGTNFQKALLRLGRENARIANIRKDTLHKITTRLAKTKSVVVLEDLNLNGMVKNHKLALSIFDAGMYEFRRQMEYKGKWYGCELILADRFFASTKRCSNCGAVKSIMGLEERVYHCDYCGEVIDRDLNAAINLEQWWTNPIVRKLRRVSPKVTPAESSEDLSIQAALVEAGTE

SEQ ID NO: 2643 - protein, 550 aa, Mycobacterium sp.
MIVRMRSCAQAAKVAEATGGVQLAGKPKPDGTPTFSRYVEIGVDFEAHRPVVESVSVLFELYDGDANSYAATGGPGAQLPSGWMVTAAKFEVEWPADPQRAGLVRSLCGPRRKAFNWGLAQVKADLDAKAADPAHESVDWDLKSLRWAWNRAKDDVAPWWAENSKECYSSGLADLAQGLANWKAGKNGTRKGRRVGFPRFKSGRRDPGRVRFTTGTMRIEDDRRTITVPVIGPLRAKENTRRVQRHLVSGRAQILNMTLSQRWGRLFVAVCYALRTPTTRSPLTQPTVRAGMDLGVRTLATVATLDTATGEQTIIEYPNPAPLKATLVARRRAGRELSRRIPGSHGHRAVKAKLARLDRRCVHLRREAAHQLTTELAGTYGQVVIEDLDVAAMKRSMRRRAFRRSVSDAAMGLVAPQLAYKTAKCSGVLTVADRWFASSQIHHGCTSPDGTPCRLQGKGRIDKHLLCPVTGEVVDRDRNAALNLRDWPDNASRGPVGTTAPSAPGPTTTVGTGHGADTGSSGAGGASVRPRPRRAGRGEAKTQTPQGDAA

SEQ ID NO: 2644 - protein, 368 aa, unknown
  TnpB Polypeptide
LALYRRSYNLAVERFRNDNYKDENGKFINMRPAIKAQVEQEQKEAGRAYNSLISDNGTLAAATTFKAVCGNNKKLKGANSGFSEIGFKSRKGSRHSFSIDRLPKGLNPCVKALGKIHLTESIPSEAIGKSCIITCDKGRWFIQVQQHIELQTEIQGEVKCVGVDQGVRTFATCFSKDDALVVGDNFAKEKLFPLMKRVDKLIGQKQKVLNTQKGVKSPDMPQWARDRLTYFNREINRLKCKKDDLILDLHNRLAYELVSSYDVIFLPSFETKGMVSRKDKTIRTIRRNTCRQMLDLNHCGFKIRLKWYAKKYGKQVVDCNESYTSKTRSWDGSIDKKLGSSKIIKGDGFTVGRDINGARNILLKHLTR

SEQ ID NO: 2645 - protein, 213 aa, unknown
  TnpB Polypeptide
MELSWEENLLIFPVEKDRMYRVLGRIRRFQREHGSVQVKSRWAYAKRLNTELGRKIAGAVAGYAEENHADVIVFEYLEIKGKISGRKKQKLHLWRKRDIQIRCEHQAHRRGMRISRICAWNTSRLAWDGSGTVVRDPGNHSLCTFQNGKRYNCDLSASYNIGARYFIRELLKPLPATERSLLEAKVPSVKRRISCVYADLRELFSEMELLRVA

SEQ ID NO: 2646 - protein, 526 aa, unknown
  TnpB Polypeptide
MSSKKILNRRQKKKKKKEEKLKRRNLEINNYKKTIIKHTNNIWIPPHNIKYKNTDTDSWFTIKKYEDKKNNKIDDFKCNIPTNKNKAKKLMPCTKVNFYPTKMQKIILERWFDAFALMYNATLKFIKQKFKENKDNNNNAEATEKKSTSVVKTISKKKIKIVAKKPKKKINPTNFYNNRKMLKNKRCEIETNSTITNKKQLDVINSELKQRKNTKKKSKKIKPVRTSINSHTLDYAIKLACINYKSALTNYRNGNIKFFRIRYWRKNRGNKILVVEKQFIKKNTIFQKLFGDIDLEYNREKYTLKAKSNITIHYNSKEKKYLLLVPEKCEVKEAVKKNKTIVLDPGIRSYMTGISKNEVIKIGNEQDKIKEILMRKDRIMENEKVPYVKKKKIERRLNTRIKNMVNELHWKTINYLVNNYDNILIGDMSVKSIVSKNESTLARITKRIGYSLSLYLFKQRLEYKCKLNKKRYSEVNERYTSRMCSVCGWYNEKLGGDKIFECKECKRTIDRDVNGARGIYLKHLQK

SEQ ID NO: 2647 - protein, 265 aa, Halogeometricum sp.
VTVENIQQVRAVWNGDRWELHLACKKEIPVEDAPGDNAAGIDIGIKNYLAIAYDNGDAELYPGSVLKQDKHYFTRDEYDTEGEDGPSRRALRARQKLSHRKDHVLHALAKHVVEQCIDHEVGRIAIGDLREIREDEDGDARNWGKRGNKKLHGWEFDRFTTLLEYKAEEHGILVDRVDEKNTSKTCSCCGRKRDANRVERGLYVCESCGATMNADVNGAVNIRRKITQSPPTEDMSNGRLARPVVHLFNQTSGRFAPSEQVGCKP

SEQ ID NO: 2648 - protein, 407 aa, Trichormus sp.
MIVYEAKAEATKEQFLKVNEALRTALFVRNSCLRYWLDGHAKNGYDLNKYTKVLSDNPEFPWVSKLNSTARQAMAERAWAAIARFFDNCKNKVTFKKGFPRFRKLQTRASVEYKKSGWVLSQCRNYITFTDKFCIGAMKLRGTRDLNYYQLKQIKRVRIVRRADGIYIQFCIDHERKEQLEPTGKSLALDLGLTHFYTDSDGNKVENPRFLRKSEQALKKVQRRLSRCAKGSTNRARARNRLGRKHLKLQRQRQDWCIKKALSVIKSADLVVFENLQVRNMLKNHNLAKSISDASWSIFTQWLEYFGKIYGRVVVAVSPAYTSIDCSNCGHQVHKTLSTRTHSCPNCSYTACRDYNASRNILNKGLELFKNTAGQAGIQHASGEFDLCSEKATSKSKSSQRKRKISQ

SEQ ID NO: 2649 - protein, 380 aa, unknown
  TnpB Polypeptide
MLRAIKVRLYPNKMQEQELNKVLGCYRFVYNHMLARKQDAYNADKTNLGLNELSKYFHNYLLKNEEYQWLIEQNTKVMKQSIRQMLTAYDNFFKEHNGFPKFKSKRDKQSALFPFEAISKTNTFETRKITLTTKLKNVSFRCSDLYLIRLQKYKDNIRSATLSKTKSGRYFLSILIEMQETELKKFGHTEYVVGIDLGVKDFVITSDGEVFENKHFYKKDEKRLSKLQRQLSKKNKGSNNFRKQCVRISKVFETITNKKENYIHFIVNELLLHYDTIYMEDLNVQGMLKNHKLAKAIQEVGFYKFKTILQTKALQSNKEVILIDRFYPSSKTCSICGYINKKLTLNDREWTCPQCGTKHDRDKNAAINILHEGERVINQR

SEQ ID NO: 2650 - protein, 379 aa, unknown
  TnpB Polypeptide
MANKAIKYRVYPTTEQEIMFAKTFGCCRKVYNLMLSDKIEGYKATGKFPTITPAKYKKDYPYLKEVDSLALANKQMDLQEAFRNTFSKSRKKKNGFPKYKSAKHSRKAYTTNNQKGTVAIIDNKHIKLPKIGKVKAVIHRIPDSEWIVKSATVSQESDGKYYISILFEFDNAVNIYVADKTNAIGLDYASDDLYVDNNGNVGSNHKYYRESHKKLAKEQRKLSRMQGSKKHEDKSNNYIKQLRKVNKIHRHIANQRLDNLHKKSTEIANQYDVVCVESLDMRSMSNKGFGNGKATLDNGYGMFLSMLEYKLFDRSKYFVKVDKWFPSSQICHCCGALHPKMKDLANRKMVCDCGLTISRDQNAAINILNEGLRLLTEIA

SEQ ID NO: 2651 - protein, 473 aa, unknown
  TnpB Polypeptide
MKQKHKSDAPKRTDLKGIVVRLYPDDNKTSLMNQLGGCSRLIYNSCLADKRKAIQDKEAKEEEQLFEYEMEYEFKGEKIPAEKEMPKISDGCGLKEYGKKLTDMKKTEKYSFLNDYNRNILAQAYINLNTAWSNHYKYPWSFNKPVYKKKVAHKDTFNVPIRALPGGQSKMGPKMICGNRISICTGLEDIHFKCSIRDEIYLNRHQKDIKSVTVTIDNTGFYYASILICDNETYEKYSDTIFSFDLGLKEFLIGKKAKFVTDDMGFIVVLDNDDIFNEENKETSKKFVHIENQHFSKQQKNKITHHQRLLSRKQVGSNRYEKERKTLAKAMRKPVNQRKDFQHKLSTQIVDENQAISMETLNVIGMQSNHNLAAALQDVAFGQFVRMIEYKALKRKRIVIKNDTFFPSSKTCSKCGTRYGGLKLSEREWVCPACGHHHHRDRNAAMMLEKNGVEIYNSKIQEELDKNYDTTTR

SEQ ID NO: 2652 - protein, 256 aa, unknown
  TnpB Polypeptide
VSRFVYNATIALLRDYESDKKPSWMDIKKMFTRLLPNWTKDTPFQVKGMAIKDTHNAFWKTCKANKGSGKPATFRFRSRKDPAQSCYILKTAISENGIYPQISGKGLGYAEFLPESCLDSRLILKAGKFYLAIPSKHRVPYGENQAHGVTQSIVAIDPGVRTFATFYSTESCGFLGEADFSRIQRMAHYLDDLMSRATKAGKQKKKRMMLAGLRMRQKVQNLIDELHHKTALFLVKNFDFILLPTFETSQMVGRSG

SEQ ID NO: 2653 - protein, 385 aa, unknown
  TnpB Polypeptide
VEGHMTVIYKSTRVRLYPTEEQQVLINKTIGCVRFVYNITLESCKKSYEQTNKFTSKKERSANLVPLKETNDFLKEVDSTALQQSVMDLNSALDNFFKNRNNFGFPKFKSKHNMKQSYRTPYNNGSATVLDNKHIKLPKLGRVKTKRFDMPEVYKVLNITVEKTNTGKYYASICIETEVQPLPKTGKQVGFDLGLKDLLIGSDETRYERPKYDYVFKDKLAKEQRKLSKMRTKLERAKLNLDECRNYQKQKHKVAKLYEHISNCAKDFNHKLSRRLVEEYDFIAMEDLNVSGLIKNHKLAYSISDVRWSQLLGFIKYKCQWYGKRFIQVDRFYASSKICSECGTYHKDIVSSLSVREWTCPDCGTYHDRDVNAAKNILNQALSVA

SEQ ID NO: 2654 - protein, 374 aa, unknown
  TnpB Polypeptide
VKILKFSFTRKILVKPDSKQAELLVNTGKAYAEAYNYVSGVVFETRNLNRTTLHKQVYRNIRTHHSLPSQMACSVIRSVISGYKTTLTNQKDWIKSERKSFSYDLVFNRDYSFSQHQISVNTLKGRIKLPYDGNNLREYLEDKSWKLGEAKLVYQNKKFYLHISVSKEIPELENAEISNITGVDLGVNFLAVSYNSKGKTKFFDGRKIKHKRAKFKNQRKALQKKKTASSRRKLKRVGQRENRWMQDVNHQVSKALVENSPGKTLFVLEDLTGIRNATKKVRLEHRYVFVSWAFYDLRRKLEYKAALNNQKVIAVNPKYTSQTCPKCGHISRNNRNKKLHTFCCKNCGYAGNDDRVAAMNLHRKGLNYLSSESA

SEQ ID NO: 2655 - protein, 339 aa, unknown
  TnpB Polypeptide
LLHGRDIFESLKAYKKNPAGFTGKPKVPGYKQDEEYIAWFSKQVAKLKAEDGRCYIQFVNNPDRFEIGKASLYGNLKYVKTEVKPMYGKYYILITFDDKIAEVEVPENPKRILGLDPGVNNFFGVANNFVGVPFVMNGRAVKSANQRFNKKRAKLISSVTKGSDSKSSVKYSKQLNILSQRRESFLRDYFYKCAWYICRYAKAADVDVIVMGHNDGQKQEIDIKDNVNQNFVFIPYTKFITILKTVASKCGIAVVIREESYTSQASLLDMDDIPTYKKGENKKYAFSGKRIHRGLYRSKNGTLLNADINGAANILRKEYPNAFDGIKDFYIFVYYYYLY

SEQ ID NO: 2656 - protein, 354 aa, Acinetobacter sp.
MMKTLKLRIRDKHCKVLDQLAFEVNFVWNYVNDLGFKHLKRKGEFLSAYDIAEYTKGTSKECNLHSQTVQAITEELITRRKQFKKAKLKWRVSNKKSAKRSLGWIPFKKSGFKYADGWVEYRKTKFNLWDSYGIGKYKVKTGSFVEDSRGRWYVCLVVESPKQEKPVATKAIGIDLGLKDIATCSDGTVITNPKFYRKYEQKLGIAQRSRNKKRVRTLHAKIANCRKDHLHKASTMLVKNNALIVVGDLSARKLVKTKMAKSVLDTGFSALKTLLKYKCENAGVLFEEVNEAYTTQICSCCGEITSSSPKGRTGLGIREWECVSCGTAHDRDKNSALNILALGHERLAVGITLL

SEQ ID NO: 2657 - protein, 408 aa, Oscillatoriales sp.
VLKAVKIRIYPTVAQQAHLAQAFGCVRWVWNQSLATMSATYQETGRGVTAMTMKKFIPLWKAEYKWLSECYSQCLQQSVLNLGVAFGNFFDGRAMYPTFKKRQGKQSIQYPQNVTVLSDREIKFPGKLGTVIAKVHRDIEGKVKTVTVSKNSDGRYFASMLVDDGIECPEPSSEGKLIGLDLGLTDFAVTSDGSKYQHPRATKKYEKNLARKQKKLARKKDKTTKNRRKAKLAVAKVHSKIKRVREDFLHKLSRKIVDENQVIVVENLAVRNLVKNHCLASSISDAGWGMFCTMLKYKAEMVGKIYLEIGRFFASTHLCSNTLKLLPSMDLSVRAFDCPHCGQRHDRDINAAINIKNEGLRLLALGTSVIAPEGYVRPKQYGRKSTTVAAVVVEGRSPRHSGTPLDGG

SEQ ID NO: 2658 - protein, 370 aa, unknown
  TnpB Polypeptide
MRKTFQYRIYPTRKQNIILLHVLSMCRKLYNDSLHDRKVAYQDCHCGLSYYDQAAWMKYIDYQGVYAHILQNVLRRVDTSFQNFFRRVKNGETSGYPRFQGRNRYDSFTYPDPYGTGYKIEDGKLHLSKIGAIRIFQHREIGGEVKTCTIKRDGDQWYASFSVELPDVEKKEIETSVGVDVGITTLATLSDGTEIENPKTLDKYDSKVKKAHRDLSRKKKGSSNRNKQKIVLAGIYRKVRNARKDYLHKTSRILADAYDQIVFEDLQIKNMVKNHHLARSIHDASWSMLINFTTYKAEYAGGIVELVNPRNTSKQCSVCDSIQSMPLSLRTYRCPDCGAVMGRDHNAAINIKNRYVPADCGELTPVEMVV

SEQ ID NO: 2659 - protein, 600 aa, unknown
  TnpB Polypeptide
MTYRGYKYRLYPNAEHRAYFARCFGATRYCYNYCVREYDAACAAGVQLSGFDIAARLREHLQDVKWMADVDYEIKESAPRRFDNALMKFKRHEANRPRQHKKGERPTVSYTTGGVVMVDFKHDLVQLPKIGILRARLHRSFSGDIVSATIKREADGNYYISLNVNIGETAVPLKPHTEAGTVGVDVGLHHLASLSTGDFKDMPDMSRSESRIQFLKKRLSLEKPGSRRYKRTAIQIARLHHHLASITKDTHHKIAAELCAGFDTICMETLNVQGMKRGEQGAKTPGDIAFNSRLHRAALASLTDRISKKAADTGTNFVAIDRFEPSTKTCHVCGHVLDSIDLDTREWTCPECGTHHDRDINAAINIRRKGIELLQARKPASRQIDKLPLAEGNFKPAKETATGCDLRTGKGTTRYNRPPKAQIADGTAPPRIFKKPRVVKPIERHGSYKYTPTTVCCDTTGKMAYYVNSTTVATLAGTSAPLIDNWAKTAAYIKPKSRQVPKMLNVIEAYRKIAEELRKVEIADCSVCGIMEFAVSTRKLVQLGKVLSDLGYKGKKYIDIYQYVYEDKFDAAMTFLNIILPDVIESECQRYEESVSNVKL

SEQ ID NO: 2660 - protein, 539 aa, Symploca sp.
MQSKGKSKASKMKLDKDSMTSSPTSMVQLELPLFATAESLQASNETNSPDKLSLGERVIEEHKSSKTSVEESTSSQKDCKPYWSDLCEAISSQLLLPTETNGVDNSYRDATGTNLKYSSLWQSKTVEKSWFSQILFTAEKPNSQQLFSPSSMPSLTVTEGMEDGATARRSRKIRLFLNPEQKALLKQWFGVSRFVYNTTIKYLQEPGTKANWMAIKSGILNSLPEWSKAVPFQIKSIAIKDACLGVKAAKKGFKQDAQIRRCRFRSRRDSTQSIFVPKTAIKTCGIYHTKLGKCRLKEALPESFSDGRLTRRYGEYYLVVSEKVQPSVTENQGRMVALDPGVRTFMTFLSEDSYGWLGNDSNLHIQKLCFRLDKLISKISKAKSQHKRRLKKAASRLRCKIKHLVKELHQKTARFLVDNFDVILLPTFETSQMVSKSRRKLRNKSVRQMLTLSHYDFKTFLKWKAWENSKMVIECNEAYTSKTVSWTGEIVKNLGGSRTIKSLSTGLKMNRDLNGARGIFLRALVDTPWLREHLNLCIC

SEQ ID NO: 2661 - protein, 445 aa, unknown
  TnpB Polypeptide
LDNWKTQDIRLSVQSKFSLNSRQANDAVHDAQSIIKSQKELVKLNHPGAANKVKFTRKRLEKTKSSGEKAKLKRRLYKEERKLAFWQKHLDAGTFPPVVFGGKKLFRERCKGNITREEWREARDSRYLSRGDRTKGGNLNTRLGVKDGAIYLDIAAEPVETVKIIRYNRITVPVYLACKPSKKTGLINGRNYRQMVLDYLKTGGAYQVEIIRESRRYYVHVAIEEEILVPYKAYNGAIGVDTNPDGLGIAHADCRGQFKESLWLPQGEWTYARSSRRDNLVGEAASQVVKTAKQLNCALTVEDLRFKNDKSVTAKFNRMSHGFIWSKFLWIVERGAAREGVPLIKTPPPFTSVIGILKYQPQYGLSNHEAAAYMIARRGIGKSAEKVPKRLILKYVKKKEVFALLANWKQWSVIKKAAVAAVKKQTERKAQSLVSWQHHRKQLVG

SEQ ID NO: 2662 - protein, 375 aa, unknown
  TnpB Polypeptide
MIKAYKYKLKPNTTQETAMNQFLGSARFIYNWGLNRKTEQYKLNGASPNYNALAKELTLLKQTEGFTWLQDVPIDALQQSLRNLENAFTRFFREHKGYPKFKSKKDNYSSYKVIKSVHFDFTNWKVKLPKLGWVNLCKNHIFNQLNCRQGTVTVSKDCCGTYWCSVVVDDMQDKPSKAKMVESTAVGIDLGIKDFAILSDGTKFSNPKYYECSQRKLAKLQKQFAKSKKGSHRHELLRIKIARLHKSISNQRNDMLHKLSTYLINSYDNVCLEDLNVEGMMQNHHLAKSIQSVSWSTFVNMLSYKSEQQGKNVIFIGRFEPSSKLCHNCGYINKDLKLNDREWTCPICGEHLDRDINAAINIRHIAFEKQNLIGC

SEQ ID NO: 2663 - protein, 365 aa, unknown
  TnpB Polypeptide
MIREAIIDRVTVRGFGKVRDSDAIAKLVFTARMYRLGVLTALECLESKIPMKECMFKIKRFVPNQKYAHACYERAREMYKSAKRKGRKVKQLRQWFMFESIGDRLDKGNRNIRLSSPNEVRVVVFAEKFGIKRIKLPIKPLKTHTEIIKELYELGSSKLLGYNARCIIRDYSRDEALVELQFIVPVDLYLKYRRIYDKPRGRNIGGIDWNSDRANLAIVSPKGELLDHKTWWFPETTSHGYPRIARKTKQSQVLSEIMDYCYHHGCGVVVFEDPNIIKTRRFTKNSTVNRKITRWTKREASQMFILKALRYGLKPFFVNPAYTSKLAGLIAKDLGLDRHTASAYILALEYLGLRPKEAYQNLQKP

SEQ ID NO: 2664 - protein, 402 aa, Escherichia sp.
VKRLQAFKFQLRPGGQQEREMRRFAGACRFVFNRALARQNENHEVGNKYIPYGKMAFWLVEWKNATETQWLKDAPSQPLQQSLKDLERAYKNFFQNRAAFPRFKKRGQNDVFRYPQGVKLDQENSRIFLPKLGWMRYRNSRQVTGVVKNVTVSQSCGKWYISIQTESEVSTPVHPSASMVGLDAGVAKLATLSDGTVFEPVNSFQKNQKTLARLQRQLSRKVKFSNNWQKQKRKIQRLHSCIANIRRDYLHKVTTAVSKNHAMIVIEDLKVSNMSKSAAGTVSQPGRNVRAKSGLNRSILDQGWYEMRRQLEYKQLWRGGQVLAVPPAYTSQRCAYCGYTAKENRLSQSKFRCQVCGYTANADVNGARNILAAGHAVLACGEMVQSGRPLKQEPTEMIQATA

SEQ ID NO: 2665 - protein, 243 aa, unknown
  TnpB Polypeptide
MTATSKHHKTLFVAAYLGTSKPLPTSYEDVGIDLGITHFAALSNDEFVESPRYFRRGEQNLAQAQRALARKKRGSHRRARAVKRVAKCHRKMRNQRQDFLHKQSRKLVNRYQVIGFEDLQVKNLTKRTKPKQDEATGQYLPSGAAAKSGLNKSIQDAGWRTFMEMTSVKAAWARRTVVFVNPHKTSQICSQCLKEGFHKDLSVRVHTCEHCGIVLDRDTNAARNVLQRVHKHLLGGTRPTPGA

SEQ ID NO: 2666 - protein, 359 aa, unknown
  TnpB Polypeptide
MIKTYTYKLKPNKKLFNKLEEQLSVCRYVYNLAKEVRDTSHKAGVSVNYYDLSKQLTETKKDFAWLRVVNSQTLQATLERLENGYKKFFKELKEGKKTSIPHWAKKDKWRSIDFKGVKAIHNSFKLPTIGIVKVFKFKGPKGELRTAKLLKEADGWYLKVVIKEADAVRENQSVCAIDMGIKYFLVTSDGEYVENPKHLFRYLQELRVENRKLSRMKKGGSNFKKQKKVLAKLHLKVSRVRKDFLHKQSRSLANNYKTIIREDLNISKMVQDSKLAKHILDCSWGTFFEFLNYKTNVVKVNPAYTSQTCSKCGHVAKENRKTQSLFECIKCGHTDNADFQACQNILQLGQQLMGANVSH

SEQ ID NO: 2667 - protein, 501 aa, unknown
  TnpB Polypeptide
VPGVVPPKGGLAYSDEPVGRYPTLFTTLGTRSSRARGKGDKEQNRNKRTIRLRLLPNGAQERKLRKLADATAKLWNELNYARLVQFRASGKIDFKGTGREHYHKYKGKLGVNAGQVINLNNGAWKSFKTLLRLYKQGRLPKFMGKPSPPGFWKDRLLGKRELIILVRNDRYYIEQVNGGEGYIVLKDWNLRIKYAGRVKWSGKQGTLVIKLEGNRWFAYVPITVGEKPARSNPRGYVKGAHERIRIENPKGNNKAFIDIGLNNLFAVVFNHTDTAILIKGSSIKAEYYYWKRETKTYQAIRDWLRNRGFNTWRRYHMFYLHAVYKRREGLRHYYRTAIRFLAKEIHKMGVNEVFVGYPYLVSQDDGNEYNTNVWWFSKIINWLGDVLEEYGIKLNIVNEYGTSRQCSICDVKHKNGRVMRGLYICPVTGIKINADLNAARNIAKKVGYNTPIPRKILSYIVTTNGVKPITPKEGETTKTPTVKPSPQKGEEGVMLNNTVPY

SEQ ID NO: 2668 - protein, 411 aa, Symploca sp.
MATKRITFKLYPSKSQSKKMHYWRKLHKDLYNDCVEHRKTSYKKFGKSVSYYDQQNCLPEFKECFPEYKELGSHALQDTVKRVDFAFRRFFKLKSGYPKFKSSRKYKGWTYPCKSGWKAGTNGKNGYLKITNLGNIRMRGQARDWGTPKTCTIIFKQGKWYASIAVDCVPTRYQTDTGAIGLDLGTHQAIADSNGDVVDNPKFLKIAQGRINKIAKTSRRKRPPKRGVKASRRWKKANRAIAKIQAKVARQRQDWQHKVSAQIVSCNSLVATEKLNLKGMTRKSKGKNKRQKSGLNRSLLDVSIGSLKDLIKYKVTEAGGFYIEVPTKKVKPSQTCPNCGYQKKKTLAERVHHCDKCSYQCDRDVAAAMVMLNYARGMERASTDLDGSTSTWCGSFKQVAQMKSHKPVAQR

SEQ ID NO: 2669 - protein, 422 aa, unknown
  TnpB Polypeptide
MGGTRLLQRHKKKLTCRIRGKQTKARENNKDFMRSYKFRIYPSKAQEKELRHHLWVSKELWNKLLEANKQKYSEETKFLTNGEMQEAVKGSYLYSQVAQTLSHRLHNALWRMIKLRKQGKECGFPRFKNIDRIKSLNYPQSGFSLDEKLKVTPFGELSIVKHRRINGKIRCMALKKEASGKWFAIFCVEQEENLPGENKGIKVGVDLGLMRFATLSDGAVIKNPLHLKKHEDKLALIQKRLSEKKKGSFNRKKARIHVARVFEKVVNTRTDFLHKASTLLVNSYSIIVLEKLSSREMAERQFGKQINDAGWGMFANMLAYKAESAGCHVVFVNPKDTTKECSNCRNLTKKELRERMHTCPFCGLSMDRDLNAARVILKRATDPKGRAMRQQAHSTAGTAGSNASGDVAVAMSMKEDAACFNR

SEQ ID NO: 2670 - protein, 144 aa, Salmonella sp.
MVGIDVGLKDLFVTDTGFKSGNPRHTAKYAARLALLQRRLSKKAKGSKNRARARLKVARLHAKIADCRQDALHKATRKLINDNQVVCVESLKVKNMIRNPSLSKATADASRGELVRQLRYKGEWAGRSVVAIDQFSAVAVAVSP

SEQ ID NO: 2671 - protein, 392 aa, unknown
  TnpB Polypeptide
MRHRAYKYRFYPTQDQEVILRKSLGCARFVYNYFLDYKTKKWKEEQKSVSMYETSRILTQLKKESEYEWLKEPVAAVLQCSLINLNDAYQRFFKGKANYPKFKKKSGRNSIYFSPNAFSYKNGNINLYKCGVIDIRWSRTLPDSVYPKSCVVSLEPSGRWSISILVEDPTIKELKLVEKSIGLDLGINHFIVSSDGEKVKSPNIKCEYEKLKKLQKRLSKKQKGSNNRYKARLKVAKQYQRITDIRTDFQHKLSTKLVRENQTICLETLNIVGMVKNRKLSRVISEASWGTFVRMLEYKCDWYGRNLVKIDRWFPSSKTCSSCGSIQSKMPLSVREWTCPDCGVQHDRDVNAAKNILAVGNTVYACGGNVRPKEVSSGGSSYEAGNSNRKVE

SEQ ID NO: 2672 - protein, 395 aa, unknown
  TnpB Polypeptide
MYLVEKHIIKDKHSFYDECDNLCFQSKNIYNQGLYNVRQHYFETKKYLNYNTNYHLTKEQECYSYLPTKVFCQTLKMVDKNFKSFFVLLRNKTVKNKLPKYLDKVKGRFMTIFPKQALGLREFKKSGKIHLSKTNIYINTKINNFNSIKEVRIIPRLKHYVIEVVYEIIEKSKIINDNVAAIDLGLNNLATITYNTNDNPEIINGRILKSINQYYNKNRSKLQSKLKGNKKTSKKIQKLTQKRNNKITDYLHKASRKLVNQLVSKNIGILIIGKNVNMKQDINIGKVNNQNFVQLPIMQFANIIKYKCELEGLTVIFNEESYTSKCSFFDNEEICKHSKYLGKRVKRGLFITASGKLVNADVNGSYNIMKKAIPNALANGIEGFGVTPIVLTIKK

SEQ ID NO: 2673 - protein, 269 aa, unknown
  TnpB Polypeptide
LLQDESVPDIPAANQVKTAVGVDLGIKKLMSLSTGQTIANPRFYQQMERKRSQLNRAVSRKVLGSRRRRKACQRLARLEQKVANRREDYQWKIANNLVQQFDLIVFENLNIQGMMARCKPKQDENGKYLPNGQSAKSGLNKAITDAAWGSLKQKVKILSDRVGVLVYEAVPHFSSQECSECGYISPTNRDQEKFICEECGHHEDADVDAAKVILQRGLNRLGIYLDAVPRVPRKQDKTTPEEPVGRQGKSSALVGEPGNPKIVPAIGVI

SEQ ID NO: 2674 - protein, 382 aa, unknown
  TnpB Polypeptide
MIRGYVYRIKPNEEQKELINKTFGCVRKMSNTLLFERVTIYDMFGKYPELLKSHKYMTPSRIKDDYSYMYEVDSQALTTAWLNLKNAYSNFIKGHNNLPRYKSRHNPIQTYTSHTTNNNIRIEGKYIKLPKLGLVKLKQHRALPDNSKIKAATIKREAGKYYVVLRIEYPEVEKQTSNIQRAIGLDYSLRSLYVDHLGETAEYPMYYKKSLDKLRKVQRVLSRRIKGSNRYQKQKLVVSRLNQKIKNQRKDFLHKASRYLVDNYEVICIEDLDLQEMKKTKHFRKSITDTAFGKFTKYLEYKTKDEGKTLVKIPKYYPSTKTCSICGKLNEIKLSQRTYKCSCGNIMDRDHNAAINIAVIGLEKYYKNEYGTDSLAWSTCAH

SEQ ID NO: 2675 - protein, 487 aa, unknown
  TnpB Polypeptide
MLKNIKQYSYDVNTDDFDELCSIAKDYNRARNYIYSRYSGIKSYNIIKKSRKNIRDVWTKSGKIDEWNINSRYIRNAIEVCAANIKTSWTQTLDDVREHINKNEKDDRVSHFMYTILKYDNYLFKVLNKEDVVIKHFDDISNNKKKKIYSKIRRLIRDNKPTISKARSLSMQLDEAMYSYENGYIKIMSNTKNKRLCFKVNTNYRFKGNICLKIMHDRIVISRAIDIETKPIEYEQNIIAIDRNKINMFDTNNAHSYGEWFGELSDVHSDLLYEVNKKRQPYHSKIKELENKENKTEKDIQKINNIKKFNLGKVKYDKRKNRFDENMRKYINSTIKDLINKENPKEIVVERLDFTVPNKNKSKKKRFSKKTNRKLSSWAKGIVIDRLKYNTELNEIKLTEVNAAYTSQECPFCHHLGEKRNDIFYCPNRQCEANVGVHSGHMAAKVILQRSSDKEITLKTKHKDVKKILLKRLEEIKKPIQPRPNDT

SEQ ID NO: 2676 - protein, 275 aa, Okeania sp.
MRTAYQYKLRPNKEQIATIEMWLELLRRQYNYRLGERFSWWSENRCPVNACPLVMPIPQLRDNPNYYSQKRDLVNTKDKFPEYKLIHSQVCQDCIKRVKLAFDRWFKAGKNGHKLGKPRFKGKGRYRSFTYPQIKQDCLEENKINLPKIGTVKLIQHRRLPDGFQIKTATISRKADGYYVTLALEDKSVPALTTKVEPTLKNTLGIDMGLKEFLVTSEGESVLIPQYYRSSQQRLKTLQKRLSRKKKGSKRWLKAVKIVAKQHKNVADKRKDFHF

SEQ ID NO: 2677 - protein, 257 aa, Actinoplanes sp.
VKSMQAYRFALDLTPSQERAVWSHAGAGRKAHNWALARVKAVLDQRAAERSYGLADDALTPALRWSLPALRKAWNAAKEQVAPWWRECSKEAFNTGLDALARGLKNWSDSRTGKRAGRKVGFPRFKTKHRTTPSVRFTTGTIRVEPDRKHVVLPRLGRLKLHESARKLARSKRWLRAKARLGRAHARVANLRRDGLHKLTTRLAREHATVVVEDLNVAGMMANRRLARHVADAGKRLPGTAPAGKTGTVPPQGRAAA

SEQ ID NO: 2678 - protein, 387 aa, unknown
  TnpB Polypeptide
VLRSYKTEINPTQEQIEIINRTIGTCRYVYNFYIAHNKEMYETDKKFVSGMEFQKWLNNEFIPNNSEYKWIKEVSSKSVKQSIMNADRAFRDFFKGKKRFPKFKKRGKSDVKMYFVKTDSKARIRCERHRIKLPSLGWVRLKEKGYIPIDRVIKSGTVSCKAGRYYVSVLVEEIEKEKPQLYDSGLGIDLGIKEFAVISNGIIKRNINKTGKVKKLEKQLKRGQHCLSRKYEALKKRSKKKKGEATRQNIRKQVLKVQKLHQRIDYIRTDYINKVIAETVKTKPSYITIEDLNIRGMMKNRHLSRAVAAQKFREFRTKLEAKCKESGIELRIADRWYPSSRLCHECGRIKLDLKISDRVYSCCCGYCADRDYNASLNLRDALTYKVA

SEQ ID NO: 2679 - protein, 345 aa, Boseongicola sp.
LLKALKVRLHPAVEQREALTFQFGAVRRVYNHALEWRMKAREDHGESVTKRMTLDRLVDLKSAPETRWLRDADSQALQQSVIHLDDAFGRFLDRWARHPRFKTRHGRQSMSYPQRAKVVDGSALYLPKAGTVRAVLHRAIEGRIKTVTVSRSPTGRHCASILVDDGRDLPEPLKAMDGESVAGIDIGLTDVVVESSGRKTPNPRFVKRTAANLRRKQKNLSRKRKGSVNRAKARVLVAKAHERTMNARGDFQHKLSRRLVDENQAICVETLGVRNMLGNRSLAAHMQNAAWGGFVRKQEQVRKVRPSPCEGGPLVRVQQDLLGLRRQGPEAAAFGPALDLRRVRG

SEQ ID NO: 2680 - protein, 422 aa, Boseongicola sp.
LTRGWTWSSSPSHSTGSASKSRQTFAKTCRRSSTACRDRTPRRYFVTKTKWTRSAKTKCLPVLYPVDSSTGQPCHGALLKALKVRLHPAVEQREALTFQFGAVRRVYNHALEWRMKAREDHGESVTKRMTLDRLVDLKSAPETRWLRDADSQALQQSVIHLDDAFGRFLDRWARHPRFKTRHGRQSMSYPQRAKVVDGSALYLPKAGTVRAVLHRAIEGRIKTVTVSRSPTGRHCASILVDDGRDLPEPLKAMDGESVAGIDIGLTDVVVESSGRKTPNPRFVKRTAANLRRKQKNLSRKRKGSVNRAKARVLVAKAHERTMNARGDFQHKLSRRLVDENQAICVETLGVRNMLGNRSLAAHMQNAAWGGFVRKQEQVRKVRPSPCEGGPLVRVQQDLLGLRRQGPEAAAFGPALDLRRVRG

SEQ ID NO: 2681 - protein, 406 aa, Okeania sp.
MLRVVIVRLYPDTQQKQLLEQSFGNCRWLWNYSLNLINETYKNTGKGLSGYEVKKLIPSLKKEHEWLKLTYSQCLQQVCLNLGVAFNNFFEKRTKYPRFKSKHGKQSIQYPQNVTVLKNSLKLPKIGVVKAIIHRLIKGKIKTVTVSKNQSHQYFASVLFEDSQDKPELTTVGKAVGVDVGLTEFAITSDGLKYNNPKFLKLHERNLKRKQQQLSRKEKGSKNRNKARRKMARVHRKISNCREDFLHKLSRRIVDENQVVVVENLNVKGMMKNHCLAKAIEQVGWGMFMTMLKYKAENEGKAYQEVDRFFPSSKTSHVCLNQVGSLPLNVRRWTCENCQTTHDRDINAAINLRDEGLRILTCGTRDKAHRQTVSHSNRGRKKSTTIAGLWVGSPRCTLASASGQFT

SEQ ID NO: 2682 - protein, 368 aa, unknown
  TnpB Polypeptide
VIQRAHKIKLKPNKAQETMLAKTAGTSRYAYNWGLAKWEELYKSGERCDAYLLSRLWTLERPAWAEEVYNGAPRKALFNLGGAYSAFFRGIRKHPTFHKKGRNDCFYISNDKAKLYGSKIRLPNIGRVRMTEQLRYEDSKIMSYNVRHEADGWYVIISVEIAEDRRTDSTSFVGVDVGCKNFAIASDGIECKKPGKLRDLERQLKRKQRLLARKAKGSKNHQKARIQVARTYKRISNIKNDTVHKFTATVAKNHGTVCIEKLDVKGLQESDNRLVRKGVHNSCMSEILRQLKYKCNNYIEVDRHFPSSKTCSNCGNINSELTLSDRTYHCHSCGIAIDRDLNGAINLCKEGIRIYTLGHRGSASGETR

SEQ ID NO: 2683 - protein, 227 aa, unknown
  TnpB Polypeptide
LIIVTDYNPLSSYRKTHNGASVGLDFGLKTYLTASDGNNIVSPLFFKTFQNKIKKQNKRLSKAQRGSNNRKRRLFELQQTYRKIRDLRNDFQWKLAHELCKQYDFIFLETLNIESMKRLWGKKISDLSHSEFISKLMYVATKYGTTVHQIDRWYPSSKTCECGFVNKNLSLRDRTWCCPKCESINDRDVLAARNILRKGISELESKSNSSDSNIGVSCVCIQESHTV

SEQ ID NO: 2684 - protein, 378 aa, unknown
  TnpB Polypeptide
MKLTLQIQLLPERDHAARLKATVERFNEAANWAAGVAFERRCSNKVALQKIVYRDLRERFNLSAQMAVRCIAQVCEAYRRDKTIRPEFRTHAAMPHDRRTMSFKGPDRVSLLSLDGRVLVAYIMGKYQRERFTNAKGQADLVLRKDGKWFLLVTVDVLESAPIPTTDFLGVDMGLANIATDSEGEKYSGEPVDKVRRKHNLQRKRLQRKGTKGAKKKLKRDAKKEARFRKHQNHCIAKKIVAKAKGTGRGIAVELLDGIRERVTARGPEARSRLSGWSFHQLYSFLSYKAQLAGVSVKRVDPAYTSQTCPECGHCERSNRRSQSEFRCKACGHEQHADVVGARNVRDAALSHDGALVARNANHRTGRPPRLSRKAPGL

SEQ ID NO: 2685 - protein, 464 aa, Clostridioides sp.
  misc_feature (179)..(183): Xaa can be any naturally occurring amino acid
VIAVEKAYKFRMYPNKKQQELINKTFGCCRFVYNKYLAKRIEVYKNDKETFTYKQCSSDLTNLKKELKWLKEPDKFSLQNALKDLENAYNKFFKEKAGFPKFKSKKINRFSYKTNFTNGNIMYCGQRIKLPKLGMVKIRDKQVPKGRILNATISKEPSGRYYVSLCCTDVDIEAFENTXXXXXFFKEKAGFPKFKSKKTNRFSYKTNFTNGNIMYCGQHIKLPKLGMVKIRDKQVPKGRILNATISKEPSGRYYVSLCCTDVDIEAFENANNQIGLDLGIKEFCISSCGEFIENPKYLKKSLSKLAKLQRELSRKTIGSLNRNKARLKVARLQEHIANQRNDFLQKLSTKLIKENDIICIEDLQVKNMIRNRKLSRLISDVSWSEFVRQLEYKANWHGRQIVKVGKFFASSQICNKCGHKNEEVKNLNIREWICPSCNETHDRDINASINILKEGLRLITIQNK

SEQ ID NO: 2686 - protein, 397 aa, Symploca sp.
MLVLEAKLVGKNWQYERLNESIRTGQFIRNKCLAYWIESSRDEKVNKSKLTKVALQLRKEFEWASKLNSQAAQAHAERAWSAISRFFDNCKKKVPLKKGYPKFKKNSRSVEYKITGWNLSEDSKKLTLTDDFNAGTFKLKGTRDLNWYTKKQIKRVRIVRRAKGYFVQFCIDVERSEPLPRTNKFVGIDLGIKEFYTDSNGEVVNNPRYLRKSELRLKRRQRRKSARVKGSKNRLKAIKKLGRAHFKVSSQRKDFAIKTAKALIQSNDMVIYEDLKVRNMVKNHKLAKSISDASWSMFTDWLDYLGKVHGRIVFSVAPHWTSQNCSNCGEKVLKSLSTRTHQCPYCQTVLDRDHNAAINILNKGWDDDRVPQGMRKHTLEESRTSGRVEKSLLLSSL

SEQ ID NO: 2687 - protein, 439 aa, unknown
  TnpB Polypeptide
MKTIKIPIKLQSDIKDLQRQCSIVIRYAYNRFKEGKNQKEIRLLCKDLKNINDLNSWLIQSCIMKAKNLIDTKQENIIFGGKFNFIQRTQNKISKKDYQNNRLLNIISQGEMLKNGNRMFDFRIIEDNQIIFKLNKKNHISIQLPKLKKNFKKELYELQELGLNKKLPISIEFNSEFIFITFEENLLYQKVENNLKDNRVLGLDLNPNYIGLNISEFDGEKQDIVYSCIFDISKLTQKLNKSSSSKEQKYQENKRKFELYQICKEIQNLALYWKCKKICIEDLNIRSKQHNKGKNFNRLVNNKWNRNIIYSNLRKRCTLNNIQFVEVNPIYSSFIGNLLYSNDKTPDPIASSIEISRRGYFKYIKNKFYPSLIKIEDLYDQWKKTTDQMFTHTYSSWKELFEIFKKSKLKYRFPLEEGKFSKVFSLRNIKSNITLYSFI

SEQ ID NO: 2688 - protein, 597 aa, unknown
  TnpB Polypeptide
MKSISDQTKFANFLKSQPELSSTGIKQVKSNVLEQMVDTVDSSNQVYPSSNQRKKKVEKSATAEYPPTGKRKIWKHKLTSSEIDTLTMKLSKIWDQASTLKEKDLSPFWTQQSKEISQRLWLPTKIDSVDSVLNSLRESSKPTPKGKSWFSIKRKHPQKKNSLMTSFQLSQYSLPASMDFEAIQSKRKSKTKPLKTLKLRLFPSNEEKEKLQTQFQQFRWYYNAVLDVVETHFENILDKNKYSSRTVRDIFRKYSYEEEVWTENLILKQFVLNENKNELPVPEWWKGQVHSRLPRGAINKFVSSLNAAISNFKNGNIRRFEMKHRRSDNPTDYLHYEDKQYPSFIRNIKSRYWFTTKDRKRKSISLKDVDTQGRGVEIIYEKETERYYLHYPVERDWFPEEDKRIENQNVLHSTDGNRIISLDPGVRKFLVGYDPQGECIFIGEGANKVLTSMLYDIDKTDESSERIIKWKKVKNMVDELHWKTINFLMENYDTILLPEFRVSQMVRGRKLPRIVKRMMLMYSFYQFKEKLKYKCEMYGKKLIIVDESYTSCTCTRCGTINKMGGLETYDCMLGCGIILDRDVVGARNIFIKNVAQR

SEQ ID NO: 2689 - protein, 409 aa, Oscillatoria sp.
MRTSYQYRLRPTKLQATEIDRWLSMLCAQYNYLLADRFNWYEQNRSSINACPLVCYLPELRDNPDYYSQKKTLPHLKKTHPWYAGIYSQVLQDVVKRVKVTFERFLKGDSSGKRSGRPRFKPRSRYRTFTYPQVKDGCLQNNLINLPMLGKVKVILHRSIPAGLKIKTVSITKKADGYYVTLSLEDSTVPEIKPDFNPQKIVGIDVGLKDFLTTSENETVAIPQHYRKAQKRLRTIQKRVSRRKKGSNRRQKAVKQLGKCHKKVADKRKDFHFKTANDLLKKYDVVAVEDLNVKGLARTKLAKSVLDAGWSRFLSILTNKAVNAGLLVIPVSAYNTSQDCSSCGEKVPKKLHERWHDCPNCGCSLDRDHNAAIVIKNRAVGHPVFKAQLMSEAIAGVAEKPAPYCTQWV

SEQ ID NO: 2690 - protein, 431 aa, Oscillatoria sp.
MYAVQKDIWHLKGFDKSIVEQLLRWSNNLFNVGTYESRQRYFKDKSAVKYPDLYRIAKTNENYSLLYSQVAQQSLKSVAESFSSFRALERLAKKGEINQKPRLPKYRTKGGMYQVSYPGQALKIVGNRVRLPLGKQGKEHFGTDALWIPLPERLKGCQIKELRLIPRNGKVWIEYVHESLTKQAPSCSLEVTGILGIDHGINNWLTCVSSNGKPFIIDGHKLKSWNQEFNKQKARVQSEHSRHKLPQGFSSKKLQQLSENRARRMRYAVNKAVRTIIDYCESYQINVIAFGWNKGQKQEVNMGEKTNQNFVQIPTAKVKERLQQECDSLGWRFVEQDESYTSKASFLDRDFLPVKVGEKPDNWQPSGKRIKRGLYRSASGLILNADVNGAANIIRKSNVAIDSIVERVGSGLLTNPLRIKLWVGSSPKVCP

SEQ ID NO: 2691 - protein, 506 aa, Oscillatoria sp.
LYPLRVSVERNAGQRGGFNTPFFDNFFCNVRRNSLNTSLWVRDVNSQYLTRTSFSSEVSLNVVVSVCFTIVFTLNMQYNCLMKLAYQFKLLPTSDQRRRMSKWLDMLRHQYNFLLADRFDWFEMNRCSVNACPLVCSIASPREHPEYYGQKRSLVSLKTEREWYKDIHADVLQDMVKRVDLAFARFIKGDINGKRSGKPRFKGKNRYRTFAYQRVKSDCIQGNRIELPKLGKIKFIQHRPIPDSFVIKRALVTLKADGWYATLTLEDASVPDTPTIGIEPTETNSIGVDAGLEYFAVCSDGTMVEPPKFYRQAEEKLAKLQTKRELRKKGSTARRKLGSRIAKLHQQVARQRKQWHFELAGELVNKAEVIFVEDLKVSNMAKRNKPKQDESGKFLPNGQSAKSGLNKSFADAGIAGFLNEILPYKAERAGRLVVKVNPAGTSQHCAMCLNRVSKELSDRWHECSCGTSMPRDLNSGILIKKVGLGVRLTIKRESGNSRRRSPHSSL

SEQ ID NO: 2692 - protein, 432 aa, Oscillatoria sp.
MQLAERHIIKSTENRFVEIDGLAFKSKNLYNAANYIIRQSFVYGWGYINYNEMNHLMKSHQAYKELPAKVSQQILMILDKNWKSFFEAVKAYKREPTKFTGRPKLPKYKDKVKGRNILVYTIQAISRQQLKKGIIKLSGTNILIKTKIEQEQICQVRLIPKCDCYVIEVIYNACAERSRSEPESTVDENQKELIASIDLGLNNLMALTSNQPGFTPLLINGRPLKSINQFYNKRKAQLQSQLKGLRKTSSRIQRLTRCRNQKIDNYLHHASRDIINILRERKMGTLVIGKNVQWKNEINLGKQTNQNFVTVPHARLIEMLEYKAALVGIRVMVQEESYTSRSSFLNLDPIPVCGENDADRVKFCGKRIKRGLYKTSSGRLINADVNGSYNILRKAVPNAFSDGIESCVVQPRRVNPLEVKKKGEGLDASHVM

SEQ ID NO: 2693 - protein, 345 aa, unknown
  TnpB Polypeptide
MIKSIKVRLNPNNKQSTKLFQYAGCARFAYNWAISREQDNYKQGNKFLSDSELRKEFTQLKKQSEYQWLNEVSNNVTKQAIKDACNTYKRFFKGQCKYPEFKSKKHSTPSFYQDNIKIQFTDTHVKVESFSMSKKQNKQKLNWIKLCEKGRIPTGCKYMNPRFTYDGLYWYVSIGIEVNDNTTLPSNEGIGIDLGIKHLAICSDGNTYKNINKTQTVKKLEKKKRRLQRSISRKYEKNKKGANYCKTSNIIKREKELLKLNHKLTNVRQNYLHQTTSEIVKREPSFICIEDLNVSGMMKNKHLSKAVQQQGFYEFRRQIEYKAMWNNIPVVIAPGAQCLTGSSSR

SEQ ID NO: 2694 - protein, 382 aa, unknown
  TnpB Polypeptide
MMQKRAIKVPIHPDEAQAVLIQKTFGCTRFIWNKMLGDEQEFYHATDVHFIPTPAKYKEEYPFLREVDSLALANAQQDLKKGFSNFFENPKHFRHPNFKSKKKAKKSYTTNCQYLKSGPTVYTTKGFIRLPKLGMVKATLYRIPPRHWILKSATISQTKSGKYFCALLYEFETPVPKEVLPTEDNAIGLDYSSPDFYVDDQGHSPEKPRWFRASEEKLAHEQRLLSNMKYGSKNYNKQLHRIQVLQEHIANQRKDFIHKESRRIANAYGAVCVENIDLRSMSQTLNLGKSTMDNGFGMFRTALKYKLEEQGKHLIYIDKWYPSSKTCSFCDGYFGELELGQEEWICPHCGKTVPRNQNAGINIKREGIRQFYAERVNTVSAT

SEQ ID NO: 2695 - protein, 238 aa, unknown
  TnpB Polypeptide
MFHVPVKQENSDARTAKERMQEGARVCSVRFTNTDSFAVCTVLDEESRQLAVKNCRGGNAYRHHCKALMKKVEASRAFTDKDNVSQPNRKYYMHLKHLNEHYAHQVSKEIMDFCKENHTGILVLPEYDEDFSRISMYRSGNYSPLHLSIRIRNYLKYKAWAEGILVLELRADGTEKRCSICGATGKKQGSVFICQNGHQVNRFLNAPETWAANARKASGKTTNQVNKRQKCLLYINAE

SEQ ID NO: 2696 - protein, 392 aa, unknown
  TnpB Polypeptide
MKAYKTEIKPTKKQIELIHQTFGNTRYVYNQFITLNLKRIEENKSVISGYDFSKMINNDPERPDWLVKSPSKAIKQAIMNGDKAIWNYLKGNKGKPNLKKKTKNNSFYLIDTIKVERHRIFLPKLEWVRLKEFGYIPNNIKSVTVSMKNGRYYVSCLTHETKDERISTSNQGIGIDFGLKDQFITKNEKIQSINRSNKIKKLEKKLRREQRALSRKYENNMTNKKYYKTGKKKGQLKSFEWIKPLSDCKNLNKQQLAVNKLHERITRIRTDYNQKALQSILKQKPSFVVVEDLNVKGLMKNKYLSKSISKAQWYTSRLFLKHQCEKLGIELRLAPRFYPSSKLCSNCGYKNNNLTLNDRFWTCPECDVVHDRDVNASINLEQCEAYTVLTTV

SEQ ID NO: 2697 - protein, 356 aa, Marinobacter sp.
MTELTIKTLKVRVRDKHGKALRRQAAAVNFVWNFINELSSRSIRERGIFLSAYDIQRYTNGAGKELGLHSHTVQRIGAEYVTRRQQFRKQRLAWRKTAGVRRSLGWIPVNTGQAKWKNGQVFFHGQHYKVWDSHGLSQHRFRSATFSEDARGRWYFNVVVEVPVEQSAGTGAVGIDLGCKDAAICSNGEKLTGRWYRAMEDKLAVAQRARKKQRVKAIHAKVANRRKDAMHQFSRRLVNENAAIFVGNINTQAITKTRMAKSSLDAGWGILKTMLEYKCAGAGVVFGLVDERYTTVTCSACNSRTGPSGLEGLRIREWTCRVCGVIHGSRDVNAARNILALGHERLAGGITVSSGR

SEQ ID NO: 2698 - protein, 333 aa, unknown
  TnpB Polypeptide
LKNLRLNDFQPEEEYIYLTYSIKNNKKEESKILLENYRVLLQKALDWLWERTKVERKEIKKGKKTFTKFKIIFPKKKEVYKTLRDDLEKINKLASHYVDKAISDAYSILNGWKRRAEKGRASLRKPRLKKIYVRVKSTLRKVEGETVRITVRPYQYTTFSWSRKWFSKRVKGLELGEPIVKEDKVYLPFRYKLPWSTPIRFLAIDSNLYTLDAYDGEKFVTFSLKELYSLKFGMELKRGKIQSFASKHGKKGKLLIKKYSHREKNRVLDYVNKFVNKLLEMYPMTTFAIEKLNKQKMFEDANDNLSKKISRTVWRKIHHVLKYKAPLYGFFFC

SEQ ID NO: 2699 - protein, 360 aa, unknown
  TnpB Polypeptide
MLLAENKTLLTTRKFDLNSLIMDIKTTCPKYYYQVNAQVLQNVSNRLSKAFDSFFRRVKENSSKVGYPRFKSKIKSITYPQSKGAFKFISDNKIRVSKLGNIPIVLHRVPKGKIKTLTIKVNKANQWFAIFGCEVDVKAIKHSSKAKVGIDAGLESFAFLTNNKTIPNPRFLVKAEKRLKLLQRRLSRKKIGSANRRKARLKLAKQHIKVTNQRTDFHHKESSKIAKAYSFVAVEDLNINGMLKNHYLAKNISDAGWGSFIQMLFYKVVANGGQLVKVNPRNTSKTCSKCGTITEMPLSKREFLCPKCGFACHRDLNSAYNILKIGQDLPESTPVDIEPLQQSSSVASSVVETGTTIGNS

SEQ ID NO: 2700 - protein, 291 aa, Streptomyces sp.
LAVSRLRWPGSPVHAPDARPTTSRPSTSVVSSAGYKTFCTVAWTTPHLRITARPPARHGTPDGSLRTDRPWNSAPSAPPHSAGCRTGEVDDAWAATPIPSSGRADSADRTPSRAPRPPLNGPSVYGSCAVSRSRSADDRVRRSGRKSPRARREARHATHINHKISKAVVDVAQRTERGIALEELGGIRERVTVPRDQRARQSAWPFHQLGAFIAYKAKRVGVPFIEVDPAYTSQRCPRCGHTERANRHTRDHFHCRRCGLAGPADHGAGANIATRGATAWAFVNMPDPVPA

SEQ ID NO: 2701 - protein, 384 aa, Lactobacillus sp.
MLMIRTQKVRLYPNRHMAKVLDSLCDYRRYCWNEGLSTWNDMYDLHTLDLSSPRPSAYSVRNELVGNKADWQYELSARTLQLAVADLGHAWQNFLDKSQPDWGKPTFKSKKAARQGFKTDRAKLVAGKVRLDKPRGVKDWYDIRISKHSDLSGVLKVISIYRENGKYWASLPLEVELDAKLRTGDVSAVDVNVGHLNYTAGVVGAVPKRLRKLYQRIKFYQKQLAHKRVMNGNKATKSGRYVAMRAKLQRDYRKVANIQHDIMQKFTTKLVNDYDTIVIEDLSVKSMQMSHIASKGLQRSMFGYFRQILTYKCDWYGKELILADRQYPSTQRCSKCGHIKSGNNKITLQGNATHQTKHNEYVCYSCGAVIDRDENAVANLLALI

SEQ ID NO: 2702 - protein, 388 aa, unknown
  TnpB Polypeptide
MFKLVDEFCFRSKNLYNVANYIIRQEFINNHNYIKYREMDKILQQTKEYKALMSQSSQCLLQVLDRSWKSFFASIKDWTQHPEKYLGKPKIPKYKKKGGVFAWFLKNNQTYIKDEYLCFRLKVFNGYKFKTNVRGRLISVRFVPRGSVYVLEIVYEVEVSENIPEIKNICSIDLGVNNFVTMVNNIGLQPIIINGKGLKSINQHYNKQRAKLQSELEIRHNQHWSNKLNAITLKRGNKIKNIIHHTSHYIIKYCNKNNINTLVIGLNKTWKQNCKLNGSTTQNFVSIPYNMLIKQLTYKCQDNGIRLIMNEESYTSGTSFLDSETPEKQNYDKSRRVYRGLFKSNNGQLINSDVNGSFQIMKKVFPNAFADGIKGCLTPVIINVVKTA

SEQ ID NO: 2703 - protein, 368 aa, unknown
  TnpB Polypeptide
LKNVQITNQIKLLLTFEQTILITNTLHEYIKTVNNVVNDYVVSGNAIKHTSKTVSADLPSALKNQAIQDAKSVFKKYTKNLKANAKKVIDDQKEIKVPILKKPVSIWNNQNYSIKFGYIAFPVWVNGKSTRIVVKMETTSYQLNLLTDKLGTLRITEKSGKFMAQIAVNAVPVVCIGTDAMGIDLGLKIPAVAITEKGKTTFCGNGRQNKYMKRKNRSLRKKLGKLKKQSAIKKLNNKEQRWMQDQDHKVSRQLVNFAKANNVSTIRLEKLSGIRQTARTSRKNEKNLHTWSFYRLAQFIEYKATLEGIKVEYVDPRYTSQTCPACGTRNKANDRKYKCECGFKGHRDIIGATNIISAPVVSGNSLSA

SEQ ID NO: 2704 - protein, 407 aa, Streptomyces sp.
LKRQRGHKARLYLTPDQLAQVDGQGHGARAMWNLLHELWQMTPKCQRSLGRMDQAIRQARKDIPWLGAVPAQAAQQVLKTCHRAWVNCWEGRAEAPAFKKRTVRRAIDIPQGRDLRIARLSRHWGQCWVPMVGLVKFRWTKALPYGKRADKHNKVTGARLVKEANGWHIVFRVQTEVDEPKPHEGPITGIDRGIAKPLALSDGTFREHEPWLTPGEAKRLKRLEQQRERRRAHRKPGERNSSRLKHTYDQIKQLRARATRRALDWQHKTTTELAGTFGVIGVEDLAITNMVKSAKGTVEAPGTNVRQRAGLNRSISGEAWGRTVTFLEYKLADRGGVLVKVPAPNTSWRCSACGFIAPGSRESQSRFVCKADGCGFVENADTNAARNIEHAAGHAVSGRGDLGVTRS

SEQ ID NO: 2705 - protein, 511 aa, unknown
  TnpB Polypeptide
VSRARKRPKDAPTFVASIPLEVAMSQVRTITTRFEGARRIYNACLGEALKRARWMRADMRWARVKAISPDDPARSAAFRELRREHGFTEQDLMSYASGCRVSWLRELVFAQEAQVLGRRAYEAVNRWVIGERGRPRFKSVSRGLHSLEAKDLTGALRIGQTSDGRAGLQWRQGFVLPFRLDEADPCHQWAALHVAAGRLLRCRITRARIHGRWTFRAQLVLDGVPLQRYEPGRQLVGLDIGPSEIAVVSDHGAFKETFCAELADQQGEIRRLQRRLDRQHHAGSSSCYDERGRHRRGGCDWWRARSKRADQTIVGLADAQRRLAEHRESLHGNLANRILGQGMVIKTEKISYQAFQRAFGLSVARRAPGTFMRMLSRKAASAGGKVIDVNTWSTALSQTCVCGARERKPLSQRVHMCCCGVAADRDVLAGFLVRHVDTTNDLHRLDAESAHVEWARRDDIRGWSVSRCSNRRVPPAVPVGHGKPSEPVGHTGISLSPTKTLRRPAGPGAAA

SEQ ID NO: 2706 - protein, 489 aa, Deinococcus sp.
MFQSAEATLRWSGLKLGLLYDGSDAYHVHAFQSRCKYVRLLRKVIKGKVRYFAQLVLEGSAFQKRPGKVANGCVVGLDIGPSSLAIVGDDAALLTSFCGPLKKDDREIRRLFRKLDRQHWANILGNFTSDGQVKRGIKLSWRSSRDYGRTRFKLLEMQRRLAEHRKTLHGKPTNDLLELGRVFRTEKLSTKAWQKVFGRSAGRNAPVMFSMLLQRKAERAGGQVQWTGSWGTALSRHCICGARKKPRSQRVHTCTCGVDGLQRDLRSAYLARHTESDTVGWRDVQASSEGAEVCLGSAHQHLGALQAARGRPRSSHPSRDQGGSLNLEGSTLRPSTKAHIVGEGRWADENPSLEAWGDLGLRFTVAPSGGQGMVMAGVCQPEQAAFFGVFCGQASAVEDRFEVAGLLRPRQAERLAQPVDQFISSVVPGAAQGPPELALRGFVVAQTGNRGGGNHVHFGTHAQWVKGRSARLPAVGSVFFSGASRTMEL

SEQ ID NO: 2707 - protein, 387 aa, unknown
  TnpB Polypeptide
MSIRSIALTLAPTDAQRAAFLALRRAFADACNHISAVAWDAQEFNRVRLHALTYYDLRAEYGLMAQHAIRAIGVVVDAYKADRATKRSFRPEGAVVLDTPRLYRLEGNHVDITTLDGRLTVKLNIGGIQRAQLGAATKLLEADLVCDRKGRWRLLVSARYLDPPPMPTEGMLGVDLGRRDIAMTSDGDSFSGQQVTAVRDRYARTRTLLQHNVSKGTRSSRRRGRTALARLSGRERRFQAQVNHTVSRRIVNEAARSGRAIALENLTGIRERTNHQPRDKMERRRSNNWAFYQLRGFLAYKAVAAGVPLVLVNPASTSQTCHCCLHSGERQGKRFACINLSCLWAGDADFNGACVIALMGVAVTNPRGPWLCCLYQPGCRAPESLAL

SEQ ID NO: 2708 - protein, 224 aa, Microcoleus sp.
KASRRWNKVNKRVAKLQRKAGLERRDWQHKVTSEIASCYDIGVTEQLNTKGMTRKAKKGSKREARRTESSARQTSRKKQKAGLNKSILSVGFGTLNKMLTYKIEAKGGLIIMLPTKENKPSQRCPKCGVVHKEWAELSNRHHACPKCGFEVPRDAGSAMVMYNVCTLRQPGLGTSLVSLGCLSSTSKTSKRKNTGSMKQLGQMRRQKSNRTAEPGETPSTCAAG

SEQ ID NO: 2709 - protein, 340 aa, Okeania sp.
LVNTKDKFREYKLIHSQVLQDCIKRVKLAFYRWLNTDKNGQKLGRPRFKKKNRYRSFTYLQIKQDCIVNQRINLPKIGKFKLIQNRSLPEDFNIKTVTISRKSDGYYVTLSLENKSVPSFNCEVKPTPENTLGIDMGMKDFLVTSSGESVPISQYYRKYQKGLKTLQKRLSRKKKGSKRWLKAITAVAKQHKKVVARCKDFHFKKANDLLTKAGVIAHENLNIKGLAKTRLSKSINDAGWGQFMMILTVKVVSGAPLLAKLLRRRQEANAGQKTIAVNPKNTSQDCSNCGEKVDKELSQRTHYCPHCCVVIDHDVFAFAQHPVGKHDLGNAAINIKNRAG

SEQ ID NO: 2710 - protein, 359 aa, Okeania sp.
MRTAYQYKLRPNKEQIATIETWLELLRRQYNYRLGERFSWWSENRCPVNACPLVTPIPQLRDNPNYYSQKKDLVNTKDKFPEYKLIHSQVLQDCIKRVKLAFDRWLKTDKKGRKLGKPRFKGKGRYRSFTYPQIKQDCIEENQINLPKIGNIKLIKHRPLPDSFQIKTATISRKADGYYVTLSLEDKLVPALTTKVEPKLKNTLGIDMGLKEFLVTSEGESIPIPQYYRSYQQRLKIQKKRLSRKKKGSKRWLKAVKAVAKQHKKADATPRRRQLACGMLTKRGNAHQAVADKRKDFHFKTANELLLKAEVIAQTRSGVPEANLNIKGLAKTRLSKSINDAIWGTIPVYFNCQSRKCWR

SEQ ID NO: 2711 - protein, 225 aa, Fusobacterium sp.
IKTKIKDKKALIEKVGWIKINEQIPSDIKYSNPRITYDNKYWYISVGIEVNKKQENLTDISLGIDLAICSNGQVFKNINKTIKVRKLEKRLKQKQRQISRKYEMNKIKKEGGVRCQFIKTKNIEKLENTTKLIHRKLANIRNNYLHQVTTSIVKNKPYRIVIEDLNVSGMMKNKHLSDSVRKQCFYKFRQYLTYKTELYGIKLVIADRFYPSSKTCSQYSSIKKI

SEQ ID NO: 2712 - protein, 377 aa, Fusobacterium sp.
MILTKKVRLYPTKEQEQKLWQSVGTARFIYNYTLAKQEENHRNGGKFIPDGIIRKELTQLKKTELTWLKEVSNNVTKQAVKDACNSYKRFFKGLANKPKFKSKKKSKPSFYNDPIKLKIKDKKALIEKVGWIKINEQIPSDIKYSNPRITYDNKYWYISVGIEVNKKQENLTDISLGIDLGLKDLAICSDGKVFKNINKTIKVRKLEKRLKQKQRQISRKYEMNKIKKEGGVRCQFIKTKNIEKLENTTKLIHRKLANIRNNYLHQVTTSIVKTKPYRIVIEDLNVSGMMKNKHLSDSVRKQCFYKFRQYLTYKTELYGIKLVVVDRFYPSSKTCSQCGSIKKDLKLKDRVYRCPHCGAVIDRDYNAALNLSMYKLA

SEQ ID NO: 2713 - protein, 460 aa, Hydrogenivirga sp.
MTAVKSLRCLVITLNDLPPEYKVVLGHLTYHSGKLYNQALYLLKNKLAKVNMFDLYNKLGSSIHLKSLQSRSAQIVLDELVRAYKNWFDYLKDPQRFKGQEIKPPKFRHKKRPHRTLTYDRTGFKIVGTKIRLSISKALITWLKEKHDIHVKYLWLETGLELEEKLIRNVQIVPKGQEFELHVIYENEVEIKEHEGNKVMTIYPNSGNFMVVGIEGVKTPYIIDGRGLKFLLRKYLKKIAKLQGRRDNLKSKGLPHHRVEERINKLWIKIKRLLRHYAHTVSNLILELALKYGVREIYVGDAVKNKNRESDLSSVADQIWSLLPHGKVKEYLEYKGEEYGIEVEYVSEAYTSGVDSTLSCGVSKDNYTPEARIERGLFRSSLGLLNADANAVRNMLNRLGRFDLTTALGKPVRLRVFCKLKGSSSTIPLYVGMGRSRGIVNLPVVVRDTMSVQTHTKLRP

SEQ ID NO: 2714 - protein, 398 aa, Hydrogenivirga sp.
MRLQRTLKLVIKPTEDQKQILLETIEQYKLAYNYACKIGWEAQTWNGVQLHNLTYYTVRDKTSLPSQLVISARVVTTESLKSAIKREKKGLKSRCPQSNNPAIRYGKRSYSAWLDREEVSLATIRGRQRFKIKVPDYFKQYLDWKVASANLKYDKKLKKFFLNVTVERDISDVGTAEFFVGVDLGLRKLAVVSTSDGRINKFFDGGYVRAVSEKYQALRKRLQSKGTPSAKRHLKKLSQREKRFRTAINHKVAKEVVELVPAGGVIVLEKLKGIRKRVKVGKQNRRWIHSWNFAQLQRFIEYKAKAKGIKVVYVDARYTSQKCSKCGHISKKNRKGQAHFVCERSGYQLNADLNAGRNIVKNYLASLEGKSGHGEASPSVWDAVNRADVGSVGCAMHG

SEQ ID NO: 2715 - protein, 206 aa, unknown
  TnpB Polypeptide
MLRKQCRFSSMKAGRFYVSVLAEIPDSKITTNDYSEGIGIDLGLKDFAIISNGKTYKNINKSARLKKLEKRLIREQRCLSRKYENLKKGESTQKANIQKQKLKVQKLYHRIDNVRTDYMNKTIAEIVKTKLSYITIEDLNVSGMMKNRHLSKTVASQKFYEFKVKLQAKCKEKRCEDLRSCIMKRKRKYVPKAISGIDDCGVYRNL

SEQ ID NO: 2716 - protein, 249 aa, Coprococcus sp.
MVKAIKVMLIPNNVQKTKMFQYAGASRFAYNWALAREKENYEKGGKFISDSELRKEFTKLRHSDEYAWLLNISNNVTKQAIKDACTAYKNFFKGLQKFPRFKSKKRSMPKFYQDNVKIQFSNTHVKFEGFSSSRKANKQKMNWVRLAEHGRIPTDVKYMNPRISFDGLNWWISVCVEFPDCKETLNDDGVGIDLGIKDLAVCSDAVKYKNINKSQKVKKLEKQKRRLQRSISRSYEKNKKGESYCKPIM

SEQ ID NO: 2717 - protein, 273 aa, unknown
  TnpB Polypeptide
VEITIPPVLLDKKVKEIRILPKANARYFEIQYIYETECIQINLNTQNALALDLGVNNLVTAVSSTGKSFIVDGKRLKSINQWFNKENARLQSIKDKQRFGKKPTNRQKAIARDCNNKVNDYMNKAARMIIDYCINNDIGTLIAGYNVTFQRNSHIGKQNNQNFVNIPYGRFRDKLAYMCELNGITYVEQEESYTSKASFWDKDNIPVYNNDNPKEYEFSGNRVHRGLYETANGKTFNADINGALNIMRKSSVVDMNILYGRGEVDTPIRIRIA

SEQ ID NO: 2718 - protein, 339 aa, unknown
  TnpB Polypeptide
MDNRTTVGYLYRASHQLTDAKQTNPFLTAVHSQVLQDVLRRLDKTFQHFFQRIKKGEKTGYPRFKGKNRYDSFTYPQSGFVLEKKKLRLSKIGCITIKLHRQIPVEGVIKTCTITRDVDHWYACFSVELPVLHSQKEIKNAIGVDVGLKSLLTLHTGDTIDNPRWFRNSENKLAKEQRRKDRKVKGSHNRHKQNTKVAQVHRKIRNQRKDFHHKLSRKLVDTYDLIVYENLTITNMVKNHHLAKSISDAGWGQLMCFTEYKAEEAGTLVEYVGAYDSTQRCSRCGKRVPKTLATRIHRCPYCGLVLARDHNSAITILHRSTHYLEARSLSGQELPVEPV

SEQ ID NO: 2719 - protein, 401 aa, unknown
  TnpB Polypeptide
VLRRQAYRYRLIPTTTQATLLRQFLGCSRLVWNAVLAENEYRFEQGDPLPLKLGAFCERLNALKARLPFLRDVHSQPLQQTLRDLARAYQSAFDPKVASEIPAFKKKRNGGGFRLPQSFKVERSGVYLPKIGWVAFRFSKRTSKRKVEGTVKNVTVRHEAGHWFVSLQVERDVVEPVHPNLAAEIGVDCGIARFAALSDGTFFDGASAFKKHKRRLATLQRRLSSKVKFSANWKKIKAHITAIHSRIANIRRDQLHKASATISKNHAVVVLEDLAIKNMSASAKGTIEEPGTNVAAKSGLNRRILDQGWGEFRRQLGYKLMWNGGTLLLIDPRNTSRTCNACGHVSAENRKTQAVFACVECGHAANADTNAAKNTLGRAGLARIACGDSQESTKQEALCIV

SEQ ID NO: 2720 - protein, 454 aa, unknown
  TnpB Polypeptide
MNYSIRKVELCYVNPGLKRAVKATLGIYRAAVKRLCEIAMSEWDSFDKLTSIQRLTLMESFIHNTKQNTAKYQDFDQSFYKFPSYYRRSAINAAIGQVSSYLTRKAQYDAKRKETISNGKRFQENAPTLNFDTNYYPSMYNKQMFLMDGNEIWLKLWIRNTWDWVKISAPTRDIKSLNRAIDQGGTLSSPQLLIKNKKLYLQFPVSFSKKGFPETDISKQKILGVDLGINHGAVCAAVDASGTIHERYFDPFVSERDQINHMLNRLKKISAQSGNGQSLAAFYTKLSGIKENYARQLAKWIVDRALESGVYGIAMEHLGRIKGRGSKKDRIHHWCKKRIFNLVKGMALRQGIRVFCINPKNTSALAYDGSGSVTRDHKNFSLCIFASEKQYNCDLSASYNIAARYFIRAYKKSIPETEWSQCVAEVPALAKRTDCTLSTLWKLDLHLHPVNTAA

SEQ ID NO: 2721 - protein, 342 aa, unknown
  TnpB Polypeptide
VVISGNRCRFLSYLWVGSRKTLEVDAGGKDIGFSPIRIVCCKHQEFNAKAEEAVTGDLRIIPMGNTFIVELTYRVGKDECKNSKSVSLNRNEALCCDLGIDNFATFVSTKPGVRPFLVKGKILKSINQRYNKQVAELRSKKHHEHIRIKGVKRYWQLQDLMHKASRLAVNFCLAHDLGRIVIGTNRNWKQRVSLGRRSNQNFVMLPHAKFIEMVRYKAEEYGIQVTVREESYTSKASAIDFDEIPDFDLKERKPAISFSGKRLKRGLYQSSKRHLINADINGAANIGRKELGDEWLKKLLELDGGVFVDTPAVVRNLHECVGVRQLLKMGARSHETVHVNAR

SEQ ID NO: 2722 - protein, 389 aa, unknown
  TnpB Polypeptide
LTSRKVSQRIPFTPSKTQAALLEQCFGARRFAYNQQVEAFNSYDRETNPRPKYPGVTDMKSENEWLRDSPVPSNALSGAIRDFRRAQSAYFRKAEYGKNRPRFASKGDNIQSFRNTMPMRRMEDDRYPLSKKLGSVRIRRRDRIRYPLESLSSWTVKRENGVYYLVLSFDVDVQPKPPVSGEVGIDVGVKDFLTLSTGEKINYPDRLRQLEEKVRWEQRKLSRRVKGSSNYRKQKAIVAKAYAKVRHFREDFQHQVSHRLIEDNQFIGMETLSVQNMTRKAKKKLDANGKPTRNGQSVKRTMNRNILRNGWSGLVDKLAYKAQWYGRTFVQVDRFYPSSRLCHDCGHKYDELRLSEREWVCESCGASHDRDVNAAINILGEALRLSQTG

SEQ ID NO: 2723 - protein, 493 aa, unknown
  TnpB Polypeptide
LVSLASEVRDISAYATYLVRNDEALGDELARITAVQPAAAGRRAGVTMPDFLVSGKSGRSRKEMLVQHRAVTEFRSWQERDKAANGESSKYVSQGWKRTVNASPPSYGEDYVNLGAVNKQYAAIENDPFADGEIVLKMVIQGTWHRLIFNFDNKRFTEGKVTLPVIKVEDGEPVFIFTVATDNPVVQFSGDYTIGVDVGTNNYATVVVRDTKTGRIVYETTLSQRVHSLWNSVRAAEAQVRDLKAKAATLLRDRQERMSALDEAQFHREAASRKKRELAILAAQEIAYLSHAWSNAVVAVEDLGWVANTMQNGRWNRGALIQWLTHYVSQNGGWVVTVNPAHTSQQCYKCGARVSHPTHEVSVCAEHGSMDRDVNAAVNIAARAVPKVEKARKTRAKNRKLQSQTALKTPPARTSLRYPGRDRTKSAPTPKRKKNRPRVVGEVILPLRPARAQADCLEARVLADQGTRNNLGTVQAALKRGNVAYKCRLCSLI

SEQ ID NO: 2724 - protein, 390 aa, unknown
  TnpB Polypeptide
MILAHKIRLDPNQKQRTYFAKAAGTARHAYNWALDEWKRQYEAGFKVTESGLRKQLNAIKREQFPWMLDVTKCAPQLAIKNLGRAFANYINGRAKYPRHHRKWKDDSFGISNDQFKIDGKRISIPNLGWVRMTEELRFAGKIMGAVVSRTADKWYVSVQVVMPEAKQIHPDACAGRAIGIDLGVHSLAVFSDGTKITGVKAHKALLARERRLNKSLSRKIGAKKGEDKSKNFIKTKEKLACLHARIANIRKDETHKLTTMIVRNYSTIGIENLNVAGMVKNHRLARAIMDMSFYEFRRQLEYKSDIFGCRFVVADRSYPSSKTCSICGYKWDNEFSLSIREWDCPKCSAHHDRDVNAAINLRNNAVSYTASACGELVRYHLCEAGTQHQS

SEQ ID NO: 2725 - protein, 363 aa, Richelia sp.
MFAVKRALKLNNKEATLMAKHAGFRRVVFNMGLSLRVQMYGESNFSDAKVISFIKKVLTNHVKKQPEFAWMNQLSSRVYQNALIDLNEAFGRYRSGKAGYPKFASRRDGQSFRVDSSNGKVLVKAGNTIKIPTLGTFRLQEPLRCGFASQTFTISKEGNRWFVSFCVDAQRLPVQQPQNSVGIDVGIKSFVTMSNGQVFDAPKPLKQAKTKLARLQRKASKQIKGSKNQRKTYNKIGKLHARIARIRLDFLHKLTTYLATTFKSIKIEDLNVKGMLANHKLAGTIADLGFYEFSRQLEYKCQMYGASLVLVARWFPSSKICSNCGHKQDMPLSIRIYDCPACGMSRDRDLNASLNILNWEPSA

SEQ ID NO: 2726 - protein, 236 aa, Escherichia sp.
VKRLQAFKFQLRPGGQQECEMRRFAGACRFVFNRALARQNENHEAGNKYIPYGKMASWLVEWKNATETQWLKDSPSQPLQQSLKDLERAYKNFFRKRAAFPRFKKRGQNDAFRYPQGVKLDQENSRIFLPKLGWMRYRNSRQVTGVVKNVTVSQSCGKWYISIQTESEVSTPVHPSASMIGLDAGVAKLATLSDGTVFGPVNSFQKNQKTLARLQRQLSRKVKFSNNWQKQKRKIQ

SEQ ID NO: 2727 - protein, 376 aa, Escherichia sp.
  misc_feature (237)..(283): Xaa can be any naturally occurring amino acid
VKRLQAFKFQLRPGGQQECEMRRFAGACRFVFNRALARQNENHEAGNKYIPYGKMASWLVEWKNATETQWLKDSPSQPLQQSLKDLERAYKNFFRKRAAFPRFKKRGQNDAFRYPQGVKLDQENSRIFLPKLGWMRYRNSRQVTGVVKNVTVSQSCGKWYISIQTESEVSTPVHPSASMIGLDAGVAKLATLSDGTVFGPVNSFQKNQKTLARLQRQLSRKVKFSNNWQKQKRKIQXXXXXXXXXXXXXXXXXXXXXXXXXXXXXXXXXXXXXXXXXXXXXXXQLEYKQLWRGGQVLAVPPAYTSQRCACCGHTAKENRLSQSKFRCQVCGYTANADVNGARNILAAGHAVLACGEMVQSGRSLKQEPTEMIQATA

SEQ ID NO: 2728 - protein, 412 aa, unknown
  TnpB Polypeptide
LLVVRTAYKCRAYPAPEQASVLNRTFGCVRVVWNRTLAWRHQRYYGEHVKTGFTQANAFLTAMKATEELAWLNEVSSVPLQQAIRHQQVAYTNFFAKRARYPRFKSRNGRQAAEYTRSGFRYRDGALWLAKMDTPLEFVWSWPDIDPAAIEPTTVTVSRDPCGRWYVSFAVEVAGPEQLPATGRAAGVDLGIKDFAVTSDGEKIANPQKLARRGQALARYQRRLARCQKGSANRAKAKAKVARAHRKVRASRADFLHRASTRLVRGHDVIVVEDLNVAGMVRNRSLAKSITDCGWGTFRQMLEYKAAKAGRHLTVVDRWYPSSKTCSVCGHLLASLSLSTRTWQCPSCGTRHDRDINAAKSILAAGLAVAGGNPGDACGADVRRHGTPRPRSAVKQEPQPVRAGIPVLQGGE

SEQ ID NO: 2729 - protein, 503 aa, unknown
  TnpB Polypeptide
VTRYRFATDNGVDVEQVSRDLTRMVTWMAQSEREVLASSEFHDLAVKVLRGGRPTGSLNSWGRKRLSRYDFEFQKHNMNEMLVSNVVSTLELYTMSVGLFQVMSTHSKETRPERILSYYRGTYPGAPQPTSGMVRAHLRRYHLKGDRKASLPGVSAKLNLAVCDTYFAPKAFRGDSDPLDVVVQVKIPSHGLTKLYFRLPDNELRFSEGKVCRPTIRLNNKGQVVFDLAIEHEAQQRDTNKVVGVDLGKVEPFVATVIDPRAKHRSTPYHANYKRRLGSLVKKEQQRRTLATHLYERANLCEKHSRDQHALVLRTEAKRVSAKATRIKHEISQCIASQIVSVADKNNAHVSLENLSWLDAKGGRWPHAEIQHRIESTAKRYGLKVVRVSAKDTSRTCSRCGGKVSNNAKSRVGTCSVCGFSLNRDVSASREIALRAVSNARNRDRMRSLLRQRALERSSTVTRQSKPVTALSGIQGHTGTSNNRLEATLMMVRENLDSRGSPT

SEQ ID NO: 2730 - protein, 510 aa, unknown
  TnpB Polypeptide
VKYYDAVTRHRFTTDGGVDVEQVERDLAQMVAWMAESEREVLASREFHDLAIKALQGDRPTGSLNSWGRKRLSRYGFSFQKHNMNEMLVSNVVSALELYAMSVGLFQVMSTHPSTTKPDQILSHYKNTYPDAPQPTSGMVCSHLRRYHIKGERKASLPGVSAKLNLAVCDTHFAPKASRDDNDPLSVTVQVKTPTYGLTRLYLRLPENSERFSEGKICRPTIRLNNKGQVVFDITIEHEIDASQTKIITGVDLGKVEPFVATVIDPKSKHRSAPYHANYKRRLGALVKKEQKRRDLAAHLYERANLCEKHNRDQHAQVLREEARRVSAKATRIKREISQCIASQVVEIADRNDAHVSLENLSWLDAQGGRWPHAEIQSRIENTAKRYGLKVTKVSAKDTSRTCSRCGDRTRNNTSTRVGTCTTCGFELNRDVSASREIALRAASPSSRTRERMRSLLRQRKEMRSSAVTRQSKPVTALSRIQGHTGTSEIKTEATLMMVRETLDSRGSPT

SEQ ID NO: 2731 - protein, 512 aa, unknown
  TnpB Polypeptide
LRGGSPEVPRGAVSRTYPRTPYAAFSKSGDPLNLKEVLDGIRADAELVAHYALREMTEQNLALVTYFDRLKPSGAGYMMGLKLPVEVKERFRSGSSRFERMFREQVVTNLRSWATRAGAVNQNYSGYVSTGWKRTVRDSKPSSLQPRLSLSAADRQYREMTVKSDRIELKVIVQGQWVVLYFPVPPQLLEDGCEPGVPDIWVDKNNRVMFGFHGKTDPGRPKFSERYIIGVDVGVTNPAAYVVWDTKNKEIVEQSLLDQRARSLSNKIKRGQVQVTSLKRKGKDEEAVSHRAHLSNRRKELSILIAQEIADAAWRYDNAIVSFEDLSHIKNTMKFGRWFRGEVHRRTRDMVESDGGRVLRVNAAFTSKRCHVCQATLDMSDYSNPVCHSCDITHHRDLNAAANIAQRANHAKACQTRRRHATKTKRIRRSKCHAKPLKHPGTKNKPTPKAPQNRPKIHPSVTPSREVSKGMCPADTRVSAVDHNVWFQTTSGTTIPKANLSANTVGGVHSKE

SEQ ID NO: 2732 - protein, 502 aa, unknown
  TnpB Polypeptide
VSRTYPRTPYAAFSKTGDPLNLDEVLDGIRADAELVAEYALRELTEQNLALVTYFDRFKPAEAGRRMGLFLPSEVKNRFRSGASRLEMLFRERVVSTLRSWAARVNATNGTHNGYVSAGWKRTVKDSKPKDLQPRLSLSATNNQYRRIHVQEDKIILDLVVQGQWTTLHFPTPPQLLEKGCETGVPDIWVDNQNRVMFGFHGKTNPGRPEFSSRYVIGVDVGVTNPATYVVWDTKGRKVVDQSLLGQRARSLNNKIKRAQVQVSSLQRKNRPEEAASHRGHLSNRRKELSILVAQEITDAAWRYDNAIVSFEDLSHIKNTMKFGRWFRGEVHRRTRDMVEADGGRVLKVNAAHTSRRCHVCQSDLDMQDYSQPRCTACGITHHRDLNAAANIAQRVNVKKACQTRRRHATKTKRIRRSKCRVKPLRHPGTKNRPTPKAPQNQKKTHTRPSFQSREVSVRMCPAESRVSAVDHREWFQTTSGTTIPTRDLSVANTVDVVYPKE

SEQ ID NO: 2733 - protein, 455 aa, Euryarchaeota sp.
VALQAYKFRIYPSRKQQDRLLASFDLCCGIYNILLSRAREAYEKDGTNLCGKAGMCRIIKEVKEENPEFYGIYSQVLQNCADRLAKAFNNFFGRAKRKKRGEHIKAGYPRFKKRVRSITYPQSGFSIDERKLKVSKIGRIPIVLHREMEGRIKTLTIKRVPSGEWFAILSCEVPTENTDLSKTNHDSPEGESVNREHPNKDKEIGIDLGISSFATMSDGVKVGNPHFLKKAEKRLKRAQRKLSRKEKKSKNRKKAGHRVAVLHEKVGNQRSDFLHKTARAIADSYGLIAVEDLNVKGWVRNRRLSKAISDAGWSEFLHLLSCKAERAGGTIVKVRPNNTSQTCSACGRALEEHIPLSERVFRCPFCGHEEDRDVNAAKNILERAREARPICQRQIMRIYRFRRSDGIMISPCEIGFFGRIGIIYRGAHGNQRLRRYRPLLLERIQEQAVSLNKEL

SEQ ID NO: 2734 - protein, 138 aa, Oceanobacillus sp.
LDKHIKLPKLGLVRFAKSRELEGRIVNATIGRNPSGKYFVSIVVETEIGHDEKTGSSVGIDVGLTDFATLSDGTVYENPRFFQTLEKKLAKAQVILSRRQVGSANWQKQKRKVARLHEKIANKRKDMLDKISTNKETS

SEQ ID NO: 2735 - protein, 229 aa, Oceanobacillus sp.
MSLDLGMDNLATIVTNTGRKPVVVKGKNIKSINQRYNQLKAHYHGILRQGKNTNEGLFTSKRLEKINYRRFNQIKDLFHKASYRIEKIALEEDIDTIIIGQNKAWKQHAKMGKRNNQSFTTIPHRLLMEMIEYKAQRHGIKVIMTEESYTSKASFLDQDEIPVYGEKTSKKAFSGKRIKRGLYQSKNGVMMNADVNGAGNIMRKIFREAFEEPFACIEMLLRPAAIILK

SEQ ID NO: 2736 - protein, 494 aa, Oceanobacillus sp.
MTRKHTPSYTIEFPLHIPLWQQHRLEKKFNIARMLYNACLGEALKRHKTVKSDKRYRALLNEPKSKERQKKLADIRLEYGFSAYGIHHFIKKAQHKFKEHIGSLEAQKLATRAFQTVEKLHFGKAKKVHFKHANDDISIENKSNQTGLRYREGEILWGDKPTKRIPKPKNWLCMPVSPKDDDEYAHLALKDRTKYVRILKREIRGKTRYFVQLIQEGYPPAKRNRKVANDETKRIGLDIGTSTIAISSDNQVELRELAPACHHDEKELRRIQRKMDRSKRSTNPNNFHENGTIKKGRLTWNYSKRYERLREKQKEHYRKAAGRRKMSHEKLANDILSLGSDIRVETMRFQSLQKRAKNTTRNNTNGKINQKKRFGKSIAKRAPAMLLTIIERKLNYRKIEMKKVDTYAIKASQFNHVTGKYEKKQLSERWNDFGEFRIQRDLYSAFLIANTNETLDAVDIDLCHAKWNRFIELHHSEIERLKQKGSKTILSFIA

SEQ ID NO: 2737 - protein, 486 aa, Oceanobacillus sp.
MANYQTMQIWVKKNHRMHGYFKEMCQHAKNMHNTTNFYIRQVFTAFTQEKAFQPLQEEVLDTIQKHMPIINANQFVVYQKKVVKEHSKPARERKEIKCHLFKEPSRENPYVDYNFLDALFKSMAQEDYRSLPTQSSQGVMKTVFQNWKAFYGSLREYKTNPSKFKARPKIPGYRRKKEKEVLFSNQDCVIKENKFLKFPKTKERLNIGKLGFTEGRLKQVRLIPKYGHYMVELIFQMPSEQEMKASKKRYMSVDLGMDNLATIVTNTGRKPVIVKGKNIKSINQRYNQLKAHYHGILRQGKNTNEGLFTSKRLEKINYKRFNQIKDLFHKASYRIEKIALEEDIDTIIIGQNKAWKQHAKMGKRNNQSFTTIPHRLLMQMIKYKAQRHGIKVIVTEETGRVSRMSMRRHLPQNLPYNQYLSMLFSWIIPHFLNVMKLVMIINECYFISPSTCFSQSSSTPQAISGSPFNDFIVPTYTLFVDLPISI

SEQ ID NO: 2738 - protein, 526 aa, Bacillus sp.
MKVTKICLIDDENAEELEKLNRLMAIFCAAWRYSFNRLLEGEQSGRLIKSVSALFHLNKRYAEDAVMQAQAIISSQKELLPLRIEGIQGKIKKTCKKIEDYQSGRKRPKKVPLEICLKGLSARLEKLQIKKSILLKQQNDQTIPTVIFGGKRNFYERLKGNISRDEWRDLRSNTLYSRGDKSKKGNLNTRIVFDDEEQQFYLEVANPLQVEGRKKSPRLRLKLLIPDKFFNEIVEIVFPNEVGVTSKKKTLEEYSPYSIELKRKNNKVYVHITYGEVVHGSIRNGNEIILSDLVAGIDVNIDRIAVSILTKQGNLLESKTFYCHEMEYVKSNRRSNISGEIAKDIIQYLLNWNVGAMVIEDITLKQDHDTNKRFNRLVHSFAKTKIQKSIISRGIKFGFKIKKVNPAYTSVIGRFKYSKKYGLSVHEAAAFVIGRRGLGFDERIPQEILNQVRTLVKPKLISILGSMEESEKRSKNGKHRRKYMGMLLRNIETFKENHSWKLWNVIHQTLIIKNQELQFKEVKSWY

SEQ ID NO: 2739 - protein, 372 aa, unknown
  TnpB Polypeptide
MESCNIMVYCACKHRVYPNQKQERLFNEYLGHSRFIHNNIISEIEYNRRICNLFNVRAPYVNRSYVESIFNYLRVFYPFINDLDINTMQACYNPVLIAYENFFKRGFGHPKFKKKNAASQSVKINNINNRIRVENGKLYWKPFGWINLKGYRSEITGKIKYIILKKQNSQWFIIVQYDTQLPEPLKKTGKEVGIDLGVKTLATLSDCKAKATLKLTETNAKIKKTQKELKRKEYGSREYKKVLKTLHKHINKRNNIKREYYHKISKEIVCEYDVIKMENLNLKEMILDPDYSKGLHEVSLGKLKNMIKYKCELYGKTYIEIPRYYPSSQICHVCGYRNTNLGIEERKWQCPQCGAILDRDLNASINILNYGK

SEQ ID NO: 2740 - protein, 186 aa, Okeania sp.
IKTFLSQQKANRKVDLLNLLNLKVGNHAQTARFRKGGFKIGQHKVYLAKIGKLKIVWSRELPGPPSSVTVIKDSANRYFLSFVVEIQPEVLPQTDNSVGIDLGIKTFATFSDGTKVDAPKPLKKRIKKYIKLSKSLSHKTKGSKRYEKARVRVAKFHAKLKDTRTDFLHKLSTEIIRENQTVVLEV

SEQ ID NO: 2741 - protein, 379 aa, Succinivibrio sp.
MQYTAYFFRIYPTDKQKELFVKTFGCARSIYNKMLADKIEHYKQTKKMLKNTPAQYKKKFPYFKEVDSLALANAQFHLEGAFSNFFQNPKFGFPNFKSKKNSRRSYTTNIVNNNIELKNGKLKLPKAGLVRVKQHREVPEGYILKAVTVSQKGSGKFYASILFEYEEEITNKEPKSFLGMDYSMHDLYVDSEGNKGEYERFYRKSEQKLKREQRKLSLMKKGSRNRAKQRIKVAKVHEKIANCRKDFMQKKSRQIANVYDCVCIENLDMKGMSQSLNFGKSVHDNAFGKFIEMLSYKLQRQGKYLVEVDKFYPSSQLCSVCGYQNKETKDLSLREWICPHCGTRHDRDINAAVNLLKEGKRLLLNQIKKNRGALGDSLL

SEQ ID NO: 2742 - protein, 284 aa, unknown
  TnpB Polypeptide
VHETTHRVGFVRLAKIGNVRFVLSRPLPAEPSSVTLIREPDGKYYVSFVVDVPAENIQIPEPSAYAVGVDLGLNRLAVAVNSEGERVFFENPRPLKKAAARLATLQRQLSRKKRGSNRYEKQRIRLAKAHAKVRNTRSHYAHQVANKVVDENQVIALENLNVAGLSRTRLGKSVLDASWGLLRRLIEEKADERHRMVVFADRFAPTSQLCSVCGEPGGRKPLNIREWACTKCGMRLDRDANACVNIMLAAGLAESLNEQKRDVRRLLAGAVAVDAVNPPRAAYL

SEQ ID NO: 2743 - protein, 443 aa, Stackebrandtia sp.
MSECSGINQGFTLCLVQLRYRYRVYPSPGQRIALAKAFGCARVVFNDAVAARKQAYRSGSPYPTTGELSKKLITEAKKTPGREFLAEVSAVVLQQALADCDRAHRNFFDSVKGKRKGAKLGPPRFKKRSARQSIRFTRNARFRVLDNKRLRLPKIGDLDVRWSRRLPAEPSSVTVVKDSTGKYFASFVVDIGEPEPLPDVADDTGIDLGLSSFAVLKGRVITSPKFFRQAERKLRKASRELSRKQQGSKNRAKARVTLAKVHARIANRRRDFIEQATTAIVRENQAVYVEDLNVKGMATRKGRRGKSVHDQALGAFLRALETKCARYGRGFARVDRWFPSTRMCSACAAITGPKGLTGLSVRQWTCPCGTHHDRDVNAQINIRNEGRRILADLAAGQAESLNACGAQIRPDIPAPRRETGTHRSDLDNRADTRIEDTVGTTAL

SEQ ID NO: 2744 - protein, 391 aa, unknown
  TnpB Polypeptide
MFRRMLNDSIRIGLSNDAFSLRRLSLLSYSQLAHYGSPSYYKLCSISRAAGILAARKKSLKRGFPTREPYAIRPQLTSCYGFKIKNGELEIPTSRGRRSQIPLTKHTQEAVSQPGVTVRSFTLTRTRLSLCIARDAPKIECTSTVGVDRNLYDLAVGNDDQTHHYDLSETVRIAKVTTRIVSSFKRNDARIREVVASKYGRRRFVRTRHVLHNVTKRIIAVAVQQRTAIVLENIEGIRCLYRKGNGQGRKYRGRMNGWSFGEAQRQIEYKARWVGLPVIRLSRRETRGSSVTCPRCGERLQSDKRLNRKLWCQKCRLVMDRDMVAAINLARRGRVRFARSRPPIPLEAKGRAVEAVKENPTPTVISGVDAPKPTPHTASWSNHPVVTPGSS

SEQ ID NO: 2745 - protein, 198 aa, unknown
  TnpB Polypeptide
VKRKRTGKWLAIFQVEDSPIPLPSTNKVVGIDVGIKYFLTDSDGHQAENPRYYHKTLQRIRLFQRSFSMKKKGSSNGRKTLLKLNRAYEKLTNQRNDFLHKLSRFYVRNYGIIVTEDLHIANMVKNHNLAKNILDASWWKFFKMLSYKAERAGRTLLKVKPAYTSQENKELIEDRDLRGSINVLNRGLLGVGTTLSAC

SEQ ID NO: 2746 - protein, 417 aa, Nocardia sp.
VRKAYKVRVYPDTEQAAQLSRTFGCVRLVWNKTLDARHRAYHAHGTKTAYRETDAALTVWKKTEDLAFLSEVSSVPLQQTLRHQHTAYASFFAGRAKYPRFKSRNGRQSAHYTRSAFRLRNGKLTLAKHSKPLEFVWSWDVDVLADLNPTMVVVSRESDGRWYVTFAVDAGDSDHATETGSTVGVDLGVKDFAALSTGEKIANPKNLDRKARNLARYQRQMARKQKGSANRRKARNKVAGTHRKIRNARFDFLHRTSTRLIRENDVIAIEDLNVAGMSRSVKGTIDKPGRNVRAKAGLNRTVLDAARRQLEYKAERAGKRVVVIDRWYPSSKTCSACGHLLSSLKLSVRHWRCPDCGTRHDRDHNAAKNILAAGLAVARESPGDACGAGVNLQGSSLRLSATKQELSGVSPMGIPAL

SEQ ID NO: 2747 - protein, 442 aa, unknown
  TnpB Polypeptide
  misc_feature (33)..(33): Xaa can be any naturally occurring amino acid
  misc_feature (65)..(65): Xaa can be any naturally occurring amino acid
  misc_feature (86)..(86): Xaa can be any naturally occurring amino acid
  misc_feature (271)..(271): Xaa can be any naturally occurring amino acid
  misc_feature (287)..(287): Xaa can be any naturally occurring amino acid
MEVIRAHVYTLRPTPEQKMLLAQTAGVVRLVYXLALEQRRIWSGKRYAGGARRSFGAKGSSRELXELRAAYDWIGAVSQTAQNQAXMDLDRAFANFFEGRASYPTPRRKGVNDAFRQAGREISVRQLNAKWSEVRIPKIGWIRYRDTRPLRRGERGAVDIRNATLRRGAGGGWEVSISHRWDIPEDDIPTGAVGVDRGVAVPFAMSDGTQVSLPATMAARETALRRAQRKMSRKRRGSRRYAKARARVARLKSSNAKARKHLAHVTSRSLXRDYGLIAIEDLRTKNXVASARGTLAEPGRNVAQKRGLNRAILNVGWHQFETMLGYKLEETGGVLVKVPAAYSSQECAACGHVDKENRKSQAVFVCIACGAADNADTNAAKVIRDRALRGETAGTRRWNTPLLDVEGTAIAPVEASTPCAGKGLNAPLHASEIHLSSGGGRC

SEQ ID NO: 2748 - protein, 374 aa, unknown
  TnpB Polypeptide
MKMRLSRMQIKKTIKCKIHNLTNIKEQILTTEYNDYQIICNQIQQCVNNDIEPKWKWFKTKTRHCSYLSGARKSIKEQHRNLNKQPVYLRNDCFNIIENKNKISKYWFKLPTKRKWGGIYLPIIIPYKYENLLSNKICDSKIIKKKHDWFLLLTIKKNIELKKSYSNILAIDLGDKVIATISGSFDNQKPTFYGRDVREIRRHYAWLRKRLGEKKKLKVIKRIGNTEQRKVNDILHKISRQIIDKAKETNSIIVLGNLKGIRESTKGKGKRFNRIVSHMPHYKLSEYIKYKAGWEGIMTIIIDERGTSHTCSHCGNKGKRPYQGLFICNSCGYQVNADYNGANNIAQRGLEAIPLLDGVRLTEPITLGAWQHGH

SEQ ID NO: 2749 - protein, 509 aa, Sarcina sp.
MHTIKFPIVTGREKEKILAKGFRAMARFHNRMVREARRRLRHLQHDPEYQRLKAEYGQAAERKEEIGKELNQLTKQYGLIEKDLWKYASVHQKKHPHLISSHQAQEETSRVYQGVCKVLYSDGKELHFKRWDDIHTIASKSWNGLRYYDPYHTEYYKKNTIPKYQNEIEYHGWQFKVKINWNDPYVKESMQHEISYVQIAREMFPSGWRYYVILYLEGDAPVKQRSREGVAGLDPGVSTAAVVYNDHCELIELAPDCKSYNRRIRILQNKIDRTMRIHNPQNYNEDGTIKKGDLQWNISKTCWRDKRKLTTLYRKKAAYIKQSHERQINVLMKDVNTFILEEMNFKALQKRSKKDTEKTEKPVEVKKKDGTKKTIRKNKRKRRFGSSIQDRAPAGFVTILKRKCSQAGGAVIEVSTREFKASQYDHSKNQYIKVPLSQRWKTIKNEKGEECRVQRDLYSAFLLKNSNKNRNTPDRKRCIKEFDRFVDHMNECIEGIKQTNTSYPACFGF

SEQ ID NO: 2750 - protein, 368 aa, unknown
  TnpB Polypeptide
VRKINRAVKIRIYPNKEQITQIEKTIGCSRFLYNRMLADKIRHYQEEKKMLKNTPAGYKKEYPWLKEVDSLALANVQLNLEGAFRKFFREPGVGFPHYKSKKHSRKSYTTNMVNGNICLQDRFLKLPKMQPVKIKLHRMIPEGWKLKSVTVSREPSGKYFASLLFDCENQTAEKRQAEKFLGMDFAMHGMCVFSTGERAGYPMFYRNAEKKLAREQRKLSRCEKGSRNYQKQKKKVALYHEKIKNQRKDFQHKLSHSLAEDYDAVCVEDLNLKGMAGGLHFGKGIQDNGYGQFLSMLGYKLEERGKYLIKVDRYFASSKICSVCGHKKKELALSERIYLCECGNRMDRDVNAAVNILKEGKRIYKKCA

SEQ ID NO: 2751 - protein, 378 aa, Halolactibacillus sp.
MYKGIEGKIYPNRAQQRLINQTFGHSRFVWNQMLAMLNTRYDNNPDAKLLSYNALSILLTQLKKEHPWLKEVDAKALQNSVKTLRETFDRFFNKQSNYPRFKSSKHYKKAYKTLERTIRFNANQRYIKLPKLGWVKCSMSLNDINNDNITSVTVIRKSNNNYYISVLVEIENQALPKTEKAVGIDLGLTDLAITSDGVKYPSLYLHRKYKKQLHYWEKRLARRRIQAKKDGKDLRYAKNYQKARIQVAKLHQKMKDTRKDYLHKVTTELVETYDVICIEELKTSNMIKNHNLAQSIASQSWRMFRNMLAYKCLTYGKELIIVNPYKTSQVCSSCGVETGKKPLSVRHFTCPTCHTQHDRDINASKNIKNIGLGMSLSQ

SEQ ID NO: 2752 - protein, 594 aa, unknown
  TnpB Polypeptide
MSRVKLDLIVKNIEYVNIMCYNLLWRNKMGIIELDNGYYIELIEDGKCKDDRIQNIQTIKLRESRNKGCLLLYIDFREFDKDRYKKILRKLLHIKKMVKFLKINIGVNQDSKIKIGYINNYDENNQYHQEFIQAINAILFNTKKERYNYIYDTVCNYLDGYFYGKNLCDFKDNQCGEKRGTTSRIGCCHHFRVKSLGPFTKLVPCEHLKDDYTCGAKCISCKLFTCDYLEKKGVKFRIYPNREQRNLIDRTLGCSRLIYNKGLAMREDAFKSGEKCGYKQTSAMLTALKQDVNYAFLKEVDSIALQQALRNLDTGYTNFFEHRAAHPKFKSKKSAKQSYRTLNIGNGIRISNKRIRLPKIGWVKVHQSMEIGAIHNATVVRTATGKYFVVLNVEYDPQPMPNNGCVVGIDVGLKEFYSDSNGTVVNNPKYLEKKAKKLAREQRRLTRKQKGSHNREKQRIRVAATHEKIANQRNDFLQKQSTMLVRENQTICIEDLNVKGMLRNHKLARAISSVSWSSFFGMLEYKAYWYGCTVIRVPTFYPSSQTCSCCGYKNVTVKNLSIRQWECPSCHTVHNRDKNAAVNILHKGLEQKSA

SEQ ID NO: 2753 - protein, 568 aa, unknown
  TnpB Polypeptide
VDRKTITKGRVSEMNGQTVETRSIAVSYKYGLLAPMDWGDDCEEEILLQAAFWNRLVELENSYRQRVRAVECEDPNVVRLETERLALVSERERLNVKRNGERQAARSKIATPAIDRQIADVSSQLKGVAARCRETRRLAHEARREQLRLVNAERYMAVSQARRESGLFWSNYNAVIESYEVARQQTLKRGVDLRLKRRSGNGRITNQIQGGIRYEDLMAGRHSQVRIGPPPPGMRNKRGASLTMTVHRRGGIRRNVTWPIILHRPLPADAIIKVVVVHRRRRSDRWIWSAVFVCSCRADASERTGPRVAVNIGWRNTPAGIRVACILSEGDISPQYVMLPNQLAQGVQLCDKETSERDKDLNTVAALIRALDLAGMPSELAESTNAVREARRHNAPRFVRLLRDWREFAPNWRPADLEMLDDWARRDRRRWHNREERRAWVSDAREYHYRQEVRRLLGRAREILINAHDMSETARVKDSELPLPARRLRFIAAPSVFRLVLLNYARKTGIRVTVVERPHDTCVFCGGQLAPPDRAALWWKCDTCGCLFDQDEHYCRLLLVEPPYGCDA

SEQ ID NO: 2754 - protein, 360 aa, Geobacillus sp.
MLCTLKIKLVPTLEQFHALLETMKRFNQACNYISEIAFRSRTFSKTKIQRLCYYDVREKFGLSAQMTVRAIGKVSESYRLDKKTLHNFKETGAIVYDERILSFKGLEYASILTLQGRMEIPMVISRYHQGLLCGNRVRGQADLVLQNGIFYLLLVVDVPEGQPNSENGFIGVDLGIMNIAVDSTGEVFSGSKVNGLRRRHAKLRAKLQKKGTKSAKRLLKKRSKKEKLFARDVNHCISKKIVEKAKALGCGIALEDLKGIRQRTEKTVKKQQRRQHSSWSFYQLRKFIEYKAAIAGVPVVLVHPKNTSRTCPVCGHVAKENRPSRDQFCCRACGYAAPADNVAAENIRRAAVNQPNAAAN

SEQ ID NO: 2755 - protein, 421 aa, Geobacillus sp.
MEAYFSFCNRHFYYLFCFHENIRRKPTALAVGGRRGLYFQYILNFFVQYKYTGFRKVGESRMLCTLKIKLMPTLEQFHALLETMKRFNQACNYISEIAFRSRTFSKTKIQRLCYYDVREKFGLSAQMTVRAIGKVSESYRLDKKTLHNFKETGAIVYDERILSFKGLEYASILTLQGRMEIPMVISRYHQGLLCGNRVRGQADLVLQNGIFYLLLVVDVPEGQPNSENGFIGVDLGIINIAVDSTGEVFSGSKVNGLRRRHAKLRAKLQKKGTKSAKRLLKKRSKKEKLFARDVNHCISKKIVEKAKALGCGIALEDLKGIRQRTEKTVKKQQRRQHSSWSFYQLRKFIEYKAAIAGVPVVLVHPKNTSRTCPVCGHVAKENRPSRDQFCCRACGYAAPADNVAAENIRRAAVNQPNAAAN

SEQ ID NO: 2756 - protein, 456 aa, Geobacillus sp.
VKKKLKTERTKLTKLGKMKESCIKGNLRFPKNTNFVLHKSGIISLELKNRSLIWMNSYLFEHRYLDVEWKRTKAKIGRLTHRLDRLEQKKTKLKEHIPSAVFGGKKLFKQQFTKEEFIKDHEAWRKLFLAARNKEMIISGRKDAGSGNFVFHYNPMTKELHMNSITGKVVTFPEVIFPYGQEMVDKTVTDQIQCKNKKEYGKPISWSIEDHGEYYIIKCLVEVESNPYIHFSTSDGVIGVDCNYHHIAWTDVSKDGNFLESGKLSFSIEDKTSGQITKIIEAEAIALVDIAVRKKKPIVLEKLDTTLSKTGDRYGNKKANRMKSMFAYRKMIQAIKSRADKMGVAVIEVNPAFTSVSGKLKYMRKFGISIHQAAAFTIGRRGLGYKEKAPKVLKKYVPKDASHHWKHWSILDKKFSVRTHILYYIFNVNQPYQGIDVFHPSLSGEEKHQLIKALSQ

SEQ ID NO: 2757 - protein, 385 aa, Geobacillus sp.
MKTVRVMKIVSNDETHLRSLDELMRVFGSAKRYAFNRLLEGRNAKDLIQHLLRQFQLNKRYAEDAVLLAQSLISSQRELLPMRLEDVQAKIEKTEKKIDDYQHGRKTPKKVDLQTCLDGLHRRLEKWKSKEDELKHHLDQGTIPRVIFGGKQNFYKRLKGKITNEEWKDLRSNQLYARGDKSKKGNLNIRLVYDDHTYKCYVEIANPLGQPKGKHAPRLRLPVLVPEKYEEEIIDLVMGEQVGVNAEEKPIIQYQPYTVEIKRKNGEYYIHLIYEEKVYGRELAYDEPIQAERIAGIDINIDRIAVSIVSKQGNFIKSKVFYCHELEYVRANKRNNLIGETVRDVYDWLLQENVGAVVIENIRLRQQHDTDKRFNRLAHHFKKKN

SEQ ID NO: 2758 - protein, 471 aa, unknown
  TnpB Polypeptide
MGKVRTSLSLSSFEVINSSKEKVIENLTEMIHQIQDAESSFVNSPEYQNLAESILSGQVKVSGKKNRCGRGVVPDVVFPCNSYNMNEMLRSSVMSRAEIYAMSYGLFSVMADNPAETNARRVKDLFKEKYPNSRVPHPYEVSSHIHRFHDKNQKTPCLPGASSKIDLSNCDGHYLKLSHTDREIVLKFRNLPTAGRQVLLRFTIPEGDRFQGDKISKPVVQIVNNRLVFKFTVEYIVPDITRTKVMGVDLGKVEPFVATIIDESLHWYSAPFFAADRVKDLGRQYDNLMSRAAHLRDKENRCRASNHLDKANALAQHQQGIRDKARRVKDEAMHQIGHEIAETAYRMNAEVVMENLSWLGSRGRRWNFREIQDAITNSCNRKGVPVSFVSARDTSNTCTRCGSSVRHTGRDNVCTSCGFRINRDVAASREIALRGTDIRLREPLRQRRPGVPVPHRAALATTTSGTSPETT

SEQ ID NO: 2759 - protein, 391 aa, unknown
  TnpB Polypeptide
MEQVLTLVCKLQPTDEQAQHMDETLTRFADACTYIHTTLPANIRNKDRMQAMIYYDVRSRFQLSANLAIQAIRRVAMNRKAAHETGNMVETFAPTSIQYDARIFSFRERDWTVSLTLLHGRERLALSLGHYQRGKLKGHQPKAAQLCKHRDGTYAVHIQLHTPVDTPPRPDKAIGVDLGRRDIAHTSTGQHWAGDEITRVRDRYARLRRGLQQKASKGTRSTRRRCRQLLARLSGREKRFQRHTNHVISKALVVEATERRAMIVLEDLTGIRARTNTQPRSKTERRRGNSWAFDQLRQFVAYKAVLACIFHFLVPPAYTSHMCHACLHIGQRHHKHFACTNPACGWSGDADWNAAQNIALLGLSLSKPRGPWLSCELQGSQKPQALEAWVA

SEQ ID NO: 2760 - protein, 731 aa, unknown
  TnpB Polypeptide
MNEEDDDEETDGIKVPFLMRKVSVIPCGIRGILVDKSWSLLINRAVTNARNVRYLGSRFINFHLTRLLHENKSLGKIDNPSLRRLFLCLATGTHPLADEESNKSIKKWHKITKCKLDDDMQSNVRGLNTIMTKTFETYHTAFKSYHTYGLFDHYKRLVAIRCKLSMKNAKECAAHIFVKLKIDLKPEIEELYKDTLTKGITNEHIDSEIVQMQEWVADTGSLDLERRIQMHYYIACQLEQCSDRKIAMAPLCSMKLPYIELCAKAVQDLYKFAISKKGASIMTEEQACQLKQPERILDILIQKRVRRKLDQGCYMITLMTDGITANLVWCRDVTCIRKITNVEKYKKDQAKYKAEKEAKIREQIKLKGKADKRTTRVQHPKIMEPSKYVKIHRTGLFDAKKGSAPGIEKGQFAICAAKRKSGYALNDDTPIVSIDPGHKNILTCANATIADPNPLPGLSLSLGEYYERIGNKAYRSQVNRGKCKNGVKDAETEISTHSLKTTNYKQCAKNIGVHLKHAKTLLGYYGSRNHARKRFEIRQSRDRFYSTIVNEIAPDPKTVIALGCMVAPVHAGGDAKFAATHSGLSSCPIAKVVDSLARNRRVVITPEYNTTKRCSYCRTPLAVTKPAKSNRTKTSVSGTQYRIPIHGPAWTAPSMQGLRHCTKCSQCVNRDKNAARGIFYAFLNNYKHGCMPAFLNKVFKRGEKSNSDKPLSMSADSKTILSLNEIAVPTP

SEQ ID NO: 2761 - protein, 263 aa, Massilia sp.
  misc_feature (260)..(260): Xaa can be any naturally occurring amino acid
VQTTYLARAAGTARFAYNWALAEWGRQFQACTLNPALPKPNEAALRRQLNAIKRTQFPWMLEVTKNAPQMAIMQLGRAFQNFFEKRARYPRFRRKGANDRFTLTNDQFQIDGKRIRIPKLGWLGMRESLRYTGRIVSATVSRTADHWYASISIDTSDAQLPPAENGGAVGIDFGVTHLATLSTGEKVSGPKALQTLLDRLRRLSRALSRKVKCSCNRKKAKAKLARLHARIANVRANGLHQLSANITRRFHTIGIEDLHXRAR

SEQ ID NO: 2762 - protein, 394 aa, unknown
  TnpB Polypeptide
MQRRRTNTQGILVVQMLVKGVVFRLGGELPSGARFLLEDFRLAVNNAIRAGLQARVTSRNALTRLAYRDFRQEHPKMYAQHLVSAFEVAGSVLKNHRRRVRKGNAGHVPYVRRLFMRAENQAYKLDRVEGVVDLPIMARFHVSLKLVVSDYHRGYLSDPSYTLGSLTLFPDRAIIAFRREVPKPYVAESALSLDTNERSLDGVFAREDKVRAIKAEFPDIVRIQQRHHDRRKRLQKRKAHDRRTSRILCRNEGKREHHRIEYRLHQVANAVLSFAESRKSAVVLEDLKGFKPKWSKELNRRLSLWPRRKLHQIIEYKAQWRGIPVVKVDPRYSSRTCPICGRIQDSRMGMEFECECGWHLDRHINASINLLQTAISKGGQGAYGSAPARSSMTR

SEQ ID NO: 2763 - protein, 536 aa, Lachnospiraceae sp.
MTEEEYRKALKQFHKLSDRHILVAETDMPYSDVLKVVTLSDKIRKAGNELVGLMRKNYDQLLRTKKYRKLLKLYGDVQDKDKRKALAGQLNEMQSEYNVTWDFCRKSMIPIGKKYGIDAIFALTKAEDVWRGIEKCLCGNGKSIHFSKYGELPCIRAKQINRGIPMSVKDDRLQFRLGKTLFGIQENDRFQQDEVDAVLSYLAEPENIDNKAVNTLIEDACCIDTYRPCYATLVPKLIRGKYRLYLHLTIEGKAMPKYDKYGNPRHIYGKGTIGADIGTQTVAYTSDTEVGLKNLSERGNSIQTSERKERLLYRAMDRSRRAANPQNYNDDGTIKKGRKTWKYSNHYKKLKSKHAELCRINAVNRQLAINEDANHLRSLGDIFVTEPKNASKLMRRAKETTKNSKGKFNKKKRFGKSIKNRCPSGFQTTVEKKFKVTGGTYIEVPNNYRASQYDHTADDYIKKKLSDRMYKLRDGTEVQRDWYSSYLLYCYDYRTQNIDKEKCIAQFKAQYNKEKALIAWIKANKIRILNSGIKVA

SEQ ID NO: 2764 - protein, 354 aa, unknown
  TnpB Polypeptide
MIKTYTFKIKPNKNKEKIFEEYLNTTRYVYNLGKEVREESYKKGVKINYFDLSKQLTEAKKEFSWLKNVNSQTLQATLERLENTYKKFFKGAGYPKWAKKKNWKSIDFKSIKTTFNAFKLPSIGVVKVFKFKVPKGELKTAKIVKEADGWYLKVVVKEEDSVKRENQSICAIDMGVSYFLTTSHGEFVDNPKHLFNYLKQLRIENRKLSRMKKGGSNFKKQVKRLALLHQKIGRVRKDFLHKQSRKLANEYGTVIREDLNIASMVAKGKLAKQILDCSWGLFFTLLEYKTNVVKVNPAYTSQQCSKCGHTSKENRKTQSLFECVKCGHTDNADYQATLNILQRGQTLLGANVGQ

SEQ ID NO: 2765 - protein, 372 aa, unknown
  TnpB Polypeptide
VKLIAQLKLLPTPEQADALRRTLETTNAACNFISQIAWDAQTFGKFAVQKLCYAAVREQFGLAAQMTIRALAKVADAYKLDTKRMRSFRPHGAISYDDRILSFNRPKTEASIWTLDGRQALPFVCGERQRALLQTQHGEIDLVLVNGAWYLFAVCDVEEPTPIDVEGVLGIDLGITNIATDSDGTIHSGRTVKSVRYRHRRLRNRLQKKGTLAAKRRLRKLAGQEYRFAKDVNHTISKRIVREAQRTKRAIAVEDLTGIRMRVRARKSQRTVLHSWSFAQLQAYIAYKARQVGVPVVLVNPRNTSRMCPACGHIAKANRATQAAFKCLQCGCAGHADTIAAGNIRVLGRAAVMQPYISEADQPSCQRQAAGL

SEQ ID NO: 2766 - protein, 185 aa, Microcystis sp.
VGLDVGLKFFYANSDGETVEITQYYRKAEKRLIHLNRKKSKKFRKGQLQSNNYQKTRKRYARKHLRISRQLKGFVEKEALRVIKSNDFIAQVNLNIQGMVKNSRLAKSINDVAWSTLLQSSVLTFRQRLEYFGFKYGKATVALAPHNTSQNCSNCDQKVPKSLSTRTRICPDCGYVEDRDINAAK

SEQ ID NO: 2767 - protein, 394 aa, unknown
  TnpB Polypeptide
VRVYPTPEQVAVLNRTFGCVRLVWNTVLAWRQTRYRAEGVKTSYAQSDRYLTELKRGGDRDFLYEVSSVPLQQALRHQHTAFVNFFAGRARPPRFKSRHGRQSASYTRSAFRWRDGRLFLAKVDDPIELVWSWPEVDPATINPATVTVSRDSDGRWYASLAVEAETEPQVDTDPGSAVGVDLGVKDFAVTSDGERIANPRHLERKARNLARYQRRMARKQRGSNNRAKARAKVARAHTKVRDARADFLHRTSTRLVRDHDLIVIEDLNVRGMVRNRSLARVISDCGWGEFRRQLEYKTRRYGRRLVVIDRWFPSSKTCSACGHLLAMLSLSTRHWTCPGCGTRHDRDVNAAKNILAAGRAVSACGADVSPQGSSLRRSAVKQETQPARDGLLRH

SEQ ID NO: 2768 - protein, 348 aa, Quinella sp.
MERFNDACNLISQIAFDNKTFGKTILQRLCYYQIRNKFKLSSQMVVRAIAKVCESYSDKKKRENQHTFKPHGAIVYDDRILTVKSIDKVSILTLDGRIFAPMSVCQYHARILDKALRVRGQTDLGCIDEKFYLFLVAECADEPETITKDFLGVDLGIVKIATTSDGEFYSGSKVKNIRRRYFRLRQRLQAKGTKSAKRKLKQRRRKESRFATDVNHCISKRLVEVAKGTQRAIVLEDLKGIRQRARKGTRQTVCKTMRQALSSWSFYQLRQFIEYKARAAGVLVIYVDPRNTSRTCSKCGHVDKKSRRDQEHFVCTACGHALNADINAALNISRRGAAVIQPNVAKSA

SEQ ID NO: 2769 - protein, 373 aa, unknown
  TnpB Polypeptide
MNKAYRYRLYPDKEQSELINKTFGCARFVYNRMLEDRKEKYEQNKDDKEALKKLKYTTPADYKDEFVWLKEVDSLALANAQLNLNTAYKNFFRDKSIGFPKFKSKHKDRKSYTTNNQNGTIRLIDNSHIRIPKLKDVKIKLHRQIPTNYKIKSATISKTASGKYYISVLVEFDIDIQEVLPCADDVIGLDYSSKALYIDSFGMSADYPKYYRKLEAKLKREQSKLSRRMKGGKNRDKQRKKVAKLHEKVANQRKDFLHKQTRQIANAYGAVVVEDLNMRGIAQGLKLAKSTNDNGFGMLRTFLEYKLREQGKKLVVIDKWYPSSKTCQVCGEINNRLTLTDRVWTCSCGTVHDRDYNAAINIRNEGCRMIGIT

SEQ ID NO: 2770 - protein, 482 aa, unknown
  TnpB Polypeptide
VARKNKGKRVRTVGRIAPSLIIRNRSYKELAEIAARLAPIRTEVWRRYGSRAALGRSHEDIRDQDWMGEDGFASSIDLPARVWKATVDDVLGDIKANREAAKQSVIENLYRRDLEESDRDEKVALLRHNEWFGDNLLRRLMRIKWRRGKTSVDNHIVLDCQSYTIEKRPDGKTWLEVTSLTPRERISIPLKGNPPISGTIRLILRGDNHLDVHYAMPEIEACVTRPCGLRVVAADKGYTEVFTDSDGDRHGEKLGKMLTTMTDKNNIRYIGRQTLSAIADKHLATGHYRKYERIVANNLGKQKLVRQKKVHRAKVRTEVFTATHAVIDKASVFVVEDLSKPINRYDRYKKKNRRLSGWVKGIIQEAVVSVSRRRGASVDCVNAAYTSQVVRCHPSFGTRDNGKLHYTKCRAVYDVDAVAAENILERRSDTEIGRYTNYKKVRAILEERFRTVSPSDTTAETARPGLQLGFETTRRRQRRAKK

SEQ ID NO: 2771 - protein, 482 aa, unknown; identical to SEQ ID NO: 2770
  TnpB Polypeptide

SEQ ID NO: 2772 - protein, 371 aa, Virgibacillus sp.
MAKQNKAYKFRLYPTDEQALIIRKTFGCVRLVYNKMLAERKGTYELSKDDKDALKKVKHPTPAKYKKEYEWLKEVDSLALANAQLNLDRAYKAFFKGMAKFPKFKSKRHKQSYTTNVVNGNIQLLDGHIKLPKLKMVKIKQHREIPSEYNIKSCTLSMTASGKYYISILTEYEKEIDHKEIESVVGLDFAMDGLFVDSEGEKANYPKFYRQMLEKLAKEQRKLSRKKKGSSNWNKQRIHVAKIQEKVANQRKNFLHHKSKKLATSYDAVVIEDLDMKGMSQALKFGKSVADNGWGMFTSFLQYKLKEQGKQLIKIDKWFPSTKTCSNCGSVKEVRLSERTYQCTCGLSLHRDYNSALNIKKEGIRLLSSAA

SEQ ID NO: 2773 - protein, 422 aa, unknown
  TnpB Polypeptide
MNRQIFKKTYKYRLYPTKRQQEILEKYLSLCRWLYNYFLDERRILYQKKKIKVSCYDQIKKIPKLKKEKPELTKVYSQTLQDVVRRLDKSFQNFFRRIKENKNGKRQKLGYPRFKGYWRYDSFVYPQFGFQLQEEKLNLSKIGHLKIKLHREIEGNIKTLTIRRTKTDKWYACFSVEIKKELPQKKVIQKAIGIDVGLDSFLTTSQGEKVDNPRYLIHSEEKLAKIQRWHSRKKLKSSNRKKSRLRVARLYEKITNQRLDFLHKLSSGLAKSFQLVAFEKLNIKGMVRNKYLAKSISDASWNRFLQQLRYKAAEAGIWAVEINAKNTSQVCSGCQTIVLKTIAARKHQCPFCGLTLDRDINAARNILQLALLNFAKQNLGGLALNTVGTTGINACAQSYDWARGRMTPWSWKNTFDREAGSH

SEQ ID NO: 2774 - protein, 208 aa, unknown
  TnpB Polypeptide
LAAVIKQAQLVWHRNQYWLHVTIEKPAPLKVQGDATAAIDPGEIHAATITDGKEALVVSGRLLRSLHRLRNKTLRRFQKAISRTRKGSKRRRKLLAAKYRFLNNIERRIEHTMHTISAIVAKWCLDRNVKTVYIGNPEGVRENDCGRKHNQRVSQWAFGKLRDLLEYKLKRHGIELVPVDERGTSGTCPVCGEYTKQTGIFSNKKMAL

SEQ ID NO: 2775 - protein, 467 aa, Moorea sp.
LYKTIPVKANFSYEERAFWEFQCKNANSLWNCATYYSKQKHYNWLEQQSEAYTTYWRDDILRYGWKTYKCSIKYPELCKELKDNPHYKALAAQSAQQTLKSVAESITSYNQLVGLYYKGQVDRPRLLRYRKKGGLAAVTFPKQAITYKEGLFYPSISKESKPELLTEIVLEPPDFIDPDWVKEVAVRPYLGQLWIDWVIDDGKQPVENNPNLDYSQAWSFDHGGDNWLTGVSTQGKSLIIDGRKLKSMNQGYARLVAKYKSGKPDFYWDSNLDRVQRKRNNQMRDAINKAARFIINRCLSDRVGNLIVGWNERQKDSINIGKRGNQNFVVIPTKRLINRLEQLCPEYGIKLTITEEAYTSKASYLDDDSLPKHGEKPKGWTPSGKRVKRGLYKSSKGHLINADCNGAGNIARKVATQLGLDLTKVGRGALTLPHRYDLFTYLSRSYRNKGVREASPSAIAARVHPAA

SEQ ID NO: 2776 - protein, 383 aa, Bacilli sp.
VTTILKGYQFRLYPSDEQKKLINQTIGCSRFVYNHFLEERIYVYKKTGISKTCYEQIKEIPQLCKSYPWLKEVDSFSLRNPVFNLENAYHRYFSQNSGYPKFKNKDTGNSYKTNNIKNTYKDKNYESIKIDLKNRTITLPKLKEVPIRGYRNKEVFVGDIKSAVIRREGLKYYVSVLVEDPLIQQPFQPKSIVGLDLGIKDLIITSHGEKIENTLECTNINKRIKGLQKALERCQKGSKNREKIKLKIKRAYMKLKNIRKHLIHNITNKIIKDNDIIVMEDLDIKAMYQTRSIAKHLVNIPLAEIKRVLEYKCLWQNKKVITINRYYPSSQICSVCEYQNKLLKDLSIRSWVCPKCGAIHDRDINASINIMFEGLKIYMQSLV

SEQ ID NO: 2777 - protein, 501 aa, Leptolyngbya sp.
MARSKTPSFILELPLVVDSQADAELLRRFQAGRQLYNGCLTEAIKRMEELRNSVEYQAAKQLPLKSKQRSEAFSSARKQYRFTDYEMQAFATVMGNRAVWIAQKIDSNSVQTLATRAFRAAERVLFGKAKKVRFKVPNRFNSIEGKGNTHPLKWKNNRLHWGKGFELEPIIDWKNPVHQHGLSSKVKYCRILKRQLNGKRRWFVQLILEGHPFQKPSNSISEGIIGLDLNVSNVAFVADAQAGLLPFAKNVPTFEQEIAEIQRQMQRSQRVANPNNYEPDFEVRRGRKIVKKKGKVRKGARNWEQSKTYQKLAKKKRNLQQRKAAYTKSQNRSLVNEILRHGKDIKTEKVSVKGWQKRYGKAIAVKSPGFFQSELKRKAESAGGSFVMFSTQTTALSQTHLNGDRIKKSLSERVHHDQTGVVMHRDLFSAYLSRFVTDNRLDMPVARESYAGSEPILVAAWQVYESSKRVGESESPQRQSPAERMATKLGTVSQVKRKLRS

SEQ ID NO: 2778 - protein, 135 aa, Deinococcus sp.
MTTSLVREYEIIGTEHLKPDNMRKNRRLSLSISDAGWGEFMRQLEYKATWYGRLVSKISSYFPSSQMCHDCGFKNAEVKNLAVREWTCPNCGEIHDRDENAALNIRREALVAAGIADTLNARRECVSPASAGNVR

SEQ ID NO: 2779 - protein, 448 aa, unknown
  TnpB Polypeptide
MKTTITAKLQLHTTNEQFAALRATQLAYRDALNLVSRYAFEHGKMSNKVKLQEGTYDEIRARFHLPSQMACSVPRQVGAAYKGLWTKVKKNAEHRKAGYTRKRYKGLDQAPRFISPTLTYQYGKDYSFKKQQLSVLSLSGRVIVAYSGYDEHTKLIEQGAEIGTAKLWYDKPKKRFFLLVSLQVETPDPTPQTHKHLVGVDVGVRYLAVTSTTKGDCAFFSGKKVRAKANHYARLRKRLQKKGTRSATRRLVQISGRERRLKQDANHVVSKRIVTQHPHSLIGLENLTDIRERTKRRTHRRKKNSKGTERVSPKTRKANAVYSKWSFAELHAMIAYKALLNKSMAIKVDAHYTSQACPLCGHTAPENRPKKGLLFVCQNCHYTLHADLVGARNVTMRTLLVRQDWIRTGQLSIVPDVSDNETKAAQRSRYAELRWSPDTSPRALAEGI

SEQ ID NO: 2780 - protein, 180 aa, Enterococcus sp.
MEQLKAYKFRIYPTEEQEIFFAKSFGCVRKVYNLMLDDRKKAYEEVKNDSSKKMTFPTPAKYKKEFPFLKEIDSLALANAQLNLDKAYKNFFRDKSVGFPRFKSKKNPVQSYTTNNQNGTVALIDSKFIKVPKLKSLVRIKLHRQPKGIIKSATISRHSSGKYYIWFCCKVLNLLSDKVE

SEQ ID NO: 2781 - protein, 334 aa, Nodularia sp.
MWGKHLNCAKLQSHIAKLRKRNQFWQSIGSQAVQNICQRIEKAYQLFFKHNQQGVRPPNFKKVRKYKSFTLKQAGYKFLGNNRVKVGNRVYQFFQSREIEGKIKTLTIKRTALGELFMVVVVDNELQPEIKSTTGKIAGFDFGLKTFLTVSDGTLIDSPQFLKQSLNAIKKASKNYSKKGKGSNNRERARKNLVRKHEDVCHKRRDWFWKLAHKLTDKFDVLCFETLNLKGMQRLWGRKISDLAFGEFLQILEWVAKKKNKQLVYIDKWYPSSKTCSHCGHILEHLDLAIRQWRCPSCQSINGRDENAARNIQMVGASTIGLGDVRLATPAIAV

SEQ ID NO: 2782 - protein, 423 aa, unknown
  TnpB Polypeptide
MLTGRRFRVEFTADQAEFAERIGGACRSVWNTGLEQRREYRRRGAWMNYQPQAKELAEAKSEHLWLKDVPGHCLQQTLMDLDKACRTHGTFKVHWRSGRRWAPSFRFPEGSKMTVEKLNRRHGRVKLPKLGWVKFRQTRSVGGETIRSATLAKEGSHWYLSLLVNDGIDAPAVHPLPQTAVGVDRGVVVAVATSGGELLDRSFVTAGEQRRAVVLQRKLSRAVKGSVNRAKTRTALAKVRARERHRRQDFCQKTANQLAHANAVVVLEKLPARNMTRRAKPVPDPNNPGRYLLNGAAAKSGLNKAILSKGWHQFELALTSVSRYTGTQVVKVPAAYTSQRCSACGHVDPKSRESQAVFRCTACTRPAEHADVNAAKNILAAGLAVTACRESVAPMGGAETLKQEPAGTREELLLQPHHSAPAA

SEQ ID NO: 2783 - protein, 410 aa, Pseudomonas sp.
MIIRQGFKYRLDTSEAQSARLRVLCGHARYVWNKALSECNQMLATEDQFVPRYETMAKWVTAWKRSPDTEWLKDAYTDNLQQKLKDLDTAWQRYFKKVADAGRPQFKKKGRSRDSVRFVNFPKYCALDGNRVKLPAGIGWVKFRQSRAILGEVKNCTVGFDAGHWFISFQTEREVENPLPKSTSAVGIDMGIERFATLSDGNYTAPLNSFKRHQLALRKAQQGMSRKTKFSNNWKRAKARVQRIHHRIANVRRDYLHKASTTISKNHAMVCIEDLQVSNMSASAAGTAEQPGRNVKAKSGLNKAILDQGWYEFRRQLDYKLTWNGGWLFVVPAHNTSRTCPACMHVSADNRKSQAQFRCVQCGYANNADVVGAINVLRRGEAHLSNEGPDMARLACEVNGAVRPSAAGTC

SEQ ID NO: 2784 - protein, 301 aa, Proteobacteria sp.
VIQRQGYRYRLKTTPALGRALAQYAGACRFVWNKVLCLNEGRYLAGVPRLTYYEAAWLLTQWRHSEEYGWLATVSIHALQHCLRDLERAYTNCFAGRTAPPRFRKKFLSDSFRFPTDFQVDGHRLKLPKIGWMRFWKSREIAGTIKNVTMRRDGPHWTVAFQTEREVDTPVHPSTSAIGIDLGIATFAAVSDGTLYPPLNAYRRLQGKLATAQQRASTKVKFSKNWQKCQTVIRRIHATIARCRKDFLHKLSTTISKNHAVIVVEDLQIRNMSQSAQGTVEEPGRNVAQKAGLNKAILDQG

SEQ ID NO: 2785 - protein, 402 aa, Thermogemmatispora sp.
MAQVQRTIPLLLPADEDLRGTLTVFQRVQQQLSAPCFNGGKPLSAVALQRACYHEVKGQLNAQMTCTAIRLVAAAYQSAQSNRRPPQRPFQFQRRQALFLIGPRGRDARLCPDGTLSIWTVAGRKRLPYQVPEAFQPRLAQAQSIDSLTVLERAGKLLGRLTITLEVPDPPTARPETEAVVGIDLNETNALVAVDGQERVLFVSGKAVKVRNRRTAKTRARLQRKLAAHKAQHRDTRSVRRVLKRLGRKQRHRTQTFAQTVAKRLVEWAPPQAVLVFEQLQVPPPQKEQIRGRALRRRLALWQRGLIRRWTEQQAQERGLCVVEVNPAYTSQICSRCGQRGNRRRHAFACLHCGFLEHADINAARNIRARCTVLRGSGLPSTSPEARADKAAGKPLAEAGDS

SEQ ID NO: 2786 - protein, 198 aa, unknown
  TnpB Polypeptide
MKPKSNIMGVDLGIKCPAVSYISDGHIKFYGNGRKNKYMRRHYKCLRQNYSKAKNIDAVKRINNKEQRIMKDIDHKLSREIIETGISHNVKIIKLERLANIRSTTRKSRKNNHSLHTWSFYRLAQFIEYKARLAGIKVEYVNPAYTSQTCPVCGHVHHANDRTYTCKCGFRIHRDILGAMNICNSTEYVGDSNIRHTA

SEQ ID NO: 2787 - protein, 381 aa, unknown
  TnpB Polypeptide
MMHKAFKYRIYPNKSQEELLSKTFGCIRVVWNANVESFNSYDKDSNPNPKIITKSDLVIDKPWLNEVSAAAIQQKIRDFEETTRQFFSKTRKRKTNRPVFKKKSGNQSYRLPNQKFSLVNDKIRLEKIGWIKISIDRSIPSDSKMLSCTISRNCCGKYFVSILVDTVIHHKGKTGKTVGIDLGLKHFATLSDGIVIDNIKFFREKQSEVSKIQKHLSRKSKGSNRYRKNKLRIARLHNEIANKRNNFLHCVTTSLVNNYDVICIEDLNVSGMLSNHKLAKAISDTSFHQFRSILEYKCKWYGKEFVVIDRFYPSSKTCSKCGWKKDDLTLSDRVFKCENCGVEIDRDLNASINIERIGVDILYNRMQSTEVTRCDEAFRMK

SEQ ID NO: 2788 - protein, 406 aa, Saccharothrix sp.
VSRYRLAPTLEQEALLLEHCAHARFVWNLTVQQHSYWRPGRASAPDYHEPRQLTEARGEFAWLRAGSHTVQQQALRDFHQAVRHFLNGTHRRPTWRKAGRDEGFRQVAVQQGHIQRLNRRHGRVWVPKVGWVRFRWCREVPHGVKSYRVTRDRARRWHIAFATTPEPIPAPGNGATVGVDRGVVVSAALSTGDLLRCPGLTKHEQQRLVSLQRRLSRCRPGSRRRERVRIALARLNARLVDRRKDWVEKTSTTLAREFDVIRIEDLRVRSMTRSAKGTVHEPGRRVRQKASLNRRILANAWSLLVTRLREKAPGRVQKVNAAYTSQQCSSRGHLAPESRKSQAGFRCVACGYSCNADVNAARNIAAGRAVTARGGGAVAPPVNREPQPAAPPPSAGSELESHVARL

SEQ ID NO: 2789 - protein, 367 aa, Clostridiales sp.
VNRLGKMNKAYKFRMYPNKEQEIILAKTFGCVRFIYNKMLEDKIAYYEKTKEKLNNTPAQYKAEYEWLKEVDSLALANAQLNLQTAYNNFFRSPKVGFPRFKSRHKNHNSYTSNNQKGSIRIEGSKIKLPKIGFIKIKQHRQIPGHYILKSATVSRSPWGKYFVSILFEYERIIKPVKPRNIVGLDFSMTELFVSSEGEFASYPRYYCQSLERLKRENRRLSQCQKESNNRNKQRIKVARLHEKVANQRKDFLHKLSRKITNSYDAVCIEDLNMQAMSKALNFGKSVADNGWGMFVNQLSYKLTEAGKELVKIDKWFPSSKTCSRCGAVKDTLSLSERVYKCDCGLVIDRDINAAINIKNQGKVLLA

SEQ ID NO: 2790 - protein, 557 aa, Herbidospora sp.
VVPRQRRLALQPAQPDRLAVEHRREVDEERREPLHLDAGLGEPADRLGQPRLERLRLGQPAQPGVTGGAQVEGELGQVGPQVDEDDGAGQHLGHERVGLVEVEGSVHHDLPREPAASAAGGIGSGRAAKAGPAHQISVRTTSDVWRSHNDRVTRQVQATPGVTLRRSFKFLLRPTARQAAALAACLEDHRTLYNAALEHRRTAYAKAGVSVRYGDQSADLKHIRADDPYGQARWSFSSQQATLRRLDRAFTAFFTRIRQGRRPGYPRFKGRGRFDTVEWPKDGDGCRWDSQPGHPTVTFLRLQGVGHVRVHRHRRVAGTVKTISVTREGTRWYVVLSCDEVPGHALPATGAVVGIDMGVASLLTTSDGEHLVNPGHLAASADRLAAAQRNLARKQRRSQRRRKAVARVAALHAHVRRQRLDGAHKTALALIRGYDVIVHEDLRIANLTRSASGTVERPGRKVAQKTGLNRSILDAGWGVFLTILSHKAESAGRELIAVNPAGTSRTCARCRHCAADNRVTQAEFRCTACGHAAHADVNAAENILRAGLALRRATEAA

SEQ ID NO: 2791 - protein, 420 aa, Herbidospora sp.
MGAEVYDYRTYIYFLNTWRRWAMRRSMKFLLRPTGAQLIALAQCLEDHRELYNAALEHRRIVYAKTRTTVRYGDQSAELKHIRADDAQGQGRWSFSSQQSTLRRLDRAFRRFFERIHQGRAPGFPRFKSRGRFNTVEWPKDGDGCRWNSRPEHPTTAFVRIQGVGHVKVHQHRDVLGIVKTISVKREGARWYVLLSCDDVPVEPLPATGSAVGIDLGVCSLLTTSDGEHFANPRFLSAGVKLLSAATRDLARRSRGSKRHRDAAARVAALHGKVRRRRLDYAHKIANRLVRSYDLIVHEALQIVNMTKRASPKPDGNGSYLPNHAAAKTGLNKSILDAGWGVFLRILVDKAESAGREVVAVNPATTSRMCNRCGHTAKENRVTQAEFACGACGHTAHADVNAAINILRAGLALREAASAA

SEQ ID NO: 2792 - protein, 504 aa, unknown
  TnpB Polypeptide
VRLRIAPSVDAGTSRAIENTQAEWGKAVRFYTDLFSEHPAVYDEKKRVTTQEGREREVSWTAKDLLSWAERMSVKTEDHPEVLHNFAAVCPQMPVTLRRAAINAASGAVRSHLTNRALWAKADPEQRGKEPKLPDPHPNLTLYGGMHDLGEARLRQGSCRLKVFSNGRWRWLDVPLLLPPYALELFAQSEVEQVRITAERAEQNARMADERRERRTNEERERLRATPGVWIAQSPTLIAKPEGLFLHAPFEKRVEIQGKAEERRLADPDLKVGTIDLNADSTVAAAWEGEHCKGVETVWHAEENAKRERALRKVARKQKASGTPVKGERSNRTLWAYIRNLDDSLAWHIAAQIVAWAVALGLQVLVFEYLRPYRPERGLSWSRRTNRKRSYWLRGKVLSHTRDLALYHGILVVERNPAWTSQVCPACHRLAERFSPSGAGYPSRLRCGCCGWSGDANVAAALNLKRKWDRTFRYPTAAERRAAEPRRAREGGAIANPEQVPVVA

SEQ ID NO: 2793 - protein, 477 aa, unknown
  TnpB Polypeptide
MKVVSSYGVHIQDHRKALKATVDIYRDATAFVIDVANKEWDALGPIYKKDKRLCKTALEALIHKTAKNPAPKYDFDGKFYKMPSYFRRAVMATAMGAVSSYRSNLANCEAGGKQGREPKLAYDRNVMPVFFRDGMSQSDAMLQGETTVVQLKLFVKNDWVWVDIHCRPRDVKYLAKWWSSVKASAPTLEVERRKGRRHCSFRLRYAFEEWRDLSQRDEPLDTRTILAVDLGINTDAVCSVMGADGTILGRRFINFPREKDRMNHLLNKLCSEQREHGRTGGRRTWDQINHLNDQLTANIARAIIDMAAEYAVNVIVFEALNFHGKIRGRKRQRLHLWRKRAIQDMVEHKAHRNLIRISRVCAWGTSRLAFDGSGEILRGRVNLSTAELVKLAAMTAQKRKEDRGRKETHCSQELCTFQNGKEYNCDLSASYNIGARYFLREWCKVIPELEDQLPKTTLRTYANLIDLKMSLAPAAAA

SEQ ID NO: 2794 - protein, 475 aa, unknown
  TnpB Polypeptide
MRHVLKTQVDKTNDLFEYFETTTKAANNLKNATRFRQRQVLTAVEKDPTALTPNEQEIMDEIARCLPLMNSVSCNEDGSPKYLMPEKGKSFLGYHFLDRLMRDSRNPDFFNQHLPRQAAQNILKEAVKEMKSFYAALRAYYRDPSKFEGKPQLPGYNKSGGCHTVTLTNQDCVIYDRPDGGKELKLPLTDKRLDLGKAPITGKLKEVKVIPTHDIFIVILSWEDGAQPPKPAKTTTRACCIDLGVSNFAAITNNLGLPCLLFKGGVPKSINQWYNKRISKIKSEQTTRTGKKFVPTPESRKLELWRENHLNDYMSKTAKLIIRWCVESRIDTIIIGVNQDWKQGVNMGRENNQEFVSIPHAKFRWQLAYRAERAGIKIIEREESYTSRASFLDGDFIPTYGEAGADKVKFSGRRTSRGLYRSKDKTTINADFNGSANIGRKELSDLFTRGMAPDFGHVLIYKHPDMPPVERRVKM

SEQ ID NO: 2795 - protein, 518 aa, unknown
  TnpB Polypeptide
MKRASTPSFVATFGLRYEPWQRDKLDKLFQVDNNIYNALVKDRKKALDQMERTRAWRRNKAGIASIFAVMDKENPSKEHQEALKVLYAEKQDMLSQYGLGEYAFQAKAQKYRKHYKKLVNTHIAQTTATAVWHKFEDYLFGNGEEIACRSWQKNRSIEGKNNSNAITFHKGVLRVCGMKIPVEPPDNAYEQECLTRKVKYCRLVRIPWKTCDWLYQVQLVLEGDPPVKVDTQTGEMLHAMGKGRAGIDIGPQTVAFVSHDFVALEELSNKANMRYRELRLIERAMDRSRRGMNPEFFNQDGTVITTDKLPPELLKPNGKRKWAHSKHYNELARKKRYLNAKLARLRRCQHNEMANRYLAQGDEFYIEDMNFAAMAKKAKAQKKEDLKPGEKFRRRKRFGKSIANKAPAGFVVTLERKVLRQGGSFQRINTREAKASQYDHLSQEYNKKKLSQRWHRFKDGRKIQRDLYSAFLIMNTNHTLNGFDQALCDANFEHFFALHNLEISRLRGVQMPSSVGVA

SEQ ID NO: 2796 - protein, 435 aa, Okeania sp.
VIYLYGCQQNLINPDEDLKSILEFICSESHKLTNCGIYYGRQLFFQAQKIIGKYDLEKEYKSNKHYQVLHSQAAQQILRSVAESFKSFKELDKKYKKGNLHFKPRVPSYRKKDGLAMITYPKQALRLVGEHIRIPLGTTVKRWFKLDSFLIPMPSNLQFVDIKELRILPRNRCFYVEFVYKKEIVVQYELKPKNVLGIDPGISNWLSCVSNVGTSFIVDGRKLKSFNQWYNKRVSTLKEGKPQGYWDHQLAHITEKRNRQMRDAVNKAACLVVNHCIEHQIGMVVFGWNQGQRQEVNLGKVTQSFVQIPTAKLKERVKQMCSEHSIKFVESEESYTSKASFLDGDQLPTFGEKPEGWKPSGKRVKRGMYRTNKGLLVNADLNGAANILRKVETQLGVNLAKVCRRVLTLATRFRIWETKAKKRSGTDLSCHVATA

SEQ ID NO: 2797 - protein, 324 aa, Moorea sp.
  misc_feature (286)..(286): Xaa can be any naturally occurring amino acid
VIIVEFKAYGKKHQYQAINEAIRTVKFIRNSCIRLWIDNKGTGKYDLSKYCKVLAKQFPFANELNSTARQAAAERAWSSITRFYENFQKKVPGKKGFPKFQKNCRSVEYKQSGWKLSPDKKLITFSDKKGIGKLKLKGTWDLWRFDKKQIKRVRIVRRADGYYIQFCVSVDINEELKPTGNTVGLDVGLKDFYTDSEGKTEPNPRFYRKGEKRLKFYQRRVSRKKKGSANRRKAINKLGRTHLKISRQREEHASAIRWLETGNGGLTTRTYLDNLNSMLVKNQPSXPILKEVPHDKEPYYEEPYDGKLSRTVLETSQTRGNPLA

SEQ ID NO: 2798 - protein, 492 aa, Opitutae sp.
MRSANPKVEDDLPQEEFLPPQTLRRRVRASGAVLMAQEAAAQIRNDVYAELRTAHRARTKPPSKIDLKKTLKHAPSAVALGRAKQVQYAVDDACAMFASYRSNFFEWAKDPASRPGQPKPPNFHRRGQRARVRLDSQDFTVSDDRLYLPESLGLGVMALVDRDGESLLRPGDRLVEVRIEPCRSRQWVHVDLVIRCKPARLTPRLLLRGTLLADLGVARLITCLDDENLLAFFVDGGVAKAILQRGAKWHAQLRSESKLDLRHGERRAGQLASRSARQMDDLMKKVALLVVTYAQAKHLARLVVGRNVDWKGVEMGKRQNQLFTFIPHAKLIAALRTKCQRAGIEFIETEESYTSKTDPLAQEAMGPKPEGYRWLGSRCTRGSFRSSMGYVLQADVNGCIGLGRKVGGEEWLAVFRQKLGASPGTRLVPRKVHVNGVGPESSPAAGIRHPRLSSPRAWMSTQVALVKAGLLPDLQLVAVATHKPTQELPMAA

SEQ ID NO: 2799 - protein, 414 aa, Streptomyces sp.
VQLRYNYRVYPNAPQRRALAKAFGCARVVWNDCLRDRKEAHAAGLAYVTSAELSRLRITQAKRTEQRAWLADVSAVVLQQSLRDLDTAYQNFFDSLKGKRQGQKAGPPRYKSKKDARQSIRLNTNAFRLKGNGTVYVAKVGHLKVKWSRRLPAGPTSLTVIKDSCGRYFLSFVVDTGADILPALEAEAGIDLGLSAFAVLSDGTKISAPRFLRRAEKKLKRLQRELSRKAKGSKNRAKARIKVARQHAKVANRRRDFHHKVSTQIIRDNQAVYVEDLAVSGLGRTRLAKSVHDAGWSAFVGMLEYKAERHGRTFAKVDRAFPSSQLCSACRFRDGPKPLHVREWTCGACGAVHDRDHNAARNLLAEGRRIVAAGRAETLNACGAPVRRAHMPAQRGEAGSPRKGQPTQAGLPGL

SEQ ID NO: 2800 - protein, 403 aa, unknown
  TnpB Polypeptide
MLKAFRYRIYPNEEQKEFFAKTFGCVRLIWNLMLSDKLNAYNNKEKIPRVTPAKYKSEYTFLKEVDSYALCNVQLQLEKAFRDHFKNKKHFGLPKFKKKKDKQSYTTNNVHGSIKVDFEKGFLYLPKIKTGIKINLHRTFEGKIKSVTVSKINDNKYYISILIETGDVKNKVKEPKGKVCGIDLGLKEFATITNDTGIYKIEHPKYLRRAEKRLKRLQRTLSRKQKGSKNFEKARRKLTKQHEYVSNARNDFLHKLSKAIIDDNQVIVVEDLNIKGMFKNKHISKSISDSGFGIFLKYLEYKAEWYNRTIIIADRFYPSSKLCNVCGYKYSELKLSDRAWSCPTCGTYHDRDINASLNLYKIGLERPDFKPVEHALVDERILKEVPKKLSCNEAGNRTFYKVR

SEQ ID NO: 2801 - protein, 412 aa, unknown
  TnpB Polypeptide
MPVVVKDEMLVKGVVFYLESDLPFEARCLLEDFRLAVNNAIRAGLQARVTSRNALTKLAYKDFREQHPRMYAQHLVSAFEVAGSVLKNHRIRVRKLVTWRIPYVKRVMMKAENQAYKLDRKTGVIDLPIRAGCHVEVRLVVSQYHRKYLDDMTLSLGSLTVLPDRVIVAFRKDAPKPFAPESALSLDTNERSLDGVFVEGDVAKAVKAEFPEVAIIQQRHHDRRKRLQKKKAHDRRISKRLCRREGTREHHRIDHRLHEVANSVLKFAEERKSAIVLEDLTGIKSKRSKELNRRLSMWPRRRLHQIIEYKAQWKGIPILKVDPRNSSRTCPICGRIQDSRMGAEFKCVCGWRLDRHLNASMNLLQTAISKGMAGGLRFNPGAFQHDVMMILYEPAMAARSELNGTSGTVGVT

SEQ ID NO: 2802 - protein, 384 aa, Kurthia sp.
VNVLSQNKAYKFRLYPNKDQQARIHQTHGHCRFVYNHFLELWNTSYKEEGKSLNRSLMSKVLTKMKKQDETAWLRNVDSVALQASYEYLIDAFNRFFKKQNKYPRFKSKKNPVQSYTTKNTNNNIAIVGNHIKLPKLGLVKFAKSCEIEGRIMRATIKYHASGHFYVSIACEVPDVQPLPKTNQSVGIDLGITDFAMLSDGRKVDNQRFTVKMEKQLKREQRKLSRRYEQAKKENRVLRDCMNYQKQRRKVARLRERVAFQREDFLNKLSTELIRQYDIICLEDLHTKGMLKNHKLAKAINDVSWFSFVQKLMYKAKWYGREIVKISRFYPSSQLCHVCGHRDGKKSLDIREWVCPSCGETLDRDLNASRNILAEGLTLLTQQP

SEQ ID NO: 2803 - protein, 375 aa, unknown
  TnpB Polypeptide
MKTYKFKVYKSKKLKYLHQQVRIAGEVYNYLISLHKRYYKIFGKYIHKNRLKNQLVKIKKRSKFAHWKQLGSQSLQDVVDRIDHGYQKFFRRENKRPPSFRKMKKFRSFTLTQSGWKLNEESVTIGKKVYKFFKSREILGTPKRIHVKRDSLGDFYIFLVTDHSEIPPEESITSVNSVGIDFGLKTYLTLSDGNIIKSPEFFKQFRTKISTANKTLSRKQKGSKSRKQARKNLSRVHKKVVNKRLDWQVKLARDLTNKYTHIYLEDLDLNGMKKRWGRKISDLAFHQQVMWLDYQATKARCKVLKIDRFEPTSKRCNVCSHLKRDLTLKNRKWLCNNCGSFNHRDFNAALNIHDAGASASGLGNVRRELVPAVSA

SEQ ID NO: 2804 - protein, 441 aa, unknown
  TnpB Polypeptide
MLTIKLPYILKDKGDLEYISKLQRQYSSVLRWTFNRFNDKLSEKEIRHLFKDKPLNNVEMLDTWFLQSAIYDAKALFSTGNISIFGGKKEFKARSLGKLSKEEFKENRNSPVCSVGEASKDGNRKFNFKIIEENVIEFKPFNKRKISILLPKLRNNYKKTLSKIQELCENKKISVTIKLNKKNISFTYDETLLKEEIKTDKKINRYDGSCRYAGIDLNPNYISISIFEDAKRIISKTYKLSELTKKSGEVNTSKKSKYLNNKLNFETFEISKNISKLLKQYNCKHLFLEDLNIKSENKGKGKFFNRLTNNSWKKNLFVLNLKKRCGISNIKVYDINPAYTSFIGNLTNNLPDPIAASVEIARRGYNLIILRNKQFYPELIKVEVLKNLWKKDLEWIYSSWKDLFILVKNSEMKYRVPFSSEDVFRIFKTEKTRVTIVYHSY

SEQ ID NO: 2805 - protein, 441 aa, unknown; identical to SEQ ID NO: 2804
  TnpB Polypeptide

SEQ ID NO: 2806 - protein, 300 aa, unknown
  TnpB Polypeptide
VTESAFRNAERAFKNFWRNRKHFGYPNFKNRNSRRSFQVRNLGILDDAVRITGLGWVRLKERGYIPTDATEYGVYATVSEQAGRWFVSILVEDVEPNLPATTGEVIGVDLGLKTLATCSDGTVFENPKALAVGQRKISRLNREMSRRVKGGKNWRKTKSKLQRAHARVGNVRKDALHNVSHELTVGKRPTVLVIEDLNVKGMTSNHSLARAVSDASMGELRRQIEYKGGWYGVRVELADRWYPSSKTCSVCGKVKGALSLSVREFVCDGCGAVIDRDYNAACNLALLERRNTPGLSGELA

SEQ ID NO: 2807 - protein, 486 aa, Tolypothrix sp.
MSTLTYCKGLPTPESEMNVLGQTELEMFLQAYAPIFRSAAIETVNHLLYGDEFNKSQWNTHLQKTYGINKRHANGVISFAKGRVDAAKTHRELHIKTIVGKIKSIEKWLKSSERKLKLARKFYAKKNWQDSKTGCNFPLSISLKYRDTNWSNLRFQIHGKKRKLSLFKNKLEHLKVKPIRVWVPHGNVFIVGSKDESCGNQVAQWDGQIIKIRVPECLESRFGKTVSSSIGNFDRIIFRLPSQGSKTWHFFYKNGRWVAAVQFTPKAVKQQSQTVSYGCIGIDMNPGSIGWAYVDNEGNLKATGQIPLQMGLPSGKQDATIVDAILQLASLGISFECPVICEELDFSDKKERLGEESRKYARMLSSWAYSRFHELLQSILSNRGVELITVNPAYSSLIGLVKYMKMYGLSSATAAALVIARRAMRLSEKPQSSITAYASVNEDKHVWSFWSQLNKKIKRSSEINRRHDYFTVSNWSFLDNLSDGEA

SEQ ID NO: 2808 - protein, 336 aa, unknown
  TnpB Polypeptide
LVGRKNLEDRCKGLISKEEYKKRRLSSIYSIGTAKPYKGNQKFRIDKDKRSIIFQPNRYVHFKFDFLSIAKNYVKIIEKLFIRQEAKDLPITYKLNSEYVYISFEEEILYKDDFKFRKIKDRYMSLDLNPNYIGYSIIDWKDSSDFKVIHSGVYSFKLLNNLYKDEKLASEDKKLKYKSNKKNYEIIQVARNLIKKCCYFKIENFVVEDLNIKPENKDKGKNFNKLINNQWIRCKFLHNIKKRCKIFGFNYIEVLPQYSSFIGNIIFRNLNYPDQILSSIEISRRGYEFRHQYILKDKKQTKNIIKSTKDEEPANIQLQKGWKRDEYTVERGKIYF

SEQ ID NO: 2809 - protein, 486 aa, Streptomyces sp.
VGRKYRPQSGRVVQAYKFALDPNNSQEQALRSHCGAARAAYNWAVSWVTASWWQRKAEASYGIGDDELTPWRRWSLPALRKEFNRIKAADPRFADWWQENSKEAYNTGLANAATAFDNYSRSKQGKCKGPRVGIPRRKAKRKARLTCRFTIGIIRIESDGRHVTLPRLGTVRTHEPTFKLLARIQAGTARVLSATVRHERGRWFVSFQVETAREITRVLRPDVAVGVDLGIKHLAVLADSTGEIRYEPNPKHLDGALKLLRFQSRRVSRRQGPDRRVGRKPSERWEKANRERNKLHYRVANLRTDAVHKLTTRVRVEYGTVVVEDLNVAGMLRNERLARRVADAGFGEIRRQLTYKGQRNACRTVVADRWYPSSKTCSGCGAVKAKLPLRVRVFTCDVCGLVMDRDENAARNLAALAATCTTGTGAAGDQDMPGVSKPRGADHKTRHQRPGRNTGRDGRAGGATLPGQRQEEARDRRQDTEVFTLW

SEQ ID NO: 2810 - protein, 638 aa, Streptomyces sp.
VEETGEVLSATALAERMGWAADLVSGIAVGLLAAHWSAADVDALASGVDAEGRALPSNAWMALRRLGWTVTPPEGVRVNDRIVRMAQEQAGRLLRSAKWRADLTTGVVETWPAEPTKRTPGEWDAVREATPGGRHLPSGVIRARTRQIAAFQRGHGRLPADVFELEAAPHTARMLPLSACDGQQATLARADDPRRALLRLQLPTRPDPRSYRDWTWVACPITLPPTVPPGAVLHLPTLRFHRGRVHADVAYTHAVPAARRTGHTVALGVDWGLNTLLSAGAIRLHDTGTITALGCGAQFRAAGVLAKQHRLRRVDEFLHAKTDHYQRLIGDTDSHCLTGKRAVLAEEIRHVSDRRSNLNDALAWSAARWTVDQAIAAGASVIYVEDLRSMEARGMGRTLNTRLSQQVRGQIVERMRHLAAEAGIAVVTIPARGTSRHCPCCLVPLRHRKAPDRPTTPGWKWALCPNPECGWQGDRDTGAWQRIAARGLAHQTKTVVDRASGAMVIRSVVDKLEARAVVEPATTPTRRDRSKTGPTRRRTTRPAPRRRRAPSPTGPSGPAGKRPEGHAPPGRRRLPRAAHRHQGVTTISTPTTGRHRPRGAALGAGFHLHAHATPPWWAHPMPDDTSSWEHLANQRRCP

SEQ ID NO: 2811 - protein, 681 aa, unknown
  TnpB Polypeptide
VKIISSYGVELRKQNIPIRQTLDVYRAAVSYLTEVYAQVWEELERIPGTKKRFNEAEHLIHTTKKNQARFDFDIRFPKMPSYLRRASIQNALGSVSSYKTRLGLWEKTDRLEGKPRLVYENHAMPVFYRDVMYREDEGGKDAAYLKLYDGHDWKWFHVRLSHTDMEYLRKNWSGKKASAPTLEKRHRKYFLRFSYTEDVILTKAPVEEQIICGVDLGINTDAVCTIMRSDGTVLGRKFIDFPSEKDRMYRVLGRIRRFQREHGSVQAKSRWAYAKRLNIELGRKIAGAVTKYAKENHADIIVFEYLETKGKISGKKKQLLDADTYSVSPTKVPAHGHSVTVEVSSKAYPDIKAEITVLIDRDESVRYKIGRENPDDVEAILYSNGDLEISGKGSVRNFKSDSAPWKKDSVKRLTWIDPEAEVESMDYWFTGNDEYLETLCRIPDTVRSMVETFKNAMAMTSMPDMSGAVRLEDITSCAEGCTALEKAMELPGNIKQAKKAFYGDTALIEGADTTACMQLENMDSMYYGCVALASVQIPDSAKELSNICNGCVNLKEVHIPSSAQKMNSSFFGCTALESITGEIPSSCTDSGNLFSGCKFLSGTLTVSCTSKTTLSSSFSDAATAGTGLTIILRYDAEKSQETANTGFYGGTKSADEILNALKASMEAAFSSGSHITITTSK

SEQ ID NO: 2812 - protein, 434 aa, Escherichia sp.
  misc_feature (52)..(52): Xaa can be any naturally occurring amino acid
VKRLQAFKFQLRPGGQQEREMRRFAGACRFVFNRALALQNENHEAGNKYIPXMRRFAGACRFVFNRALALQNENHEAGNKYIPYGKMASWLVEWKNATETQWLKDSPSQPLQQSLKDLERAYKNFFQKRAAFPRFKKRGQNDAFRYPQGVKLDQENSRIFLPKLGWMRYRNSRQVTGVVKNVTVSQSCGKWYISIQTESEVSTPVHPSASMVGLDAGVAKLATLSDGTVFEPVNSFQKNQKTLARLQRQLSRKVKFSNNWQKQKRKIQRLHSCIANIRRDYLHKVTTTVSKNHAMIVIEDLKVSNMSKSAAGTVSQPGRNVRAKSGLNRSILDQGWYEMRRQLEHKQLWSGGQVLAVPPAYTSQRCACCGHTAKENRLSQSKFRCQVCGYTANADVNGARNILAAGHAVLACGEMVQSGRPLKQEPTEMIQATA

SEQ ID NO: 2813 - protein, 362 aa, Bacillus sp.
VKLVTQTITVKVKLLPTKEQIRLLEQSSSDYIKLINTLVSEMVEAKKSTKKSTKDIKANLPSAVKNQAIKDAKSVFSTKVKKSKYKIVPILKRPVCVWNNQNYSFDFTHISMPFMVNGKSTRFKIRALLTGKYNRNFELLKHKLGTLRITKKSAKWIAQMSVTIPTNEKMGTKILGVDLGLKVPAVAITNDDKVRFFGNGRQNKYMKRKFRSIRKKLGEAKKLNALRQLDDKEQRWMQDQDHKVSREIVDFATNNNISVIRLEQLTNIRQTARTSRKNERNLHTWSFFRLAKFIEYKAKLVGIKTEYVNPSYTSQTCPKCSEKKKAQDRKYKCQCGFEKHRDIVGAMNIRYATVIDGNSQSA

SEQ ID NO: 2814 - protein, 307 aa, unknown
  TnpB Polypeptide
MAQSVMKTVVAKYKSAKSNKHGLNKVVFKKPEYDLVWNRDYSLVKGLFSVNTLNGRIKVPFRQEGMDQYFDGSWKFGTAKLVFKHDKFFLHIPTTKEIEDSLIQDIKNVVGIDLGINFLATSYDSSNNTEFYHGRHIKHKRANYSKSRKELQQRQTPSSRKRLRLIGQRENRWMTDVNHQVSKALVNSAGQNSLLVLEDLTGVRNATEKVQLKNRYVFVSWGFYQLRQMIEYKAKLNRSLIIAVDPKYTSQKCPLCGHTEKANRDKKNHSFTCKNCTYTSNDDRIGAINLRNIGIEYVHAELIKQVP

SEQ ID NO: 2815 - protein, 751 aa, unknown
  TnpB Polypeptide
MEEEEAAEEPAKKRRGKSQEKRNEDTLKNYSTVSAKLNSFLRKGEEGFRQAIRDIIEEDVITMSKIANEGYMFATFYLLYVEKSKVAWPDIDQGFFDSCCRIVTASKQECGKKYPLFQDAFQEYSECRPEWRYTVPRNEYMTKLIEALARQMATNCDNYIKSTFLKRLVEHVQFAQGVDGSKGQRRKFVYEAWTGKFDKNNDEEGRHYGFADWLKECNPWDEKLMEEQRNMYLETLLDMIRTMESLPHDEKGRKTFALLPGKGDFQISHMRMTKACLLNILQKLNVEHQVELLKKVEERLKEKGKFAEAKIVEDYLKEKGKLAEAKIVEDYLKAKEKKKLNILTDSFWKRDEEIVNQIWREVFQVEKYETSRRKFAYVMSTNGYDVTVTLQVPKTEAELKKEREEKEKGKNRKRKADEEARDEEDKEYDAFPASCNGFETFIGIDPGRTNVITAYSGDMTLDRKKKSSCLMISQREYYSRIHQNDFNKYQERVRKGDTKYNTILQFMPTMKTGSFDAFKEAVRYRLLYQDTLFDYAAKKAFRRYRFRSKVYKQKVLDEICRMIVKEKSKQARKKEKRKNRKARKKRKKKGEKEPPAERKKQQDLTKKNMIGFGDWSAKQDTGFFKGKSTMTAPVKKIRRELRRYATVVRIDEFNTSQVCSTCHEKMKNMVERQIVHDETGCHFPSRKVHQVMCCKSTQCPKQWQRDVNASRNMYDLLMCKVKGEPRPACFEPLKKEAEGRQHQQKKRRRTH

SEQ ID NO: 2816 - protein, 465 aa, unknown
  TnpB Polypeptide
MPSLTYIKGLPTPESELNALGFSQMEMFLTAFAPIFRLAVIETVAQLLNCAKFNKSKWNSHLQTAYSINKRHANGVIAYAKGKVDSEAEHRSLHIKTLTGKAKSIELWLGKVEKKLKAANKFYSKKNWRNSKTGCGFPLSCSLKYRETNWQNLHFQIHHKKRKLFLVQNKLATLKVEPIKVFVPRDQVFLVGSKDETLGNGIAQWNGSILKVRVPACLEASFGKSVSAEIGDFNRNINRLPTPAAKTWHLFKKDNSWKVAVSFTPIPVKPQSMDRSYGCIGIDLNPGSIGWAYVDADGNLKTKGQLPLQMGLPNGAQQAQIVDVCLQLAVLAITFQCPIVCEELDFSDKKQRLGEAGRKYSRMLSSWAYNEFYKQLNSILGNRGIELIAVNPAFTSIIGLFKYLKMYGLASDEAAALAIARRGMRLSEKLPDSITAYVEVNSNKHVWTQWAELNRKTKQSRISES

SEQ ID NO: 2817 - protein, 388 aa, unknown
  TnpB Polypeptide
LQAKTVSCKLKVGEASCIERTLNAFVDACNDVLAQAQRTGCKNKTKLHHLSYRAIRARTGLKANHACQAIRRVAVAIKAQGSPNEVKRFRPTSLSLDARTFKLWLQSERARITLLDGTITFPLQLGDYQRSLLQGQEPTSAALVKRRDGGYYLQVAVEVPAQEPSNTPQVKGVDLGRRDIATTSEGEAWSGQRLQAVRDRFARTRASLQSRQRTRSVARLLRRLSGRERRYQRAVNHQISRSLVDRARQQNAALALEDLGGIRQRTNRQPRSKPERRRSNSWAFYQLRQFLAYKANIAGVPLVAVPPAHTSQSCHQCGRVHPQSGGSYRHGKRFNCEFCGWHGDADLNGARNIALLGAAVTRPEVQGPACSLASYVAHERRQLSHARQ

SEQ ID NO: 2818 - protein, 418 aa, Akkermansiaceae sp.
LDLNDKIDKTYAQFKVNSDIPCVPSQILRNGVDKYIQAVRNHQHNPKKWNKPRPQREVRGLVLSSDLFEFRDGRLWIGRPKWPIGFIRMKAHRPHGIPATIVIRETRSGRWFLSFSYDDKLPDPPTNSDLKKQIRAEGEQGLQGKVLGIDRGVHPVVTLSSEENLGLDAILHGRRVLRLQARKRRLRRKLSRQKDGDSNRRQKTLREMARTTERLQDIRRDTFRKAVCRLVQGPMEVFVVEDLKLKGIRKTMLAKTPAGRMQNEPREGRRKVARAMLRASLGEFDRMLQSAAHRAWKLLLWVPPQHSSTLCSACGHRSPKNRPDRSSFQCMACHQAMDPDVNAARNLASRGLRTLFPNPPAGQAGVKARGGVGRTARRTAPKSGPKAKRNEKSPLQIRLEDPGHATHNTADPWTPSPP

SEQ ID NO: 2819 - protein, 370 aa, unknown
  TnpB Polypeptide
MARKTFKFRLYPNREQRDKLTATLDVCRELYNAALEERIGAWKIRTPVRCYDQMSQLPDIKGLRPDVASVFSQVLQDVLRRLDKTYKAFFGRVKRGQKAGFPRFKGRNRYDSFTYPQSGFELGDKLQLSKIGNIKIKQHRSIVGEVKTLTIRREAGGWYACFSVEYEPTKLPANSNNIGVDLGLEAFATLSDGTRIENHHFYKAAQARLRRAQRKVVRRTNKKSKRRRKAILLLQKVHQHVVNQRKDFQHKLSTKLVQNFGMIAVEDLNVKGLSAGILAKAVHDVGWSSFLNMLAYKAENAGRQLVKVDPKYTSQECPSCHALEKKPLSERVHRCDCGLTIGRDHAAAFVILGRGLRLQAQTMEQSVRVA

SEQ ID NO: 2820 - protein, 220 aa, unknown
  TnpB Polypeptide
MRIVYKGSKIVAQVVYEVNEPEYTDDGSAMGVDLGIKCPAVSYTSDGSVKFYGNGRKNKYMRRHYKYLRKKLGKAKKPDAIKRINNKEQRIMKDIDHKISREIVETAVVHDVKVIKLERLANIRSTTRTSRKNNPSLHTWSFYRLAQFIEYKAKLAGIKVEYVNPAYTSQRCPVCGSVHHARDRNYTCSCGFRIHRDLLGAINICNSTEYVGDSNIRHTA

SEQ ID NO: 2821 - protein, 333 aa, Deltaproteobacteria sp.
LTGKRYSQQTRPAYPCSARSVPRCSRAFRAFFRRVAGKSGKAGYPSFKSEGRYDSITYPQEPGFSIRDGKLALSKIGHIRMKMHRPAEGRMKMCTVVRDSGHWYACISVECEARTRTARPSGRHIGIDTGVTSFAVLSDGTRIENPMYLTRSLKKLSRLQKGLSRKKKDSANRKKAKLLVTRVHRAIRNQRADFQHRLSRTIVDQYGAITVEDLKVRNMVRNRHLARSISDAGWGSFLMKLAYKAEEAGRLFEKVPPHGTSQMCSGCGGKVPKSLSVRTHRCPHCGLVLDRDHNAAINILRRSTVGATGSYARGEAALSGPSSNREVPSVRAG

SEQ ID NO: 2822 - protein, 406 aa, unknown
  TnpB Polypeptide
MAYRCRAYPDQAQQQVLARTFGCVRVVWNRTLAARRARYAAEGTSTSYAHSDRALTAMKRDPDLAFLNQVSSVPLQQALRHQQQAFAAFFGQRARHPRFKSRRSRQSAHYTRSAFTLRGGALRLARTGAPLRFTWSWPEVDVGARDPAMVIVSREPDGRWYVTFTLDAAGTEPLPPAGRAAGVDLGVKDFAVTSGGEKTSPRHLSRRARNLARYQRRLARCRKGSANRAKAAARVARAHRKVRSARTDFLHRSSTRLVRGNDLIVIEDLAVANMIRNRKLARAIADCGWGEFRRQLAYTCARYGRELVVISRWYPSSKTCSACGHLLAELSLPTRHWTCPSCGARHDRDINAAKNILAAGRAVARGSPGDACGAGVRHSGSSRVRPAVKQEPQPVTAGIPVHQGEE

SEQ ID NO: 2823 - protein, 427 aa, unknown
  TnpB Polypeptide
MQAVKAVQIPYQPSEEILSLLETFRNMVNYCVRVGLKKNITSRFRLSNEVYNKLSKCGLHTWYSLSAVEVATAILKNYRKAKRKNPNVKPPYAKRLVAKLGNQAYKVVDGKLRIPIKPRQYFYIPLHKRALEFLSDSTLKLGSVTLTACMVSVVFSKTAEVMEPKGYVAYDVNEKSIDGAYIENGKVTSKSYDLSEICTIRHGYFERVRKVQAKYSRDRRVSQKIQRKWFLNHNNRVNSILHKVSSDIVKHAKEKGYGIILEDLKGIRKSINRKVLGVNKFNGKVQRISRHSKKLKRRLNSWSFRKLQQFIEYKAKWEGVKVVYVNAHNTSKVCAICGCIMQDPKAKTLECCGINRHLNAALNMLKTQDETLRFKVNRSPNEVMHSPLNKAGNKRREVALTSNCNTALVNATEPEMSIIRNLVQLNG

SEQ ID NO: 2824 - protein, 358 aa, unknown
  TnpB Polypeptide
MRRFPNNGANELHRHSTDAVVQSFFASLKSWCRRRQADPNAKPPRRRRRYFKVIWKSSALKVQDGKLYLSNGKGNLPVVISWAWGTPVQVEIGWDGKQYERRACYDLSQTAEDEPNEEAITPQTGEVAGVDSGEVHKAVAHDGVGTLIANGRLLRAKRRYQNKLKGKLSRLMARKKKGSRRRKRLISSRQKPLAKLRKQIRDILHKQTTRLVSTLHAGGVQTVVMGDIRDRRRSARYNQVANQKIHQMSSGQLRQMLTFKGGCKWFCKRSATRRRSACVATDSTSPVAGSIIAEPVVFGSIATASDRPICAESIWDSLMSRQLGSWHPPSGCGTDRISDAAQEVGAILQPEKESFAFR

SEQ ID NO: 2825 - protein, 554 aa, Rhizobium sp.
MFRSFQTRIRGDQPVLERYAAVMSRAEHKIFALLQAGRQWKGDIHTTLYPDFGISATHLDMVYRQLLARLQSLREVGLRHIREWELRLAITRRSLGRMKQALQKQASAIAKLVAEDVELTLKIQGLKRALGNARHVALRIRPLKTLLDASYRKRRLLARMRVRRRKLLRGLHYGQRKEQRLRHRIARERAKLERPSLCFGTRKAFRACFFRTGVIGGATKWRELREGRFTLEGDSIRESGNPFARLRPHADGTFDLELRLPYALRELAEVCCTVKNSRQYIVRFHGLRFQHGQRDLEQALAGHRSITITFIKDTTSWRLIASFRQDIPEVQTPPRAGAIGVDFNASHAAAVFIDAAGNPGRTFSAPASTRGLSANQSTDLIKKSAARLIAEAKAARLPVVIEQLDFSYRRVVAEHWRGPAYMRALYRLPYAKFREAMLSAAARNGVRLFQVASQNSSRSGHQRFARRYGLSIHHAAAVVIARRAMIKSEQRSLPPGYNSGKASQWHPTATREERKACTGKPGESVDRIDSGGAAGAQSVGGPSPTHRAHSLDSG

SEQ ID NO: 2826 - protein, 438 aa, unknown
  TnpB Polypeptide
MPEKLVIFDEIQHKILKVRIYPNTEQTILINKTFGSCRKLYNEHLQERNEFYIDNILPIKSKATKAEISQIYKSFKPKTEKEWKEIYPWMKEVSSAALQQARMDCDQAFVNFFKSNNGSRKGKSGFPKFKSKHSNHQSYREVMVDDSYLNFEERKMKLPKIGKVSFKDRKFPTWWNRKIKLCSMTVEKNCSNQYFVAILFEVQKAVHKIENRKESLGLDFSPAEMYVDSDGKFGKDFGYVAQKQAHHKQLRKLSRRLARKQKGSKNRNKARIKLARLEEHIANSRKDWIEKESLRLVKSYKKIVVEDLNLKGISKFLRNAKNMNDTSWATFVSRLQLKGQDYNCNVVKADRYFPSSKLCSKCGWKYERLQLSERKWTCPECGAHHIRDVNAAINLKNYVPLEEWELTPVENVKVKSLALLALQIGSFDEAGNTTGDCV

SEQ ID NO: 2827 - protein, 380 aa, unknown
  TnpB Polypeptide
MEPTADETQKLLCQAGASRLVWNLALDCCQTFYKANHKGISQSQLSAELTKFKTPRLWMYDFDSQALQQVLKNLYQAYRNHFNPKMQAGFPKFKTKKNTKQSFRIPQRVTVEAGKVYVPKIGWIKIRQSQDIEGETKSATFKRTATGRWFVTLVSEFELTECLPKVTPEQVHGGDLGLNTYLTLSDGDEVGVPQFYRQYAKKLRRAQQTMCRRVKGSRNRAKAVLAVSKVHERISNLRGNFAHQLTHGLVSKYPALCLENLSIEGLAKTKLAKSMLDAAFGETIRQWKYKSLWNNTHAIQADRFFPSTKLCSECGYKNNDLTLSDRDWICPSCGTHHRRDGNASLNLQAEGIRILDALGYMESLNDCGQCVSLAKASNAG

SEQ ID NO: 2828 - protein, 380 aa, unknown; identical to SEQ ID NO: 2827
  TnpB Polypeptide

SEQ ID NO: 2829 - protein, 507 aa, unknown
  TnpB Polypeptide
MASATKTIRQSLIYRPTQDTWFAATKSLFNQVAAFYFDVIAAHPGILDVDSRAARAALERLTHATKDNPHPVIPLSGAVTTNIPKLFRRAAIHAALGSAHSFYTHLEKWRKHKEKALTKGKKFTIRPPVPPRSWNKSPVFYAGQWKGYTVTSIMLKLWTGSSWAWVKCGLQGRTLPDGWEMESPMLVENVGRWSLHIPVTKKFTAPAKVVQQLGTNTATRLCAVDLNISEHLAVCTIQTVEGTVVATRFIRGGRQLHGLRKRQLGRVARNRRKTGIIAEGERDNAHLWAKIRALNEDSAQQVSARIVQFAKEHQASILVFEHLGNFKPEKGKYSKRSNEKRSYWLRGKIFQYSKYKAWNDGIITCRVSPRNTSRQCARCGGLVARYDAGQPAEGYTPGAPLVYCSHCQMRGNADRNASIVIGQRLLARYHQQTSFQEKPPTPLLRVERPAKAGGVRRSQDVKGHGRPSITRVRHGRANAQGTAHDMLSGMVDDVSGIPHQLRLFNES

SEQ ID NO: 2830 - protein, 605 aa, Streptomyces sp.
MSEPKKKLRTIDAPFVALGPSGVAIRDRLKHLTDVDDKVLRLVGEHLGRLASLDIKNRCADGLDHDSDTWAARKQGLTADSSSRWAGSITKATHDQWALSRRCQLAHIQGLEAGVRTLMHRLSQPIGEKGTKRAPGGYRSRAEWFQKSRRLTTLEHRLDVARAERETGVVHVVRGGRRLLNNRHNLEAAQLTAEQWRERWEAQRWFLAADGESGKRFGNETIRVTPDGEVSIKLPAPLAHLANSKHGRYVLATRVQFQHRGADWRDRIEDNRAVAYRIHLDVERGRWYLTASWTRPVVQTIPLQTARSEGMVGVDTNADHFAAYRLDRHGNPVGDRKRFFYDLSGRADHRDAQVRQAISQLLHWADRCGVKAIGLENLDFATEKTREKHGRRKRFRQIISGIPTGKLKARLVSMASEHGLSIVAVDPAYTSMWGDQHWKKPLTSKKRKMSRHDAAGIAIGRRALGHPVRRRTAPLPQYQSDAAGHRTAQARPGARGREETRPPVTERAHDARSRTGTQRTRETSASKHRSGRAQFQELTANVTPAHCSGTVDAKTGQGLGKPVGSAVSEKRGGGYGSTGSGGRCAPARSSTRSSSIWSAIWTAVP

SEQ ID NO: 2831 - protein, 364 aa, unknown
  TnpB Polypeptide
VVQYTTLKVRLCPTPAQAELFEKTFGCCRYIWNQMLSDQQRFYEETGVHFIPTPAKYKPGTPFLKEVDNQALTQEYNKLAQAFRVFFKNPESFRHPKFKRKKDDRDSFTACSHEFESGPTIYTTRDGIRMTKAGIVKAKFSRRPQAWWKLKRITVCRTKTGKYYCSILYECPVKQPEAVIPTAETTIGLKYSMGHFYVADNGAMADPPRWLKWSQEKLEKLQQKLARMEPGSRNYEDGVQKYRLLHEHIANQRRDFLHKESSRIANDWDAVCVRADDLETVSDRSGFGQFRELLRYKLERQGKPLILVERYTPTSRTCSACGALQEKVLYKNRTWVCPECGTRHQREVNAARNIKSEGLARHCA

SEQ ID NO: 2832 - protein, 429 aa, Halogranum sp.
MHYNYKYRLNPPEALEEELLYHVDTCRQLYNHVLHLLNEADDIPARYEVQGRLPDLKSWWDDLGDVHSKVLQMVVKRVYDNLSTLKAQKENGRAVGMLKWKPPREYRSLTYNQSGFELKNTSGRPTLWLSKIGEIPIHLHRDIPENATIKQVAVKREPTGEWYATFGIDVNEDTPEKPQNPERVVGIDVGILKYAHDTDGYAIESPDFSEERERLERAQHDLSRKEHGSANWEKQLQVVAECHADLKRKRRDFLHKLSNYYACEYDLVAVEDLDAKGLVELPGNSRNRAGAAWGTFLRMLQYKCEREGTYFVAVDPKDTTKECASCGVKTDKPLWVREHSCPSCEFEADRDANAAWNILSRGLEDIGVGYSESTSPEIKDFWCANESRRDSLTPVETALPTDTDSVSAKRVVETGSPTLKERTASAVSE

SEQ ID NO: 2833 - protein, 386 aa, Chloroflexi sp.
MSEAITIYKAYKYRLYRCDQKDRKLRHKIFVASTIWNHFIALQRRTYQLTGKYISLMQMNNHVLKLRKTQRFRLWKDLHSQACQDVCYRIDEAYMRYFKKVVKGRPKFKKARKYSSFTFPQSGYKVDDNTVTIDGTKYKFVKHREMGGRIKALTVKRDRVGRLWLCFRVKEDVVIGKASTGKSGGFDFGLKTFLTDDEGRPYASPQFFTQGIRKTLKLNRELSRKMDGSKHRKRARRALAKHSADVANKRSEHHFQLAHRLCDEYDTLYFEDLNLSGMKALWGRKVSDLGFASFVSILEWVAFKRGKRVVKIGRFAPTTKTCSGCGQRHHLTLRDRVLNCDCGLVIDRDHNAAINIKTAGTSAVFQSVRKTKVPLRQRVDGRSPQL

SEQ ID NO: 2834 - protein, 423 aa, Haloferacaceae sp.
MAKRVVTRTYTAGICNQRQVRDDLDSLGFAASKLWNVARWTVGRVWDACGQIPDDGVLKSYLKSHERYADLNAQSSQKVLEELSEAFNGWYGHRRNGNQNANPPGYRKHGDDHPRSTVTFKEDGFKHDAKYNRVRLSKGRNLKEHWSDFILCKYDAGPNVTVENVQQVRAVYEHGEWRLHFVCRVEIDGAEPPGDGVAGIDLGICNLATVSYGDEAVVYPGGALKEDEYYFAKKRAETGDSASREAKRLDRKRTGRLTHFLHALSKDIISECVDRDIGTIVVGDLGGIREDENGDARNWGSHGNLDLHGWAFDRFTQMLSYKAEAESIDVVTTSERNTSKTCSACGRSDKRQRVHRGLYVCECGFVGNADCNGAENIRQKVLPNPPPEDRDNGWLAQPAVRLFDRSEGRFAPREQATQTDCEP

SEQ ID NO: 2835 - protein, 313 aa, Haloferacaceae sp.
LNPKQEDWWHALIDDEDDSVWAGELRLQRDGNQWVLHVTANYEVEADHSFSCESDDVTPVGFDVGESKLLVGCALRDDTPVDPLFVDGGRVRHLRQKQVSAEDRLKPRDASNLLDDLVWGRWQDAIEDEIEKASTRAVEYTSQFENPIMVLEYLDGITDEGIGKYWNRRLGKWLLSRLQSRIEDKAAERGIPVEYVHPHHTSKTCHACQHIGYRPHQGTFRCTNEACWVSEYQADLNAAANIANRLNPWGESLPWISAGDDSPRSGGQWQAHEDTSPSEGFPSERRASDDKVSSNSPAVGAGTEPETGDAHTS

SEQ ID NO: 2836 - protein, 436 aa, Haloferacaceae sp.
MYYAYKYRFKPPDAHREELDRHRDICRQLYNHALYRFNQIADDVGTVKQRVRSVRDELPDLKQWWDDLPTVYSTVLQTTVMPIADSVNALGKFKQNGYGVGQLKWKPPREFHSFTYSQSGFKLDKKGGRTLLSLSKLGDIPIRLHRTIPDNATLKQVTLKKEPTGEWFATFGVELDREPPTKPENPERCVGIDVGILTYAHDTSGTAVGSLDLSSERERLEREQRKLSRKQHGSAIYEKQRRRVAECHADLRRKRRDFLHKLSTYYAWEYDLVAVEDLNVAGMMQFNSNSRNRVSAAWGTFLRMLEYKCEREGTHFIPVNPRNTTKECAACGVKSDKPLWIREHSCPTCGFTADRDWNGAWNILRRGIKKVGAGRSESPSSESHRDSDRLRKSWNDFRTPVEAALPTGTIVVPAQRVVEAGSPTLKRERKRASRVG

SEQ ID NO: 2837 - protein, 380 aa, Haloferacaceae sp.
LKGHSKYKGLQSQSSQRVLEELAEAFNSWYEKRKSDSRANPPDYRKKNYYDDDGNRVHEEHPRSTVTWKQNGIKHDAKNNRVRLSKGVNHKAHPRALEYILVEYETRPGVTVENLQQVRAVYDKAKERWELHLVCKDEIETPDSPGEETAGIDLGICNFAAIAYSTEQADLYPGNRLKQDGYYFPKEIAKCDDSGGDRATRLNHKWSERRTHFFHNLAKHIVERCVQREVGHINVGALSGVREDENDKSKNWGKHGNLDLHGWAFDRFTSILEYKAKVEGIKIAEVSERDTSKTCCVCGRGDDRQRVERGLYVCEECDAAFNADVNGAENIRFDINESNSESSASLDEDRSTGWLAQPGVYLHDLSSGFQPQEQVGDCKP

SEQ ID NO: 2838 - protein, 416 aa, Azotobacter sp.
MLRRQAFKFRIEPTGEQQRKLRQFAGACRFVFNKALALQQANREAGGKFIGYVAMARQLTAWRNDEETSWLKEAPVHPLQHALKDLDRAYQNFFAQRADFPRFKKRGRGDSFRYPDPKQIKLDQGNRRVFLPKLGWLRYRHSREVSGLVKNVTVSLSAGHWYVSIQTEREVAVPLHASPLAVGIDLGVVRFATLWDGQRETVLDPLNSFARHQHRLAKAQRQMARKTKFGRNWHKAKARVQRIQRQIANVRADYLHKASHRISKNHALLCVEDLQVANMSRSAKGTAEQPGRSVRQKAGLNRSILDQGWGEFRRQLDYKSQWAGAWLVAVPPQYSSQQCPECGHTHSGNRQTQSSFLCQACGHRENADRVAARNIRERGLKLLEGQDDARIACEVNGAVRPSAAGTHRSEQAATAV

SEQ ID NO: 2839 - protein, 408 aa, unknown
  TnpB Polypeptide
VVVQMLVKGVVFRFEDMLPPETKLLLEDFRLAVNSSVRAGLQARVTSRNALTRLAYKDFRQEHPKMYAQHLVSAFEVAAALLKSHRKRVRRGNPASIPFVRRLFMKAENQAYKLDRENGVIDLPIMAGCHVRLKLVLSDYNRGFLDNHSYSLGSLTLTSDRAVIAFRKEAPKPYVPDSVLSLDTNERSLDGVFVRGDDASAVKADFPDVATIQQRHHDRRKRLQKKKAHDRRTSRRLCRREGARERHRIEYRLHQVANAVLSFAEDQKSAVVLEDLKGIRPKWSKELNRRLSLWPRRKLHQIIEYKAQWRGIPVVKVDPRYSSRTCPICGRIQDSRMGTEFECECGWHLDKHVNASLNLLQTAISKGMAGGLRFNPGAFQHDVMMILYDPERGARSEPNGTSGMTVAS

SEQ ID NO: 2840 - protein, 403 aa, Nodularia sp.
MQLVEKHVIKQGHRFYQEIDQLCFLSKNLYNVGNYLIRQTFINSNESLSYYDIQKQLQSSVDYKALPSKVSQQVLMVLDRNWKSFKEALKSWFENQSRFLGKPKLPKYKHKTNGRNIVIYTKQALSKPALERGVIKPSKTNIELLTKSVNIAQVRIVPKLDHYVIEVVYNKEVEPASIDVNKIAAIDLGLSNLATVTFNQAGIAPLLINGSPLKAMNQFFNKQKANWQSIIGTGTTKRIQKLCTKRHHKVDDYMHKASRFIINKLLGLGVDTLVIGKNENWKQEINIGSRNNQNFGQIPHSLFINKLTYKAELIGIKVLVTEESYTSKASFLDLDNIPTYQEGVKHTFSGKRIIRGLYKSADGRIINADVNGSYNIMRKAVPNAFANGIEGIVVCPVKVKLPN

SEQ ID NO: 2841 - protein, 282 aa, unknown
  TnpB Polypeptide
MRPISISFEKKAEYPRFKSKKTHRYSYTTKYTNGNIELYENKVKLPKIGLVKIKKTRAPKGRLLSATVSQVPSGKYYVSLCYTDVEEVLFPLTYNETGIDLGIKDFIVLSNGEKVENPKYLKKSIEQLKKLQRQQSRKTKGGRNWIKNRIKIARLHEKIANQRMDFINKLSTRIITEYDIICIEDLKVDNMLKNHNLAQSISDVSWSKFTTQLEYKAKWYGKVIKKVDTFYASSQTCHCCGYKNEETKDLKVREWTCPKCHSNHDRDVNASINILMQGILAN

SEQ ID NO: 2842 - protein, 412 aa, unknown
  TnpB Polypeptide
MTRAEQIKNTLQETRQRRETQKPVVYELKLQNLSKKKSDVLRKAFLEAKWLYNWLVSDTERLGIPANKVSVVEIKAGEAYEQRELTALGSQIKQEIADRLKDNLRALGKLKENGHKVGALKPKRFVNSIPLKQYGVTYSLDFAQNRVRIQRLGKFRVLGLHQIPADAEIANAVLVRKPCGYYLHVTCYLPKDSHTSLNPVGKDIGIDFGVSSKLTLSNGIRIDFEVHETPRLKQLQRKLARTQKGSRNRERIRFLLREEYEKLNNRRKDAQNKVLAFLKIYRKVVFQDDCVKGWSGLFGRQVHSSGIGGLKSRLRTSLETPVAVERTETTTKECFACGKRKELSLWDRVIECECGWKCDRDVNAALVILRKGLGLGVEQAVGLDRPELKPPEREAAARILGSNPYIRVSFPR

SEQ ID NO: 2843 - protein, 367 aa, Lactobacillus sp.
  misc_feature (284)..(353): Xaa can be any naturally occurring amino acid
MVLKGIKLRIYPDSYQKELIEYNFGANRFVWNNMLDMMIKRHENNPDLKALKAFDLNYILTTFKKEHTWLKKAESTSLQVSNKDLFEAYKGFFSKKRKFPRFKSKKFPKQSYQSKFVNNNVEIIDDSYIKLPKLGVMKYKNKKAIPSIIKYVTIRKSSTNKYYAILTVDEGITQLPKTNKSVGLDMGVSDLVICSDGSKYKTIRFDKKISKKKHYWEKRLARRRTQALKDIQYKKKFGLIDPKPLEQYSNYMRAKLMVAKYSEKIANQRKDYLHKITRELVENXXXXXXXXXXXXXXXXXXXXXXXXXXXXXXXXXXXXXXXXXXXXXXXXXXXXXXXXXXXXXXXXXXXXXXINYHVPSLINHGEH

SEQ ID NO: 2844 - protein, 453 aa, Lactobacillus sp.
  misc_feature (117)..(193): Xaa can be any naturally occurring amino acid
  misc_feature (376)..(451): Xaa can be any naturally occurring amino acid
MVLKGIKLRIYPDDYQKELIEYNFGANRFVWNNMLNMMIKRHENNPDLKSLKAFDLNYILTTFKKEHVWLKKAESTSLQVSNKDLFEAYKGFFSKKRKFPRFKSKKYPKQSYQSKFXXXXXXXXXXXXXXXXXXXXXXXXXXXXXXXXXXXXXXXXXXXXXXXXXXXXXXXXXXXXXXXXXXXXXXXXXXXXXIPSIIKYVTIRKSSTNKYYAILTVDEDITQLSKTNKSVGLDMGVSDLVIYSDGSKYKTIRFDKKLAKKKRYWEKRLARRRTQALKDIQYKKKFGLIDPKPLEQYSNYMKAKLMVAKYSEKITNQRKDYLHKITRELVENNDLIVIEDLKTKNLLGNHKLSRAIANQSWRALRLMLEYKCEWYXXXXXXXXXXXXXXXXXXXXXXXXXXXXXXXXXXXXXXXXXXXXXXXXXXXXXXXXXXXXXXXXXXXXXXXXXXXXLS

SEQ ID NO: 2845 - protein, 133 aa, Moorea sp.
LSRKQKRSNNRYKARLKVARIQAKIKDARKDFTHKLTTRLVKENQLIAFEDLAVKNMVKNPKLAQVISDANWAEIIRQVKYKSEWYNRKAVSIDRWFPSSKLCSVCLNRVESLPLSVREWDCPSCNTRHVRVA

SEQ ID NO: 2846 - protein, 557 aa, Bacillus sp.
MKKAYFSKRIYKTDLPYEMVEALTQTIETCNRAKRFAFQTIVREKRWNRKMHTDSLHLVLKRNYQLNDYYANSAAQEAKALFTGLMELQKIYEKQTQEKVKKLKKKLKQERTKLTDLRKIKQSCVKEKLTFPKNTRFAKHNNLISLSRKKDTLIWLNEYLFEHQYLDAQIKRIQAKIGLLTHRQLRLTQKLASYKTHIPSAVFGSKKLFRFRFTIDEFVRNHDKWKILFSRARNKQLILSGRKDAKYGNFGFQYVPETQELWMTTSSGKTLKFPAVTFPYGQEIMKEVITTQLQCKNKKKHGKPIAWSVEDHGEYYIVKCLVDVPENSHTNYSTSDGTIGVDCNLEHFAWANVTKDGNYKGSGALRFSILGKSIGQITKIIEAEAVRLVDLAERYNKPIVIEKLDTTQSKTGDRYGNKHANRMKSMFAYEKMTSAILGRADKRGVAVFQVNPAYTSIAGKMKYMRKFGISIHQSAAFTIGRRGLGYKEKVPRVLQLYIPKKDAHHWSHWHQLNNRLAIRTHHFYQLYDANRPNEALQIERLDVFENEKKKLAKLSVL

SEQ ID NO: 2847 - protein, 379 aa, Delta sp.
MEQITITAKIQIITSDTDRVLLNNTMAVYRNACNYVSNHIFHTHDLKQFSLNKVLYATLRERFGLKSQMAQSVLKTVIARYKTITQNQKEWIKPVFKKPQYDLVWNRDYSLTQETFSINTLEGRVKLSYHSKGMEKYFNATTYKFGTAKLVYKHGKYFLHIPVTYDVPAYKLSEVCHVVGIDRGINFLIATYDSKHKSGFVSGKAIKQKRANYSKLRKELQIRKTPSSRRRIKAIGQRENRWMQDINHQVSKALVENNPKHTLFVLEDLTGVRNATERIHTKTRYVSVSWSFYDLEQKLIYKAKQNESAVIKVDPAYTSQCCPKCGHTEKANRNKKKHLFTCKNCGYQSNDDRIGAMNLYRMGTNYLVDSQVPSAVAKE

SEQ ID NO: 2848 - protein, 342 aa, Ruminococcaceae sp.
MVYNHYLDKQIRLYEEEKITFGYTKCANDLTVLKKEKEFLKEVDSISLQQVLRHLDTAFQNFFKQPKTGFPKFKSKKKHINSYTTVCVNNNIKLENGKIALPKIGKVKVRQHRSIPENYILKSVTVSQTPSGKYYASILFEYENQVQKSEPQIFLGLDFSMHELYVASDGTSAQYPRFYRQALKRLEREQRKLSKMQKGSNNRNKQRIKVARLHEKVADQRKDFLHKQSRQITNAYDCVCIENLNMQAMSQSLNFGKSVADNGWGMFTTFLQYKLEGAGKQLVKVDKFFASSQVCSICGYQNPETKDLSVREWDCPCCRTHHDRDINAAVNIRNEGMRIALA

SEQ ID NO: 2849 - protein, 393 aa, Micromonospora sp.
LDPTVQQCARLAQHAGLSRVVENFCLALVKAALDQRNAERTYGIGEERLTPVPWSAPALEKAWRAAHPTAYPWFTQAGLSSRVPKEACRVRAAGLRNWADSRKGARRGGRVGFPTWRKRRHGFRFRYDADRAHPTGPSMVALPGVGPVRTREDMSWLTGRIGDGRARIIGATVRQQAGRWWVSFQLEIDRTDVDTRRAVAADAPTCGIDLGLATFAVIADDTGQVEEIHAPRALKAAQRKLRRANQALARCQRGSANRAKAVRKIASVHLKVAHQRADFLHQLTTRLATSKRAIAVESLNVAGMLRNRRLARAVSDAGFAEFVRQLQYKTTWYGSTVWAADRWYPSTKTCSVCRAVNAGLTLSDRSWTCRCGATHNRDHNAARNLLTAMHAAT

SEQ ID NO: 2850 - protein, 518 aa, Massilia sp.
LDLRGGGRPRLGHELPQAGIEKTARRHSRRWRRPHRAHAQGSPAALRRRAGVRPMRGKADRGGHHQPGRGKQLRGGAGPRRARDRHCVLRPAVRKPKPQEPQADRRRAQGRTGGTVLAAHRIRLAPNNAQATYLARAAGTARFAYNWALAEWQKQSLARQNNPALPAPSQLSLRRQLNAVKRDQFPWMLEVTKNAPQMAIIQLGQAFENFFSKRARYPRFRRKGRDDRFTLSNDQFAVEGQRIRIPKLGWVSMREALRFTGRIVSASIARRAGHWYASLTVDTLEDQPLPTAENQGAVGVDLGISTLATLSTGEKWPGPKALRALLARLRRLSRALSRKVKGASNRRKAKDRLASLHARIANVRADFLHKLTTSITRRFHTIGIEDLNVKGMLANRHLARAVADMGFSELRRQLEYKADWRGGQVVVADRWYPSSKLCSCCGRLLEALALGTRRWSCAGCGTQHDRDVNAAINLKSVAVSSTVSACGGDGTGPARQRGTKPSPAKQESNSMAALNNKG

SEQ ID NO: 2851 - protein, 240 aa, Cyanobacteria sp.
  misc_feature (3)..(44): Xaa can be any naturally occurring amino acid
MNXXXXXXXXXXXXXXXXXXXXXXXXXXXXXXXXXXXXXXXXXXEKGKNGRRKARRRFAKKHLRISRQRNEHAKRLARLLCKSNDLVAYEDLVVRNLVKNHCLAKSISDAGWAKFRQWIEHFASKYRRVAVAVSPHYTSQKCSGCGAIVKKSLSTRTHACKCGCRLNRDFNAAKNILNLALQARGGHPRSKAVGVETSTLVGETLVEQVSTLITESPCMDNRGVSISAGIKLLFADAKPE

SEQ ID NO: 2852 - protein, 299 aa, Cyanobacteria sp.
  misc_feature (256)..(297): Xaa can be any naturally occurring amino acid
VLVLEYKVKAKPYQYKAIDEAIRTVQFVRNKCLRYWMDAPKEAKINGFALNKYSTKLREEFSFVKDLNSMAVQASAERGWAAISRFYENCKNKQPGKKGFPRFQKDNRSVEYKTSGWYLHKTKRRITITDKKGIGELKLLGKWDIHTYPVKSIRRVRLVRRADGYYCQFVIDVECFEHLEPTGKSIGLDVGLEFFYTDSNGHTEENPRFLRKVEKSLKQAQRRIYKKEKGKNGRRKARRRFAKKHLRISRQRNEHXXXXXXXXXXXXXXXXXXXXXXXXXXXXXXXXXXXXXXXXXXER

SEQ ID NO: 2853 - protein, 407 aa, Cyanobacteria sp.
VTKWDSASGIQMKVTTQLRHEFSSFEEINSDVLQRNIAKLDAAYTNFWRHGSCFPRYLRALKSFEYKPKQVKIEAISDSYAIVYLPGIGNVKMHNSRDLSLVKEVRTCTVKVSGGYWFISMLVEIPGSLPEEKPLSEAKSVVGIDVGVNQLVAISDGSFVENIRVTTNAKTARRLAIRQRSAGRKRKGSSNKRKAFERNARTNYKLTIHRDGYNWQAASKIVKTADAIGREDLNIKNMVKRAKPKPDGNGGYKRNGASAKSGLNKVILDCGWGDLFKKVSWLALKVGKPVIAVNPRQTSQECPECGHTDKANRNGEKFLCSNCGYTEHADTKASRTIAKRVGLVFPKNHKTLPADCGKVTPVKISTSGYVESRNHAYESSHIQLSLFDLNQYTTVDSRKSQRYGRNS

SEQ ID NO: 2854 - protein, 412 aa, unknown
  TnpB Polypeptide
MKTFKYRIYPSTAQETQLNQQLELCRWVYNKTLETRKNSFEQFGISLSFYDTKKMLPDWKAEKPDLKRVHSMVLQDVTLRVDLAFQAFFRRVKAGALRQDFGVSAQSNAQGAAGELTFGELSRAVEPGYPRFKGYQRYDSMCYPQYGNGVKLDGNRLNLSKIGSVKVNLHRELRGKPKTVCIRRSSTGKWFATFACACEPIRLPDEPKRIGIDVGTATFATLSDGSKVKNPRFFKRDVKRLADAQRRLEREAKGTPGRTKRKKVVARIHERIANKRTDFAHKLSRQWVNAYGVIVLEDLNITGMMAEHKVIFGYKLNKSIADVAWHQLAQFTLYKAADAGRLCLQVDPRNTSKMCSRCRSLVPKELSDRVHNCPHCGLVLDRDHNAAINILARGLASINADSSDVVVEAHPL

SEQ ID NO: 2855 - protein, 456 aa, unknown
  TnpB Polypeptide
MAVIPFLSPSKDDVLFIGCRGRCFAPKVRRLIALDTLTWFLIILQSVPSVRRSLPCELASPLPPEIKFLMQDFRLMVNKSIRFAMENNLTAKGSLVKLAQSMAKEYHLNFQHARTATEVALSLSKGHRRRLRKGKECKLPYVYKPFLRADDSTFHVSMENGHVRLSIRAGEWSGFDLILSSYHLDALASGKVKQLTLNEKKAVLVIEKEAPEQYVPSLVIALDTNERSLDGVSLSSYGVVPITVPFPDVSIVQHRHFVRRRKLARKKRRDRRVGRMLLSKEGKREHDRVSQRLHLVSKGLVRAAEQAQAAIVLEDLRLPRGGGRGRRMRRRISSWPQRELHRQIEYKAEELGVPVIKVDPRYTSKTCPRCGEIKQRRSRVGRVFVCDKCGWRMDRQLNAGLNICRTALAELPEAMRRGLGGLRLDPDALADDTMILLYSSGSAGAHGVSGRPGNTR

SEQ ID NO: 2856 - protein, 376 aa, unknown
  TnpB Polypeptide
MDKTAHGRMVDKVQVQKVIKAKIVGLTNIKRQILDHEYEGLQRFLRGDSGVELYSANKQQAKRFYRVVKPEQEYPLSIRKDLIRVEHRNTKLSRYWVRIPVKLRRGGIWVAVKPHCEIAEDLEICESKLLKRNGEYFLHLVVKREVELKTSYSSVLAIDMGIRHAACSVDTRSGETHFYGRELRKARGHYFHLRRNLGREKLLKVVKRIGDKEGRTTNDQLHKIAKAIVDEAERTNAIIAIGNPKGIRKSGKGRRFNRKLNSWPFWKLRQYITCKANWRGIRVVEVNEAYTSKHCSRCGQIGVRSGNHHGLFECPRCGLKENADRNGAFNIGRRALGQVSEAGAVVSQPVTGALPSSELGSVVQYPTPEATQLVRW

SEQ ID NO: 2857 - protein, 435 aa, Calothrix sp.
VICLYGCQQVLIHPNPDLKAILSFICSQSNNLSNCALYYARQIWFKAKRYITKFELDKEMKSNRHFQTLYSQSAQQLCRSVYESFASFKQLNALYQRGELLERPRLPKYRKNGLNSVSYPKQGLRLIEDGQIRIPLGQTVKVWFKLDSFTLPMPSNLSFDSIREVRILPINRCFYAEFIYQVDPVVSDVDKSRVLGIDHGLKNWLTCVDNIGTSFIVDGRHIKSLNRWYNKQVATIKENKSQGFWSNKLAAITEKRNRQIRDGINKTARIVINHCLENRIGRVVFGWGQGIKQEINLGKKCNQQFVQIPTARLKQRIEQLCQQYGIEFIKTEEANTSTASFVDGDTLPKHGEKPNDWKSSGRRVKRGLFRTAMNWYINADANGAANIIRKVSTTLGLDLSGVCRGALTHPTRIYIWVTAKKKQRDAVLTCPVASF

SEQ ID NO: 2858 - protein, 395 aa, unknown
  TnpB Polypeptide
MLLVESHITNATSELNDLTFKCKNLYNKANYIIRNEFINNGNYISKFDMFTIAKDLDEYKALPVRIGRGVLRTLDANWKSFFSTIKRWKTNKELFRGKPNLPKYLPKDGKFTALFYESAILKETKKNKGIGLSSLKMRIPVKTKNKIIEIQVVPIKNDKFKINIIYDYKEDALKIDNKQYCGIDLGINNLMTVTSNKSGCKPLVVNGKPLKSINQYYNKTKAKYQSDLPKNIHTSKRIDKLTFKRNNKINDYLHKSTDYITKVCLENELNTIVIGYNEFWKQKVNIGKVNNQKFVQIPFEKMLDMLKYKCQKYGINIITNEESYTSKCSFLDNEIICKHDNYFGKRIKRGLYKTNRGRLINADVNGSYNIIRKVFPNAFSNGIEGVAVHPYRVNL

SEQ ID NO: 2859 - protein, 423 aa, unknown
  TnpB Polypeptide
MDVQRTVTVLLPDDADLRATLVAFRSVQQDVSTTAFNTGKPLRAVELHRAEYNAVKGRVNSQMTITALRIVAGAYASAKTLHASKVKAEARRKARYETKGWTYKPRQIKPLGLCHFERATAMFLVGQRGRDADFRKDGSLSIWTVGGRKRIAYDVVAAHKPLLDAAKEVDSITVIERDGKLYGRVALTLDAPEPRGVVPVGIDLNETNALVAVDADGRELFISGLATKVRNRRTMQVTKRVQAKLAIRKAEKRDTRSVRRVLKRLGGRRSRRTRDFARVTAKALVTWAPVDAVLVFEDLQLSRPERGLTRGVALRRRLSLWQHRAIRTAVENKAQMAGVAVAFVDPRYTSKNCSRCGLRGVRRRHSFTCPHCGFEAHADANAAINIRQRFVQSRLDAAPSVAAEALPLLGVGEGKPSALADGH

SEQ ID NO: 2860 - protein, 373 aa, unknown
  TnpB Polypeptide
VEYSYKFRLYPNGEQINLIERTFGCCRYVYNHYLVKRQDVYKTSGETLNYYACANDMTQLKQQEQTSWLREVDATALQSSLRDLDTAYQNFFRRVKQGEKPGYPKFKSKHSHKQSYKSKCVGTNIRVLPNAVQLPKLGKVKCRISKTVEGRILSATVSRSASGKYYVAICCRLDREIPKLPSTGAVVGLDVGIKSFAVSSDGVEYANPKYLRQSEKKLAKLQRQLSRKTKGSANWNKTRIQIARLHEHIANQRKDMQHKLSTEIVRQNDVICIEDLAPSNMVKNHKLAKSIADASWSEFRRQLTYKADWYGRTLVTVDRFYASSQTCSYCGERWPGTKDLAVRQWVCPNCGAALDRDTNAAVNILHEGLRQIA

SEQ ID NO: 2861 - protein, 389 aa, unknown
  TnpB Polypeptide
MTVRNVSQRIPFVPSKTQAALLEQCFGARRFAYNQQVEAFNSYDKDANPRPSYPNVTDMKNENEWLRDSPVPSNALSNAIQDFRRAQSAYFRKAQYGKDRPRFASKSDNVQSFRNRSPMRHMEGNRYPLSKKLGSVRIRRRDRIRYPLESLSSWTVKRENGVYYLILLFDVEIQPKPKAGGKVGIDVGVKDFLTLSTGEKINYPDRLHQLEEKVRWEQRKLSHRVKGSSNYSKQKATVAKAYAKARHYREDFQHQVSHRLIEDNQFIGVETLAVQNMTRKAKKKLDENGKPMRNGQASKRAMNRSILRNGWSGFVDKLAYKAQWYGRTFVQVDRFYPSSRLCHGCGHKYDELRLSEREWVCESCGASHDRDVNAAMNILDEALRLGQTG

SEQ ID NO: 2862 - protein, 419 aa, unknown
  TnpB Polypeptide
VSNQVVTRTVKATIQNQSQVHDDLDSHGYAASKLWNVGRWTIQRVWNAIDHIPDGDELASYLKDHAKYNDLHSQSSQKVLQELSNAFHSWYNQDNSDHNPPGYRKHGDTHPRSTVTWKNNGFKLDTKNNRVRLSKGANMKPSRYAADYILCEYEEQADYTLADVHRVQTVRAVWTGDDWELHFVCKLPVETQDSTGEKTAGIDLGICNTAAVSLGDETLLYPGNALKEDAHYFRHIEYDTEGDDGPSQTAEWARQKKSRRQDHFLHAVSTDIVQQCASRGVGTIAVGHPKNIREDEDWGRHGNKRLHDWAFDELIQHIEYKAEERGISVERVDEYELRTSKTCCACGMEADSNRVKRGLYVCEGCELVANSDLNAAENMRATVTPSPEVDRSNGCLAQPSVRLCDKSTGRVRLQEQVVS

SEQ ID NO: 2863 - protein, 370 aa, unknown
  TnpB Polypeptide
MLIAHKIELNLNNKQRTYMAKTCGVARFAYNWALAEWTRQYEAWKADNSLPKPNQMALRRQLNAVKRVDYPWMLEVTKCAPQLAIMQLGTAFKNFFSGRARYPVFRKKGVHDRFSISNDQFAVKGKRFRVPNLGWVRMRETLRFTGRIVSATVSRVADSWFVSITVSVPDPTERRTENQGAVGVDLGINAMATLSNGDIIPGAKPHTALLGKLRRLSRSLSRKVRGSKNRSKARAELARLYARMSNIRRDCLHQLTTYLARSFSVIGIESLNVKGMLKNRRLSRSVADMGFFEFRRQLEYKAGMYGSVVRVADKWFPSSKMCSDCGYVLPELSLDVRQWQCPECGAEHHRDINAALNLRNLALSMGATGT

SEQ ID NO: 2864 - protein, 438 aa, unknown
  TnpB Polypeptide
MKDEKSNGRKSINRGRKRQMEIFRAYKTELDINDKQRTLLIQCSGTARWAFNWGLARRIQEYKETGKSSNAIEQHRQLNALKSAEYPWLYNYSKCIPHEALRDLDKAYQNFFRRVKNGKKIPGFPKFKSRKKGIGSFRLAGAVHVTETHIKLPRIGWLRLKEHGYIPIDGIHILSVTVSESAGRWFVSVQCKQEIETIKAIGEPIGIDLGIKDLAVTSEGTKFENPKPLKKARVKLKRLQRELSHRKKNGKNREKTRRKVAKAHQRISNIRRDALYKATSAIVAKTKPDSERPSVVVIEDLNVSGMMKNHCLAQAISDVGFAEFRRQLKYKTVWYGSELIIADRFFPSSRMCRFCGNINTELKLSDREWICSCGAILDRDLNAAINLKNLAVRRVPPEQACIGQVNAYGDGKLQPSGGVHRRNRNQTLDLPLVDLSRF

SEQ ID NO: 2865 - protein, 200 aa, Okeania sp.
VINGRPLKSINQYYNKVKSSLQSQLKENQWSKRLKKLMLKREFKINDYLHKPSSLIINTLINQKIGTVIIGHNPEWKQKINLGKRNISYFVSVPYNRLIEMLSYKAKMVGIDVIITEESYTSASSFIDNDLIPVYTEGEKNNVTFSGKRIKRCSAAKGGFPHERLHQDKEECNCTASIGLINESRERFFEHYEKSSPKCL

SEQ ID NO: 2866 - protein, 344 aa, Okeania sp.
VPGKKAVRPRDDGSRKGTRTKRGYPKFKKYQVRASVEYKTSGWKLSEDRRYLTLTDKFEVGTFKLWGSRNLHYYQLKQIKRVRIIRRHDGYYAQFLIDHIREEKKELTGKQTGLDVGLNHFYTDSEGNQVDNPRFFRKDERQIKKLQKRLSGTKKGSKNRIKARNRLGREGAGAEPASAHRAPSHLKVSRRRNDWACKEAQHVIESNDLVAIENLKVRNMVKNHHLAKSINDAAWYKFREWLEYFGSIYGIPVIAVEPFNTSQNCSNCGKKVSKTLSTRTHKCPHCGYEADRDENAAINILQSALKQLSTTPGRGESNISGETGLCLDGETQTDKPTRRKRKSG

SEQ ID NO: 2867 - protein, 404 aa, Okeania sp.
VIALTYQYKLRPNQQQEAEINQILDVCKSVYNYALRERKDWLSSRKSPINSCSIISEYIIPADTPYPSYNNQAKSLTIAKKTNPKLKSVNAQVLQQTLKNLDQAFSKMKSLGKGFPRFKKKLRSFVFPAMLKNCLGYTKVKLPQLGWIKIRKSRPYPEAMTAKQARIVKKASGYYLMITFTSSESVPDNPVGKVSLGVDAGIENFVATSTGQLIKSPKFLLSQLRELKLLQRRLKKKTIRSNNWFKYQNRIAKLHEKIANTRRDWHFKLAHQLCNLADNIFVEDINFNSWSRGIIRKQSLDSGIGQFINEILPFVCWKRGKYYAKVDKNHTSQECPRCGHRQKKKLSDRKHNCSNCGYQINRDVAAAKVIRNRGLIAVGHTVNQNACRDGLAGVQLSLFDLLPS

SEQ ID NO: 2868 - protein, 321 aa, Okeania sp.
LWFKADKNGQRLGKPRFKGKGRYRSFTYPQIKLNCIEGNQINLPKIGKVKLIQHRPIPEGFQIKTVTISRKVDGYYVTLSLEDKSVPALTTKVEPTLKNTLGIDMGLKEFLVTSEGESVPIPQYYRKSQQRLKTLQKRLSRKKKGSKRWLKALLSVAKQHKKVADKRKDFHFKTANELLSKAEVIAHENLNIKGLAKTRLSKSINDAGWGQFLTILTVKAENAGQKTIAVNPKNTSQNCSNCGKKVPKKLNIRTHSCPHCGIAIDRDVNAAINIKNRAVGHSVLKARACPTGYRDWETRSPHYTARLVWEYVTQLTIAIDS

SEQ ID NO: 2869 - protein, 409 aa, Okeania sp.
MLLSIKVELKPNNKQVTAFRKASGVARHAYNWANALVKDVLVQRETDKTIKVPSAIDLHKRLVAEVKSENAWYYETNKNVPQQALKELRTAWDRCFKKIAKQPKFKKKGQCDSFYLESGSKAAPKIKNDGKRIKLPSIGWVRLAEPLPVTATHNCVISRTADKWFIAIKYEVEKPSIEGQRPTVGVDIGIKELAVCSNGKVFKNPKTYRRMSKRLKHLQRQVSKKVKGSNNRKKAVTKLAKIHARIANIRKDAIHKLTTYLAKNHSIIKIEDLHVKAFLKNHRLAGAIADCGMYEFRRQLEYKTEKFSSQLILVDTMFPSSQICSNCGNHRHKMPLKNRVYICPDCGHIEDRDLNASKNIERWFEGIFIPTLPSQTVSSTGMACGVDKPFSCQTKATLKQEVNAKTTYV

SEQ ID NO: 2870 - protein, 238 aa, unknown
  TnpB Polypeptide
MATTCSLPCRQIGKHVGIDVGLKTFYTDSEGNTVPNPRFLRKAEKRLKRLHRRKDRKHKGSTNRKKAIKRLAKAYLKVSRQRQDFAVKTARALIMSSDMIAFEDLQIANLVKNHRLAKSIADAAWGQFLSWLRYYGHIASVPVVAVSPCFTTQDCSGCGERVYKSLSVRTHVCPSCGLVLDRDQNAAKNILEAALDYLADLNRTAGQAETGRSQERRNASGHQTSSRRKRLRSVASDG

SEQ ID NO: 2871 - protein, 404 aa, unknown
  TnpB Polypeptide
MLVRGVVFYLDSELPFDAKSLLEDFRLAVNCSIRTGLHARVTSRNALCRLAYKDFREQHPRMYAKHLVSAFEVAGSALKNHRRRVRKGVTCRIPYVKRLMMKAENQAYKLDRKSGVVDLPIRAGCHVQLKLIVSQYHQKYLDDAALTLGSLTVLPDRVIVAFRKDAPKLFVPESALSLDTNERSLDGLFVEGDVAKAVKAEFPDIAIIQQRHHDRRKRLQKKKAHDRRTSKNLCRKEGTREHHRIDHRLHQVANSILRFAEERKSAIVLEDLKGFRSKRSKELNRRLSMWPRRKLHQIIEYKARWKGIPVVKVDPRNSSGTCPICGRIQYSRMGTEFKCECGWHLDKHVNASINLLKTAISKGVAGGLWFNPGAFQHDVMMILYEPAMAARSEPNGTSGIVGVT

SEQ ID NO: 2872 - protein, 638 aa, unknown
  TnpB Polypeptide
MKKKRKKKGEDEDDGNQKPPEADEVDGRNKKVKRTDVSRRKQERKNLDSSVIKCSLSGRFCHDARHWPSEARAIMLQVLDEQVESLSQMMVRGSMVANEVLLTCLRENLPLPDLTSTNFFRHCIVGKSNDPLVSRVLGTVFQNHPEILRLKGDWAAINILTNRYVTNVKNSFVVPFLDRQKAFVKKWLEIKELEKYYQFDIICEINGWPRRTPRVFPAEVHELIKRHRELLEEPQDLHPKDLRPHVVVRYYHELQCFYDNSGCARISLLPLCISKRHFMTIDSTVLLKMLLNVVEKMGNQAPDWIKDIALYDNVCDDAIHACREEMWEKTFGLKKLKTSSKHRFDYQVDTDGISACFHFSHPKPPQPVDTSVDDRTHFLDAKRIISIDPGRTNLVTAYDSYFDRYFTLTRKDYYGYFRGSDRKIRLWEREMQPINTELSEFSLRSADPFKCQGYRNTYFRWYFTIWRSRLAFNRARESLNIFFKKRECLDKFFAKMRGPKDAPRPKVAYGAASIRPHAHGEMSAPVKYVLKACSKMYHTTMVNEHLTSKTHETCGSRMHPVKNEGEPANQSIRGLYWCPTCRKLVNRDRNAALNILLVARCIEGRPNHLAFGQPAVYMRKLTLLPPKKQKRRTGLVSS

SEQ ID NO: 2873 - protein, 419 aa, unknown
  TnpB Polypeptide
MEVRRTAPVKLVVPDERRDDLHKSARQFLHCANRAAEFCWSDRSYTECVTVNTTARDALYDEFRDETDLTANLVQEAIRRAVHATKGCVERWKNGKRVSQPEFTSWSMLYDKRSATFYRNKVSLSTVNGRVECDFELPADSPTPYEQYVLSGEFEYRASTLQYDEATDEFYFHITTRKYDSDEDSSDNSEGSADAKHQTVLGIDLGVNSLAVASTGRFWQGDDYDHWCREFEKRRGEMQQRGTQAAHTALLRLGKREEAWRKQYIHTVANELVSEAVKHDCDVIVFEDLTDIRERLPEAKWHHVWAFRRLLKYVEYKTPERGISVKQVEPNHTSQRCSRTDCGFTHDDNRHGEHFCCQKCGYEVNADYNGAKNIGLRYARKRQHRLRSSPKSGSGDAPVDVRVNGGTLNGESHQPIAGD

SEQ ID NO: 2874 - protein, 371 aa, Acidobacteria sp.
MHRIFKYRLYPNRKQRRMLDTHLMLCRELYHAGLQERIESYKTNRKGVTWLEQQSQLPAIKEARPEFKNIHAHTLQAVLIRLHRAFQNFFGRVRKGQNPGFPRFKGANRFRSLVFTCAAYQVHGSRVQISKVGSVKIKMHRPLPKEVGTLFLKNVRGAWYGCFACEVETDALPAIHQAIGIDVGVKSFAVLSDGTAIENPRYYQQAQAKLRVAQRRVARRKRGHRRGKAVLLFQKIHQHMAQQRADFQHQLSTGLVQNYGTIAVEDLNVPGLAGSMLAKFVRDAGGAGFFQKLAYKAESAGREFIPVPAPGTSQTCICGAAVPKRLSDREPVCTACGLITDRDHISARVILQRARIVPSCVNVGEVMPCVA

SEQ ID NO: 2875 - protein, 415 aa, unknown
  TnpB Polypeptide
MRGRKQVRHSLLRALLCIAIPYNNYKLTEGTAQAFSLLVCALSEAKGMLKTMNKAFVFRIQPDKEQKILLAKTFGCARFIWNKMLSDKKECYEETGKSLKTTPAKYKEEFPWLKEVDSLALANEQLSLEKAYKNFWNGKGKVGFPKFKSKHKDRSSYTTNYVNGNIEISNGKMKLPKLKWVTIKQHREIPDGYQLKSCTVSQEPDGNYYVSILFAYEQKIKPQEIENVIGLDFSMKELYVDDEGRIPEYPGFYRKAQEKLAREQRKLSKCEKGSSNRAKQRKIVAKLHKKVSNQRKDFLHKQSRQIINAYDAVVVENLNMKDMSMALKFGKSVHDNGWGMFVLFLQYKLGEAGKQLVKVDKWFPSSKTCCVCGKKKDELTLSERVYICECGNIMDRDQNAAINIRQEGLRILGIA

SEQ ID NO: 2876 - protein, 424 aa, Streptomyces sp.
MQTAPVKRAFKYRFYPTVAQAAELSRTFGCVRKVYNMALAARTEAWTLRQERVNYNATSAMLTAWKKTEELAFLNDVSSVPLQQALRHLQSAFVAFWDRRTRYPRFKSKKKSRASAEYTTSAFRYRDGKLTLAKMSEPLDIVWSRPLPNDVQPSTVTVSQDAAGRWFVALLCEDPGVRPLPPADEVIGVDAGLDHLLTLSTGEKIINPRHERKDRARLAKAQRELSRKADGNGANRAKARVKVAKIHARIADRRRDHLHKLTTRLVRENQTIVIEDLTVRNLMKNGKLARAISDAAWSEFRSMLEYKAVWYGRDVIAVDRWFPSSKLCSVCGMLAEKMPLNVRTWTCGCGTTHDRDVNAAQNLKAAGLAVSACGAGVRPQRSTPGGRSAMKQETRGASRGALPRPTRGRKPTLGSPPDLKPRQR

SEQ ID NO: 2877 - protein, 396 aa, unknown
  TnpB Polypeptide
MELTYKYRIYPTKQQVSDIRNICSAARFLYNKLLEDITQHYREKRQWKKLDSKPFIEFFPFLAQTDPGALAWAVNRLDRAYWHFFFVEKTETDRYQPEAIAKNKMDKKYALLDTDLVCYPQYKRKKDTKESYTTVLKNVNVEKKRILLPVLGRVKIAYHRQVPKDAQLLDCTILKNKAGKYFILLRLALPEAPKKELQTALGMVFVPGGPIAMRSDGYGVCIRHQTPQQTKRMEQAYKTLCRRVYGSRRYEAQRKYLASLYEKRANQRRNDLHKAARQITNAADVLYLQKPDVRKQAAQQKTARARAEIWDEAWYALYSNVRYKAEQEGKRFWGVPENFPTYHFCSGCGTFKKDPEENQWVCPECGLQMDKAVNAATNLKHMAEKYIREQRELAQR

SEQ ID NO: 2878 - protein, 360 aa, unknown
  TnpB Polypeptide
MKGYKYRIFPTDEQKIQIDKTISCCRYVWNGFLALKEFRYKEFGETMNYNTMNKLLTEVKKADNFLHEVDSTALQQTLKQLDNTYKMFFKGVCKYPRFKSKKNPKNSYKSMSVKIKDNQIVIPKIGKVDYANSRSINGRILSATISRTPTNKYFVSFTVDEDVKHLLKTDKEVGIDLGLKTFAVCSDGQEYKSPKPMWKYISRLKKLQRKLSKKKSKESNRYKKLKLKIALLHERISNIRKDFLHKLSTKLIQENQLICLEDLNVKGMTKNHKLAKAILDCGFGVFAEMLKNKANMYGRQIVQIDRWYPSSKTCSCCGHIKSDLKLSDRTYVCEECGIIIDRDFNASINILTVGRQLIRG

SEQ ID NO: 2879 - protein, 486 aa, unknown
  TnpB Polypeptide
MPSLTYVKGLPTPVSELNSLGCTEMEMFLEAFAPLFRLGAIETVNHLLSGGEFDKSKWNTHLQNAYQISKRHANGVISYASCKVDGAKEQRCLHIKTLEGKAKSIENWLKKAERKLKLARKFYAKKKWQQSNTGCNFPLSCSLNFKDTNWGNLKFQIHNKKRKLALIRHKVEHLKAKPIRVYVPHGQVFIVGSKDEKWGNQTAQWDGNVLKIRVPSCLESRFGKYIDSEVGNYERNINRLPVAGAKTWHLFHKDGKWNVAVQFTPSNVKRQSKDRAYGCIGIDMNPGSIGWAYVDTEGNLKAKGQIPLEMGLPSGKQQATIVDACLSLVKLAISFQCPVVCEELDFSDKKERLGEQGRKYARMLSSWAYSEFFKQLGSILSNRGIELITVGSAYSSVIGLAKYMKRYGLASDEAAAMVIARRGMRLSERLPDSITAYFEVNSGKHVWSQWNQLNKQIKRSGKINCRHDYFTVSNWSFLGTPQKEEA

SEQ ID NO: 2880 - protein, 314 aa, unknown
  TnpB Polypeptide
VLKFKNDKPLLAGLLTAKAAQKRKWLTGSGLRKDVTLPIPNLSGEALSACTYAEIVWHRGHYWFHYCIDTPVAEPRHEHLPLKPAGCDLGEIHSVTLATENKALVLSGRAVRAVKQGRAKFLAELSKKMARCKKGSRQWKKYLRAKRYLQQKSDAQIKDWLHKTTKQAVDFLLAEQVTHLVIGKVDGIEKNTRKDTTKKRKTTQRRRQQLSLWEHGRLTAYLTYKAKKAGVVVEETGEAYTSQDCPFEVSPEGRRRWRRPRPRRSVVILPCCLPIAWPLPAAGTRGVRRKESHVLQLWEKVKLGYLLFQKFFSM

SEQ ID NO: 2881 - protein, 273 aa, unknown
  TnpB Polypeptide
MREPLPIRWSRTLPRKTEPSTVTVSLDAAGRWHVSILVEETIRPLPARRNAIGIDLGVDSYAVTSDGETIANPRHYKKLAERLEREQRTLSRKTKGSNNRRKAALKVARTYARITDMRRDFLHKLSTRIIRENQTVVLEDLNVKNMAKRCAPKPDPDNPNHWLPNGQSAKNGLNGSIMDAGWSEFRRMLEYKAEWYGRQLITIDRYYPSTQICSHCGAKTGPKGMPGLKVRAWTCPDCGTTHDRDLNAAENILAAGLAVSVCKDGRTGTKVSH

SEQ ID NO: 2882 - protein, 412 aa, unknown
  TnpB Polypeptide
MRLVRQSVIKRSSPAYTGVEHLCHLSKNLYNAALYTIKQKYESDGTYLNYYDINRIMCETNNPDYRALQNSQSQQTLKLVDQNYKSFFTSLKSKNVKHKVSPPKYLKKNGLYTVVCATNGFSQKKLRQGIINPGKTDIEIPFTGIDPDSIQQVKFVPRNGYIMMEVIYNVEDREPLPDNGNYMAIDLGVKNLATCTTTIDKPFIINGKGLCSINQYYNKEKSRIQSELEKKNGKKTSKRLQNLTNKRNRKIKDQLHKASRYIIDYAVSRHVNTIIVGKNDGWKQDVNIGEINNQNFVCISHTQFVNMLQYKAELAGIRVVLTEESYTSLCSFVDKETIRFHEIYAGKRAKTKTFITSSGMIMNADVNGSLNIMRKGLMKINASDDAAYHCKPVGRGFIVNPVKISDFTKFKE

SEQ ID NO: 2883 - protein, 428 aa, unknown
  TnpB Polypeptide
MGRVAGPSRGQGRDGSRVRAERAPPQVPRPAPRPVGDGDRGGAPGQVRPVRRGVRRGRPRRPGTPTARRRPGGSRRRPGAGRDGDPDLAVRAAVRAARGGEPGCPRHRRDHRGRPVKVLQAYKYAIDHTPRDERGLRSHAGAKRFAWNWGLARCRERHDAEGKWYSAAELHKLWNTEKKQDPALAWWSENSKCAYQEAFRDLERALRDFVKSKKGQRKGKRLGFPRFKKRGKCRDSFRFGAGVMRCEGTTVTLPRLGTAPHPRVHGGTRVAGPGWPGADLVGDREQDGAKVVRVVRGRGRAGRAGGPRPPRHRDRDRPRRQDPPHSSRQHREHHRDTRAEAAARVPAEAAPRVPRLLPQAEGLEPPAQGGGAPRPDPRQGRERPGGRAPQGHHPAGGPVRDRRGRGPERDRDDREPEAGPRCRRPGIR

SEQ ID NO: 2884 - protein, 413 aa, unknown
  TnpB Polypeptide
MLVKGVVFRLASDLPPEALSLLLDFRLAVNKAVRASLDARASSRYGITKLLYKTFREELPGMYAQHLVSSFEVAAGILKNYRKQLRHGGRCGTPFVKRLMMKAENQAYKLDRAEGMIDLPIRAGCHVKLRLVVSRYHRRYLNDETLSLGSLTVLPDRVIVAFRKESPRPIAASSVLSLDTNERSLDGIFVEGGRKGDTTCVQVKAAFPEVAVIQQRHHERRRRLQKKKAHDKRLTRALCGREGAREHHRIDYRMHHVANAVLEFAEDHRSAIVLEDLRGIRPNKNKDLNRRLSVWPRRKLHQIIEYKAAWRSIPIIKVDPRYSSRRCPTCGRIPDSRMGTRAEFVCECGWHLDRHVNASMNLLQTAISKGLEVAGGLRFSPGAFQHDVVMTLYEPAMAARSEPNGTSHFGVTS

SEQ ID NO: 2885 - protein, 362 aa, Bacillus sp.
MLKAYKYRIYPNKEQRTFFSKTFGCVRFVYNKMLADRINSYHESQTSIDKSIKYPTPAQYKKEFPFLKEVDSLALANAQMNLNKAYAHFFRDKSIGFPKFKNKKENRCSYTTNNQKGTVCIENGYMKLPKLRTRVRIKQHRPFFGLIKSVTISKTTTNKYFASVLVEEKERLFPELKKRVGIVMGLKGFATLSNGKKYEIPKWMRKTENRLVFLQKSLLRKKKGSKNQNKIRSQIARLHEKIVNQHNDFLHKISNEITNENQVIVMEDLKMKDIQNNHKLAKSICEVSWAKFREYQTYKALWKDRELIIAPKNYLSGQLCSCCGYKNKEVEKTNLYEWDCPMCNSHHDRDVNASINLLKLAL

SEQ ID NO: 2886 - protein, 152 aa, unknown
  TnpB Polypeptide
VLTWGSQGSPHSPLDGRFLGNPKPLERSLERVRVLQRTLSRKKFLSKNWLKTKTRLAKQHERVKDFRRDLFFKLGALLAQEYDLLVLEDLDVQGLIQSGTKRGGGFGSTTPRSQSSERCWSGGFEKEENRFYLSPLTTLHVSVSCVVGSTRV

SEQ ID NO: 2887 - protein, 448 aa, unknown
  TnpB Polypeptide
VLKSYSLKHERGDELEPLLRAYRDVVNQTLEELWSHIEWEKRKVKGRKQWRLLPKYKVNIHSKEYKKELRDSLLQDWPYAAHWVDSAIKTAYSLLKSWRKNYVKGDRKRRRPTAKRLFARAKQTLIKLEGDRLRLTVKPDEYVYLDLSARYFKLPSEVSSAGLGEPIITLEKVHLPVHCEEDAQSGKPAVAWDFNLLSLDGYSPETGWIRIDTSKLASVHIASFEKRRSVQRKASKSKKTKRILAKYSKRERNRARKHQLEIARVIQSVAGVVGLEELKKQGMYTRSRIWNRRISRSDWRSITRILEGRLGEVKVKELDPYGSSSLCSRCGWHNQDLNGADVFVCGGCGLRLDRQLNAAINLYMRLRFGYAEKWVGAKKRVELKMEGASQREWWDTVVLPSLPLGGCVLTGAERNGADELVRSLYDALKPKLYYAYDRCADAYLRTPT

SEQ ID NO: 2888 - protein, 334 aa, unknown
  TnpB Polypeptide
MQQIITAKLKLITTPDQLQALRETQLAYRDALNAVSSYAFEHGRTSWAITLHKGMYAELRTRYHLPSQLACSVERQVAATYKGLWTKLLKNAEHRRKKITTKRFQGLDKPPRYSSPTVHYTYERDYTFQRDSRVSLGTLNGRITLPYQGYDEHLALIRHGASIGDAKLWYDKPKKTFYVLVSLEIDVPEPTYEQLSEVVGVDVGMRYLAVTSTETGKATFHSGKRVRHKANHYARLRKRLQKKGTRGAKRRVRGIEQRERRLKLQVNHIIAKHIVKQHPHALIGLEQLKDIRERTKRKKRRRKKNGKGYEQVSPKARHPPIACTHSGHLPSCTT

SEQ ID NO: 2889 - protein, 103 aa, Okeania sp.
KLARAISDANWGEVVRQLEYKAEWYGRELIKIDRYFPSSKRCSICGHVVEKLPLNIRQWDCPECGSHHDRDINAAINILRMGTRVGERRKWSDPATTPVAREC

SEQ ID NO: 2890 - protein, 521 aa, unknown
  TnpB Polypeptide
MSKDTLYRSYEIEFPKKLIPTYDFLQTKLLEILNNRHYYDQFNNFPLYDASGNRIHKGTFWQIGRSLFPENYFDTWNLGGNAWYFRMLLETIWRSLKSLDEKRQIYTILKRYDFKPTKALRKALKEKKLFPTNKELKNLIASKKYPNLSKDLTFIMDFSVSSSSTLKTVDENHYLLRVDKDTWCDCRVLIPLSVRLELTGELTKPSFRRKASGRYHGMCSYVVDTVDMDLEDNILGVDLGFVKLFSAVVLKPDNSLSREFNNSERLQALYDKLTRVYEAKRRLYNRMRKSRATTQHIYTKNIRRCVELENLKTKIKNIKKTLMEELAAETISLAIREKCNIIKVEDLGVMSNTTGKWNYGCYHKKLNDLAELYHIEIVKVNPAFTSQRHPITKEKGVLRGRNLVFSDGQIYDRDYLAAINIALSPRGQKHSERTIETLGPKKKRECFTPKTSNKKMKQQRLLKSKIKQSFNQSGVREIVTYFHKDNELSLNYAVVLGYDSVMSSYRHKRHILTHKYHLDPQ

SEQ ID NO: 2891 - protein, 1668 aa, Okeania sp.
MIKNPGKAVFPIEFKLEAKSQSIIALDPGVRSFLTGFDGEKFIDIGKGDITRIFRLSQHIDKLISNKTALKGRQKKYKRQRLMRKIDNLFMRIRNLIDEVHKKVAKWLTTEYRIIFLPTFESSQMVAKSGKKKRKLNSCVRIEVIPELEKIIGEQPPVPELSGTAAQNRFNLLFPKFTKVFSSASHPLVIFLDDLQWADFASLKLIELLMTETKYLLLIGAYRDNEVSPAHPLMLSLSEIKKAQATINTITLAPLNQIQINNLVADTLKCTEKSALLLSQLVFQKSHGNPFFATQFLKVLYQDKLIKFNIDLGCWECEISQVTQQAVTDDVVEFMAFQLQKLPQSTQHILQLAACIGNQFDLATLAIVSQHSEIETATYLWKALQEGLILPTGNIYKFYIEQENQTFTQANSQTVRYKFLHDRVQQAAYFLIPEEEKKTTHYQIGQQLFQNISKNKRAERIFEIVNQLNYGKTVITEQKERDELAELNLIACGKARSATAYQVGREYANMGLLMLGENSWQRQYKMSLALHELATELALLCGEFEAMEQFIETVIAKVHTLLEKVNVYRIRIQANASQNKLTEAIAIGKNLLQQLGVIFPKIVTEKDIQTAIAEINPLIGDREIENLVDLPQMKDLEKIAIIEIANGLMAVASISGSPLFPLLVALSVKLSIQYGNTSASAMAYACYGIIASNTIQDVNTGVKFGQLAVRVVSKFDVKAAKPEVSIVEGLFTFHRKSHVRETLALLKEGYTTALELGDLEFAGRNVYGFCLNSFWCGQSLATLEEETKAYCNQFVQLNQLITANYCRIYWQSILNLLGVAEHPTILSGEALEEVEFLPQLIEANDIFGLHFFYGCKLMLCYLFGEIESAQNHAVEIRRYLMVAAGTVGEPAFYFYDSLTALATLNIQRSHKEVLEQVEKNQTQLQQQWANYAPMNHQHKVDLVAAEIYRIKGEKLEAIELYDKAISGAKQNEYIQEEALANELAAKFYLNWGKEKVAQAYMQEAYYCYARWGAKAKTHDLEKLYPQLLQPILQQQPLQLNPTETIDLNQMLSSTHSNSTSSNKISDILDFTSVLKAAQAISSSLELDQLIASMTRIILENSGAKKAVLMLPQNNTWQVKTITLISQQEIQTILVPQLLDSSPDIPIKIIHYVKNTKQTVLINNCQTNIPGLIGEYMLQHQPQSVLCTPIINHGNLAGILYLENNLISGVFTSERLQVINLLSAQAAISLENAQLYSQQQEKNRQIAQKEEEYRSIFESVNDGLSICDLETGKLVAANPTIYQIYGYNQEEWFQAKPADFIHPDYIYLFSEYLTALRAGQEFYTQAIAKRKDGSFFDVEVKAVPFIYKGKLHGLTILRDITEQQAALRERQKAEAAVVKKSLELEAALEELKQAQLQIIQSEKMSALGNLVSGIGHEMNNPLGFISASLKQAKPTIANIIEHLELYQESLTNKSDEILDHAEEIDLDYSLEDLPKMIDSMTIACNRLKNISTSLRTFSRADKDYQVPFNIHEGIDSTLLILKHRLKANEKRPAIEIIKNYGNLPKIYCFPGQLNQVFMNIIANAIDALDESNTGLSFAEIEVNPNRIIITTSVENQGVKISIADNGPGMNEEVKAKIFDHLFTTKDVGKGTGLGLAIARQIIEQKHGGNLDVSSTSGEGTEFTIVLPLQ

SEQ ID NO: 2892 - protein, 221 aa, Leptospirillum sp.
MKKTLKVKLTPTKEQAKSLLETIETFNDACNWISRKSFETGTPYDPEEFLGVDMGIVHLSTDSDGESFSGEGVDQVRKKIHTLKKASGKETRFKKDTNHCLSKRIVSKAKGTGRGIALEDLKGFNGRTMVGKSQKERFGKWAFNQLRRFITYKAVLEGVPVVLIDPRNTSRTCSVCRHCEKDNRKSQDQLSCQECEHIENTDINAARNIRFKATINPPIAV

SEQ ID NO: 2893 - protein, 261 aa, Leptospirillum sp.
MKKILKAKLTPTKEQAKSLLETIETFKEACNWISRKSFEAGTPYQMKLHHLVYFEAKEMFPALTSQMIVRAIAKVSGSYRTEKKTLHSFKKHSAMEYDKRLLSFKSLSHASMATVHGRITVPLIFGHYAPLDRNKMLGQADLTTSGGKFFLNLVIDVPDGTPYDPEECLGIDMGIVNLSTDSDGESFSGERVDQVREKIHTLKKVSGKEARLKKDTNHCLSKRIVSKAKGAGRGIALEDLKGFNGRTMVGKSQKERFGKWT

SEQ ID NO: 2894 - protein, 356 aa, Leptospirillum sp.
MKKTLKVKLAPTKEQAKSLLETIETFNDACNWISRKSFEAGTPHQMKLHHLVYFEARERFPALTSQMIVRAIAKVSDSYRTEKKTLHFFKKQSAMEYDKRLLSFKSLSHASLATIHGRITVPLIFGHYAPLDRNKMLGQADLTTSGGKFFLNLVIDVPDGTPYDPEECLGVDMGIVNLSTDSDGESFSGEGVDHVREKIHTLKKALQEKGTKNAKRHLKKVSGKEARFKKDTNHCLSKKIVSKAKGTGRGIALEDLKGFNSRTMVGKSQKERFGKWAFDQLRRFITYKAVLEGVPVVVVDPRNTSRTCSVCGHCEKDNRKSQEHFSCLICKHTEHADINAARNIRFKAAINRPIAV

SEQ ID NO: 2895 - protein, 477 aa, Leptospirillum sp.
MQTGKRLRAYPTPAQEQILLQWIGHQRFIYNAKVSEDRYYWAFAKKAVSLSGTPVPVDQEYARFIGPETSWLREVPSQILRNGAVRWKQAMGRFFSGLARKPVFQRKDGRQSVWITSELFRFRTNDETQFEELILGTKKFPVGVLPFKAHTPYSRPASLHVSVEAGKWFVSFSSDDGLPEPKEEDTISWLRMFSEEELEGKTLGFDRGVTIPVMASDGRRIDFSSVQKIRMEKKERAKKRWQRKLSRQVKGSNNRKESKTRLSRTFEYAKNVRKDVIHKATHDLVSDPDRTLFVVEDLKVKNMTKRPEPKQEDSGGYAKNGARAKAGLNWAILSSCWGLFVVLLSYKARRSGKLVIKVSPQFSSQECARCGHIHPDNRPSQAGFVCQRCGLADNADLNASRVIAKRGIRLLLEGKVPQKTIRRCGIGKLKTLGPERSEVKASGEDDKTRRTKRLRASSAKEELPLARSETPPTAQSA

SEQ ID NO: 2896 - protein, 286 aa, Leptospirillum sp.
MFSEEELRSQTLGFDRGVTIPVMASSGRRIDFSPIQKIRMEKKERAKKRWQRKLSRQVKGSDNRRKSRKRLARTFEYAKKVRKDVIHKATRDLVSEPDRNLFVVEDLKIKNMTRKPEGKQDDSGGYAKNGARAKAGLNRAILSSCWGLFVLFLSYKSLRSGKLVIKVSPQYSSQECVRCGHIHPDNRPSRAEFICQHCGLKDNADHNASRVIARRGVRLLLEWKIQKKEIWRCGIGKGKQLGREPSEVKASFDSDQTRRPKRLRETSAKEDIRSRDRKHLRKPQNV

SEQ ID NO: 2897 - protein, 203 aa, Leptospirillum sp.
VIDVPDGTPYDPEECLGVDAGIVHLSTDSDGESFSGEGVDQVREKIHTLKKALQEKGTKNAKRHLKKVSGKEARFKKDTNHCLSKKIVSKAKGTGRGIALEDLKGFNGRTMVGKSQKERFGKWAFDQLRRFITYKAVLEGVPVVLVDPRNTSRTCSVCGHCEKDNRTSQEQFSCLTCKYTEHADINAARNIRFKAAINRPIAV

SEQ ID NO: 2898 - protein, 486 aa, unknown
  TnpB Polypeptide
MALFAVPGGWVVQAYKYALDPAPAQERSLWSHAGAARFARNHMLGLVKAALDQRAAERSYGITENDLTPGPGWSLPALRRAWNQRKDVVAPWWAENSKEAYNTGLDSLARSLETWSKSRTGQRAGAEAGFPRFRSKRGRASVRFTTGTIRVEADRHHVTLPRLGTIRTHESTRKLARRVEAGTARILSATATRDAGGRWFVSFQTLVQRTTTRPAQAGIRHPVVGVDLGVKAGSLMVVGTPGAIEVERVPAPKSLAAARARLRWLQRKAARQVGPCDPKTRRKQTPSNRWRRTQARIGRTHARAAHVRTDALHKATTRLAQQHQVIVVERLNVAGMRSAGGARKRGLNRALADASLAGIRRMLAYKTTWYGSTLVQADRWYPSSKTCSGCGSRKPKLLLSERTYACEHCGLVLDRDLNAAINLARLGETHPLGESSPAGSGPVAGRGATRETEPAPAGDAAGDETSTPHQPTLGQAGTASPQGEAA

SEQ ID NO: 2899 - protein, 423 aa, unknown
  TnpB Polypeptide
MASITLVAESKLYLKDNTSLYNYFDDYSKLFNFLVRRTVHHLRHKLNGEPESKYRTNLMLEFGITNRMVKSVVVTAKTQFNLLKELSHYQYGLLYKRKYSLQKKIEKLKLSLNSNRLKRRKLAEVRLFWTQMKLNKVNQLISNGLKMNLTFGTKHLLQTNKKKFLVKRDNQVIYMGSKHDTCGNQQFQIAFNSRYNRFEYKLRLDNKWVSGSNKYIFGSFVLKNKEAKVNILNTLSTKLSNPLTYRIIKRDGTLYLQIMYRREAPNITQSTNGVLGVDFNKGFISVSEINQNGRLQSLTRYNYLHKGKATRTKTSMLELVSKLVSQAVSVGKDIVIEDLISLDSNKKQNKTTSKNYNHMINSLKFGLFKCCLFSKATKEGVLVHTVNPYNTSKIAKESYTNRMKLNVHDAASYVIARRFYQYD

SEQ ID NO: 2900 - protein, 377 aa, unknown
  TnpB Polypeptide
MILAKKVRLYPTQEQEKKLWQSVGTARFIYNYTIAKQEENYKNGGKFISDGDIRKELTQLKKSELIWLNEVSNNVTKQAVKDACNSYKRFFKGLANKPKFKSKKKSKPSFYNDPIKLKVKDRKILIEKVGWLKINEEIPTEVKYSNPRITYDNKYWYISVGVEVNKEKEELTDVSLGIDLGLKDLAICSDGKVFKNINKTKKVKKLEKKLKQKQKQISRKYEMNKIKKEGGVRCQFIKTKNIEKLENTTRLIHRKLSNIRNNYLHQVTTNIVKTKPYRIVIEDLNVSRMMKNKHLSDSVRKQCFHKFRQYITYKTELNGIELIVADRFYPSSKICSQCGFIKKDLKLKDRVYRCSHCGVVIDRDYNASINLSMYKLA

SEQ ID NO: 2901 - protein, 395 aa, unknown
  TnpB Polypeptide
MARKKSATARRREGIMSGTPTRALVMPLALSPDQHAMYSRLADLYNRVWGSAVSWYDANRTVNAVGAHKALYAGLRGRFPQLPSQFVCNALRDAAGAVRSWNSNHPKRRWSLRASRRKPTIRFDLRTMGLRGNLLTLSSTHGLKRQRFLLPGMPEWFASRYPERRLQTVTLALDPTNPTARLTLTFRIPKTEPVEGRVLGVDLGMHALYKDSEGGEYRYPQVQRVRRRYAYDRRTLQEKGTRSAHRRLKAIGRREERFIRDVDHRAAKRLADTPGIGVMAFEDLTRIRRLARKGTRTGRRRRNMLNQWPFSQLQEFAAYKAAAKGIQVVMVDPAYTSQRCNRCGYVDKGNRDRARFDCLRCGHSDDADHNAALNIRDRAIQSLGQTQGQGAVNHP

SEQ ID NO: 2902 - protein, 155 aa, Fusobacterium sp.
LYSKSKKIKLRELKNFNKKKLKVQKLFYRLNCIRDDYNNKIVNEITRAKLKYITIEDLKVSNMIKNKHLSKAIQEQNFYSIRTKLINKCKERNIELRLVDIFYPSSKTCSCCGSVKKDLKLNDRIYKCCNCGLEIDRDYNASINLEKAKIYKVIA

SEQ ID NO: 2903 - protein, 239 aa, Fusobacterium sp.
MSRSIEYSKSKKIKLKECKNFNRKKLKVQKLFYRLNCIRDDYNNKIVDEITRAKLKYITIEDLKVSNMIKNKHLYSIRTKLINKCKDRNIELRLVDTFYPSSKTCKVQKIFYRLNCIRDDYNNKIVNEITRAKLKYITIEDLKVSNMIKNRHLSKAIQEQNFYAIRTKLINKCKERNIELRLVDTFYPSSKTCSCCGSIKKDLKLNDRNYKCCNCGLEIDRDYNASINLEKAKVYKIIA

SEQ ID NO: 2904 - protein, 380 aa, Fusobacterium sp.
MIKDKNKGVDIMKTKIIKRAYKFRIYPTLEQISFFAKSFGCVRKVHNLMLDDRKKAYEEYKSTGIKTKYPTPAKYKEEYPYLKEVDSLALANTQLNLEKAYKNFLKNKDFGFPKYKCKSNPVQSYTTNNQNTIYIKDGYIKLPKLKSLVKIKLHKEIKGIIKSVTISKNSLNHYLGIKEFATMSDCTKVENLKLSKEYEKKLKREQRKLSRRCKLAKDSDKKLSDSRNYQKQKKDLGIKEFATMSDCTKVENLKLSKEYEKKLKREQRKLSRRCKLAKDSDKKLSDSRNYQKQKKKVAKIHNKIRNKRKDFINKLSTKIINNHDIICIEDLNIKGMLKNHKLAKSISDVSWSEFRRQLEYKANWYGRKIVKVATLWTRNR

SEQ ID NO: 2905 - protein, 314 aa, Fusobacterium sp.
MYKALKIELKLTNEQKIQVNKTIGVERFIYNEYIKYNQEQYKLGNKFVSANDFSKYLNNIYLPNNLDKKWIKDVSSKSVKQAIIYGEQAFKRFFKGLSAFPVFKKKGKNELGAYFVKNNKTDFEFYRHKIKIPTLKFVRVKEYGYIPKNTNIKSGTITKIADRYFLSLIIEVKDIVKTENTSTKGLGIDLGIKLKREQRKMSRSIEYLKSKKIKLKECKNFSKKKLKVQKIFYRLNCIRDDYNNKIVNEITRAKLKYITIEDLKVSNMIKNKHLSKAIQEQNFYAIRTKLINKCKERNIELLTKQKRIYICTDG

SEQ ID NO: 2906 - protein, 386 aa, Fusobacterium sp.
MYKALKIELKLTVAQKIKVCQTIGTERFIYNEYIKYNQEQYKLGNKFVSANDFSKYINNVYLPNNPDKKWIKDISSKSVKQAMIYGEQAFKRFFKGLTAFPVFKKKGRNELGAYFVKNNKKDFEFYRHKIKIPTLKFVKVKEYGYIPKNANIKSGTITKIADRYFLSLIIEVDDIVKTKNKNIKGLGIDLGIKDTAICSDGRVFKNINKTIKIKKLKKKLKREQRKMSRSIEYSKSKKIRLRELKNFNKKKLKVQKLFYRLNCVRDDYNNKIVDEITRAKLKYITIEDLKVSNMIKNKHLSKAIQEQNFYSIRTKLINKCKDRNIELRLVDTFYPSSKTCSCCGSVKKDLKLNDRIYKCYNCGLEIDRDYNASINLEKAKIYKVIA

SEQ ID NO: 2907 - protein, 399 aa, Clostridium sp.
MKKLKRAYKMEINPTDEQKSKIHQTIGVSRFIYNFYIARNKEIYEKEGKFVSGMDFSKWLNNEYIPNNQEMKWIKEVSSKATKQAIMNGDKAFRDFFKKAKGFPRFKKKKNQDVKAYFPKNNKTDWTLERHRVKIPTLGWVRLKEFGYIPVNSVVKSGTVSQKADRYYVSILVEERDIKISNSNIGIKISNPNNEGLGIDLGIKEFVVCSDGIKFKNINKTLTVKKIEKKLKREQRKLSRKYESLKIRNKNIKEGRATSQNIQKQVVKVQKLHQRLRNIRTDYINKTVSKIVKQKSSYVTIEDLNVKGMMKNKHLSKAIASQKFFEFKTKLTVKCKENNIELRIVDRFYPSSKTCSQCGKIKKDLKLSNRIYKCNCGLDIDRDLNASINLKNAKEYKIA

SEQ ID NO: 2908 - protein, 392 aa, unknown
  TnpB Polypeptide
METILGSIALKVRLINIKAKKEKSEVRTVEKSYKYRIYPNKKQKVLIAKTFGSCRYVYNLYLAKRIEMYALNKEIFSYEQCCNDMTQLKSELSWLKEVDSTALQSALKDLDMAYQKFFKEHSGFPKFKSKRIHRFSYRSKHSHGNIRYCGEYIRLPKLGMVKTKTKLIPRGRILSATVSQEPSGKYYVSLCCTDVEVEPLERTGNAVGLDLGIKDFCVTSDGQVVETPKYLKKSLEKLAKLQKRLSRKSKDSSNHNKARIKVARLYEKVSNQREDFLQKLSTALVRENDIICVEDLKVENMLKNHNLARSIADVSWSEFVRMLEYKAKWYGRTIVKVDTFFASSQTCNVCGYKNEKVKNLSVREWTCPNCGTHHDRDINAAINILNEGLRLL

SEQ ID NO: 2909 - protein, 421 aa, Streptosporangium sp.
VESVKQTRAHVARLDLSTAQVAVLDAQAHTARTLRNLLHEYFTFRQGRLASVKDCDAAIRQARREIDWMGQLPAQAAQAVLKTYRQAWANFLDPDHPAKRPTFKSRLRSRMAVDVPQARDLQIKRVNRRWGAINLPKVGRVRFRWTKDLPGVTKGGPAGRITGARLVKEADGWHLVFRTERQVPAPVCHPGPQVGIDRGITVALALSDTTMREHGPWLTSGEKEHLRRLEKKSARQRRTRTPGRPTSKRLTRTYDQIAKARATAKRRAVDWQHQTTTELAGTFSVIKVEDLKITNMVRSAKGTVENPGVNVAQKAGLNRSIAGEAWARTVTLLEYKTRDRGGMVVKVPAPGTSQTCHQCGHRDPAGRVKTVFTCTSPACGWVGHADTNAAININNAAGTVVSGRGDLGVTRSVKRQPPRAA

SEQ ID NO: 2910 - protein, 394 aa, Lactobacillus sp.
MQMLSTYKVEIKPTNYQIWLLNRHIGGSRWAYNLFLEINKRRYEDGYHYMNAYEFSKWFNHDYLQANPEDDWIKELYAKSVKQAFIDADTAMKRFFKHLSRYPHFRSWKRGQGAYYFVKNGKQQIIQAERHRIKLPKLGWVRLKEYGYLPTNAQRFVIKQGRIKRHAGRYYLTCVVEQPEPVQPNLTGARIGIDLGIKDFAILSNGLVYRNRNKGRRMKRLRRQLRRLQRKYSRQYLAFKVRKQKEGKSATDLNLAKTRRRMQRLYQRLQNMQKDYQNKIISAMVITKPQWVALENLNVTGMLKNRHLAKAISYQGFYNFRIRLIAKCQQLGIPVHLTNRFEPTSKICHHCGAKKVDLKLSDRIYRCVVCGHVADRDMNAALNIRDTENFELAY

SEQ ID NO: 2911 - protein, 362 aa, unknown
  TnpB Polypeptide
VLKAYKYRIYPNQEQRTYLAKTFGCVRFIYNRMLADRIKSYEENKELDIKQIKYPTPAQYKKEFPWLKEVDSLALANAQMNLDKAYKNFFRDKSVGFPKFKSKKTNYNSYTTNNQNGTVYIENGYIKVPKLKTMIKIKQHREFIGLIKSCTISQVPGGKYCMSILVDTENIKLPKTDTKIGIDVGLKDFAICSSGEVFRNPKWFRKSEKRLAKLQKDLSRKEKGSNNRRKARLKVAKLHEKITNQRKDFLHKVSDKITNENQVIVIEDLKVKNMMKNEKLAKAISEVSWSEFRFMLEYKAEWKGRKILVAPSNYASSQLCSNCGNKSSQTKDLSCRTYVCQECGMIMDRDINASKNLLKLAM

SEQ ID NO: 2912 - protein, 214 aa, Moraxella sp.
MKTLKLRIKDKHATQLNRLSGSVNFVWNYVNDLSYKYLQKTGKFFNAYDLNGYTKGSGELLGLHSQTIQAINETHAKSRKQFKKAKLNWRTNRPNAKHKSLGWIPFKKAAIKHIATHQTGKKGLKSTLQLSLDKGKNLVIDLWDSYNLSLYQINTLEIVQDSRHRWYACITVKDYPKTQCGAGSVGIDLGLKTVPPPQTVINYKSNKHSNTPKT

SEQ ID NO: 2913 - protein, 382 aa, Orenia sp.
MTIREKAYKFRLCPNKEQRILINKSVGCARYVYNHFLDKAKENEYQSYSKFSKQLTQLKKEIEWLKEPDKFSLQNALKDLDRAFKNFFSKKYDFPKFKSKKNPKNSYRTNKFTRRSGTTNIEVKNNKIKLPKLGWIKFRKSKEVKGEILNVTVTRTNTDKYYISIAVKEKIEELPKVDKQIGIDLGLKEFAIMSDGEKIANPRVLKKYEKKIARLNKSLARKEKGSNNWYKAKKKLAKVHEKVANIRLDFLHKLSTKLIKENQLIAVETLKVKNMLKNSKLADLSRGFSMKTLRKSISDVSWSKFIELLTYKAKWYGRNLVKIDTFFASSQLCSNCGYKNEKVKDLKIRKWECPECKDIHDRDINASLNILNEGLKIKASST

SEQ ID NO: 2914 - protein, 411 aa, unknown
  TnpB Polypeptide
MSRYRLYPTPAQEAALLSHCAHARYVWNLAVEQRTWWQPGRPAPGYVEQCRQLTEARAANPWLADGSVIVQQQALRDFHAAYAAWFASLRAWRNRDATIQPEQRTAAPSPPSWRKRGRREGFRIVAVGPQDARRVNSRWGQVLVPKLGWVRFRWSRSVPAAKSFRVTRDRAGRWHVAFAAAPSAVPAPGNGAVVGVDRGVAVSAALSTGQLLNTPGLRPAERLRLRLLERRLVRQRKGSRRRERTKIAIAHLKTREVDRRRDWTEKTSTDLARRFDLICVEDLDVRALTSSASGTIERPGRGVRQKAGLNRGILASGWGRLVDRLEHKAPSRVQKVAAAYTSQRCSACGHVAAESRQSQTAFRCVTCAWTGNADYNAARNIAAAGRVVAARGGLALAGPVNREPPTLGVVA

SEQ ID NO: 2915 - protein, 463 aa, Anaeromicrobium sp.
MDTIMKTVKQYSKEIDLEELQYIANQYKNVKNYVYSRYSGVNSILILPKYRKEIRDVWVKSKFAEQWKLPARYWKQALDEAIANIKTEWSNIKNRIKICVNNNENLSNEEKYYIRYILKADKLYQDVLTYKSIHIPKKFEDKKLNFKYLNNMIRRLTRRYKKSIPYSRECKSFMIDAQMYSYQMKKDMLYINIMTAKRGKRLCIELTDKQVHSGNLRVVLDDRRIQVHKGLQTQVKENNNSNIIGIDKGYKYLFAVSSGKFYGEKLNKFLNSETERLNKVNKQRNRFWALYKSHLEEGNVKKANAIKENNLGKVKYNHNKLKHNQTVKAYINHSLNELIKNETPKEIVMEKLDFVSWNDRYPKSIKRKLSRWIKGYIRDRLEYKCDLNRVKYTYVNPAYTSKVCNMCGEFGKRRGDVFKCPKCGEIHADSNASINILNRNYDKEISLYTPYKKVKEILEKRVS

SEQ ID NO: 2916 - protein, 436 aa, unknown
  TnpB Polypeptide
MNNDCVYLTRSCIIRGLSKKQFNVLCDVSLRLNDLRNCAIETTGCVKSSDGKHFRKVNYKSVISKVKKEFKGKFSGVQAHIAGATIKKHVDSFNSYIALRNKKIDQEYDRPVNEPKKHEIDCLSNIIIPGQSITCSKKKLGEGYIELPLSREYKKRLESGDCRPKIIIPENIRDKKLIQVEIIPIRNGKMFKANFTYQEEKDSWDLDKDNVMGIDLGVNNFATLVTTEGTPYIVDGRFLKNQIAFKCKKTAKYQSKLNKEGLKKSKRIDNINNKFKGIQNNFLNHATRFIIDLCRKQDVGTIILGYNKNFQYKSNIGPIQNQIFSHYAFKQFKEKLETQCQLHDITLIIQEESYTSKSSFLDNDILPVYEENQKKQNKYEFKGKRIKRGLYKTLKGKLINADVNAACNIIRKSKQKFNNERLCKWVQSAPAKIKLI

SEQ ID NO: 2917 - protein, 392 aa, Microcoleus sp.
MAQLTLTLKLPFHRLNACKALEFERLTAVNTAVANDLLAVDNKERKKLTSAAFRHIEIGSMWINQTIRNTHAKTKVKHFKQMWLEVNNQGYEVLKSGNLFTVSFSLYRGRKGRIPLDVHAASHTEVLDKAIEGSAKLGSLKLCKSKKGVWYALISVSMEVPDAGDVKGWIGVDRGQNNIAVAALPNSFGKFWNGRKVKATRRRFQKTRKVLQEAKKLKKVKQLESRERRIMTQINHEISRQLVQFASYFGMGLRFEDLSEIRSTSKQRKKTKSDAAQNRDAWAFYQLEIFTRYKAIRAGVPVESVPAPYTSKSDHRNGVIGKRVKHQFKGFDGYRCNADWNASQNIGQWVGFACPLNLQKAVSAMEIVDSEDGVNDSPLTGDASLTTASASS

SEQ ID NO: 2918 - protein, 516 aa, Caloramator sp.
MYTIKLKLYKPSKRKRDIIDETMKNYSLAYQYLLDRAYEDIKRIERDFKDSIGNYSTMNIIKWIDKDICKELNRFSIEPFKDALKMEFASTIVGYLKLKQSKGRVCYPCAYISDEKLERMYSNITKDFLENKKDFSYYEAEIEKILKKNKPKPLFFGRYDKNRNYCLLYDEKSNRYFAKLYLLNVKSTKRERINVSDERKLKYVYKDFETVEDRGRKECFLLFPLSFGKYQEEYLKQALKNPSILKVARLVKENGEYYLLITLDIKMPDRIETNNFMGVSRGINDDIYYTISDNEGCELESGFISNDNIHCIANQIVERAYDNKCQVIMHKNFNMGDKLKWVDGEREIMPRLSPREYNKLCSILNYKLLEKGLPSPVKVSCKGIYTTCPSCLSNTIKNRFSEKLYICVYCGYADSIEHVGSLNTSRRLIKYRQDKIKIKVVKNNGVLRFINKDLDLNFVPQNPYNCKEEFIEHLKLLIKDFYSKGSINDKNYKKRFSLIKKIENSKDIFEQIQIIE

SEQ ID NO: 2919 - protein, 376 aa, Pantoea sp.
MKRAYKYRFYPTPEQVELLAQTFGCVRFVYNSVLRWRTDAYRQRQEKIGYIQANARLTALKKEPEFTWLNDVSCVPLQQVLRHQQTAFSNFFAGRAKYPTFKSKHHRQSAELTASAFKYRDGRLYMAKSKVPLDIRWSRPLPSAPSTVTISKDAAGRYFVSCLCESEPVSLPITAKTVGIDVGLKDLFVTDTGFRQSNPRHTAKYEKRLALLQRQLSRKKKGSKNRAKARLKVARLHAKIADCRLDALHKATRRLINENQVVCVESLKVKNMIRNPKLSKAIADASWGEFVRQLEYKAEWTGRSVVAIDQFFPSSKRCSGCGHTLSKLALNIRSWHCPECGIEHDRDINAAKNIKAAGLAVLAHGETVKPEPRSAA

SEQ ID NO: 2920 - protein, 368 aa, Blautia sp.
VRKINRAVKIRIYPNAEQRVQIEKTIGCSRFIYNCMLADKIEHYKKEKKMLRNTPASYKKEYPWLKEVDSLALANVQMHLESAFRKFFREPSVGFPRFKSKKSARKSYTTNVVNGNIFLEGKYLKLPKMAAVRIKLHRPISEKWKLKSVTVRREPSGKYFASLLFYCENQTAEKGPAEKFIGIDFAMQGMCVFSTNERAKYPMFYRHAEKKLAREQRKLSRCQKGSQNYKKQKKRVALCHEKIRNQRKDFQHKLSTSLAESYDAVCVEDLNLKGMAGGFHFGKGVHDNGYGLFLSMLEYKLEERGKYLIKVDCYFASSKICSVCGKKKEELSLSDRIYCCECGNRMDRDVNAAVNIMNEGKRIFAECA

SEQ ID NO: 2921 - protein, 377 aa, unknown
  TnpB Polypeptide
MWYHTAMEIQRTVTITLPADADLRATLTAFRAVQNAVSADAFNDGKPLAAVPLQRVVYGRVKGTLNSQMTITALRLVVGAYSIAVKGRNRRLTAEARRKTRFESKGWRYTPRQIKPLGVCRFERRAAMFLVGVRGRDADFRQDGTLSIRTVGGRKRLSYKVVRAHQALFDAAKEIDSLTVVERDGHLYGRVALTLDAPDPTGVTPVGIDLNETNALVAVDSDGNELFLSGLATKVKNRRTMQATKRVQRTLATRKAEGTDTRSVRRVLKRLSGRRTRRTRDVARVTAKMLVAWAPADAVLVFEDLRMSRPEKGLTRGAALRRRLSLWQFGAIRDAVESKAQMHGVAVTFVNPAYTSQNCSRCGLRGKRHRHKFTCPH

SEQ ID NO: 2922 - protein, 438 aa, unknown
  TnpB Polypeptide
MKNNKFSRVSNLKFRYSARGEQKRLINRLSKEIMTKVRLTSKVVGQKCRQGIIHKICNQNGYVWTPENERVTPTEARDHSEWYKDIWGDCENLSLPVILIEQVLNRYQSYKKRNGHWPKYVEFKKDRINIKKNYIRYDDTLNRLYIRDLHGVKIELQVDNSRSVLTHKDIFLKQLNKKKKQEKSPLTTVQFAANMIFDQRQIIPIVTIEQEEIYSPAEGKFFAVDINQSTKDWLTFNIPINGHKAYPKPDSIKEAEQRIQAIETAINATFALKPNERRGKTVKVKHPDFEEMVFKCTSDGRRRLRLYWKDAHKKHKKEIKNCLGLKQIEKFIIENKLGYAHDNIGPGKQRGTFGQDKLGEYWEKRAKEIGFPFEKVNPSFTSRECPECGDQSKKNRKKDEFKCVNCGYENESHIVGAINIGRKAQRAYSDRSQVSDPE

SEQ ID NO: 2923 - protein, 423 aa, Haloferax sp.
VNGRKERIAFVSATNTINKWPLIYIEPVVDDYVRRTAITRLEVTDEQRDLLEETISEWKRGCQIATDMAWGKCNAKSDVQPLAYDDVRERTDLGSQHVVLATHQAAQAITGCLERRSKDKKVSKPTFTAPTVKYDTRTMTLFDDETVSLSTTKSRVRCDLALPNADGGYQRQYLDADEWCVTESTLTTRGGDYFLHIGFRRHKTDTERNTAEDETVLGVDLGIKNLAVTSTAFFFSGRELTHNLREFEKLRSGLQQTGTRSAHRTLEQLSGRELRYVRDVLHRASNAIVDEALRHDCDIIAFEDLTNIRERTGASWGHKWAFRTLYEQVEYKAEVEGIAVKQVGSAYTSKRCAECGFTADENRLTRNEFRCLKCESEANADYNAAKNIGMRYVRRGQQSSRRTGNSQLALKSGTVTSSGFVET

SEQ ID NO: 2924 - protein, 343 aa, Haloferax sp.
VYNETIRLAKEGVDWNAIPDRVADDADLVKNTTQRVVAKALGAMENYYEYDDFGQPSHTKDGAYPLRSNYEEGYNLSLTDDGNVAFRISAKPYNHVKGVLEGSDAHLDVLKTALESDDWKIGTAEALFHNDTPELHVNVTNTEQTVRDKQNSRTVVGVDVNEDNVALTALSEDGVEDTLVIDFPEIKFERHRYFTMRKRVQNAGKDGIHNTLEGREERFVRDRLHKVSRHIVEWSQQFETPCIVFEDLKEMRDSIDYGTRMNRRLHHLPFRALQYYTSYKAAFEGVPTAWIDPAYTSQRCPMCGHTERANRNKKAVQMQVLRASRPQRPRCKRQYRRERREET

SEQ ID NO: 2925 - protein, 379 aa, unknown
  TnpB Polypeptide
MIVFEAKLQGTDGQYQALDEALRTARFVRNSCLRYWMDNQGINKYDLNKYCAVLAREFKWADKLNSMARQASAERAWSGIARFSDNCKKQVPGKKGFPRFKKHQQNLSVEYKTSGWKLSEDRREITFTDGFKAGTFRMWGTRALHYYQVEQIKRVRVVRRADGYYTQFCIDVERTETHELTGKNVGIDVGLNHFLTDSDGQQIENPRFLRKDEKALKKSQRRVARKKKGSNNRAKARNRLGRKHLKVSRRRKDFVVKTARCVVQSSDLVAIEDLKVRNMVKNHHLAKSISDAAWSQFREWLEYFGKVFGVPVIAVPPHFTSQDCSNCGTEVKKTLSTRTHTCSRCGHIQDRDWNAAINILKKALQYLAKNTVGHMEINA

SEQ ID NO: 2926 - protein, 455 aa, Ignisphaera sp.
VGCFLQASLAPTDGEDASIVTRTVIVRSERIPKKLFRFFIELEGMYRNIVEQLVIYSAREKITSFIKLKALKYRETRNLYPHLPSHYVHTACQDASTRVKSFLKLKKEGSTKKEYPSVRRISIWLDDHLCRLDGLTRIGISTHRGWIHVDLIPHKQFYKYINSGWRLASEARIKLDRKERRLIIYLIFRRNVRLYKPSGYVAIDVNENNVAVLINGKAYLLETNIERITLGYYYRRKRVQKKYDKICSAGCRMKRKILRKLREEERKDDTRWKVANIIVREASKHGYGVVLEDLGDKPAENMISRIKDDQLRHRIFQAAFKGIQRAIEEKAKEHDVPVIYVSPRNTSKQCPMHRVEIRYNGSRIGVCSAGKEKWHRDVAACYNLLLKALGGDGSTAPSHPGLTLDGSPMPLGSTAAHDLTGIPRSLWARLKSLDMTMNKVIGMNIQGQTARGSQD

SEQ ID NO: 2927 - protein, 359 aa, unknown
  TnpB Polypeptide
VTLKAKKTIKAKIVHLTRIKQRLLEEEYEALQRFLHGEKAELYSANKQQAKRFYKNIKPNKEYPLSIRKDLLRVKRRDTKIAEYWARIPVKGRRGGVWVAIKPHCLIEPDMEICESKLFKRNGDFYLHITVQKEVKPKTDCDGILAIDMGIHNIAVTVNSKTKKARFYGKELRAVRGHYFHLRRKLPNRKAVKKVGAHERRIVNHELHRISKAIVQEANRSNSAIVLGKLKDMRKNGNSKGRRFNRKLNNFPYRKLSSYVKYKAGWLGIPVITVSEAYTSQTCSICGGRGVRHNGLFKCSCGAELNSDYNGAKNIMKRALGLTSSVGATVNLPRTNPTDNLNPMMRLEAPCESWGSSLF

SEQ ID NO: 2928 - protein, 397 aa, unknown
  TnpB Polypeptide
MRLTLQVKLLPTKEQAELFAATQRRYVQLCNYLSVLVYETRITNPHSMYYIFNRDLRFMFPDIPSAMHACARAKVAGAYRARISNLKRRNRKHLNQPCEFKASSSVDYNKLLYSSTLNRISDTSYETKSTQPNSSYSTVVLSIASIIGRIKVDALIPNTVLYKFGSWKQATLVYRKNTKEWYFLIATEVIEPPLKSYDKYLGVDMGITNIATTSDGTIYSGSTIDDKRIKHYAHVRSLQKCNTRSARRRLSKIRKRMSNFIRTTNHNISKLIVTAAQRSDACIVLEQLKYLHESLKARKPQRIRMFGWSYTQLRDFITYKAKLLGISVISVDPKYSSQTCRECGHTERANRHGEYFLCKVCGHSEHADINAAINLAMLGMVVDHCQEAGLSIPTYSK

SEQ ID NO: 2929 - protein, 356 aa, Giesbergeria sp.
MDCTKTLRLRIKDKHARVLSAMAREVNQVWNFCNETSHRAIRERHQWLSGYDLQKLTNGFSKCDGVHIGSPTVQQVCEGYAKARKQFKKAKLRWRVSNPQSSKHSLGWIPFKARALQYKAGQVAFAGQTLSLWDSYGLADYELRSGSFSQDNRGRWYLNIVVKVQTKPTAATASVGIDLGLKDCATASNGKKEHGRWYRQHELELAKAQRAHKKHRARAIHAKIANQRKDALHKFSTTMVRENAAIFVGDVASAKLVKTKMAKSTLDAGWAMLKTMLEYKSHQAGIVFRQVNEVYSTQTCSCCGSVPASSPKGRAGLRIREWTCSDCGAVHDRDVNAARNILAAGHRRLAVGISGV

SEQ ID NO: 2930 - protein, 393 aa, Fischerella sp.
MYAIKIELKLNNKERILMRKHSGYARFVYNYGLALTQELYFVGVRGSITKQINEIKKVFTGYTKKQPENQWMNQLSSKVYQRAFMDLGQAYQRWAKGLSGKPAFKSKKDGDSFTVYDSNGKVLALSGKKIRIPTLGIFRLKEELPCSYVTQTFTISRQAEKWYVSCAVDAEKIPPTYHPQEAVGIDLGVKCFCTLSDGSQIEAPKFYKQAKTKLAKAQWQNRNKQSGNRRQGVKQSNRAKKFYDSIAKKHARSSNQRKDFLHKTTTDISRKFYRIRIEDLNVSGMLANRKLSSAISDLGFYEFRRQLIYKSEFFRTKVEVIDRWYPSSKLCSLCGSKHDNLKLSDRVYQCQNKSCLAHTITMDRDLNAAYNLLNAPPDFVRLAQSEVTLVDKK

SEQ ID NO: 2931 - protein, 430 aa, unknown
  TnpB Polypeptide
MRQVERHWIKEGHKLYSVCDDLTFKAKNLYNAGLYQIRQSIFERYKSQEEEKPPVLSWVELVSQFRKEKQSDMLALPSKVSTNILKSLGSTIHSYYQLLKCYHDKSNSSITNKPQPPRYLHKTEGRYIVEFTNQTISKKRGLNGELILCPRDLNLSIPTKVTNPKYVRIVPKLKAFVIEVIYEVEASPLKQTGNYAAIDLGIDNLATITFSNGVNPLIVKGSQLKSINQGYNRLIAKAKSKLPANQKTSQHIHRLWENRECKLQSELHKITSFLSLYFDEMAIETIFVGKNKSWKQEVSLGKKTNQSFTQIPFNTFISQLTYKCLVHGIRVIEQEESYTSKASFLDEDKIPVYDSVQTKPQFSGKRVSRGLYQSKEGRVLNADVNGSYNILVKGLLSLGKTLNRKVVSFHTRSLKRWESISNKNLLLHYM

SEQ ID NO: 2932 - protein, 368 aa, unknown
  TnpB Polypeptide
VLKAYKYRIYPNSEQRIQIAKTFGCCRFVYNQTLAYRKEIYEKEKKSVSKTDCNNYCNRELKKDYEWLKAIDKFALTNAIYNMDAAYQKFFKEHAGYPKFKSKHDNHKSYTTNFTNGNIAVDFETGKIKLPKLKAVKARLHREYSGQIKSATVSQVSSGKYYVSILVETEHKELAHTNHNIGIDLGIKDLCTASNGDKFENPKTLKKYEKQLVKLQRQLAHKEKGSANFHKMKRKIAGCHERITNIRKDKLHRISHKLINDNQVIVSENLAISNMIKNHNLAKSIADCSWYELTRQLEYKAEWNNRQYIKVDTFYASSQLCGCCGYKNTDVKNLAIRIWSCPVCGTKHDRDLNASQNILAEGLRLLSA

SEQ ID NO: 2933 - protein, 378 aa, Ruminococcus sp.
MSYRAIKIKLFPTREQEKLLWQSAGTARFAYNWAKKFADTYYRLYKKSLNAGKARKHFTKLRNRKKYAWLKEVSSEIPQQAIKDYFEALNKFFKKIAGYPGFKSRKRSTVSFYHSNAKFTVSDNVIKLEKIGEIRMKDDNRLPRGNYRRDKSKVCNPRVKYNGKYWYISLCVENKYEKCKLDKDLSVGIDLATVSNFEKSFGNINKTQRVRRLKKQLRRLQRQVSRKYEKNRSGNRYLKTNNIMKLERKIKLLHKRLSDIRLNYLHQVTISIAKTKPYRIVMEDLNVKGMMKNKHLAQAISEQGFAKFIELMKYKAEKFGIEFIQADRFYPSSKICSHCESLKKDLKLSERIYHCSCCGFTIDRDKNASINLANYKLA

SEQ ID NO: 2934 - protein, 397 aa, unknown
  TnpB Polypeptide
MEQVLTIVCKLQPTQEQSQKIEATLSAFANACNFINTTVDPKLVNNVRIQTLIYTQVRNQFYLSANLTIRAINRVSANRKTAKLKNKPVKDFHPTSADYDARIFDFREKDWAASLTLVGGREHIRMDVGNYQRGKLKGRKPTSATLCKHGDGSYHIHIQIKDEPPELKKSDSVVGIDLGRRDIAVTSSGDKWSGKDIQQVRDDFFKVRASLQQKASKGTRSTRRRARQILQRLSGRERRYQSWLNHNISRTIVNKAKTSNQSIAIEDLTGIRERTNQQPRSKTERRRSNSWAFYQLREFLTYKAIQAGVKLVKVNPAYTSQMCHKCNHIHPVKGKSYRSNKSFKCGHCGWYGDADLNGAINISNIGAAVNLPRGSGLFCSLSEHSQGYQKPPHLCVG

SEQ ID NO: 2935 - protein, 555 aa, Bacillus sp.
MQLKEYMNQTFPGVTLVPHIYFQWENHLHFHFGKGKDLYVERTDAINREYFTQLYTYNKYLFEDIFSKEDEVFLVTNVYRFKKENVKNPQKINLYRRFIHNRELKYHIRQETIPFLFEDEEAMQRFTQKQNIGRACLTAKEFRLLQRMSHSSKALRNVGLYTMKQSYLNNNRMATVKEVDTAMQADMNYSGVQSNSVQAIRRALYAEVKSFFKALEQWKKHPKKFTGRPKFPNYSRSTDKRIIEIYQVPKVDENGFWMIPMSVAFRQKFGSIKIRMPKNLRHKKISYIEIVPKQKGRFFEVHYTYEMHVSQMKKSPATTSNALSCDLGVDRLVSCVTNTGDTFLIDGKKLKSINQYFNKMIRNFQQKNIENGISKRVVTNRMAALWHNRERQINGYISQTVGLVFKKVKAFGIDTVVVGYNAGWKQKSDMGKKNNQKFVQIPFHKLIAAIENKCKKEGIRFLKQEESYTSKASFLDKDLVPVWTKDDKTYYRFSGKRMTRGLYQSKAGTCIHADINGALNTLKKSKVVELEESLKVKTPILLEVQKRKAVATRIA

SEQ ID NO: 2936 - protein, 389 aa, Ruminococcus sp.
MNKAIKYRIYPTTEQIVLLLKTFGCCRKVWNLMLADKIAFYEQTGSMLKNTPAQYKASYPFLREVDSLALANEQLHLQAAYNAFFKNKSIGFPNFKSAKRSKRAYTTNNQKGTIALAEKGIKLPKLGIVKAKLYRLPKTGWILKSATISQESDGKFYASVLFEYEAEIKVVPVSDNAIGLDYKSDGLYMDSNGIVGSNHKFYRESYTKLCKAQKKLSRMIEANIIGYKAGPKGGRVPIYKKPLSECKNIVKQRLRVAKISRHVAHQRLDNLHKKSTEIANLYDVVCVESLNMKAIANRGFGNGKATLDNGYGMFLNMLEYKLYDRGKHFVKVDKWFPSSQLCSCCGNCQKLALSARTYTCRSCGIVIDRDYNAALNIKNEGLRLLSQAV

SEQ ID NO: 2937 - protein, 385 aa, unknown
  TnpB Polypeptide
MEQVIKVRLYPTTEQAGFLNRQFGCVRLIYNKALGIINHQYKVHGRGLSAKHDIKKLLPIAKKNNRYSFLKECDSLALQQSCNNLDKAFKKFFEKKAGYPKFKKKQSRQSSYHINVSVHQTENRKRGYIKIPKLSTPIKAVLHRRIPEGKIKSATLSKDPSGKYYASMIFSVERVLKAPSQSFKENQITGIDMGLKDLLITSKNQKIANPRFYVKALKELRRKQKALSRCVKGSRGYEATRIKVAKCHEKVRKAREDLQHKISLQLVNENQVIVVETLKVKNMIKNRRLAKHIADASWSKLITKLEYKAKLYGKKVIKIDQWFPSSKTCSCCGYERKSLPLQVRFWTCPECKTDLDRDINASVNIKKQGIIMLKAEGLSVSANGV

SEQ ID NO: 2938 - protein, 466 aa, unknown
  TnpB Polypeptide
MFEKGGKIMYRAQTVQIKKGHRLYKYCERECSLSAKLYNRANFIARQYATAVRDLEQYKPLRENQLSAYEMVRNVVAGTKYAPKGKWLNYNRLDYILKATGDESYYAMYAQENQQTLKLLMRDYTSFFESLKEYRANPAVFTGRPKMPHYVKEGGLKTAVLTNQICKVKNGRYIKFPGTKIRLNAGAEITKLKEVRIKPRGGAFEVSIVYEIADTGIQPITDAKVMTQKLCELGKLTDITDKRIIAIDPGVDNFLSMVNNFGDQPMLIKGGSIKSANQFYNKELARHKSQAELCNKRKVTKRISRLHLKRYNIIKDKMHKISRYLADYCRDRKVDMVILGHNVYQKQEIATGHVNNQSFVQIPFVVFAGMLSYKLAEYGIQLLLTEESYTSRADYLAGDYMPTYGADDEKADFSGSRVKRGLYRHFDGKLSNADINGAANILRKVFPKVVQWDRGVVDTPCAVRVA

SEQ ID NO: 2939 - protein, 400 aa, Chloroflexi sp.
MSKREKPAKEKNPSKTYQFRLYPTHKQERTLEQWLVLCCEVYNAALDERKSAYRMAGVSLSYADQCAELPACKEVRPDLAEVPSQVLQDVVKRVDLAFDGFFQRVQEGKKPGFPRFKARFRYHSLTFKQFGNSFNVLAGGKNNRGTLVLAKFGQIKMVMHRAIKGTAKTAIVKRTPTGKWFVNITVERSSSEGEKKPLLPSEEEVGIDVGLSTFAYLSTEEEIGNPRFFREDEAKLARAQRKLAKAPKGSKEREKKRKVVARTHERIANRRKNFIEQEVSKLLARFGFFAVEALVVRNMVTNPKLAKSIADASWSMFFTRLLAKAEEAGRQVVKVNPAYTSQTCSGCSHRRPMPLSVRVYECPNCGLVIHRDHNGSLNILADARQAVGRHSRVIPEAPGL

SEQ ID NO: 2940 - protein, 392 aa, unknown
  TnpB Polypeptide
MKAYKTEIQPNKDQIELIHQTFGNTRYVYNQFIKLNLDRLKENQDILSGYDYSKMLNNDPERPDWLLKSPSKAIKQAIMYAHQALWGYLKGNNGVPRFRKKGKHNSFYLIGVIKVERHRIFLPKLKWVRLKEFGYIPNNIKSATVSMKNGRYYVSCLTDETGDERIATSSQGLGIDFGLKDQFITRDIVIPSVNKSNRIKRLEKRLKREQRSLSRKYENNMTNKVYYKTGKRKGQLKSFKYKRPLHECKNIAKQRLVVDKLYERITRIRTDYNQKAIQLILKQKPSFIVIEDLNIKGLMKNKHLAKAIANAQWYMSRVFLKQQCEKLGIELRLASRFYPSSKLCSECGYKNKDLKLKERSWVCPKCKVIHDRDVNAAKNLEQCKNYTVLTAV

SEQ ID NO: 2941 - protein, 392 aa, unknown
  TnpB Polypeptide
MIKSLKVRLNPNNKQLTKLFQYAGCARFAYNWAIAREQANYKQGHKFLTDNELRKEFTQLKKLEDYKWLNEVSNNVTKQAIKDACNTYKRFFKGQCKYPKFKSKKQSTPAFYQDTGKIQFTDTHVKVEGFSSSKKRNKQKLNCIKLCEKGRIPPNCKYMNPRFTYDGLYWYVSVGVEVGDKITSLSSDGIGIDLGIKDLAICSDGYTYKNINKTQRVKKIEKRKRRLQRSISRRYEKNKKGVKYCKTSNIIKREKELLKVNKRLTNIRHNYLHQTTSEIVKRKPSFICIEDLNVSGMMKNRHLSKAVQQQSFYEFRRQIEYKAEWSNIPVIIVDRFFPSSKLCSCCGIVKNDLKLSDRVYSCECGNIIDRDFQASLNLKVYGENVLKQQSVI

SEQ ID NO: 2942 - protein, 412 aa, unknown
  TnpB Polypeptide
MRSQKLRLKPTKEQESLMWWYSKVSRNYWNLLVDIDKRNNKGEFDDVLSKNSNKTYYSKFYDRDIYSLNQSDYLNLAKIVVAKNYEEDKEKWSWYYKPNQSFIYTSIAREMVRIRRQDKGKLNFRSIDKISPSFNVRCDMSADKKRLSRIYLKESGKLQIPTIGDVGFGSTRTEFDLSCKKQVANISFDGKYWYLSYTEDEELQEVDLPEYTSGVGVDLGIKTLATVSDGTTIPNIKTFRRVRILKKRLKRLQRKVARKYLINGCNKHNKTKNIIKLERQIKLIHRSIRNIRINHICKFVSELVKKRPRYVAIENLNVKGMMKNKHLAKDVANCSFYTIREHLIRKATERYVEVRLVDRFYPSSKTCSNCGSYKKDLKLSQRVYHCNSCHEKIERDLNAAINIAQTDKYVLA

SEQ ID NO: 2943 - protein, 411 aa, unknown
  TnpB Polypeptide
MIVQRVEKHVVKTRNSYYSLLCEYTHKAKNLYNHANYLIRQEFCKNNKWLRFGELDKILRDDLIYDDYRQMPSAQSAQQLLRLVDRVWISFFRSIKDWSKNPDKYLGKPKLPKYKSKDGNYVLVLTSQEVKLKGDKLKFPRKFKGFEVKPRFVDLDNYVAFKQVRVVPNYNSLCVELVYTVDIPDNNLEDNGCYLGIDIGLDNLATVVNNKGCEPFVINGKGLKSINKYYNKQMSYYRSISKKVNNKDYTNRIARLTEKRNLKVDDYLHKASRRIVDYAIENNYNTIVIGDNKNWKQNSKLSKVVNQSFIGLPHKNLISMVQYKAQNVGINVLLTEENYTSGTSFLDNELPRKENYNKKRRVSRGLFVSNKGVKINADVNGAYQILRKVFPEVNSDGIEGVALHPVKVGIV

SEQ ID NO: 2944 - protein, 444 aa, unknown
  TnpB Polypeptide
MEEWYMIRARKYTIVTQLHEKLNKDIINYFDETVSTYSVAFRRTFHKLNNNSKINISKLNTGIQKEYKVTKRTANSIIRDAKGRISALKELRETELKSITARIKYLKDTVIPEMEQQLASNILKINLGKYVNYTKHKNLRRSIVAKKNKLNRLKQRKLNIEYQLDSKNFNVCFGTKELARKNKERFLAQRDSSMHYIGAKEEPACNQNFKLTFSKKNNQFEVRIRKDFCVVGSNKYLFGQIYFRHHKNKLIEILKSKESPLSYKSIKRNGRYYLYCTFEIKYKSEEFLTRNSYGTIGVDFNKGFVAISETNKNGHLIKTDVVHYRFKQGNSTQTDFEKITNILVNRCLNTGKDLVIENLDFAKRKASTETRKGRKYNEMIHSLAYRMFSETIGNTAYRNKVWVRKVNPAWTSWIAKQKYCPQMKLNVHVGASFVIARRGQGYKD

SEQ ID NO: 2945 - protein, 425 aa, unknown
  TnpB Polypeptide
MKERIFTTKEQGRMLVEAGLPISTAIGFRDKYLDQLHSMKDDAGRIGLIEAVTPDISNPVWDVGTLLNLLPYEIEGCTFECYKLEHAWSVTYRDIDEIPIYWSSELLAKTFGCVRVVWNACVDSFNSYDKETNPNPKFPTKSDLVIEKPWLNEVSAATLQQKQRDFIEFSRQYFNKNRKEKLGKPNYKNKHDNQSFRLPFPKFKITNIVETGQCYKQKTSKTVGVDLGIKTLATLSDGIAVENPHFLCENQAKLKRMQRHLSRKKLGSNRRNKCRLKVSRLHRDIANKRSWYMHNLTTMLVNNYDVICIENLNASGMLQNHKLAGSVYDASFSMFRNQLEYKCRWYGKELIVIDRFYPSSKTCSRCGWKNKDLKLSDRTFVCKDCGMEIDRDLNAAINIQAVGVDAAIRTQSSRVASCVEASKME

SEQ ID NO: 2946 - protein, 405 aa, Symploca sp.
VRTAYQYRLRPTKQQAIEIDRWLSMLCYQYNYLLADRFNWYEQNRSPVNACPLVCYLPELRDNPDYYSQKKTLPQLKKDRPWYSGIHSQVLQDVVKRVKVSFDRFLKRDSNGKRIGRPRFKPLSRYRTMTYPQIKQDCLQGNRINLPKLGKVKVILHRQIPDGFKIKTASITKKSERYYLTLSLEDKTVPSIKPDINPYSITGIDVGLKEFLTTAEGEAVAVPQHYRKAQKRLRVIQKGVSRRQKGGKRRLKAIKQLSRQHKKVADKRKDFHFKTANYLLSKYDVIAHEELNVKGLSRTRLAKSVLDAGWSSFLSILANKAENAGLLVVPVSAHNTSQECSSCGEKVPKKLHIRWHNCRSCGCSLDRDQNAAINIKNRAVGHPVLKAQLTSDGIPGVAEKPALYA

SEQ ID NO: 2947 - protein, 292 aa, unknown
  TnpB Polypeptide
LGSGTVQLVCVEYATRRKQFKKTRLNWRVSNPKSAKYSLGWIPFKGGHAKYKAGQIHFAGQKLSLWDSYGLADYELRAGSFSEDSRGRWYFNVAVQVQARPSPGTAAVGIDLGLKECATVSTGEKIEGRWYRGHEQALGIAQRAKKRKRARAIHAKIRNQRKDELLQFSSALVKRNAAIFVGDVASAKLVKTKMAKSALDAGWAMLKTMLEYKSHQAGIVFEAVNENYTTQTCSCCGSIPASSPKGRAGLGIREWVCSGCATVHDRDVNAAKNILAVGHRRLAAGITVSSGR

SEQ ID NO: 2948 - protein, 293 aa, unknown
  TnpB Polypeptide
MKERIFTTKEQGRVLVETGLPISTAIGFRDKYLDSLHSMEDDAGRIGLIEAVTPDISDPVWDVGTLMNLLPFVSVLVETEQCYKQETSKTVGVDLGIKTLATLSDGIAVENPHFLCENQAKLKRMQRHLSRKKLGSNRRNKCRLKVSRLHRDIANKRSWYMHNLTTMLVNNYDVICIENLNASGMLQNHKLAGSVYDASFSMFRNQLEYKCRWYGKELIVIDRFYPSSKTCSRCGWKNKDLKLSDRTFVCKDCGMEIDRDLNAAINIQAVGVDAAIRTQSSRVASCVEASKME

SEQ ID NO: 2949 - protein, 499 aa, unknown
  TnpB Polypeptide
MIYTIRFRLFPTPSQKKRLHEIFNIYNRAKRKGYRLLIKNEANIQQQLMAYCQNNPYVNSILLENQQKFHQQITWLEKHRSYLQAKGEVIHDKITAIKHVQKGDWRLRGLYARLSAIQNRLRTLQFKPLIFGGKRGFRDRIRHKLTHQEFQIHRDASFTCVGKKKGVNLNIKVLTTKEVQIRTFSKAKGKKWLIIPFSVNEKQESLLQILFQAEKYTATVKRLLVRRDLRYYVHFSYELPEPEKRYAFENGAIGLDMNYQVLGLTNVDQTGRLLSYQTVRLRNLYSLRRNQGANYLSFKLDKILNYCVHKGKGLVLEDLSFSQYFSYNKSLNRKLNQFKTSALELLKRKCLKRGVAYREVFPGYTSLIGKYKYSRLHNLSGHILASYVIARRGLGLQEDLPPIYQWLLAQVGGALKPRLNPSSPYYKWAQIHDLFKHSGITSFKTSKILPKVVLMQHVLNSATGAQPNNLRAGLSPAGKIEDYHKFWNFCRKFPIFISN

SEQ ID NO: 2950 - protein, 402 aa, Escherichia sp.
VKRLQAFKFQLRPGGQQEREMRRFAGACRFVFNCALARQNENHEVGNKYIPYGKMAFWLVEWKNATETQWLKDAPSQPLQQSLKDLERAYKNFFQNRAAFPRFKKRGQNDVFRYPQGVKLDQENSRIFLPKLGWLRYRNSRQVTGVVKNVTVSQSCGKWYISIQAESEVSTPVHPSASMVGLDAGVAKLATLSDGTVFEPVNSFQKNQKTLARLQRQLSRKVKFSNNWQKQKRKIQRLHSCIANIRRDYLHKVTTAVSKNHAMIVIEDLKVSNMSKSAAGTVSQPGRNVRAKSGLNRSILDQGWYEMRRQLEYKQLWRGGQVLAVPPAYTSQRCAYCGHTAKENRLTQSKFRCQVCGYTANADVNGARNILAAGHAVLACGEMVQSGRPLKQEPTEMIQATA

SEQ ID NO: 2951 - protein, 382 aa, unknown
  TnpB Polypeptide
MLKTVRVKLLPTPDQKSILLATMKVVNTACNGISEFVYTNRVWNRYEVQKQMYRSVRADYLLGAQMTILACRKVADSYYAGIKKGDEWVLHEYRPRGAIAYDGRTYSVTDNVLSLWTIQGRIKVRPQTKYQLTNENEMDLCYDRSKNRFYANMLVEVPEEPEHPVTDYLGVDLGIVNIAATSDGVQVPGTDCEQVRQWYQGRRQILQSVGTKSAKRRLKKISTGESRFKKQVNHVISKHVVGLAKGTSRGIALEDLTGIRERTTVRHGQRDRHSKWAFAQLRTFIQYKATIAGVPVVLVDPAYTSQQCSVCGYTDKKNRKTRNSFSCMSCNHAEPADINAAKNIARRAAANQPMVAEASSATSYTSLDDASSCKPPVLTGGS

SEQ ID NO: 2952 - protein, 175 aa, unknown
  TnpB Polypeptide
MVGVEGRVNHILHCTTKSIVEEAVKNKEAIVLEDIAGIRRLFIKGNGQGRRYRGMMNSWSFGEVQRQIEYKARWKGIPIIHLTKGETRNTSTTCPRCGERLQFGQNRQLWCPSCKTWEDRDVVAAKNLSRRGWMRFVQSLPLEAKGGAVEAMMRNPTTTVILRVDAPKSSLQKKA

SEQ ID NO: 2953 - protein, 412 aa, unknown
  TnpB Polypeptide
MLRAVKIRLYPTACQTTQINMLLGCCRVVYNQALARNIAQYKEYHISENRTSLSYWFHHELLHNPDFEYLKEQNTKVLKQSIMDMLSAYKNFFERHTGYPKFKSKHNNKQSCRFPIDAISKINDYTTYKLSLANIKNIKFRCNKKYAEYLQKNKANIRQATLSKLPCGEYYLSILVDGDLTHNGVQNTDSCIGIDLGVKDFVITSEGEVFNNLHFKKNENNKLKRLQRQLSRKVKGSNNQNKTRIKLAKVYKKINDKKQYYLHQISNTLINENQVICMENLNVKGMMKNHKLAESISEMNFGEFKRILEYKARWYNRKILFVDRYYPSSKTCSCCGYKNKDLKLSDRFWTCPQCGKIHDRDINAAVNILHEGMRLVGSSTTEFKLVDYPTMDDHSEMSLKSSDRLKQEVNKE

SEQ ID NO: 2954 - protein, 341 aa, unknown
  TnpB Polypeptide
MPPSGSTSETPANSGESLSCLDNKPGGCCTTTLTNQDCVLYDAGKGAHELKLPLTRERLSLGKAPIQGRLKQVKIIPTHGIFVVSLTTEVKGELPTPVEIPQRIIGIDLGVNNFAAITNNLGKPCLLFKGGVAKSANQWYNKQMAAIKSEQMTRTGKDFVPTPESRRLELRRDNYLSDYMSKVAKLVIRWCVENQVDTIIVGVNKDWKQGSNMGSQNNQNFVSLPFAKFRWQLQYRAERLGIRYIEHEESYTSKASFLDGDFIPVYGEDGADQVKFSGRRFKRGLYRSKSGQVLNSDFNGSANTIRKAIQDAFVRGIMPDFSRVLVYKHPDMKPISVGKTA

SEQ ID NO: 2955 - protein, 360 aa, unknown
  TnpB Polypeptide
MQKGLKIRLYPNKKQMNILSINFGHTRFVYNYFLDYSKNNKDYNYNNWSKKLTELKNSKNTIFLKEADKFALQNSLKNLKTAYDNFFSKRAKAPNYKKKHNEQAYRTNYTNNNVVLYDNGIKLPKLGIVKCKYNKDIKNNKIISVTVKLLKSGIYEASIIYECIKSSLPKTGLSVGIDLGVRKLITTSDNDTYISELDIDRINNRIRRKQRKLSKCKLHSNNWNKERCKLAKIYQYRDDYMLDNIHKATKAIVTKYDIIYMEDLDIKDLLSKQKLKKHKRKMLTSSLGKITTLLEYKCEHYNKTIKKIDRYYPSTQTCSVCGKTYQVKASEVYKCPYCKLVIDRDYNAAINILNYGIAHN

SEQ ID NO: 2956 - protein, 272 aa, Flavobacterium sp.
LIKQKVEIRGNCIKLPKLGLIKFFNSRAVESKIKNATIREEADGWYISLVFEGETTELESSQQNTGLDLGLNYFAVTSNDERIDNPRTYKKYEKALAILNRSRDRKKKGGSNRGKVVEKIGRLHQKIANVRKDFLDKVSTKLIRENQAIVVEDLKISNLVKKAKPVLSEDGKTYLKNNRKQKSGLSKSILDSGWGIFTNMLEYKAKWYGRTFVKVAPQYTSRDCSNCNYRLEKLALSIREWQCPECNTIHHRDHNASINILNKWRLGESPEA

SEQ ID NO: 2957 - protein, 402 aa, unknown
  TnpB Polypeptide
MARAVKRAFRFRFYPSSEQACELARTFGCVRLVYNMGLQARTEAWTLRQERVNYNATSSMLTAWKKTDDLAFLNEVSAVPLQQALRHLQFAFTNFFAKRARYPSFKSKKKSRRSAEYTTSGFRYRDGRLTLAKMAEPLNIVWSRPLPEGAKPSTVTVSQDAAGRWFVSLLCDDRIEQAPAPSPAVGVDAGLDSLLTLSTGEKVVNPKHERRDRAALAKAQRNLAKKETGSANRAKARLKVARVHARITDRRRDHLHKLTTRLVRENQTIVVEDLTVRNMVTNHSLARAISDAAWRQFRTLLEYKADWHGRNLVVVDRWFPSSKLCSACGALAERMPLNMRSWTCRCGTVHDRDVNAARNILAEGLSVIACGGGIRPQRTNVRTGRSSVKQETQRATAGIPRL

SEQ ID NO: 2958 - protein, 230 aa, unknown
  TnpB Polypeptide
MSATVKQRAGRWFVSVSVETERTESDNQVSGAVGIDLGIKTLATLSDGTVFENPKTYYKYDKQLRRAQKSLSRKKQGGKNRAKARLKLAKLHYRINCVVDDHVHKMTRCIADNYHTVVLEDLNVKGMQKNRHLSKAVSRANFHKIKQFLMYKCRDVRFVDKFYPSSKTCSNCGRVKDMPLHRRVYKCECGLNLDRDLNAALNILGQGLPEVKPVEMKALASVQLKRNYCL

SEQ ID NO: 2959 - protein, 383 aa, Idiomarina sp.
MLKSTKVRIYPTQVQRDFLVAHFGAVRFSYNKALYLKKHYYRVKGMCIKPKKDLKPLLALAKRTRKYGWLKNFDSISLQQAIINLDKAFDNFLNPKLKTKHPKFKSRRGRQTSYHCIGVKVLSDAVKIPKLGPIKAKLHREIKGKVKSITISCNASGKFFASILSDDNQGTPETCRSIDTAIGIDLGILHFATDSNGCKTDNPRFLLRAERNLKRKMKALSRKKVGGKNRNKSRLIVAKCYEKLTNTREDFQHKLSRKLIDENQAVIVETLETANMLRNYRLSKHIADAVWSGFIEKLAYKANQSGKHLVKVDRFFASTKTCHSCGKKSFISLNDRVWTCNCGITHDRDTNAAINILKQGLIMLKAEGHSVSACGCLHKTSES

SEQ ID NO: 2960 - protein, 276 aa, Okeania sp.
MATVSYPKQALKLKGNQIRVPLGNTCKRWFGLDCFLIPMPSNLGFSTLKELRILPRNKCFYWEFIYEKEVVVKPQLNQDSVLGIDHGVDNWLTCVSNVGTSLIVDGKHLKSMNRWYNKQISTIKENKSQGFWSNKLAGITEKRNRQVRDGINKAARIVINHCLKKSIGTIVFGWNKGQKNEIKLGKKSNSEFVPIPTARLKERIAQLCDEYGIIFIETEESYTSIASFLDGDYLPNYGEKPDDWKPSGKRIKRCSAVLGVSPMSDCIKTAWFVWNW

SEQ ID NO: 2961 - protein, 402 aa, Streptomyces sp.
MIRAYKFLLRPTKGQAAALADMLRDHCSLYNAALQERRDAYRHVSKTTVRYGDQSAQLKAIRTFDPERQGRWSFSSQQATLRRLDKAFAAFFRRVKAGEKPGYPRFKGVGHFDSVMFPKDGDGCRWDSTPHDRQTRVRLQGVGHVRVHQHRLVQGRVKTVTVKREGRRWYVVLACDNVPAEELPPTGAIVGIDMGVAHFLTTSDGEHVANPRFLKAMAGELAEAQRHLATFPKRTRQRTKRHRAAARKVAKLHAKIRRRRLDFHHKTARALVRDFDVIAHERLNTAGMTKSPHPKAAPDTPGSFLLNGATAKAGLNRSILDAGWAQFLGILANKAESAGRFVIPVDARNTSRTCPDCGHVARGNRVTQATFRCTACGFAANADHVGATNVLNRAGLVLCDVA

SEQ ID NO: 2962 - protein, 442 aa, unknown
  TnpB Polypeptide
MQIISSYGVELRKQNIPIRQTLEIYRSAVSYLIGIYVQVWEELAEIPDAKRRFNAAEHLVHTTKKNHACFDFDIRFPKMPSYLRRSAIQHALGTVSSYKTRLDLWEKTDGKSGKPKLVYENHAMPVFYRDVMYREGAEGKDEAYLKLYDGHDWKWSCVRLDHTDMEYLRKCWSGKKASAPTLEKRHHKYFLRFTYTEEVTLTKTPVKEQVICSVDLGINTDAVCTIMRADGTVLGRRFIDHPSEKDRMYRTLGRIRRFQREHGSAQTQGRWAYTKRLNTELGKKIAGAIVRYAEENHADVIVFEYLEMQGKISGKKKQKLHLWRKRDIQRRCEHQAHRKGMRVSRICAWNTSRLAYDGSGAVTRDWENHSLCTFQTGKRYNCDLSASYNIGARYFIRELLKRLPVTERSLLEAKVPPVKRRTSCVYADLRKLHSEMELLKAA

SEQ ID NO: 2963 - protein, 368 aa, unknown
  TnpB Polypeptide
MIKHKGYKFRLYPNLEQRIFFEKTFGCSRFIWNQMLADRIAHYEETGESLKNTPAQYKKDFPWLKEVDSLALANVQLNLNKAYKSFFESRVSFPRFKSKKTVQSYKTNNQNGTIALLDGKVKLPKIGWVKVKAHRQIKGVIKSATISKTATGKYYISILCEEEILPLPKTDSNLGIDLGLENFAILSTGEKIGNPKFLTSLSKKLAKEQKILSRRGLLAKKKGVKLSESSNYQKQKLKVARLHEKISNQRKDFLHKLSINLIKNHDVICVEDLASRNLMKNHHLARAIGDVSWYEFIRQLRYKADWYGKKIVTISRWFPSSQLCSSCGASSGKKPLSIREWTCEGCGIHHDRDINASLNILKEGLSLA

SEQ ID NO: 2964 - protein, 416 aa, Ruminococcus sp.
VYLTIKQKVKHLSKEDYGILRELCHTAKNLANEAIYNVRQYYFTEGEYLKYEKNYALLKDSPHYKMLNSNMAQQILKEVDGSFKSFFGLLKLAKKGRYSFRDCQLPHYLSKKGFTTLVIGFVRLNGNKLILPYSNAFRKTHQPVEIKVPPILADKRIKEIRIIPKSGARFFEIQYTYQAECVQRNLDKNNALALDLGVNNLVTAVSNQGRSFIIDGRKLKSINQWFNKENARLQGIKDRQEDKRRTTNRQKILADKRNRQVNDYMSKTAKKIIDYCIAHDIGTLVIGYNETFQRNSDMNKRNGWNFVHIPYGKLRSKLEYLCELNGMVFVKQEESYTSKASFWDNDTIPVYNADNPQSYQFSGTRIRRGLYRTADGTLLNADVNGALNIMKKSSVVDLTVLYGSGEVDTPVRIRVA

SEQ ID NO: 2965 - protein, 327 aa, Clostridioides sp.
  misc_feature (168)..(235): Xaa can be any naturally occurring amino acid
MYPNKKQQELINKTFGCCRFVYNKYLAKRIEVYKNAKETFTYKQCSSDLTNLKKELKWLKEPDKFSLQNALKDLDNAYEKFFKKKAGFPKFKSKKINRFSYKTNFTNGNIMYCGQHIKLPKLGMVKIRDKQVPKGRILNATISKEPSGRYYVSLCCTDVDIEVFENTXXXXXXXXXXXXXXXXXXXXXXXXXXXXXXXXXXXXXXXXXXXXXXXXXXXXXXXXXXXXXXXXXXXXKLSSLISDVSWSEFVRQLEYKANWHGRQIVKVGKFFASSQICNKCGYKNEEVKDLNIREWICPSCNETHDRDINASINILKEGLRLITIQNK

SEQ ID NO: 2966 - protein, 360 aa, unknown
  TnpB Polypeptide
MLCTLKIKLITSNEQFNALLETMKVFNQACNYASEIAFNSKTFSQVKLHKIVYYDIREKFGLSAQMAVRVIGKVVESYRVDKKTLHTFKETGAIVYDERILSFKGLEYASILTLQGRIEVPMIISKYHQGLLAGRRVRGQADLILQNGTFYLLLVVDVPESEPNSENGFIGVDFGIVNIAVDSTGEVFSGNKVNGLRKRYAKLRTKLQSKGTKSAKRLLKKRSKKEKLFARDVNHCISKKIVAKAKALGCGIALEDLKGIRKRTEKTVRKSQRRQHSSWAFCQLRQFIEYKAKIAGVPVVLVNPKNTSRTCPVCGYIAKGNRPSRDKFCCQACGYAAPADNVAAENIRRAAVNQPDAATA

SEQ ID NO: 2967 - protein, 389 aa, unknown
  TnpB Polypeptide
VEYVQRASGTGRFTDNSGREQWEKQYQAYKQEQKIAPEEQRVLTPLNPVQKGPIFAYFSRDFVIKRTFEDLKKAYDNFFVGRVAYPEYKKKVQSHDTIYLSNDTFPVGSHWISIPGPGRFILDRRQTRKNRGKLPRKQVPCQQVMLPGATASWGAGNWYMSLQLDIKKHSPLPCTPITGMDMSLKQATVVLDGRRLENQRPLASHLKQLGKLQRKLSKKQKTSDPETGPTISSHSYEKQQRKVARKHQQIAHIRRDIQHKFTTEVARSSGVIGIEDPNILADVGQSEAGASSRLCGHGATVTVLENASSQCGSGALYRFVPVSFDQVLFVLWACQKAHAPQALNLSVPEPGTGDRPGFERRFTPGLVRDRYASPTSRLKLAVPGSGYDR

SEQ ID NO: 2968 - protein, 367 aa, Clostridiales sp.
MQRIRGYKYRAYPNRKQKEFFEQTFGCCRFVYNYYMEKRQRLWREWHDTLSYNDMSKDLSSVLKREYVWLKDADSIALQQSLRHLDRAYDKFFKKHTGYPKFRSKRYKQSYRTMNINGSVSIDESSITLPKAGRVKIVNTREFNGRIISATVSRAASGRYYISLQVEENYEILPNAGGKIGLDAGLKALYTTCDSDIYPNPKTLALHEKRIRRLQRSLSRKQKGSKNSEKARLRLAREHEKISDIRNDIQHKITHKLASENQVVCVENLNVRGMMKDHRLAKSISDASWSELCRKLEYKVKDHGGILIKVPRTYASSQICSCCGRKDPMIKDLGIRRWTCPSCGANHDRDVNAAKNILEKGLKMLAS

SEQ ID NO: 2969 - protein, 312 aa, Mycobacterium sp.
  misc_feature (307)..(307): Xaa can be any naturally occurring amino acid
MLTGRRFRVEFTDEQAEFAERIGGACRAVWNTGLEQRREYRRRGAWMNYQPQAKELAEAKSEHSWLNDVPGHCLQQALMDLDRACREHGTGKVHWRSGRRWVPSFRFPEGNKMALEQLNGRRARIKLPKLGWVKFRMSRPVARDIIRSVTVTRAGRHWFISVLVDDGRQVPQTHQGSVTAVGVDRGVAVAVATSTGALFGRAFTTVGERRRVVALQRTLSRTASRSANRDKARAALAAVRARERRRRMDFCAQTAHQLAAANAMVVIEDLKTKQMTKSAKGTLDQPGRSVAAKSGLNRAILAKGWHXAVPAA

SEQ ID NO: 2970 - protein, 432 aa, Streptomyces sp.
VVVVVLRSLGRRGVGGDGGEIHQHPVGASLEEGEGGRLVIRAYKFLLRPMARQEASLRAMLAAHCSLYNGALQERRDAYAHSSQTKIKYGDQSAQLKDIRTFDPECQGRWSFSSQQSTLRRLNVAFVAFFKRAQKRKAALARGVPKDLAPKAGYPRFKGVGHFDTVTFPKDGDGCRWDSTPHDTQTRVRLQGVGHVRVHQHRPVRGRVKTVSVKREGRKWYVITTCDQVPAEPLPATGAIVGIDMGITHFLTTSQGEHVPNPRFLRASADELAAAQRVLETFPKKTRRRTKKHRAAARRVAKIHAKIRRQRLDHHHKRAFDLVRDNDVIGHEALNTAGMTKTPASKPDPDQDGAFLPNGAAAKAGLNKSILDASWGLFLEILANKAESAGRRVIPVDARNTSRTCPPSAGGCGSPRRTASPKRSSSASSAGS

SEQ ID NO: 2971 - protein, 399 aa, Streptomyces sp.
MGKTAEEPKPTVVEGEEAQRIKRELLGIGDRRKHHTREATRLKSHAKEPDTHHRLYRFRFYPTEEQAEQLGRTFGACRWVYNEGLALRSGAWEQHRVNVGFAETCRALTGWKRAEETAWLRDVSSTVLQQSLRHLDQAYGRFFKGEARYPKRKKKGRSRDAATYVRTGFKWVEDPERPGTGLITLAKQSQPLDIRWSRALPVGVVPVRLSVTRDRAGRYFVSTLVEERIVPLPPVFVSGSREPKAVGVDVGLASLVTLDDGTKLDHPRLLKRYAEKLARLQRELHRKVKGSRNRGKVRQKIARLYALIGDVRRDMLDQLTTRLVHENQVLVVEDLSVVTLMRAGRGKGRQRKAKLNQAIMDASWGELLRHLRYKASGTAGRWWSSIVSFPRPGGARPVM

SEQ ID NO: 2972 - protein, 427 aa, unknown
  TnpB Polypeptide
LIEYCDSVIKKYNYVFRIVWHRIKNNPTQKNHILNAQLQNEFDICKRTANSIIKTVVGRFNSLKALKEYELKQCKIKLNKLEQNLIVEQNKLDKQKILAKNNQIKNLQSYRNIKIKVFWMKIRIDKLKNRIKSLKNQLSTNCFKITFGTYKLLKQDVEQFLKQRDCNMCFIGTKSEKCGNSNFQLSYTRRNNQFKIKVRKDFDGNKQAVGNDRYVYGKCYFNHLKKYLISILKNHNLPLTYRIIKRFNKYYLQCILTIKKESVTRKTYGTIGIDFNKGFLAVAETNEHGNLLNIMRLNYIFGQGIKTENSLLQCINQLIKRSLQTGKDLVIEDLDFSKKKSLTIKAKSSNGKKYNNMLHSFAYRKFSDRCEQICNRNSVGLIKVNPAWTSWIAKHKYCDLMKLNVHTGASFVIARRGMNIREKKIKK

SEQ ID NO: 2973 - protein, 406 aa, unknown
  TnpB Polypeptide
MYVGERTMVIVTYNIELQMNESSFGFWKDFLSKSKEAYNMCASILVENNTPLDLHHVHEVVYDELRNKFNTLPAQCIIKIYKEVLAALRSIRSNKQKNADIPQRKQLALRIDKRLYSNLTVEGIALTGEVKNKRTFYPFIKFPKMETLFSEYKTKDPLLFIRDNRIFLSVPFEVAEKPLKNDTSVGVDLGMKRLFVTSEGVAYRDKQYLKKRRELRYLKRCLQSKGSKSAKKHLNKVRRKERNISKDMCYRASNALLASTKANIIVMEDLSKIKKTTSKTKEGFKRKRHNNAMAQVPFHMFKEILTHKTALVGKQVVTVSPAYTSQTDCRTNKRDGNRNGCRYLCSDGKVYDADWNASINIAKRGKHPFANVEPIDGQLKFLNGRELSASHTLNSFKSRSLASQLL

SEQ ID NO: 2974 - protein, 401 aa, Crocosphaera sp.
MYAIKRELKLNNQEKSFMKGCAGFSRFVYNHGLSLLKSTWDIPEISGSDSKRLDAIKKVFTNITKKQTEYLWTNKYSSRIYQNAFRDLKKAFSRWRNAKIKAELPRFRKKKHNCSFTVDSSNGKVLVREGKKIKIPTLGTFRLKEGIPYNCVSQTFTISREAGRWYVSFAVSASYIPEMKHSHQKVGIDLGIKTFATLSDGNTIEAPSSIKRAKTKLGKIQWRNRNKVLDNRCAGIEASKNAVKYYQKLRKKHKRITNIRQDFLQKTTTLLAKTYQHILVEDLNIKGMMANHKLSDALSNLGLYRFRELLSYKQECFGFLLTIVDRWFPSSKTCSVCGNIQDMPLCERVYHCQHCGQVMDRDLNASINLENWTNNADGLSVNPERSRRVNVCGQEGAVSLG

SEQ ID NO: 2975 - protein, 402 aa, Escherichia sp.
MKRLQAFKFQLRPGGQQEREMRRFAGACRFVFNRALALQNENHEAGNKYIPYGKMASWLVEWKNATETQWLKDSPSQPLQQSLKGLERAYKNFFQKRAAFPRFKKRGQNDAFRYPQGVKLDQENSRIFLPKLGWMRYRNSRQVTGVVKNVTVSQSCGKWYISIQTESEVSTPVHPSASMIGLDAGVAKLATLSDGTVFEPVNSFQKNQKTLARLQRQLSRKVKFSNNWQKQKRKIQRLHSCIANIRRDYLHKVTTAVSKNHAMIVIEDLKVSNMSKSAAGTVSQPGRNVRAKSGLNRSILDQGWYEMRRQLEYKQLWRGGQVLAVPPAYTSQRCAYCGHTAKENRLSQSKFRCQVCGYTANADVNGARNILAAGHAVLACGEMVQSGRPLKQEPTEMIQATA

SEQ ID NO: 2976 - protein, 363 aa, Acholeplasmataceae sp.
  misc_feature (354)..(362): Xaa can be any naturally occurring amino acid
MNKAFKFRIYPNESQKTLIHMTLGHNRFLWNKMLEDKQKHYELTKNSLHLTPAQYKNDYPFLKDIDSLSLANTQLNQEKAFRMFFNHKQDFPKFRSKKQDYGYTTNLVNNNIVLLKGYIKLPKLGEVKIKQHRVIPNEMTLKSVTVSMSSTGKYYVSILYEYQKEIKKKDVKESIGLDFSMTHFYVDSEGFKMEYPKDIQTDFNKLRILQRSLSRRIKGSSNYYKKVLEIALLHERIKHKRDDFLHKLSNAIAKRNDLVSVEGLNLIEMSQERPYYAKQISRFGWTRFVSFLKYKLETQGKTLMMMDQWYPSSKTCSQCGEIHTELKLSNRVFECPRCSNQIDRDHNAAININXXXXXXXXXS

SEQ ID NO: 2977 - protein, 365 aa, unknown
  TnpB Polypeptide
MQKGIKFRIYPNREQKNRINQTLGCCRFIYNRGLAMREEAFKDGNKAGYSQTSAMLTDLKKSEDFAFLKAVDSIALQQTLRDLDRGYVNFFQKRASRPTFRRKHSNRQSYRTINQGDNIRIVGKYIRLPKLGFVKVRQSMETGKINNVTVERTPTGKYFAVLNVEFEPERKYNKGDIIGIDVGIKEFYSDSKGNVVSNPKYLEKSMHKLIREQRKLSRKKRGSNNRNKQRIRVALVHEKVTNRRNDFLQKQSTMLIRENQTICIEDLKVKNMMKNHKLAKHIGSASWSEFFDMLTYKAAWYGNDIVKIPTMYPSSQTCSCCGYKNPLVKNLGIRNWECPKCHTSHDRDRNASVNILNKGLQIQSA

SEQ ID NO: 2978 - protein, 416 aa, unknown
  TnpB Polypeptide
MIRRQAFKYRIEPTGEQQRKLRKFAGMCRFVFNKALALQQENREAGEKFIGYVPMAKHLTAWRNGEETPWLKDAPVHPLQHALKDLDRAYQNFFTKKASFPRFKKKGQGDSFRYPDAKQIKLDQRGSRLFLPKVGWLKYRNSRTALGALKNVTVSQSGGKWFVSIQTEREIETPVHASPLAAGIDMGIVRFATLWDGTRETVLQPLNSFKRHQKRLAKAQRQMSHKTKFSNNWKRAKACVQRIHRQIANARTDYLHQASHRLSKSHALLCIEDLQVSNMSRSAAGTAEKPGRNIRQKSGLNRSILDQGWGEFRRQLEYKAQWAGGDVLAVAPQNTSRHCPACSHTHADNRQSQSVFLCVACGHTENADLVAAKNIRERGLNLLKGPDMAQIACAVNGAVRPSAAGTRRSDHAANAA

SEQ ID NO: 2979 - protein, 395 aa, unknown
  TnpB Polypeptide
VLVYTYKFRLYPTPQQILLLEGNLETCRRLYNQILSSISKGNKLSKVDTQNFIPEWKKTNPYLKKVYSKVLQMVNYTLWSNVRGLSESKKKSNRIGGLRFKGKGWYKTLNFNQSGFKIDESNNRIKFSKIGNIRTIIHRKIDGAVKGIIIKKTNTGKWFVNVQIDKQVAPLPVTGKDVGLDVGISKFVTDSDKNEFEYPRNIDKTLTKIKKQQRELSGKKKGSNNRKKVKQQLGIIYETLENQRIDFLHKMSTYYIRNYDLIAHEDLNITNMLQSKRSKTLNRHILDASWGEFFNMLNIKAESAGRKVVKVDPKNTTPKCSVCKTIVPKKLSDRTHNCNCGHLVPRDYNAAQNVLFDAYSLNGNRRKGLSSLFVEKNPLLFTFSSNEIASGKIFC

SEQ ID NO: 2980 - protein, 330 aa, Haloprofundus sp.
VRRTWKNGRRVSQPEFTSWSIVYDKRSATFYRNKVSLSTVNGRVECDFELPAESPTPYEQYVLSEKFEFRTSTLQYDAVDDEFYFHISTRRYDSDGEDDSEVPADTEHQTVLGIDLGVNSLAVASTGRFWQGNDYDHWCREFEKRRAKMQQRGTQAAHNALLRLGKREEGWRKQYIHTIANEIVKEAVETGCTQIVFEKLDGIRERLRFAKWHHLWAFRRIVEYVEYKAAQQSVAVERVKPNFTSQRCSRTDCGFTHEGNRHGEHFECLKCGYKVNADYNAAKNIGMRYVQKRQHRLHSSPMSESVDASVNMRINGGLMNGDGYQPLAET

SEQ ID NO: 2981 - protein, 412 aa, unknown
  TnpB Polypeptide
VYVTEQLTIGSTLATSKVHTKRHHALYWCRKTPKLREKANKIAVNLAHKIQLKPNKEQKQMLARAAGCARFTYNWALAEWNKQYMAGEKPSALKLKKQFNSIKKQEFPWIYDSPKDANQQPFTNLQSAFKGFFDKRTAYPQFKKKYKRDSFYVSNDQFHITDNMIKLPLIGKIKLEETLRFEGKIMSAVVSRKADKWFISIAVEMNDYGKARTSDNTIAIDFGIKTFAVDQNGASFDAPKPLKNKLQKLKRYQRICSKRKDGSQNKKKQRCKVAKIHKEISDLRHDFTHKFTTQICRENQTIIIEDLNLKSWSKMFGKSGIDGGVGEARRQLKYKSLIYNNNLVVIDKWAPTSKSCSSCGSYKSDLKLSDRIFCCTDCGHKMDRDWNAAKNIYVSGMRQLGMACPEVTPLDI

SEQ ID NO: 2982 - protein, 418 aa, unknown
  TnpB Polypeptide
VISYKLACSHSIPEDYFKQFNNVVRFAHNRWIEEKSVTEIEKACKLLINIDLLDASFVKMAVNSAKSLKNKEKVVFGGRKLFERLKYKKTENKTEWDKKRNPSIYLRGSSCDAAGNRKASFDLLNQKIIFKPRCGLIYEIDLKNDRRLGALRRLQDLCEDKKACFSLEILRNEVIVIFDEAVLADASTRKPIKNRILSFDMNPNYIGLVVMDNQTIRYKEIIDLSILNKITNKNKKLHETCEINSRIVALARHHRVELIAFEDLNMKSKDHKKGKNFNRLVNNSWNRSKLVQNLVKKCNINGIKYKEIPAFYSSFVGCLTQPEEYDSIAAAMELSRRARQFLTNQSVTNFPEVDLKAITTRWKEMLGFEIDDVSWINLYDWFKKRTKLSYRKLFRLQNFEGVSLRLKSVSSGVVCHLV

SEQ ID NO: 2983 - protein, 384 aa, unknown
  TnpB Polypeptide
MGEITYNIKLQFPNPQEKNFWLNLLKEERSSFNLASEIVFNKHPKINLKEVYDVCYYPIRNSTNLLPAQGANKVIKEVISCYRSIKSNKHNLKDAPKKEQLSMRLDKRLYSNFSKTSIKLVSSVPHKRIEIKFKLYDKVKEMFDKYTACDPLIFFKNNSFFLSVSFKVPDLPKANEEAVGVDLGCRRLFTTSEGKTLLGNEFNFYKRKVRFNKRKLQSKKKSSHSARTKLNKLSHRERNFSKKYIELAVNELIKSTNKSIIVLEDLTKIKQKTNKKGSSHNNRLSQIPFYLFKQILSYKTPLVGKQVETVNPAYTSQLDCRGIEKGERKNRRYYTTDNLVFDSDWNAAINIANKFSKHPISSLLPLDGKLDLMGRLLSSNQSSN

SEQ ID NO: 2984 - protein, 400 aa, unknown
  TnpB Polypeptide
VVCRKSFRFRVYPTKEQRATLARWQDALRFLWNLALEQRLIALGHPRHDRKYLTSFDQINQLTELRAELPWLAEVPRNVCAQLLVELDKAWQRCFAKISRQPRWKCKDRDLAPLCEPHRKVWSLDAEGLHFPKLGTMRIVEHRRLEGISKTCSLVQEVDQWFVAISCEVEQKVSPKVAPVVALDRGCVNLVADSDGRLVENPHFFRVMGLRIARAQRVVSRRKKGSHNREKAKIRVAKLYRKVSRQRSYVLHQISHDYANSHGTVVVEKLNVRAMSTKGGSHKTGLNRSILDSGWSQLMSMLRYKLAWSGGYLVEVPAAYSSQTCSVCGVVDPKSRLSQSVFVCTSCGHRDHADLNAAKVLLSRVKRSALPVEGLPPEGAHRSRKRLNVPKGRSPESSAL

SEQ ID NO: 2985 - protein, 284 aa, Microcoleus sp.
LSFDRRTITFTDGFEAGSFKLWGTRDLHVYQLKQIKRVRVVRRADGYYVQFLIDQERLEKRTPTGKTLGLDVGLTHFYTDSDGQTVENPRHLRKSQKALKRLNRRFSRTKKGSKNRAKARNRLSRKHLKVSRQRKDFAVKLARCVIQSSDLVAYEDLQVRNLVKNRKLAKSISDAAWSNFRQWLEYFGKVFGVVTVAVPPHYTSQNCSNCGEVVKKSLSQRTHRCQHCGVVLDRDSNAAINILELGLRTVGHTETLNASGDIDRCIGEVTPQCKSSRGKRKPKQ

SEQ ID NO: 2986 - protein, 558 aa, unknown
  TnpB Polypeptide
MQAADAELLNADFAIHDHLLHTMVSDMLRPGRLGKKSLFLHYRGKGLATNHVQSLTAEAKGIVSAAKEALALNIKTKTQQIAKVEGKIKDTSNQLSRSLKAKENLKARSLARKNGGIIPPFKNPFGSWVRTKVTKDGLAFFVGFKNGKREPTRYGNEYLFETLYLDPRIRRLKSNINNLKCRLHDLKGELARLEREKKAGVVHICFGGKKAFRQRREVRRRNELRSWEGMWKHRRRREMPLVGRLDGPQGSWMARYDVEKKIFSYQTYSGKWISIPGVEFPYGQGWVEAAVSASEIAKRNKKLPPDQQIPGWPAGSVSWSLKDCGNAVQVKCMVTLPEDPNKNFCYDDGCVAFDMNYDHFAASELGPQGELQRHWTVPLQMEGRTSNQISNAISEGLEEIFRYAVAVNKPITIEGIEHPDKCLLYGNKKANRKISEFAHEKMTALAESKGEKYHLSVREVNPAYTSQIGKIKYMRQMGLSIHEAAAYVIGRRGMGLKDPVPKDMARLIPEKKKGTHYWFQWGAIYSALKNVPVNNFYRKINYREYESLAALKEGLLKA

SEQ ID NO: 2987 - protein, 381 aa, unknown
  TnpB Polypeptide
MIKGHVIRLEPNNKQATYFAKACGVARLAYNWALNEWQRQYQADKTYRDYCTTNNLPIDDSQLNKPSQGKLRKQLNAIKREQYPFMLEVTKCSPQMAIIQLGDAFNRFFKGQTKYPRPRKKGRDDRFTLSNDQFRIDGQRIKIPNLGWVKMFEPLRFNGKILSAKVFKKGGQWFVSVAVELAQVIQPKPKTGKAVGIDLGIKDLLVLSNGMKIQAPKPLKTQLAKLRRLNKSLSRKQKGSNNREKAKTKLSRLHAKIGNIRSNSLHQITTYLVSEYDVLAIEDLNVSGMVKNRKLSRAISDLGFYEFKRQLIYKANQWGKAVKSVDRFYPSTKTCHYCGHKVDELPLSVRMWQCPSCHTQHDRDINASMNILANANNLLTA

SEQ ID NO: 2988 - protein, 223 aa, Clostridioides sp.
  misc_feature (169)..(223): Xaa can be any naturally occurring amino acid
MYCGQHIKLPKLDMVKIRDKQVPKGRILNATISKEPSGRYYVSLCCTDVDIEAFENTNNQIGLDLGIKEFCISSCGEFIENPKYLKKSLNKLAKLQRELSRKTIGSLNRNKARLKVARLQEHIANQRNDFLQKLSTKLIKDNDIICIEDLQVKNMIRNRKLSRLISDVXXXXXXXXXXXXXXXXXXXXXXXXXXXXXXXXXXXXXXXXXXXXXXXXXXXXXXX

SEQ ID NO: 2989 - protein, 402 aa, unknown
  TnpB Polypeptide
MNMRVTRTIRIQLKPMHEQAALLQQTMQEYTRSFNEVCQVADTAKVRNGVELHRLTYGPQRTTSHLPSQLICAARVKATEAIKAVLTRRQKQVKKYEALQKQGKATNPLKLARTPHSDLCAIRYDARSFRFDRETRMVSLVHVQQEGHRRNRAVMDVRVPAYYEQYLTAQWEQESADLLYRKGAFWLHVVVCAHVPVVASTGKVVGIDLGINRLAVTSQPRFFASKHLKETNNRYFRLQRALQSKGTKSAKKHLQKLSGKLKRFQHHANHVTAQQIVASLNPGDTITMENLTDIRERVKGRRKQRRAMSNWSFAHLQGVIAYKAAYRSIKVEFVDARYSSQACSRCGSIDKRNRLCQSEFSCKQCGYSNNADENAAYNLASRATSATSGLHVKRPIVSDLRV

SEQ ID NO: 2990 - protein, 397 aa, unknown
  TnpB Polypeptide
MSQVLTVSCKLEVLSHQVEKVEAVLQGFANCCEYINRNTPERLTNQIAVQALIYKAARNDCNLPAQLTIHAIRRVCANRKTAKLKGYKVKKFAPTSANYDSRIFTFIEEDWTVTLTMLKRRERFRLLVGNYQRSLLKGTTPKAAVLVKRQDGSYYLQIQIGSEPPQAQEADRVLGIDLGRTDIAVTSNGEKFSGKQVTQLRDKYSRVRASLQTKASKGTRSRRRRCRKLLKRLGGRERRFQTWLNHTISYRLIQQAKSSSQAISLEDLTGIRERTNELPRSKNERRRSNSWAFFQLRMFLLYKGIKFGVKVHLVDPRYTSKTCHVCKVLGLRQGKKFSCLNVPCGWIGDADENGANNIAKLGVLINNPGGSSTLFCSLQDVVLRAAENPVLATGRSG

SEQ ID NO: 2991 - protein, 491 aa, Nostoc sp.
MPTLTYIKGLPTPAGELNSLGLTEFEMFLTAYSSVFHKAACETANHLLTVNSFHESSWNTYLQKTYGISRRQSSGAISFAQGAVDASKEHRKLHIKTLEGKLRSLKYWITKSEKRLSDSTKFYAKKNWRNSKTGCRFPLSCSLKFRNTNWNNLRFQIHNKKRRAYKLAKQIEHLRTSSFQTIIPRNQVFVVGSKDESFGNQVCQWDGHTLKFRVPACLESRFGKQVITKLGNFDRNINRLPKDGAKTWHFFRKHNKWNAAVKFTPVAIQPVSRHSAYGCIGIDLNPGSIGWAYIDKDGNLKSHGQIPLQIGLPSGKQDAQIVNACLQLTRFAHAFCCPIVCEKLDFSTKKEQLGEHGRKYARMLSAWAYSRFYQLLDSISSNRGIYLMKVNPAYTSLIGMVKYARQYGLPSDCAAALAIARRGMRLTEDIPGSITAYLSVKDGKHVWSLWNQLNKLIQKSSIKRHYFYAISNWGSLVKRLSEPSGKSKLRH

SEQ ID NO: 2992 - protein, 348 aa, Gammaproteobacteria sp.
VTVDTSTTRRYVGWRCRLYPNPAQDSELLRCRNGLRELANELLAASQLSYGETGRRLSLTEMRAFAREWQRRPEHRNSPASATYRVAGDLDRAFRTWFSRPGRRGRRGFPRIKGIGREPGIYFSNQGIRFEGSRVWLPKFGSVRWKGGSLPRGRLEGPPGRKTLGLLSGRAWLDAGNRWMLSCLFECAPLTPIEPRTARAAVRQNGDEISVSVDGEAGHVVRESRALRNARRRLARLERRLERCEFGSEGRKRALALMRNQARKVRNHQADLQHKTTTGVVHDAREIEVEGASSELLRQLEYKAEWHGRRLKVRRGPPKPGTGMPRRARRPGSRSQKRESRTRRPKAL

SEQ ID NO: 2993 - protein, 465 aa, Frankia sp.
VSRVLQAYRFALDPNNVQAANLNRHAGARRYAFNWGLAFVKAALGQREAEKSYGLSGDDLTPVPWTLPALRLRWNQIKNGIAPWWAGCSKEAFSAGLADLANALKNFTDSKKGKCKGGKVGFPRFKKRGKARDSFRYTTGSYGPCGELHVKLPRIGPVKVHEPMGALTSRLVDGRARLGGATVSRTAGRWFVSFTVETEREIPDTPSARQVRGGVVGIDLGVKHLAVLSTGEKVPNPKHAARAEKELRRTSRAYARSQPGSNGRAKLAAELAKQHAHTANQRRDGLHKLTTELARTHRTVVIEDLNVTGMVRNRHLAKAVFDVGMGELRRQLEYKCGRTVRNPKTGTDVYVPGWHGAHLHVADRWYPSSKTCSGCGWRNPSLTLSDRTFTCKRCGLVIDRDENAAINLRRLVDREYIGDVKTARGADRKTSALAVPARRQVAAKREPGTARADQTGGASPRGEAA

SEQ ID NO: 2994 - protein, 605 aa, Rhodococcus sp.
MSTTGDRRSAVAARQFSVTTRAHVAVDDATGESIGLDDVDVRVGWLLDLITAAGAELVSRLWQPATFDVLAAGLDRQDRRLPTQGHVAAARLGWTPIYPDGVHVPSRVSRVVTAQVVATLRTLAYRDTAIAALSARFDPATGRLTAPSEPGDSVPAGFARGVRRQLAARARRGGGVPGGRLRITDVQGSPRMAAMAQLSAADRQLAQLAVTGDELVLTVKLPTSPAPAGRAQWRSVRLIAAIPAHLYGREITDWHLPTLVLDRRGLLWRCAATELVPADDLESAAVAVGVDWSPSTLGAAAITAENPEGLVSDYRGWTYDDRGLGIKLARLQAEGQLLHGKAARLTRLAATAPPEVRAELEAKIVILDGHRTAVGIKRGKINRELAFHFGRQVTDYAAAAGAQVIAVEDLTTLETRGHGRVNNNRAAQSARRQAVAALAHTAAGVGIAVVFVPARGSSALCPGCDEPLARPGGYHDAWCPGCRVGGNRDHMAGVNLAKRALLGRSKVTRRRGQMPAVRVAEHAPVRRCRDKNGPTPGRARHRRVRRSLPAVTPWLGVNPKQHVPASQASVWDTVKPTPPHGDTGSRDTHTPLQSATRVADSMRSM

SEQ ID NO: 2995 - protein, 499 aa, unknown
  TnpB Polypeptide
MQLTYKYKLKPTADQLTRFKTWVELCRRQYNYRLGERFAWWESTRTPINACPLTCSITPIQEVYKNIPEFRVQTRDGRKKDSNGKPVTKKGDRHPNIVHGYVQWLSVQLADQKHTKKLFPEYKELDSQVLQDVVNRVETAFTRFTNPDQNGNRSGKPRFRGKHYYRSFTYTQLFNSDVSKDERGRFCVNLAKIGLVPMVFHRPIPDGFKVKTGTVFKESDGWYISLTLEDKDVPVAVAEIQPTESNSMGIDLGVENYAALSIGEMVEHPRFFKTSANQLALLQYRLQKRKKFSLPWRILKVKIAKLHQHIARQRLDFQFKLAYWLFSKCDVLFVEDLKLKNLTRRAKAKIDNQGNWLPNGQLAKAGLNKSMLDAAHGQFVQVLKFVAWKLGKVVRVVDPRGTSQHCWDCLNRVDKELKDRWHSCHCGQELHRDHNSAKLIKKIGLICVNSGDGNASLKTALGLLTEGSQRCYRKSGQCLDCSRSGKRGYVSDAEQEAKL

SEQ ID NO: 2996 - protein, 374 aa, unknown
  TnpB Polypeptide
VILTYRYRLLPLKSQYRALERLCAAQRELYNAALEERIDCYRKTGKARTYIQQCKALTECRHELDDMGELPVYLQRWTLKRLDEAFHGFFRRLKARSGKVGFPRFRGEGRWEAFGFAEFRGIRFDGKRLRFAGMPGGLKVHLHRGLPEGVEVRSCVFRQDGAGWFVCLQVAVPTPQKRAITSVIGVDLGLEVFAYCSDNVPIPNPRIARRAETELRRVQRALSRCQRGSHRRHKVRTQVARVHRKITNTRNSWLHTESAGLVKRADLIIVEDLKVANMIRHPILARSIADASWSRFVSKLAYKVEKTGGHLTRVDPRNTSQECSRCHRLVPKSLAVRTHKCPFCSLVMHRDYNGSLNVRRAGIGAGALNVIGLR

SEQ ID NO: 2997 - protein, 461 aa, Bacillus sp.
MNFLRKVVKTMVRKKAVKVLRKQKKRENMQRFTQKQNIGRACLTAKEFRLLQRMSHSSKALRNVGLYTIKQSYLNHNNIATVKEVDTAMQADMNYWGMQSNSVQAIRRALYAEVKSFFKALEQWKKYPEKFTGRPKFPNYSRSTEKRIIEIYQIPKVDENGYWMIPMSVAFRKKFGSIQIRMPKNLRHKKISYIEIVPKQKGRFFEVHYTYDMHVSQMKQQSTTTSNALSCDLGVDRLVSCVTNTGDAFLIDGKKLKSINQYFNKMICNLQQKNMDNGISKRIVTNKMAALWHKRERQINGYIAQTVGLLFKKVNEFDIDTIVVGYNAGWKQNSHMGKKNNQKFVQIPFHKLIAAIENKCVKEGIRFFRQEESYTSKASFLDKDPVPVWSKDNRAQYYFSGKRITRGLYQSKAGTCIHADINGALNTLQKSQVVELDGNLKVKTPILLEVQKRKAVASCIA

SEQ ID NO: 2998 - protein, 402 aa, Escherichia sp.
VKRLQAFKFQLRPGGQQEREMRRFAGACRFVFNRALALQNENHEAGNKYIPYGKMASWLVEWKNATETQWLKDAPSQPLQQSLKDLERAYKNFFRKRAAFPRFKKRGQNDAFRYPQGVKLDQENSRIFLPKLGWMRYLNSRQVTGVVKNVTVSQSCGKWYISIQTESEVSTPVHPSASMVGLDAGVAKLATLSDGTVFEPVNSFQKNQKKLARLQRQLSRKVKFSNNWQKQKRKIQRLHSCTANIRRDYLHKVTTTVSKNHAMIVIEDLKVSNMSKSAAGTVSQPGRNVRAKSGLNRSILDQGWYEMRRQLEYKQLWRGGQVLAVPPAYTSQRCACCGHTAKENRLSQSKFRCQVCGYTANADVNGARNILAAGHAVLACGEMVQSGRPLKQEPTEMIQATA

SEQ ID NO: 2999 - protein, 487 aa, Burkholderia sp.
MYSTNMSSILQSGVRFRAYPDTGLASILARWIGCQRFIYNSKVSEDRLFAAQRRLELVWGNSEVKAPLDQAYAQFKDRELTPWLYEVPSQILRNGAVRWMNAKRRQLKKLGNAPRRRTRRDFNSVRVTGELFRFVQTAAGPVIQLGTKAEPVGRLPFKAHRPFGLPKSIVLREVAGQWFVSFCYEHESNVIARKPHELAYELNALDDATLARVTLGLDRNVADNCVATSAGEQLRFDPLTVKRMQRKEIGAKRYQRRMARSQNGSANRRKLVRRLARRLDYATRVRNDFAHRLTYRLVNSEARFFVLEDLKVGNMSRRPKAVKDERTGKWLRNRAKAKAGLNRKILASCWGRIDAFLRYKAGKKNKLVGKVPAQNSSRGCSRCGHIHADNRDARRFVCVRCGLTLHADHNAGINIKTLGIGALRDGAFFVEKPKKRIAFRRTDSIPTGGTPEVACGANISPDPRPAWVRQCATKQESCVARRRSIGL

SEQ ID NO: 3000 - protein, 339 aa, Clostridium sp.
MKKLKRAYKMEINPTDEQKSKIHRTIVVSRFVYNFYIARNKEIYEREGKFVSGMDFSKWLNNEYIPNTQEMKWIKEVSSKATKQAIMNGDKAFRDFFKKAKGFPRFKKKKNQDVKAYFPKNNKTDWTLERHRVKIPTLGWVRLKEFGYIPVNSMVKSGTVSQKADRYYVSILVEERDIKISNSNIGIKISNTNNEGLGIDLGIKEFAVCSDGIKFKNINKTSTVKKVEKKLKREQRKLSRKYESLKTRNKNIREGRATSQNIQKQIVKVQKLHHRLRNIRTDYINKIVSSIIKQKPSYITIEDLAVSNMMKNKHLSKAIASQKFFEFKTKLMSKCKKII

SEQ ID NO: 3001 - protein, 401 aa, unknown
  TnpB Polypeptide
MRKINRTYKFRLYPNRKQTELLAKHFGCSRFVYNYFLNQRKEQYKLTGKSDNYYEQAKKLITLKKQEETAWLKEVNAQTLQFVLRSLDAAYTNFFKKRAKFPKFKSKHSKNSFTVPQSTSVAGGRLFIRKFKEGIKCRIHREIKGKIGKVTITKTPSGKYFVSVFTEEECITSLENTGKSIGVDMGLKDLLITSEGETFKNNRYTRRYESKLAKAQQHLSRKKKGSRGFENQRLKVAKLHEKITNSRADFLHKCSISLVRRYDTICIEDLNVKGMVKNHHLAKSITDASWCSFISMLTYKAEWNGKKVVKVDRYFPSSQTCNVCGYVNKQIKDLSVREWECPHCHTHHDRDVNAAINILRFGLNNISAGTVDYTGGEEVRTDHLESHSSEKSETNEHLVQG

SEQ ID NO: 3002 - protein, 454 aa, unknown
  TnpB Polypeptide
MTEATPTIERAYRVRLSPNRVQERMLRRLIGAKRFVWNWALGESNAQYRETGKRKPLKDLSSGVTALRKAPDTAWLDELPREPFSQVLRDLERAFSNAFAKRAAFPSFKSRGTVNALRFTLDQRREQVDRSGRVQIDGVGKVRFRVTEDLIGRLRSVTVRLDSAGRWFASFTADGVPAKTAASAAMPSLGIDMGLKDAVVFSTGEKIAAPKPLKAKLAKLRRYQRRHSRQRDHQLRLMGLDPEKPIPKGTRLPVSNRGRRTQQMIGRLHAQVADQRREFQHQISRTIVDTAQVILIEDLNLAAMAKSMGRKSFRRSVADVGLGELRRQIEYKAAWAGRAVIRIDRFFPSSKTCFDCGHVNKALDLKERTWDCPACGTHHDRDINAAKNIEREGLRLLADPSTPRSGGTYARGEPTSGSVSTTKRRARGTANSSIARTAGSPRNAGMEPVVRGAG

SEQ ID NO: 3003 - protein, 387 aa, Nocardiopsis sp.
MKTVVQVKLLPTPEQARALEATLHACNRAANEASRVVQARGLQHKYALHHAVYQRIKAEFGLSAQPAARVIGKVADAYTTRQAHLKAGKLGRPGAPRRRRIESTPIDFRPDAAQPFDDRCLSWQMDARTVSIWTVQGRMKHLALTGSPEQLKLLADHRQGESDLIRRNGMWFLAATCEVPEQPLNTVPDGFVGVDLGIVEIATTSDGNRYAGRVLNRYRRRQNRLRAKLQKKNSKSAKRLLKRRSRREARRARDINHQISKRIVERAERTDRGIALEDLRGIRGRVRLARAQRSTLHSWSFAQLRNFISYKARRSGVPVQMVDPAYSSQTCSECDHTSRLNRSGRGRFVCRSCGVVLHADVNASRNLARSGEVAWNAGRQSVASDPL

SEQ ID NO: 3004 - protein, 307 aa, Mycobacterium sp.
MARLKVPEGWCVQAFRFTLNPTQTQAASLARHFGARRKAFNWTVTALKADIKAWRADGTESAKPSLRVLRKRWNTVKDQVCVNAQTGQVWWPECSKEAYADGIAGAVDAYWNCKSCRAGKRAGKTVGVPRFKKKGRDADRVCFTTGAMRVEPDRRHLTLPVIGTIRTYENTRRVERLIAKGRARVLAITVRRNGTRLDASVRVLVQRPQQRRVALPDSRVGVDVGVRRLATVADAEGTVLEQVPNPRPLDAVPAAPSGQRCPYPPPARADNTIGQNPRPYRCRRSGCGGNAAAKGTAGGARQTARTV

SEQ ID NO: 3005 - protein, 187 aa, unknown
  TnpB Polypeptide
MGIDVGENNIAAVSTGRIWKAGALKDKRDRYMSQRKRLQRNGSQSARQHLKKASGRERRHVTHVNNVVSKEIVQEAAKRGIKLIALEDLTHIRDHIKAGKRIRSRLHRWSFRELQEMIVYKAAAAGIRCVFLDPRYTSQTCSQCGAPGKRHKHGFCCSQCGHLAHSDLNASRNLQGLCRQLSAQGLM

SEQ ID NO: 3006 - protein, 362 aa, unknown
  TnpB Polypeptide
MFNGKRFVWNYFLALNKERLKNNERILTYYQMSSLLTQLKKEQEWLRQCEKSILQNTLKNLYNAFQEYFKKTRGFPKFKSYKNNHRSVKMNFTNNNIEVLEKEIQYTSTSKYKKQNCKIKLPKIKKVKIAYSRQYEGRILSATISQVPSGKYFVSLCCTDVKSKKYRQTNNTIGIDLGIKEFAIFNTGEKIDNPKYYRKYEQKLKKKQRKLSSKQKGSSNRNKQRIKVARLHEKIHNTRLDFLHKLTTKLVKKNDIICIEDLKVSEILHNKKNKNLHKSISDASFYEFKRQLQYKTLWNDKILSIIDQYYPSSKLCSNCGFKYDDLTLDIREWECKNCGSIHDRDINAAKNILNEGLRLLVS

SEQ ID NO: 3007 - protein, 393 aa, Marinobacterium sp.
MSAEMLKATKVRVYPTPEQAAFLNRQFGATRFVYNKALHIIRSQYRRHGTKLRAKKDLKPLLAVAKKSRKYHWLKDFDSIALQQACINLDKAFQNFFDPKLPARYPTFKRKHGKQSSYHCMSVSAGDNWIKVPKLKPIKARIHRELAGTLKSITLSRTITGKYYASLLVEDGIETPAPLQTVNTVLGVDLGLTHLAIDSEGNKTANPRFLKRAQANLRRKQKALSRCQKGSKGRAQARLKLAKAHERLANTRADFQHNLSRQLIDKNQAVVVETLKVKNLLKNRKLSKHIADASWFSLIHKLEYKAKAQGKHLVKIDQWFASSKTCSGCNHKLESMPLSVRNWTCPACLVQHDRDVNAAINIRQQGIIKLRAEGLSVPANGGLRKSGHAPVAA

SEQ ID NO: 3008 - protein, 395 aa, unknown
  TnpB Polypeptide
MSAYKKGVRFRIYPNNKQKTHIAKTLGCCRLVYNKARFMREESYKTTGKGINYTQTSKMLTELKHTDEFCFLNEVSGVALQQSLRDLDSAYTKFFKKLGGYPKFKSKHESWQSYRIVNQGDKVRIVGKYIKIPVLGMVRIKQSMNIYNINNVTIEVSPTGKYYAVINTTFEPESRSNNGCMVGLDVGIKTFLTDSNNNEVANPKWLTSSQHKLRREQRKLSRMIEANISGYTKGSKGGRVPVYKKPLIECSNIQKQRKVVAKLHDKVTNQRDDFLQKLSTNIVKENQLIGVEDLNIKGMVKNHKLAKAVSDASWSKFIKMLEYKATWYGSEVIKVPRFFASSQTCSCCGFKNPKVKNLAVRKWTCPVCKTLHYRDYTAAVNILNKAMEIRNSLKA

SEQ ID NO: 3009 - protein, 313 aa, unknown
  TnpB Polypeptide
MSSTPRLVSDGKTGHTDRHTAHAGGGAEQRIAYHLRRGRRQRHPRREQVGDHGGARLDNGLLILSKIGHVAVRWSRPLEGTPKTVTISREADGWYVCFSCAAVPIQSLPATGRETGVDLGIEAFATLSDGARISSPSWYRKAERVLKTAQRRVSRRKRGSSRRRNAVTLLAKAHQKVRRQRQDFHPQTALALVQQNDTIYHEDVQTANMVRNHHLAKRISDAGWSAFLGIPSFKATCAGRSVIAVNPAFTSQICSGCGVPVHKGLSVRWHLCPECGTSLHRDHNAARNRERAGQARRGGAALVASENRASAEM

SEQ ID NO: 3010 - protein, 425 aa, unknown
  TnpB Polypeptide
MKLVYKFRNPKTEHLDLLCSISKKLYNQANWYIRQDFFQLENWLRYEDLNFILKSSNNYKLLKSQTSQQILKVLDKNWKSFFKSIKEWKKSRKKFNGRPRPPKYKKDFYNLLIFTNQNSKIKHNKIILTMSQLFKKEFPEFENPIELSIPHYKNENFEHYQQIRILPRKRFYEIEIVYKKEVKKSKLEQDHYLSIDFGLNNLVTTVENQYFKPIIISGKLLKSINRQWNKRKARLYSIKDKQKLKWTDRLDKITIKRNSVVKDYLHKTAQFIVSYCLKNQIGNICLGELKGIKQHIRMGKQNNQNFVDVPIQILKHMITYKAQLIGINIHEVDEAYTSKCSSLDLEAIQKHKKYIGKRIKRGLFRGSNYILNADVNGALNILRKVVGDGFIQNLSDRGCWFQPVRIRDMFQTSHEQFLTKSVNIS

SEQ ID NO: 3011 - protein, 390 aa, Moraxella sp.
MTTIRGHIIELTPNNTQATHLKKACGVARFAYNWALAEWKKQYEQDKNYRDECQAKGITIDETKLHKPSQGKLRKQLNSIKREQFPFMLEVTKCSPQLAIMQLGNAFKRFFKGESKYPQFRKKGVNDRFSLSNDQFKLKLKKDKPHIQIPNLGLVRMTEHLRYNGKILSAKVFTKGGKWFVSIAVELDDTQKPLPKTGKSVGLDLGITDLATLSDSTKIQAPKPLKNKLKKLQRLSKQLSRKQKGSKNREKAKTKLSRLHYKISCIRKDFLHKLTTDLVKKFDAICLENLNTKGMVRNRKLSRAISDLGFYEFKRQLIYKANQWGKSIKELDRFYPSSKTCSNCGFIMAKENLTLAARHWICPSCHANHDRDINASINILNQADKVLTLS

SEQ ID NO: 3012 - protein, 240 aa, Azospirillum sp.
VKWHRDLPASAKLGAAVLSRSAGKWFVCFQVTVPDGDVQHRDGASVGIDVGLSSLIATSDGETVATPPWTTHAAKKQRRLQRALARCKRGSKRRLKAKQRLARHSAHTATQRRDFLHKLSRSLVGRYAVIALEDLDVDRLARSMLAKAVHNAAWGQLRRFLAYKAASADTRVEAVDPRGTSQTCPACGAGVAKTLAERTHTCPCGCVMDRAVAAATVILQRAQAMGPGTGLRSSSQRVAA

SEQ ID NO: 3013 - protein, 407 aa, Sporolactobacillus sp.
MKGKMSEERKKQIKNRMAAVKAEYVYTLGFELRVYPSAQQAAIMRFNANTSRYIYNAHVFRDWATKSQAKWLRKNPWLDTNMPSMASAAYQTSWSMWRKVNAAGTPKPKRKDSCRLSYQTKNAYTAKARTEGYDIFNGAKVRITDAHHIRIPKVGVLRAAARNISRLPHEKGIRIGVTTVKQEANGNWFVSFQVKSNHPFKQTLAQTGRSIGIDLNVSNFLTASDGQTVPNPRFYQRIKGRLAKQQRIVSRRQLRAKKEHRKLKNSKNYQTARLRLAEMQNRVARARLDFLHRTSTTLIKNHDVIVSEELRGKNLLKNHALAMSISDVGWRLFLNQLDYKAKLYGRTYIKVNPAYTTKMCHCCGAINRAVTLGIEQWTCPTCGAFHSRDHNAAINILHKGLAALQSA

SEQ ID NO: 3014 - protein, 552 aa, Haloferacaceae sp.
MSNHLSLPIRLPFEGQERHARLDALTTTVANTLIETYWRAEHLSGIDEYAYRAWKYFDEAEAFTDIDCYLPSRYKRCILQKVGETLRSHADKRNAFQSIKSVLSDRKIRRIDTRRIKTQLWDAGEYLTSGYVDVLIGQLNSYYDKHGRFPETYFDLQACPSYAKGVLPYSADDGPTSGQAVKYTYDEDTQILTVKLKTPDTLEPETRGDWTWTEHELEGYDAFDDLLDHGSLSAPSFQPTQTKTGETYYELAFPVEIEHQEKSDDVETVVAIDSGLRKDATAIVMNEDGKQRSVPYFIQNTERDRMQNLAHERNQINAKLAHLRRNGRDHTDSFKHVQAEYERVNNKIRHKREQLVHDVANQVLALALVYDVDAIVHEDLRSLSPPRGEGQLSWELSSWARREIIEKIEYRAEIVGLHVDRVHPENTSRSCPRCGSTGHTTKSPEHSFEVWWGGHFRCDNARCGFEADRDYVGAVNVARVFFSDTGSLQHEFTSSYTGDAEIVPASRSAGEQRTAFRSTSESDSDGGTRLTFGGAPVAFTGQSEQEVTAGGG

SEQ ID NO: 3015 - protein, 396 aa, unknown
  TnpB Polypeptide
VPPNTRDFSREIQAAQQTPVWYNIAMRTYKYRLYPTSEQTARLENTLEACRSLYNAALAERKCAYRQQRKHISKLQQLNELPDMKGSIPELQRVHSQVLQDVVIRVDKAFDAFFRRLGSGDRPGYPRFRGKGWYDSFTYPQSGFSLSENKCGNQKLRLSKIGKVRIRLHRPVEGKIKTCTIKRETDKWYVCFSCEVEPKPLPKSNKAAGVDMGLLSFAALSDGSTISNPRYLRKAENKLKYEQRRLSKKRMKSNSRKKQKAKLARLHRKVANQRKDFLHKKSRKLVNNYDTLVFEDLRVKNMVKNHHLAKSISDASWGRFIQYCTYKAENAGKQVILVNPRGTSQICSKCGAVVKKTLAMRIHKCECGLKIDRDVNAAINILGLGTGLGGASALAG

SEQ ID NO: 3016 - protein, 381 aa, Pseudomonadaceae sp.
MANRAYKYRFYPTPEQAQLLAQTFGCTRFVYNHVLRWRTDAFFQRQEKIGYLGASAELSRMKKSGEFPWLNGVSCVPLQQCLRHQQSAFRNFFAGRTKYPAFKSKKHRQSAEFTRSAFSCRDGKLYLAKSKVPLDIRWSRPLPCEPSTVTVSKDCAGRYFVSCLCEFEPGALPVTPKMIGIDLGLKDLFVTSEGERIGNPRHTAKYATKLARAQRRLSKKKPGSANRARARLKVARIHAKISDCRVDSLHKLSRRLINENQVVCAETLAVKNLIRNPKLSKAIADAGWGELMRQLQYKGDWAGRSVVQIDRWYPSSKRCSCCGHTLEQLSLEVRSWVCPQCATGHDRDVNAAINVKAAGLAVLAPGENVSGIGQVPLSCSR

SEQ ID NO: 3017 - protein, 398 aa, unknown
  TnpB Polypeptide
MFQLVEKAYKYRFYPLKQQKEILEKTFGCTRMVYNHFLDLRSKTYKEEKKSINYNDTSKFLTSLKTKNPWLKEISSVCLQQSLRHLDRAFISFFKKKSKYPNFKKKRNRQSAKYMKTSFIYENDKITLAKMKEPLNIRWSRKFKDAPTSLTITKENDDTYYISIIVKEKIEPLDFKKKKIGIDLGIIDTITDSNGKSTKNPKLLNKALKKLRLRQKSLSRKLKKSKNRIKARKKLAKLHLYIKNKRLDFLHKLSWQLVNENQVIAAERLNIKNMLKNRHLAASISDVSWKQLITFLEYKSKWYKRIFFQVDTFFPSSKTCNSCGHKLATLALSVRKWNCPNCHIVNNRDENAAKNVLDKAITEIKEKYRGTLGNVSLWSLCKTFLEDPKKATNCESGT

SEQ ID NO: 3018 - protein, 393 aa, Actinomadura sp.
MRRTYKFLLRPTCRQAAALGQCLEAHRQLYNAALEHRREAYRRAGVSVRYGDQSAELKHIRADDPGGQGHWSFSSQQATLRRLDIAFAAFFRRVKAGRKPGYPRFKGRGWFDTVTWPKDGDGCRWDSTPCDRLTRIRLQGVGHVRVHRHRAVRGRVKTISVKRETNRWYVILSCDDVPAEPLPQTGAVIGIDMGVASLVTTSDGWQVDNPRHLHAAAGRLAAAQQALARTKPGSRRRRKAAARVAAAHAKIRRRRLDHAHKTANVLVGGYDVIVHEDLKISNMTRSASGSLDAPGCNVAAKTGLNRSILDAGWGVFLRILASKAESAGRELIAVDPRNTSRTCSRCGNCARDNRQSQAAFRCTACGHTAHADVNAAINILRAGLVLREAAEAA

SEQ ID NO: 3019 - protein, 587 aa, Streptomyces sp.
MSERGVGEGAWPGAVTGCSGFECVTFGRGCSLGAVTVAVSGGGEGVGGLREVAASFVVPGPSGVAIRAGLKGLTGQDEAVLRQVGDLLGSLASRDLRVRCAAGLGHDGEQWARRKRALSGESSSRWAGSITKATHDQWALARRGQLAHIQSLQTGVETIRRRLSQPIGANGCKGAPGGYGSEREWFAKSRRLHVLEDRLVRVRADWEAGRVRVVRGGKKLLNSRHHLEAAGLTEAQWRLRWQAERWFLRADGESGKPYGNETIRITPEGEVSIRLPAALAGLANAPHGRYVLACRVRFRHRGEQWADRVTAGRAVAYRIHYDPDRNRWYLTASWQNPSVTTVPLSAVRAGGLVGMDMNADHLAAWRLDAHGNPVGAPRRFDYQLTGTASHRDAQVRHALIRLLHWSARHGLSLAIEDLDFTAEKTREKHGRRKQFRKLISGLPTARLRARLVSMAAELGITIVAVDPAYTSRWGAQHWQKPLTSKTRKPTRHDAAAVAIGRRALGCAIRRRTAPPPPHRSDAVGHRTAQARPDTPGREGPRPRVPGPRTRSVPPGRGAKAGDQCAHNRSGHTAEHEPWTQDSLPLSP

SEQ ID NO: 3020 - protein, 485 aa, unknown
  TnpB Polypeptide
MIMYRAYEMKLLANNKKLKIIDSILNEYRKTASSIFNLYWSNFISTGKIPKFIDLSSIKSNLSERYKQTCASQVRGILMSYISNRANDFKDIIYKSSLCNKEEQRIKLLFINKHHKFFSQMILMRKKEIEPEIIKLSRKIFHHLLKTNSLPNMKHISMALDEKVAVVAESNNKSLVAYWIKLSTLEQRKPIMLPVAKNKYYEAIKANRANFIQLNKNRDGHISVSFIKDIAPEKIPFKTERVSIDLGLTNLLTFNEGSMYGRTYFSSKLKEYDKKISTLCARLQRNNLRPRSSRRYRKLVDSLRAFLKNEIGRVMNRSFKRFLPKHIVVERLNFQSQRLSKRLNRLIGNFGKSIVKAKLNDLSEKYGVTIEEVNPAYTSQTCSSCDYVAKNNRRSQAVFICACCGLKLHADINASRCIDARSSSSIASIYNSKAFILDKLVTRFIERQASHYSLAKITQSNPYFRPYSDLIAMITKKLSNITGIV

SEQ ID NO: 3021 - protein, 400 aa, unknown
  TnpB Polypeptide
MLKAYKYYLQPSQEQKTLINKHLGSCRWLYNYALNKKITAYQKDKTNISRFDLQKELPQLKKQVNTEWLSEINSQSLQAVLRNLDMAYTRFFRQKKGFPQFKSKHDNRQSFQIPQRVSIDWENSNIILPNIKTVPIVLSRKFEGTIKNVTLSKTPTNKYFVSVLVDNTKKFPKKAIIKENTTIGIDLGIKDFAILSNCERIENPHYLKNNLIRLKCLQRRLSKKVKGSNNRNKARLAVSKQHEIITNKRLDFLHKVTYKLTHENQVDTICIENLAVSNMVKNHCLAQSISDVSWYKFKELLTYKCDWYGKNLITIGRFAPSSKLCTCGYLNKELKLSDRTWTCPSCNAMHDRDLLAANNIKKMGLHPKNYSGTGCSGELLESSTLVGTMKEENLLIPINT

SEQ ID NO: 3022 - protein, 388 aa, unknown
  TnpB Polypeptide
LLRAYKYRLNPTPLQAYILDQHFGACRLIYNLALEVRTTAYRSAGIKLNSYDLSAQLTELKTENKWLMGVNAQSLQDVLKNLDCAFTNFFRGHSSYPTFKSLKRSKLSAKFPQRNQLLTDKGLLVVTKFQEGIKIIVDRIPKGELRNVVISKSKTGKYTASLTYETGRVAPAKKPISDNAVGIDLGIKHFATLSPGEKIVNHKFLKSSQDRLVVLQRRLSKKVKGSHRRKVQVLRVAKVHEKIINQRVDFQHKLSTSIVNKYDTICMENLAISNMVKNHSLAGAILDAAWYQFVFMIKYKCDWYGKNFLQIGRFEPSSKMCTCGTINKRLTLDDREWTCDSCGASHDRDILAANNIKNFALRNAGWGSPKADVELPTLVGARKRQVAI

SEQ ID NO: 3023 - protein, 382 aa, Sporosarcina sp.
MTNKAYKFRIYPNQDQQVLIAKTIGCSRFVFNHFLYKWNDTYKETGKGLTYGTCSAGLPLLKKELSWLKEVDSIALQSAVRNLADSFDRFFKKQTKPPRFKSKRNNVQSYTTKQTNGNIAVIGNAIKLPKLGFVKLAKSREISGRIMNATIRRNPSGNYFVSILVETEVCELPKTNTSVGIDVGLKDFAINSDETVYENPKFFRALEKKLAKAQRILSRRKEHAIYQQKPLHEAKNYQKQRRIVACIHEEIANKRNDYLHKVSTEIIKNHDVIGIEDLQVSNMLKNHNLAKAISEVSWSQFRTMLEYKAKWYGKTVIAVAKIFPSSQLCSSCGYRHKDVKVLALREWVCPACNSCHDRDYNASINLEKEAIRLLTAGTVELA

SEQ ID NO: 3024 - protein, 377 aa, unknown
  TnpB Polypeptide
VEFRRTAVIKLNTPDGADSFLHETVEQFKHCANIASEWCWNGDDGYHVTSKAKAERALYDRLRDETDLTANLVQKGIRRAVEATKSGWSRLERGESTSQPHFSADSVVYDKRVRRSTATTSHSQPRWSGRVRLHSSRRLGDTPTKYVSNDDYEFRMGHLQYRDGDWYLHASMRKEEEDTKPDTEHRTVLGVDLGVNNIAVASTGRFWSANEFNHWNREYEKRRGSLGLCGSREAHENIERIGRKAEGRFTIYLHTVANEFIREAVENECSHIVFEDLTHIRRTFPMRRGNINGRSDGCTGTSSTKQTNMAWRSCRSTRATRRSDARRVGLPTTRIATRSRSSASSVGTKTTRTTTLRRISACSISVVGKTQAMEAHP

SEQ ID NO: 3025 - protein, 422 aa, Moorea sp.
MRLAYQFKLRLTKSQTSEMERWLDMLRHQYNYLLADRFAWYEQNRCSINSCLLVCHLPELRDNPDYYSQKRTLPQLKKDRPWYKAIHANVLQDCVKRVDLTFKRFLKGDSNGKRSGRPRFKSKERFRSLTFSAFSNNPIDGNRLNLPKFGWVKMVYHRPIPSGFKIKTATVTRKADGYYVTLSIQDDTVPDVIAVEEATNPIGIDMGLKSFLVKSDGSEVEIPQYYRKAQKRLKKMQKAVSRSTKGSKNRKKAAKRLGKAHKKVADTRKDFHFKTAKKLLSNHDLVAHEKLNIKGLVKTRMAKSVLDAGWGQFLSILSTKAVRVAWPTAINAGLVTKAVNPRPQATLRERNTSQNCSNCGQKVPKKLKDRIHSCPHCGYKADRDVNAAKNILYLAVGHPASSKAYRATEPLGGVGKKPTLNL

SEQ ID NO: 3026 - protein, 469 aa, Planosporangium sp.
MPGAATGIVGSAPAFRPGVKRAVRRSGMGKVDPPPRRIGVGTCGCVSVLSYACGTVSGVRLRYNFRVYPTPGQCGALARAFGCARVVFNDALRARQAAREAGLPYVSDAELSRQVITQAKQSPDRVWLGGVSAVVLQQALADLNAAYRNFFASVTGRRKGRRVAPPRLRSRKDNRQAIRFTANARFKVLDNGRLRLPKIGDLQVRWSRQLPAVASSVTIIKDAAGRYFASLVVQTTDEPLPETDSEVGIDLGLTHFAVLSDGTKVAAPKFLRRAAGKLKRLQQDLSRKQRGSNNRKKAVVKVARAHAKVADTRRDWQHKLSTAIIRDNQAVCVEDLCVAGLGRTRLARSVHDAGWASFVGMLEYKAARYGRTFGKIDRFAPTSQTCSNCGRVDGPKPLNVRSWTCPCGQVHDRDVNAAINVLAAGRAESLNACGAQVSPAPVPAPRGEAGIHPDATRCSTRSAEGIPVL

SEQ ID NO: 3027 - protein, 499 aa, unknown
  TnpB Polypeptide
MTGLKKSPEERTHLETEVLHNVFTGIQKANEYLGQKNMTKQFKHLKLAQLGGMNSAVIAYSIVCQEPFHYPTAETWFLSYHTLDAIFKFTDNPVYKRMNSQVNQNVIRKVIAAWKGYFETLKKYKENPAGYTGKPRMPGYKKDKEATVWFSSQTAKLKEENGICYLQFVNFKEKLRIGKSSLFAGSKYIKTEIKPMFGQYCLMVTFDDRMQEIPVPEHPNRILGLDPGVNNFLGAANNFGAVPFVIKGGALKSVNQRFNKKRSVLLSALTKGNNSTDSIKHSKQLHVLSRKRESFLRDYFYKCAWYICRYAAAAGVDVIVMGHNEGQKQEVNLGDAGNQNFVSIPYTKFITALRAVAAKCGIAVVVREESYTSKASLMDMDDIPVYKQDENTNYHFSGKRTHRGLYKSKDGTVINADINGAANILRKEYAYAFDEVKDFTYLYKTTLAIGYKDLYRNAKTMTSRPKKYCFHKTGFGSGVRHEYRKWNRLEYREVFGDIA

SEQ ID NO: 3028 - protein, 418 aa, unknown
  TnpB Polypeptide
LNSSSRIEEVKSWFLANQRIATGVDSRKVYSQYFKPSREEGTDLVSTQLKTRRIRIYPTKEQRTILRRWIGVQRLVYNQAIQHYKDKEFEVRHWMKLYSIVFSELDMDYVKKVPHHIKLNAVKDAYTSWRTNCKKTKKSGTTFSLRFKSRKDKVQSCYIPKTAISTLGIYYTKSGIMKFSETDWFANSEISDCRLKYDHGRWFVSIPRKVTTQCVFETQGGAVAVDPGIRNFGTYFSTDGRFGWVGQRAFERILKLNIRIDKMRYIIATTEDKLYKFRLKRTIDRMYHKIRDLVDELHWKFINFLTKEFSVVIFPHFNVSEMVKTQNRKIRKVVVRSMMSLRFHEFKERLKNKCKERHVIFIEQNEAWTSKTNSFNGEVMANLGGKEYFNFQGMRINRDVNGSRNILLRAMRDSSANG

SEQ ID NO: 3029 - protein, 407 aa, Sporosarcina sp.
MGVISVVQKDFRMKGYKYKIHPNVEQQKMINQTIGCARFVYNHILFENLERRKRSLPWLSKFDAIKILPELKKSFEWLKEADSIALQSSIEYLYQGFKRYNKMKKVLHKKTVKKYEEINYIPTEYDNLGHPRFKNKKHSVQSYTTKNSRGCIEIKENRIKLPKLGWVRFSKSRDVEGIIKRVTVSKSRLGKYSVSIICELAYSPYKPAKNESIGIDLGITNLLVLSNGEIVRNPKTFQSYKKRLAFLQRALARKQEGSKSWEENKRKITKVHQKIKCFREDFLQKLSTRLIHENQVIGLESLQVKSMVKEKQLSEAIHDASWSKFVNMLNYKANWYGRIIISIDSFFASSQLCSECGFQNKEIKNLKIRSWVCPSCRAVHDRDLNAAKNIKIEAIRLYKLERDSACI

SEQ ID NO: 3030 - protein, 469 aa, unknown
  TnpB Polypeptide
MRDSRTHQPLTYDVRLPDEAQADALRLLDASRAVVNQALEVLWPHLDEFGSERAGPAWKDVGKYIGSPQPHGDRQWRCESEVVGRLFRQQAERKKAFELVAPILSDGFIRPTTEKRPVGKNRPAIKEAITALQKSLEEDETSFVALQNVVEQRCTFFFQHDRFPIDYKELQPVPLLKVGMLTYAGDDGREKGQAYRMAVDLEAGVARFRFRAPSEAGPWRWRTVDTIISLPECLKERLPHGELMAPTLREERRADGERFAVLDFIIEVEKEALPEWRSVERVVGADWGVHSLLTATAVDEHSEQVGGPFFLDTGSFDGRQARTRRQIDEVKKKVARYEQERDALPEDHAKRSWYTQRLALYRREIELCWRKYERRNRALAHLARNVLLLLCQIHGCSLLSMESLKTLKTTGRGRGVRGRWRNYCNNSTIRGEIWRLLRYKCHLLGLRFHTEQPRGTSHTCPHCGVPAKT

SEQ ID NO: 3031 - protein, 351 aa, unknown
  TnpB Polypeptide
MIVRTLKLKLAKAQEAKLNQWLWNLTGVYNWAIKKIERNAANKIYFSQKDFQNLLAEHSNRMEIPSHTLQGTLTQAYLAWQRCFRKQAKKPRLKGKRNKLNSIPFPDPMKPPKDNRISIPCLGTLRFHKQAIPEAKIKCARIVRRASGWYLCLWLDTEHKFPVKQTEAAIGIDPGFSTLLTLSDGTKIENPRELRKGATRLAQAQRAHDKKLTARLLEKQHNRRSDRNHKISRWLVENYKTIYFSDDNFKAMAKLFGKSITEAALADLLRKLNYKCRTGGRKLEPVCSRNTTMTCGCCWALTGPTGLHGLAVRHWVCSACGAVHDRDINSAKVVLSVGLGTSHEREIRHVA

SEQ ID NO: 3032 - protein, 404 aa, Nocardiopsis sp.
MVRNVQLRYQYRLYPDGDQRAALTRLFGCVRVVFNDALERTAPVKASNKLLGSPKARTAEGPYQRVPKNTELSKALITQAKQTPERTWLSQVSAIPLQQALRDLDRAWAAHEDSKTGTRKGPKVGAPRFKSRRDNRQSARFTANARWRITPAGKLSLPRVGDVKVRWSRNLPSAPTSVTVIKDAADRYFASFVVETTADEMLPETTPEVGIDLGLTHFAVLSDGTTVTNPRFLRRAERKLRKAQRDLSRKAKGSNNKEKARHRVARAHAGVADARKDFHHKLSTTLVRENQAIHVEDLSVKALGRTRMAKSVHDAGWSAFVNMLEYKSFRYGRVFSKVGRWLPSSQTCSECWAVDGPKPLHVREWTCKACKTIHDRDVNAARIVLAAGRADRKNACGGTVGPAA

SEQ ID NO: 3033 - protein, 306 aa, unknown
  TnpB Polypeptide
MKAKGRTVGKLRKKWVHSMIYEQTGFKLTGNRLWLSKIGELRIELSRPVPGTIKQIVVKHTPAHKLFVAIISETPDTPEPTAGTRAVGIDLNLENFSTDTDGVVFPHPHNVRKAAKRLRRAQRKLSRAVDGSRNRRKQRVRVARIHEQVENRRNDFLHKWSRYYVDRYDYIALEHLNIKPMIESLDAKLRGRSKSILDAAWYKAREFIRYKAANAGTYVHLVDPAYTTQDCFLCGHREKKDLAQRTHSCPVCGYTVPRDLNAAQNILKRAAVGWGTPESTLVEIGTATPPSPAGQVPVNEARISRL

SEQ ID NO: 3034 - protein, 691 aa, Anaerobiospirillum sp.
MRQIMITTPYAAMSTDALMSMNSDEVMSSADKQLLKQIHKQSSRHVLKLESTLSAKDICQLFKVSNRIRLAGNELTNKMRKNLNRLTRTKQYRNLLELYGKADNPADKKNYAQQLKQMQENENVTWDFCRKTMQTLQVNYKIDAVLALTKAEAVWKGVETCLYRNGKTIHFTEEGVYPALIAKQINRCIILTAKDGSLQFKYGSMVFGAKINDTFEQEEADAVIHYLTNKSQMDKAAIDCYKDNGSCISTYRPCYVSLVPQIIRGKRRIYIHICIEGTPKVKRNKNGQPRHALGQGVVGEDLGPRSIAITHKDGVFLENIRCVGKKPEAVQEEIANLQSAIARSLIATNPQNFNDDGSMKSGNLIWNVSNNCKKKILQFKDCCRRKSINIHLGINQLVNYIRSLGDTLIIEENNASALAKRGRSIVKSNANSNTSCAVALNTNGAQSNAQQQSSTIKSNSNGSNQAQANSNTSCAVELNTNGAKSNAQQQSSAIKSNSNGSNQAQANSNTSCTVGLNTNGAQSNAQQQSSAIKSNSNGSNQAQSVITIQSFDKQDFNYSLIGEYRVKLMKRFGRSIYKYCMGYVWAHAQQKFLNTGGQFIIVPRNYRASQYDHTADTYTKRKLSDRMITLSDGTVVQRDCYSSFLLYCYSFDSKAIDKDKCNVEFARFLKNEQDLIAYIKAHKINVFNSGI

SEQ ID NO: 3035 - protein, 283 aa, unknown
  TnpB Polypeptide
VDFERNRIKLPKLGEIKTVFHRVFAGKMKYATVSVTSTGKWFVSILVDDGAATPEPAPFTLDTTLGIDVGLTDFATLSTGEKIENPRYLNNSLQCLNVLQRQVSRKKKGSKNRQKAIQRLALCHEKVANQRNDFLHNLSFRVVSENQAIAVESLNVTGMQKNHCLARSISDASWSAFFTMLEYKCQRYGKTLLKIGQFDPSSKICSKCGYLKQDLALADREWVCPDCGTHHDRDINAAINIKKFALQEQNLVGIAGAERTVEPVDSLPMGRRMKQEAAPFRAG

SEQ ID NO: 3036 - protein, 438 aa, Streptomyces sp.
VTRWVKRAFRYRFYPTDEQAAQLLRTFGCVRLVYNKALEERTYNTLEERTRAWYREQRRISYVQSSAMPTAWKKTEELAFLNEVSSVPLQQALRHLQAAFTGFFARRAKYPRFKSRKKSRVSAEYTRSAFTWRDGQLTLAKMAGPLDIRWSRPLPDGAEPTTVTVSRDSAGRWFVSLLCEDTLTPAPATTAAVGIDAGITCLLTLSTGEKITNPKHERRDRARLSRAQRALSRKQKGSANREKARRKVARIHARITDRRRDFLHKLTTRLVRENQTVVIEDLTVRTLLKNHTLARAISDAAWTQLRSMLEYKCAWYGRDLVVIDRWFPSSRLCGACGTVRGKLPLNVREWTCGCGTVHDRDVNAACTILAAGPAASACGDGVRPQRESSRTRRSSAKQEPQRATAGIPRLQAGEEVKRPRCGCGRPPPAGAAPCSCPA

SEQ ID NO: 3037 - protein, 198 aa, unknown
  TnpB Polypeptide
LKSINQYYNKQLATMKSKLPNGIYSSKEIRKLTQKRNHKIHNELHKMTTYIIDTCVKNDITTVIVGVNKGWKQGVSIGKKNNQNFVSIPYYKARNMLKYKCQLVGITYVEVEENYTSKCSAMDLEPLVKQQTYIGNRKHRGLFEYSSGCINADINGSLNMIRKVAGNSVFVVNNAGKLVEGYAVSPQKVTITFDSDIF

SEQ ID NO: 3038 - protein, 386 aa, Deinococcus sp.
VTQIQTTTHYKAFKFRLYPTKAQQAVLNEQLWLCRSLYNCALQERRDAYRKCGISLSGYDQKKHLPEIKAALPEYGKVYSQVLQDVILRLDKAFKAFFRRVKAGEKPGYPRFQGRDRFDSLHYPQLGFSVSEKTAFFSKIGNIRIKLHRPIEGKIKTATIKREGDEWYAVYTCEVEARPLPATGSQVGVDVGTTWFAITSDGEFVENPRHYRRAMKKLRTAQRAVARKPNKRSNRRKKAVKRVAKIHRKVARQRLDFHHKTATKLIRENDLIAHEDLNVGGMGRGNLARSIHDVGWSQFFSLLALKAVDAGRQVVRVDPRFTSQACSQCGHTCKQNRVSQAQFKCIQCGHEMNADENAALNILARALPSGANVSGCAERPLRSLGL

SEQ ID NO: 3039 - protein, 585 aa, unknown
  TnpB Polypeptide
VARTVTLELLAPSLAKQQAFKRLQGEFNRVANEVASAVQQGSAEAARALDSLFPSGWDHPVVRMIQGQLRAAAGNPGRSPLPRFKPRAPVVFGETDWTLTNIEGKWKLTLPVFGRTIQVPVLVPQAQSEALSRLVAGGIPMEGRLFQRRGRWYFAATFLNEVAVKGDRPVVGVDLGRRLRAVMVEPTSNHRQFLSGRAHEHRLRRYDRAIARLSAAGQLRSAARVRAKRDRYAEAADRQVANAIVAFARDHDRAVIKFERFSSQTAPGQRPEVERYRRIQRLVSRKAERCGLPVVAVSGFDTSQRCYACGSVQPGNRRGRRYRCGCGYHAHADLNAARNVAQTAIWSEAIQLAAGGYNPAGQAEGTAASQVVGLIKGETDRLRSAIAQAVSHALPPTPPALGVASHTHSNQMEGFEMASLVKDLTESSTKFVTGSLDNLKTYVDRTSEEVSRVDFVGVTRRVLDTAIDNTKKVVKLTSEPNGLDFFGKAKAVADGSLEAAKEVVTTISEEGKKADLLGVSTRVTMEGLASLRNQVDLTLDTTKTITNRLMPIATGSKPVATRAPQVTRVEVEHEKPAATSGKASK

SEQ ID NO: 3040 - protein, 362 aa, Thermoplasmatales sp.
  misc_feature (357)..(362): Xaa can be any naturally occurring amino acid
MTHPWRSSGSKRTIWWNYEPSDRILRYLDDMRDAIRFGTAEAYVHWKSSGRIPSPIDLRKEIKGWFDSRCDYAKHHINPVCRSSVAILRSFRKNRREKAFPEIRKLAMRLDSELVKIVNNSIRITIRPGEYEIIPVNKKNKRWNEYIGYKISEVLITDRIVSVSFAIPGEKHTGNEIMGMDLNFKTADSTTVDTRSGGIAHVETISMGGIVRIQNDFSRRRKEIQKHVRNHQKRNRKLEQTRGRQRRRVKDELHKQSTTMVSDHPNASFVFEDLTGIRKSGEDKGKRFRTYLNRWPYSMFQKMVEYKSKNKAIYVNPRGTSSECPVCGEKLRHPAWKISRCDNCDRDYDRNRLASMXXXXXX

SEQ ID NO: 3041 - protein, 242 aa, Methanoculleus sp.
LRSISFGDSSEVSSESVISDDIRERLKDIVWNLSGRLGIDGRVIENPRFFERSRARIKKLQQGVARKCRGSKNWEKAKKKLERAYAHVTNQKNDFLHKLSRRYVDSYATICVEDLNIKYLKENDKSRGLRRSIHDAPWGRFLLYLSCEAESAGTNFVQIDPRDTTQLCSNCGSIMKKDLSVRIHECPYCGFVADRDYNAAENIHRVGLEQPFEPVEMRPLHHISVTQVLSMIAGKPRPTGAG

SEQ ID NO: 3042 - protein, 427 aa, unknown
  TnpB Polypeptide
MLKRMSDYAYHCGLQLRIYPSDRQKQIIRRNAGASRFVYNRLVATDRERSRLKKSAHLCPSDRDRLSYLNVVRSSMSAFCATAPFLAEPEIDSDMIQQAQMAYSTAWKNCREEGSGFPTFHKKKNAFFYRTSNHYSQKKIRSSSSPCGLCEGTIRFEDRKHVRLPKIGRIRFSGSKKMIQRLFDTSEEIRIGSVQIKTDETGSRYASLSLASDFPFHDLYLQTGKAVGIDMNLTNFFYDSDGKEVPSPKYLRKSEKRLKKSQRKLSRKAERAKKDGRKIHECRNYEEQRIKLARLHKHVANQRRDFVRRLADEEVKTHDYLFAENLKVSNLVKNHRLAKAISDSGWRMFLEELKWCASKRGKTCILINPRNTTQTCSACGYVCSGDTRITLGVEEWDCPHCGTHHIRDYNAAVNIKENGLALLCSPK

SEQ ID NO: 3043 - protein, 404 aa, Nocardiopsis sp.
MARSTVKRAFKYRFHSTDVQSAELSRTFGCVRLVCNRALAHRTRAWYTEQRRVDYDESSAVLTEWKKDPDLAFLNEVSSVPLQQGLRHLQAAFRNFFDKRARYPRFESRKKSRTSAEYSRSGFRYRDGHNTLAKMTEPLNILWSRPLPEGAEPSTVTVSRDAAGRWFVSVLCEDVVADHPATDSAVGVDAGITSLVTLSTGEKITNPRHEPRDRARLANVQRALSRKAKGSANRGKARRKVARVHARVTDRRRDFLHKLTARLVRENPVVVLEDLAVRTMVKNRRLSRAISDVAWRGLRSMSEYKVRWYGRDLVVVDRFFPSSKACPECGTVRNELSLNVREWTCPQCGATHDRDVNAANNLRAAGLAVVACGAGVRPQRESSRTGRPAVKQEAQRVTAGIPSP

SEQ ID NO: 3044 - protein, 506 aa, unknown
  TnpB Polypeptide
MRKLDSNAHSVFLLYYHLILVIKYRKKVLNDPISNRAREIFEHIAPNYHITLEEWNHDQDHVHIMFRAHPKSELSKFINAYKSASSRLIKKEYPEVRQKLWKEMFWSKSFCLLSAGGARLRSSVSTLKHRERVKVNTVYRFRIYPNKAQRELFAKTFGCVRLVYNRMLAEKKAHYEKTGKNLSLTPARYKSEFPWLKEVDSLALCNAQLHLQTAYKNFFRDDSVGFPKFKSKKKSVKSYTTNYVNGNIVLQNGKLKLPKAGWVRIRQHRKIDECYQLKGATISQEADERYYVALLYSCEEPVHETRKAETAIGLDFSMKELYVDSNGNHAAYPHFFQKARQKLAREQRRLSRCEQGSNRYKKQKKKVARIHTRIAHQRKDFLHKESKKIANSYDIVCIENLNMKEMSQDMHLGKSVHDNSWGMFTDFLTYKMERAGKKLIRIDRWYPSSKTCSCCGKVKEDLQLSDRIYECVCGNRMDRDENAAINICREGIRISGMMLDIEKKIF

SEQ ID NO: 3045 - protein, 383 aa, Nitrospirae sp.
VLRTASIKLDVTAEQATSLAALRSSYARACNLLVPIVREHRIWNRVALHRRAYSMLRTTTPLSSQMCCNAIFSVCKAYKTQKALGRIKKDAPVPEIRFDCASVHFDKRTYTLLNGDSVSLATLDGRIRVPMRLGQHQRRILESGQPKEAELVCRKGQWYFNLVVESGDREPVAFGPVMGVDVGENTLAATSTGKVFGGGKLRDKRDRYLALRRRLQSNGSQSAKQKLRQVSGKEARRVKHINHETSKAIVEQAKRLGIARIVMEDLTHIRSRIKAGRRVRARLHRWAFRQLQRFVEYKAKAAGIAVEYVNPAYTSQSCSACGNIGKRAKHRFECDNCGLRAHSDCNASRNLARIGETAVSPRAVVNTPDVGSVDLGNQVCASQ

SEQ ID NO: 3046 - protein, 399 aa, unknown
  TnpB Polypeptide
MSRYRLFPASAQEAVLRGHCAHARYIWNLAVEQHAHWHPGRTGAPGYLEQCRQLTAARAEYSWLAAGSQTVQQQALRDFTQAMTAFFDPGNPAGRPTWRKAGRDEGFRIVGRGRQWDVRRLSRKTGQVWVPKAGWVRFRWSRPVPTGATSYRVTMDRAGRWHIAFAVIPAPVSGPGNGEVVGIDRGVVVSAALSTGDLLTVPGLTGPERTRLRRLERKLAHARRGSNRRARVKLAIARLRVRETDRRTDWAEKTSTDLARRFDVIRVEDLKVRNMTRSARGTAASPGRNVRAKAGLNRGILASGWGLLVRRLENKAPGRVERISPAFTSQRCSACGHVDTNSRESQARFACTACGYASHADVNAARNIAAGHAVTARGGDGAARPVNREPQLLASLPGT

SEQ ID NO: 3047 - protein, 336 aa, Synechococcus sp.
MKYNELMSQVLTVSCKLKASQSQAAKLDATRDAFVQALNWVNQNTPEKIVNAVKLQSLCYYEIRARFGLSSNLAQQVCRRVAGARKAARQRNRPVKEFKRRFVTYDARIFSFREKDWTVSLTTVEGRERFELAIGNYQRGMLAGSNPKSATLVQRKDGSYYIQICVEKKPPKQQDTDKVIGVDFGRTDIAHTSEGDNWNGQQLNRVRDHYSKLRAALQRKASKGTRSSRRRCRELLQRLSGKERRFQAWVNHRISKAIVSRAKTTNSAIALEDLTGIRERVNQQPRSKTERRRANSWAFYQLRQFLEYKARVAGVSLILVPPAYTSQTCHRCLHIH

SEQ ID NO: 3048 - protein, 201 aa, Synechococcus sp.
VAGSRKVARQQNCPVKAFKAGFVTYDARIFSFRENDWTVSLTTVEGRERFELAIGNYQRGMLAGTNPKSATLVKRKEGSHYIQIGVEPDTPKAMGVDLGRRDIAHTSEEDNWNGQPLNQVRDHSSRLRASLQRKASQGTRSSRRRCRQLLQRLSGQERRLQTWVNPCISKAIVSRAQATHSFIALEDLSGIRERTNRQPRS

SEQ ID NO: 3049 - protein, 385 aa, unknown
  TnpB Polypeptide
MDKGYVYRAYPNAKQRELIKKTFGCKRFVYNYFLDLRKTRWKNDKKNMTFFEMNKLLTPLKQEKDFLCEPDKNALQNALRDLDKAYENFFGTVNSPRKMKFGYPRFKSKRDNYQSYRTNFTNNNIAFEVTHIKLPKLGRVRIRGGKNLVPEGRILSVTVCIEPDGRYYISICATDVPAPVLEHNEEPVGIDLGIKDLAILSDGTQFDALKPLNVSLKRLKFLQRSFDRKSKSSTRREKARVKVARIHARIAAQREDYLHKLTNFVTKKYGVIFLEDLNVRGMLRNHKVARHIADSSWGELRRQLEYKAKWRGRVLLTVDRFYASSQTCGNCGFKNPAVKELGVREWVCPKCGHHHDRDLNAAQNILCEGLRLLAELDEKFCDKSA

SEQ ID NO: 3050 - protein, 376 aa, unknown
  TnpB Polypeptide
MVEKINSEGFQTRNDLNYFLTELKESEPWLYNHHSKMLQMVSTQIDGSQKSLVELRKNGYKTGTLKFARFSKYNTFVYNQSGFAIKDGFLHLSKIGKIKIITHREIPDNANIKQITVSKSKLGKWHASVTCEIDAILPKINMIKSVGIDVGIKNFAYDSDGCQTPNPLNLKKMLKPLARIQRKISRRKKGSNNRLKAIRHLQRIHERIANRRKDFQHKLSTQYAKNHDVVFVEKLEKLNMVKNHKLARSIMDSSWGTFVQKLEYKCKLFVEVPARNTTIECSRCGSAVPKSLAVRIHRCDKCNLVTDRDYNASINILKKGLEIFNLLSKADYQTTAGTAESNACGDLNEVCEAGRGYRTSPVVVHSTFGCNEINTF

SEQ ID NO: 3051 - protein, 237 aa, Streptomyces sp.
VSVTAGTAPHRDAQVRRALTRLLRWARTCGVKAIAVEDLNFTAEKTREKHGRRKRFRGLISGTPTGRLHARLTSMAHRSGIAVIAVDPAYTSKWGAQHWQKPLTTKNRKTTRHDAAAVAIGRRAQGHPLRRRTAPPPAHRSDEQGHRTVQARPGVPGREGTRPRRNGLTRLTPDSWPSATPRSPGPISVRCRAPGRYSADDTRPADRAGGVHGPGTPHAVASRPDAARGRQPLHRHP

SEQ ID NO: 3052 - protein, 446 aa, Bacillus sp.
MKIAKTLSHKITNHSRIFDATLEVYNHALSFIIDIIEKEFDHLDDMTTKSIVPLVEKLIHTTKSNPLPKYREFNSLFYKFPSYFRRGAIATAFGKVKSYRSHYRNWEEEKAIVLSEGRKFKKKPPRLQLEHKEFPVFYRGNMFERTSDTTAQIKVFHKNDWVWMDIEFKKQDLYKRGVWDWKENNPKLVKVGKKYFLHFSYQSKVTLSTTKMKDQKACAVDLGVNNSAVCSVIDANGTVLARKFMNQPKEKDQLYTMTNKLRKVQRISGWVSASNFWRRINGLQKQIVNNTSHEIVKFANEHHCDVIVFEYLDKMKVPKGFWGAKKLRFKLRYWRKKGIQNKVEEMAHYLGMRISRVNARNTSALAYDGSGFVERNDKKDLAVFTTGKVYHADLSASYNIGARYFIRGIQKSISEKKWLALQAKVPELSKRTNTTLSSLISLNLAQ

SEQ ID NO: 3053 - protein, 257 aa, unknown
  TnpB Polypeptide
LQSGKLKLPKAGWIRIKQHRSIDDSYILKGATVSQEADDKYYVSLLYAAEKPEHKIRPVKTAIGLDFSMNELYVDSTGTHADYPHFFRKYQEKLAREQRRLSHCKKGSSRYMKQKKKIARLHAHIARQRKDYLHKESRKITNFYDLVCIESLNMKEMSQDSRFGKSVHDNGWGMFTDFLSYKLERAGKKLVRIDKWYPSSKICSCCGKLKKELKLEDRMYSCTCGNQMNRDENAAINICREGLRILGVELDAERKIS

SEQ ID NO: 3054 - protein, 255 aa, unknown
  TnpB Polypeptide
VETSFSNFTTPDKNGNRRGKPRFKGFHYYKSFTYPQLDNLNIIKDEQNRICIDLAKIGQVPMVFHRSIPTGFKVKTGTVIREAPRWYISLTLEDKTVPVTVVEIQPTDENTLGIDLGITNYVDLSNGERIENPRFFRKSAEKLARLQAKLANRIKGSKPGQIIKSKISKLHQFVARARLDFQFKTAHKLFDKCDVLILEDLSLKNLTRLAQVKTDIENGNLIYLPNGQAAKSGLNKSMLDASHGQFATVLMGLGN

SEQ ID NO: 3055 - protein, 397 aa, unknown
  TnpB Polypeptide
MVQQIKTVKLRCYPDDDQLNQLPQMFGNVRFVYNYMLNLQNYSYKHFNNHLSRFDMNKLITRLKKKSRYQWLKFSESTSLLEACHHLDIAYQRFFTKQGGYPRFKRRSYNQSYTSLTVNHNIKQLSHGFVQLPKLGQMQINPYKVKGSIVSMTLRETARGHYYLMLVIKRGIKPLPKTKKTIGIDLGLRNLMNLSNGVKYKSLKFDNLNHKIELAQRKLSRRILNAKKQEQIDIQHKHKFNIVQYQDAEAFRNLAWYERRGVVSARRHLAKLHAEKANQRKDYLQKLSTKLIRQYDVIVFEDLRPSNMMKNHHLARTIGEQGWRMLITMCQYKARWYDKEVILVSPRNTTQTCASCGYKLVGNQKLDLSIEHWQCPQCHANHDRDVNAAKNILALAS

SEQ ID NO: 3056 - protein, 435 aa, unknown
  TnpB Polypeptide
MRKVIHGEIYSPDFDNLNKLVSDWASAYRFSFCRFQKDKLSFNEVRNWAKTKYPSLNTRQISDVVTQAQGLYSRVEDKKVIFGGRKYWDKLIKNEISNDEWKFKRDNQIYVRGDKTKKGNPNIRLLNKNGGFYLRVTIGNRKFEEHKLFVPAKFEEQLVSLFGSGNPYNVRLIKKGSQHYKMVIDYEVENPQTVIDFSNGVIGVDVNPDRVAISDIRRDGNLINSFSVLNNRMFFASTNKRDYEIGCIVKQIMQYALNRNKGIVFENLKFKKEFENQGRRFNRIKSNFVWKKLLTLLERKCIENGIQYKKVNPAFTSVIGKFKYQKMYNLSIHESASYIIGRRGLGFNEKLSLYKYPSKYVKEVVFDLAGNKTKRIHSWASWRKLRDNYKKAVLTGLQGRMSDLKESDDNLCYVGENPTGEVLSKELVLRGINGY

SEQ ID NO: 3057 - protein, 390 aa, Mycobacterium sp.
  misc_feature (354)..(363): Xaa can be any naturally occurring amino acid
MAKFEIPEGWMVQAFRFTLDPTAEQARALARHFGARRKAYNWTVATLKADIDAWQATGIQTAKPSLRVLRKRWNTVKNDVCVNIETGVVWWPECSKEAYADGIDGAVDAYWNWQNSRSGKRDGKRMGFPRFKKKGRDPDRVTFTTGAMRVEPDRSHLTLPVIGTVRTHENTRRVERLIAKGRSRVLAITVRRNGTRIDASVRVLVQRPQQPKVTDPGSRVGVDVGVRRLATVATADGAVLERVPNPRPLDAALNELRHVCRARSRCTKGSRRYRERTTEISRLHRRVNDVRTHHLHCLTTHLAKTHGRIVVEGLDAAGMLRQQGLSGARARRRGLSDAALGTPRRHLSYKTGWXXXXXXXXXXLPRLRACPRDRMGRALAMRFVLGIASA

SEQ ID NO: 3058 - protein, 458 aa, Caldicellulosiruptor sp.
MRYAYKRLLEGHKRNELKKQLQGIFNLNSRYVDDAIMKANSVLKSYKERGENPRKVIFGGRELFEKLQKRHINGRAYRKLQREWKEKRKGNLYSRGDRSKKGNLNTRIEIDEDCTRLRINVGEREYVYARIQPGWKVKAGTYTDRNQLLQSISISGEPYSVELKLKNGVVYAYFTVEEVFPQPAITRANGVIGIDTNAYPKNVAWAETDEYGQLLGYGKVAMPGLESGSSSKREYYRWQYAHMIVQMAKEKQKAIVIESLSIQDRGKRGDFSGRKSRRIRHCFGYRLLLEKIKLLAKREGIEVVEVNPAYTSVIGILKYAPQYMVSKDVAAAYVIARRGLGLKERVPYNYIAFLSRLDVNNMEELKEHVKKVVKNPYVRKIQLKKIDRAIKILQSPGSESGRVSGPLGGTSSDTCSKCYNSWRVLRVAVVTPLSPDRVLRDMSVLKSLLISGQVGRPG

SEQ ID NO: 3059 - protein, 349 aa, Caldicellulosiruptor sp.
VKGNENYRLLPSQVAQQTVKAVDEAFKSFIAILSAKKEGKVERKVSLPKYLPKGGMFLLSFPKDQFKVKQDKLRLSLGRSFYKEFGVRYLYFNLPPAVLGNRIKEVRIVPKFDGRWFEIEYVYEETTQPCNFNKDRCLSIDLGLDNFAAVVDTIGTAFLIEGRYIKSINRWYNKERARLQSIYSKQRIKYGKKLAQISLKRQHIIDNFLNQAANLIVKHCLSNQIGRVVIGELKDIKQGINLGRVNNQNFVAIPYEKFKRKLGAKCHFYGIEYVEVDESFTSQKCSRCGIVSKSNRKFRGLYVCKECGNVVNTDINGAINILKKVAGESALKQIASSGCVNHPVRIRVA

SEQ ID NO: 3060 - protein, 405 aa, Caldicellulosiruptor sp.
MYKTQKNHIRCDKQTYKLLRYLCHFSKNLYNYALYYIRQHYFKTQEYLRYESVYHLVKDSEDYRLLPSQVAQQTLISVDEAFKSFLSLLKAKKEGKVEEKVSMPKYLPKDGMYQIVFSKDQFKTEGKKVRLSLGRSFAKEFGVRYLYFDLPATVLGKKIKEVRIVPRFNGRWFEIEYVYEEEQQLSIFDLSRCLAIDLGLDNFAAVVDTIGTAFLIEGRFLKSVNRWYNKERARLQSIYSRQGIKCGRKLALVSRKRQHIIDNFLNQAVSLIIKHCLNNQIGAVVVGRMKGIKQGIEIGRVNNQNFVGIPYDKFKRKLKSKCMYYGIRYMEVDEGYTSQRCSRCGHVSKSSRKYRGLYVCKKCGYVVNADINGAINIVAKVAGESAVKQITSSGCVNHPVRIRVA

SEQ ID NO: 3061 - protein, 405 aa, Caldicellulosiruptor sp.
MYKTQKNHIRCNKQTYRLLRILCRVSKNLYNYALYHIRQHYFNTQQYLRYESVYHIVKENKNYRLLPSQVAQQTLLCVDEAFKSFFKLLVAKKEGKTDKKVSIPKYLPKDGMFLLSFPKDQFKVEKDKVRLSLGRNFYREFGVRHLYFDLPANILGKRIKEVRILPKFHGRWFEIEYVYEEVTQSYKLDRNKYLSIDLGLDNFAAVVDTIGTAFIIEGGYIKSVNRWYNKERARLQSIYSKQGIKYGSKLAKISLKRQHVVDNFLDQAVSLIIKHCLNNQIGTIVIGKMKYIKQEINLGKVNNQNFVGIPYEKFKKKLEAKCEYYGIGYKEVDESYTSQTCGRCGVVRKSNRKYRGLYVCKNCGYVVNADINGAMNILGKVAGESAAKQIASSGRVNRPVRIRVV

SEQ ID NO: 3062 - protein, 452 aa, Caldicellulosiruptor sp.
LQQEFTDKEVLKDMVTVQAKLIFDSSKDKQKVLDLMRRWSSCMRYAYKRLLEGHKRNELKRQLQGIFNLNSRYVDDAIMKAKSILTSCKERGENPEKVIFGGRQLFEKLKRRHINGKANRKLQLKWQEKRKGSLYSRGDRSKNGNLNTRIEIDGNFTKLRINVGEREYVYATIQGGWKMKGKTYMDRNLLLQAISSSSEPYSVELKLKNGVVYAYFTVEEVFPKPAITRANGVIGIDTNAYPKNVAWAETDEYGQFLGYGRIPLEKLESGSSSKREYYRWQYAHMIVQMAKEKKKAIVIENLSIQDRGRRGDFSGRKSRRIRHYFGYRSLLEKVKLLAKREGVEVIEVDPAYTSVIGMLKYAPQFMVSKDIAAAYVIARRGLGLRERIPHNYMLLLGAGAMAFPNTACWGWESFDGRTTSTPAAKHVLMCTVWLTRSLSSSESKQGRQQCTQ

SEQ ID NO: 3063 - protein, 434 aa, Caldicellulosiruptor sp.
VLSGELKRMTKVEKIKQTRQQTKERRKNQIPVMYQLKINLNSASEETKEKLFKLFLEAKWLYNYIVADIENRLDSNAEKLKEVEIKVGENFEKRKIENLSSQMKQALRERIKQNLYSLHVQKENGYRTGKLQFKHCVNSIPLKQYGNTFKFGNQQKTIVKIQGIKKPLRVLGGHQIPEDSEIAKAELVRRPSGIYLFVTCYIDRDKHTKVWEQRKNKKGVVKPRVWQIFDVAAGIDFKPTGLVLSNRLKLEWRIKETKRLKELQKQLARQQKGSKRWYKTKEKIAREYEKLTNIKYDIINKTCSFLYRYRKICFQEDNIKSWKDGYFSKSVHYSAVGTIKRRLSDSLRVSTAVVKSNVPTTKTCSSCGSQQKISLSDRIFRCAVCGLEIDRDLNATINMLKEVGLDRSELKPVEWETAARIFRGNPYILVSHTT

SEQ ID NO: 3064 - protein, 408 aa, unknown
  TnpB Polypeptide
MRLDVSEQDTDTLEFMQGKCRGLYNWWIMKLRHGEKWHLYEAKKSLQQNKVHDPALVQVYGKLLHEVYFRLDGAMRAFFRRVKAGGQPGFPRVRPRHSFFTLVYPAMYITVEGNRLMLPTGGKGKSKQFSTIVAHLTETPPAHFKEVAISRDARGNYYASFVAERPEEKADNDGVVAFDLGMKTLATGVNEQGRFYHIGGFKGGQWYNRQLDRIRSKRATCKKKSRRYRHLSKVYKRVSEKKRKEQRDSLHKASHFMARRMVERTVVVGDLSQRQMVMKEHRERNKHLNRAIFNDWGHFTCVQMLRYKCQLYGKELVILNERDTSKTCSGCGHMQDIPLWKRTYRCKNTECRLVIDRDENSAVNILKRYLARLGPHTQPECGVLHADQYNGEVTEASCPTPVQQLKLW

SEQ ID NO: 3065 - protein, 497 aa, Kibdelosporangium sp.
MRTAYRCRAYPGPEQVTVLNRTFGCVRLVWNKTLAERYHAWRVEGKRTSYRETDTALTGWKRTQELAFLSEVSSVPLQQTLRHQHAAFANFFAGRARYPRFKSRAGKQSAHYTRSAFRMRDGQLFLAKISAALRFVWSWPEIDPATMNPTMVVVSREPDGRWYVTFAIDTGDTTAGGSGPAPGIGPEIGIDLGVADFMVDSTGDRVANPRHLERKARNLARYQRRMARCQRDSVNRRKAKAMVARAHRKVRNSRQDFLHRQSTRLVRDHNLIAVEDLAVANMVRNKRLARAISGCGWGEFRRQLEYKAMRAGKTLVVVDRWYPSSKTCSTCGHLLAELTLSVRHWTCPACRTRHDRDINAARNILAAGRAVARGDTLGDACGADVRRQGSPLPQSAVNQEARLRKRESPPQGKKSRWCQTWSARAGRTPVVAGSDNSPGEPIVDTRFTLVARATARVGCPGRCFTPTGMVITKYRTGEYTSDSTSSAHPSAIELFRA

SEQ ID NO: 3066 - protein, 446 aa, unknown
  TnpB Polypeptide
MQRRKVTFKLYPNDAQLARLDGWVRLHAELYNAALQERIEAYTKSGISISYYDQQNTLPAIKQFRPELVELGSHALQETLRKLDRAFQAFFRRVKAGQSPGFPRFKASARFAGFCYPDPAGWKLHQLGNRGASMVIRARGKHRFDQVKPNDLTLMRKRNHATGKDQWYASVTLRVSDESCQRTRTGDDQVGLDFGVNHWATFDDGSQIGNPRWLREWLPKLADLQQQRARKKRGSHRYQQLTQKISRLHQRITNVRRDFLHKQTSALVQRCALIATEELTPKNMSRSAKGTVESPGRRVRQKAGLNREILSASFGMSHQMLQYKAEEAGTRLHLAKTRQLKPSQRCSACWAIVPKTLNDRTHACSCGCTLPRDENSAKVVLFDAWTPNDTPGTGVTARLEPLSANTDKPRSKTRETPTRRESSLSIGIEAQQRENFYDVTFRMVRV

SEQ ID NO: 3067 - protein, 439 aa, unknown
  TnpB Polypeptide
MLEVHRTHRAKILNHVQVEDSLDRHGWSASKLWNVANYHSQQVWEETGEIPDHGDLKDKLKAHPKYKGLHSQSSQRVLEELAEAFNSWYGKRVSDSRANPPGYRKKNYYDQQGRRVHEEHPRSTVTWKQNGIKHDAKNNRVRLSKGANHKEHPKAWEYILVEYETRPVVTVENLQQVRAVYDKAKQRWELHLVCKDEIETPTTPGNESAGVDLGICNFAAVAYSTKEADLYPGNRLKQDGYYFPKEIAKCDDSGGDRAARLHHKWSERRTHFFHSLSKHVVQRCVEQEVGRINIGNLEGVREDGNGDSKNWGKHGNLDLHGWAFDRFTKILTYKAKVEGIEVVEVSERDTSKTCCMCGREDESQRVERGLYVCETCDAAFNADVNGAENIRLDLNQSNSESAPRLGGDRSTGWLAQPGVYLHDLSRGFQPRTEVVDCKP

SEQ ID NO: 3068 - protein, 413 aa, unknown
  TnpB Polypeptide
MKRTEIIYIPLNPTLNYYSHISKNLYNQATYLIKQHLKENKLLLYNDLNKLLKDSENYKELPTQSAQQILKIVSRNWKSYFKALKKYRNNSNKFKARPKPPSFKPKDGIFMLVFTNQQCKIKDGKLRFPKKINLTVDTRLNDDTNIREVRLIPTLGGYKIEIIYEKEPIIMELNDNKIISIDLGMKNIITMTNNFGDKPIIIKDNGKGIKSINQFFNKIVSNLKSIYDKQGIKSGKKLKKVITKRNFKVSDWIHKASRFVVNYCVKNKVSKIIIGYNDDWKQEVSLGKKNNQTFTLIPFKTLIDKIVYKAEEVGIKVVLIEESYTSKCSFFDNEEIGKKKEYAGKRFCRGLFKTLKGWVVNADVNLKIHFVNLYDFFASLRNGAYNIMRKAIDNAFKGIDSYKLPTHPIKTYI

SEQ ID NO: 3069 - protein, 284 aa, unknown
  TnpB Polypeptide
MLRAIKIRLYPNKTQEQVLNSVLGCYRFVYNYMLARKQEAYNTDKTNLGTTQLSKHFHHELLKDEQYAWLKEQNTKIMNQAIRQMDSGYQKFFKQHNGFPKFKSKKNNQSALFPKGTISKKNTFVTRKITLTTKLKDISFRCSDLYLARLRRYKNNIRSATLSKTKSGNFFLSILIDMNDNELTKFNKTGRDVGIDLGVKDFVITSDDTTFDNKHFYNKEEKRLVKLQRQLSRKRKGSNNFYKQCKRIAKVFETITNKKENYIHSVVNELLSQYDTVYMEDLNV

SEQ ID NO: 3070 - protein, 350 aa, unknown
  TnpB Polypeptide
MDKMLQQTKEYKLLMSQSSQCLLQVLDRNWKSFFVTIKDWTMHPEKYLGKPRIPKYKNKDGRYAWFLKNNQTFIKDGYLNFRLRIFNGYKFKTNCNGRLISVRFVPKGNIYIMEIVYETEISENIPEVNNICSIDLGINNFVTMVNNIGLQPIIINGKGVKSINQHYNKRKAKIQSELKLRNNKYWSKRLNIITLNRNNKVKNYIHHVSHYIVDYCKQHSIDTLVVGLNKTWKQECKLSDKVTQNFTFIPYDMLIKQLEYKCQDIAIRLIMTEENYTSGTSFLDNELPIKESYDKSRRIQRGLFKSNNGQLINSDVNGAFQIMKKVFPNAFVDGIKGCLTPVIINVVKTA

SEQ ID NO: 3071 - protein, 561 aa, unknown
  TnpB Polypeptide
MTMLKLDKLPISLDSHHKLFVCTLIKAYLKDIKLQVELECLITQVYKRTLIVFVMHKKKMLNKNVSSMLESVQKNNKMIWNDNSSTLDLSIQLCQILIQVSTLRKRTLKPFWTSAYNELSKKLWLPTKIDYVDLPMTCSSMLSIRQVERVDDCQASRNLLPSRIVDKWESENIEKDIVKCRKIRLKVTDSNRSALDEWFNTSRYVYNKTVCEIKNGAKVNFQDLRNKLVTKERDKIRNKRVKDWETRTPKEVRATAVKDVCNAYKTSMANLKAKNIKHFDLSYKKKTSFDQSIGIQKQSIKNKNGNLEIYSRILKPIKLGKRSKNLKVGNCDARLVKQKNRYFICVPMKCKTEKNKDYKRVVGIDPGVRKFMTIYSEEKISEYRQKRDLLKRLNAKIDKLRMERIRPLRRGERVKARKKSINKVEIRKSDLIDELHWKTIREITKENDVVCYGDIKSHDIVKRYNNNNLNREIMDLKLYKFKERLRNKCIEYNKVLIEVDESYTSKTCTNCGVINDVKDSERYECKSCEIKIDRDLNGARNIMLKGIQSLPSAFLGGEKNK

SEQ ID NO: 3072 - protein, 425 aa, Stackebrandtia sp.
VQLRYQYRVYPSPGQRMALAKAFGCARLVWNDALALRKRAYQDGVAISPGDVAKRVTTVAKKTPQRAFLSEVSAVVLQQSLRDLDTAYKNFFESVSGKRKGPKAGPPRFKKRASRQSIRVNRNAFSLTQKRRLYVAKVGDLKVRWSRELPAVPSSVTVIKTAAGRYFASFVIEVAAQPLPVLSEDQDTGIDLGLSSFAVLRGRVIASPRFLRQAERRIRKAQRELARKRNGSANRRKTRVKLAKAHARVANRRRDFIEQETTRIVRENQAVYVEDLYVKGMAVRRGRRGKSVGDQALGAFTRTLEAKCARFGRGFAKVGRWFPSTQLCSACGTVEGPKGLAGLKARTWVCGCGAVHDRDANAEHNIRAEGRRVLAEGRSERLNARGAQVRPVPVPAPRVETGTRRGVDRAKAESPAPDTRKEPGL

SEQ ID NO: 3073 - protein, 406 aa, Stackebrandtia sp.
MRTAYKCRAYPDSEQAAMLSRTFGCVRLVWNKTLAERHHRYHSEGRRTSYRETDATLTAWKKTRELAFLSEVSSVPLQQTLRHQHAAFANFFAGGAKYPRFKNRNWRQSAHYTRAAFRMRDGQLWLAKASAPLRFVWSWDNIDLVALKPTTVIISREPDGRWYVAFAVDIDAPAPLEETKHAVGIDVGIKNFAVTSDGERIRNPCHLERKSRNLARYQRRMARCQRGSMNRRKAKAKVARTHRKVRNARQDFLHRTSANLVRKADIVVVEDLGVRNMVRNRRLARAISDAGWSEFRRQLEYKCQRAGRRLVVIDRHYPSSKTCNACGHLLAKLNLGTRAWTCPSCRARHDRDHNAAKNILAAGLAVAAAESRSDACGADIRRQGPALPRSAANQETHPVRGVTPHP

SEQ ID NO: 3074 - protein, 318 aa, Geitlerinema sp.
VRLVYNKALAARSQAGKEQQEKVGYGETSKMLTQWKKEEALQFLGEVSAVPLQQGLRHLDEGYTHFFTGRAKYPRFKKKRNGGSAEFTKAAFRWRDGSLYLAKCKEPLEIRWSRQLPKGAEPSTVTVRLEPSGRWHVSILVNDDTVKPLPLSEKSVGVDVGIAHLAITSDGEKVENPRLYSEQRAASSEQCPLLTVGCSLLTEKAVGHTVTACGASVRLERHCSGEQLRKTLSIVEGERSRNPNCEVWESPSFQSGEDVKNAQSTWYIIKRESGHCDICEVDRRDEADVVQQWGPFPSQQDAIARRIGLIRSGKCLPK

SEQ ID NO: 3075 - protein, 362 aa, Geitlerinema sp.
MTLRAFRYRFYPTAEQEGLLRRTLGCVRLVYNKALEVRSQAWKERQEKVGYRETSKMLAQWKKEEELQFLAEVSAVPLQQGLLHLDKGYSNCFAGRAKYPRFKKKRNGGSAEFTKSAFRWQNGSLYLAKCREPLNIRWSRQLPKEAEPSTVTVRFDPSGRWHVSILVEDDTVQPLPESEKSVGVDVGINSLAVTSDGEKMTNPRHLTKHDQRLRRAQKSLSRKIKGSRNREKARQKVAKIHAQITDSRKDYLHKLSTRLVRENQTIVVEDLSVKNLVKNRKLARQISDCAWGEFVNQLDYKCQWYGRTLVKVDRWFPSSKLCSSCGHQMDSMPLSVREWTCPKCRTVHDRDINAAQNLWATP

SEQ ID NO: 3076 - protein, 404 aa, Pyrococcus sp.
LPTHYYYTVCQDAVTRAKSFLELKKKGKVETEKPVVKRVSLWLDDVLWDYKRFPQFNTLKNGRKILIIRLSTRKGRIKLSLKPHKLFFKYLNEGWKVKPGVKLRLIEEERKVLAYFVFEKEFEEQEPTGSFLSVDYNADNISLGTSEFLIQVRTDLGKITRFYTNVRREIQKSHLVGWRRKLPSNKGRKLLEKFGRRKRNRRVDLQGKFAKRLVELAKVLNATIVLEEVPKNFNQKVARRRKRKEKGLRDVLHNIGMNGFQRFVLEKAVEFNVPVVFVSPSYSSKICPGCGAFNVKPDDDALRRRVFNCPVCGFSMDRDFVAVLNLLGLFPFSPKANEPLAEDPVGLMMLVVEANLLHHRNALIIATKTGAGGNGKKNIILAWDLDDFKSLNNVRVNPKSAVPD

SEQ ID NO: 3077 - protein, 429 aa, Pyrococcus sp.
MRVTRTVVLKSERLPKKIFKVFIELEGMYREMLLQILPFAVQNGITSPVKLKAEKYKFLRELYPQLPSHYAYTVCQDAVTRAKSFLKRKRRGLAKKECPEVRSVSIWLDDHLWRAGLTFIRIATHKGWIEVGLEGHKYYWKTVNSDWKLASQSRVKLDKRERRLIVFLVFYKDVREYKAKSWIPIDVNEDNVTALIDFKPVIFETNQKKITLGYYYRRKKVQEKWDKKLGSRNGKKRRILGKLREKDKKRDIRNKLAKIIVEEARKRNAGIVLERLPKNVPRRMLEKVSNKQLRHRIYQSAFLGIQKAIERKAKEYGVPVIKVNPKNSSRLCPIHNAVVKYESGRFGVCSVGGEVWHRDILAVWNLYLRAPQSDGSNAPSSGGLFADGSPVPLGSTATNEAIWIEKSRWLRWNSLPPTQTNTHLYKKKR

SEQ ID NO: 3078 - protein, 414 aa, Pyrococcus sp.
MQNNSSKNETVVKAYSIPIQADGIILEFIEEYHRMARVVLQEILNAEKFTKFERKQLRDKLLEDWKYANHYVDSAINQMLGLVKSYRRKLRKGKKVRKPRLRKKFVYVKSTLFTLKGFILKITIIPREYYLEINLANYPYILPLLKEVWSGNLRLGGLFLFPDKLVLNFVKTVEYFEPRDWMSIDINLTNVTVLAGLTVYRFDTRELYHIHRVYELKRQKIQGISAWNKRLSEKLLKKYSGREKNRARDFLHKLANKIVGIARERRMGIILEDLNGIKERVLGGSKSLNRKLSKWNVRELQRLIEYKAKWFGVPVVYVNPKNSSKTCPACGGHLIPQEGRLMKCLKCGLVEDRDFIAVLNLRMWGSGVTPKGLEVSRASTLNERPMKTNPYGIMAIEEKQRIGLKFHKITPKPP

SEQ ID NO: 3079 - protein, 431 aa, Thermococcus sp.
MKRAVTVKLQPSKTQEKTLKELILTSSKVWNRVNYLRRQEFFEGKPIDFLKTEKIVYEEFKSEIGSATVQQIARKNAESWRSFFSLIRNKRNGELPKWFKPKPPDYIKEGGLIVLRNDQYKIEGNKLILKGLGKFKRLEVQFKGRIHLKGKQGRLEITYDPIRRKWYAHISYTVEERFYDQEWIKLPKEPLGNLSAGIDLGVNNLMAVYVENGESFLVNGRPLKSIAFYWRKRIAEYQSRLNKSGAKKSRKLSRMHEKAKLQARHYINTAVRQTVERLYHLGVSRIVVGYPKEIARNPDKGRKQNYLLSHVWRFNTVIKRLKEVAEEYGISVIVVNEAFTSKLYPVCGKPHEGARFVRGLFKCPVAGLVFNADLVGAFNILKKVVKTITPSLPGLAAGRGNWGKTVPEGLKARFELGFNEAPQTFPSMARG

SEQ ID NO: 3080 - protein, 393 aa, Thermococcus sp.
  misc_feature (175)..(178): Xaa can be any naturally occurring amino acid
  misc_feature (208)..(208): Xaa can be any naturally occurring amino acid
MPSETIKLTAKFKLKEIPNGLDVLFSTYREIVNYLIGYAFENNVTSFYKLKKETYKSLRKEYPDLPSHYHYTATQMATMIYKSYRKRRKKGKAKGKPVFKKDAIMLDDHLFKLDLKAGVIKLSTPMGKIKLEFYPAKYHEKFGDWKIGQAWLVRTQKGVFINVVFSREVEVREPXXXXGVDLNENNVTLSLPNGEFVQIITHEKDIRXGYFVKRRKIQKKLRTGKKREELLEKYGRRERNRLNDLYHKLANKIVELAEKYGGIALEDLTEIRDSIRYSAEMNGRLHRWSFRKLQSIIEYKAKLKGVRVVFVNPAYTSSLCPVCGGKLSPKGHRVLKCSNCGFEADRDVIGSWNISLRALKMWGVSVPPESQPMKMGGWKVIRYDSFMCFKSGG

SEQ ID NO: 3081 - protein, 417 aa, Thermococcus sp.
MTKIVLTYRMPHNWNIDLFLKEYQKLLQRAIDEIWENTTWKEKRVKHRYSLGRKNYRYYGTTRLIPYFPQSNEFKRKLRNELLREWPFAKHYVDSAIKTAYSVLKSWRQNYLKGKRKRAKPVVKRKFVRVKTTLMKVEGSKIRITVRPREKYLELDFSREWFYEKVKNWNVGELIIRESDVLLTFSKEVEFSGRIKIGIDSNLTSLDVYHPEKGWTRVDLSELHRISETYDRIIDMLKSVQRKAPKRIGVLLKKYWTRRRNRIEDYLNKLAVQLSREFPDAVFVFEDLDKFKMLQNGSRKFNRKLSRATWKKIVGKLSYRVPIEFVNPAYTSSTCPVCGSKLESRNGLVVCHNCGFEADRQFVGAFNVFVRGLGVALSGAERDDLLSDEPGGGLNAMRPKSVVRVDLNGWRFTHTYS

SEQ ID NO: 3082 - protein, 431 aa, Thermococcus sp.
MKRTVTVKLQPSKAQEEALKELAQISSKVWNRVNYLRRQEFFEGKPIDFNKTEKIVYEEFKSEIGSATVQQIARKNAESWRSFFSLIRNKRNGELPNWFKPKPPNDVKDKGLIVLRNDQYKIEGNKLILKGLGKFKKLKVQFKGRIHLKGKQGRLEITYDPIRRKWYVHISYTVKKRLQEGEWVELPRQPLGNLSAGIDLGVNNLMAVYVENGEGFLVNGRPLKSIAFYWQRRIADYQSKLNKSGAKKSRKLSRMHEKAKLQAKHYINTAVRQTVERLYQLRVSRIIVGYPKGISRNSDKGKKQNYLLSHVWRFNYIIKRLKEVAEEYGIEVIITDEAFTSKTCPVCGRPHEGARFVRGLFKCPATGLVFNADLVGAFNILRKVVKTITPSLSGLSGGRGNWGKALPEGSKTLFSLGLNETPQTFPSLARG

SEQ ID NO: 3083 - protein, 410 aa, Thermococcus sp.
MKRTVTVKLQPSKEAERVLFELADIGAKAWNEVNYLRRQLFFNHEPVDFNKTEKIVYEKYKKEIGSATVQQICRKNAEAWRSFFSLIKKKKELPKWFKPKPPNYIREGGLILLRNDQYKIEGNKLILKGLGKFKKLEVQFKGRIHLKGKQGRLEITYDPIRRKWYAHISYTVEERFYDQEWIKLPKEPLGNLSAGIDLGINNLMAVYVENGESFLVNGIPLKSIAFYWRKRIAEYQSKINKSGCKKSRKLTRMHQKAKLQAKHYINTAVRQTIERLYQRGVSRIIVGYPKGISRNSDKGRKQNYLLSHVWQFNYIIKRLKEVAEEYGIRVLVVDEAFTSKTCPVCGRPHEGARFVRGLFKCPETGLVFNSDLVGAFNKMITPSLSGLSGGRGNWGKALPEGFEEPVSVWV

SEQ ID NO: 3084 - protein, 219 aa, Thermococcus sp.
MGGFLVNGRPLKSIAFYWQKRIAEYQSRLNKSGAKKSRKLSRMHEKAKLQARHYINTAVRQTVERLYHLGVSRIVVGYPKGIARNSEKGKKQNYLLSHVWRFNYVIKRLREVAEEYGIEVIITDEAFTSKVCPVCGKPHEGARFVRGLFKCPATGVIFNADLVGAFNILKKAVKTITPSLSALSGGRGNWGKALPEGLKARFELGFNEAPRTFPHLARG

SEQ ID NO: 3085 - protein, 240 aa, Thermococcus sp.
MKRTVTLKLQPSKAQDKTLKELAFISSKIWNRVNYLRRQEFFDGKPIDFLKTEKIVYEEFKSEIGSATVQQIARKNAEAWRSFFSLIRNKRNGELPNWLKPKPPNYVKDKGLIVLRNDQYKIEDNKLILKGLGKFRRLEVQFKGRIHLKGKQGRLEITYDPIRRKWYAHISITVAEKLKGENWEKIPREPLGNLSAGIDLGVNNLMAVYVENGRFLGEWETAQEHCLLLAKEDCRVSVEA

SEQ ID NO: 3086 - protein, 428 aa, Thermococcus sp.
LHPRPEGRGFQKRKVKLQPSKEQEKALKELALISSKAWNKVNYLRRQEFFEGKPVDFLKTEKIVYKEFKSEIGSATVQQICRKNAESWRSFFSLIKKKKELPKWFKPKPPNYLKDNGKRKPLIILRNDQYKIEGSKLILKGLGKFKKLEVQFKGRIHLKGKQGRLEIVYDNVKRKWYAHISYTVEERKNDKGWVRVPRQPLGNLSAGIDLGINNLMAVYVENGESFLVNGRPLKSIAFYWRKRIAEYQSKINKSGCKKSRKLTRMHQKAKLQAKHYINTAVRQTIERLYQRGVSRIIVGYPKGISRNSDKGRKQNYLLSHVWQFNYIIKRLKEVAEEYGIRVLVVDEAFTSKTCPVCGKPHEGARFVRGLFKCPATGVIFNADLVGAFNILKKVVKTITPSLSGLSGGRGNWGKALPEGFEEPVSVWV

SEQ ID NO: 3087 - protein, 309 aa, unknown
  TnpB Polypeptide
MTIDLGLGALTYATEDGTIAKVQIAPSADTDHRAVRKLQRAMERSRQATNPDNYETVEVVRHGKKHKSLKVKSGRLQWRFSKRYESLRAELAEIFRLSAATRKREHGEVCNWLLGHAGHIIVEDNSYKAFQRGRFGKTIGRHAPAALYAQLTNKAESAGLLVEVVSPKKLKPTQHNLLTGQFVKHELWERRVRLGNDDDDRWIDRDAAACLNLLYADLEKQTYAPERIREAVLAGVTAWLDAGVVVIQAREGIAEREFRRCVVFQYARLDRGDERNDCAWSRDLHALVGPRRRQYCAFHGSPQHRVGDD

SEQ ID NO: 3088 - protein, 435 aa, unknown
  TnpB Polypeptide
MGSYEAVKVRLDPTPRQERLMASHAGAARFAYNAGLAHVKEALDNGELTDLSHYALLRWWNANKDVLAVNRTTGEVWWSQNSKEAYNMALHGLARGFSNWAKSRKGRRKGRRVGFPKFKSKNGVMRFAYSTGFTAPAANDPYGLKLPRIGRVHCMENVYKLVNGARLIRISVSRRAGHWYASLTVEREPAASTTALKLGAVGVDLGVKNLATLSDGTVIPNPRALGKKLKSLRKVQQALSRKVMGSARREKARERVARLYARVTDARADAINKATSMIAGRYSVVCIEDLNVAGMVKNHHLARSVSDAALGEFRRQLEYKTARSGAVLRVVDRWFPSSKTCSNCGAVKAKLPLSERTFNCDDCGLSMDRDLNAAINIRVAGSAPETLNARGGDVRRTNVPLVNADPCEARTKRAQKSAVRLGAGLGNEAMQPRVS

SEQ ID NO: 3089 - protein, 272 aa, unknown
  TnpB Polypeptide
MRHMDGNRYPLSKKLGSVRIRRRDRIRYPLESLSSWTVKRENGVYYLVLLFDVDVQPKPPVDGQVGIDVGVKDFLTLSTGEKINYPDRLRQLEERVRWEQRKLSRRAKGSSNYRKQKATVAKAHAKVRHYRENFQHELSHRLIEDNQFIGMETLAVQNMTRRAKKKLDANGKPMRNGQLAKRAMNRSVLRNGWSGFAGKLAYKAQWYGRTFVQVDRFYPSSRLCHDCGHKYDGLRLSEREWVCECCGASHDRDVNAALNILGEALRLSQVGE

SEQ ID NO: 3090 - protein, 453 aa, unknown
  TnpB Polypeptide
MEYFTGGDDVYQTTGIVLKSDSELALYCKEMCSAAKLFKNTVIFRCRQLLSANYKNYSDLQVHEQEVLNEFKLTEERFKPIGSKYYLPGYLHFDYLFKVTENPDYYNKLPMQSNQQIIKGVLADFKGYFKAVKSYKKNPKAFTGKPKLPTYCKADKISFDITNQDCVVKTGKDGISYLKLPKTKLTVNLGKLVINKLKEVTIKPFYNTYKICIISEEPDIEPVELDYENYLSVDLGIDNFITSSNNCGLTPFIVKGNIIKSYNQWFNKKVSYLQSLLPYGQHSSHQIQQLWKKRYHKIADFYNKTAHYVIKYCMDHEIGNLVIGKNTYWKQNINLGKQNNQNFCYISHASFIKKVCEMASKFGIRVILNEESYTSKASFLDNDKFPVYGEVNHPDFSGRRIHRGLYQSKKGILINADVNGASNILKKAVPTAFDKTLNYTYLYQTVNTIHVNP

SEQ ID NO: 3091 - protein, 462 aa, unknown
  TnpB Polypeptide
MTIVRKEEPMKVVSSYAVEIRHFNQIFKDTVRVYRSALSFLIEIYDKEWDYLSSIVKQKERFNTAEHLVHTTKHNKSKYDFDTQFYKMPSYLRRDVINAALGAVSSYQSNLRNWEAAGKKGNPPVLQVNRYVTPVFFRDNMYLETESGTVCNLKVLHNNDWVWITVNLLKTDVAYLKKYWSHCKPSAPKLEKRHKKWFLRFTFEESVELASSPVEEQTICAVDLGINHDAVCSIMESDGTVLARRFINFPSEKDHLYHVLNRIKKFQRQHGSKNSSSFWAYVKRLNEELSKKIAAAIVSFANPSSMEFEFDKVKFATEYRADVIVFEYLSIKGKKSGSKKQKLHMWRKNYIQDLVEHKAHRIGVRISRVCAKYTSRLAFDSSGEVIRNLNNHSLCTFQTGKRYNCDLSASYNIGARYFIRELLKPVSVKRQSLLWTKVPEAERRTTCTLDTLRQVSDFLKVS

SEQ ID NO: 3092 - protein, 367 aa, unknown
  TnpB Polypeptide
MIAYKYKLYHTDKTKHLDKMLREASFVWNHALALQKRYYRIYKKYVGLGKMKAHFAKHIHRNILGAQTVQELLERQDTAYQRFFTHLATRPPKFRRAKEFSSFVFKQDGFKLSGNSIRINKLSRTYRFFLSREYAGNVRRVTIKRSPLGEYYIIVTTDAEARSYGKTHKGASVGIDFGLKTYMTLSDGDTIVSPRYLRSGLSLIQRKGRKLSLCKTQSNHRDERKKELNRQYERIVNRRTDWQWKLAHDLCRKYDNIFIEDLRLTGMTKLWGRKMSDLAHGEFIGKLEYVASKYNVAVHKIDRFYPSSKTCTCGHTNRNLTLADRSWTCPECGAHHDRDLLAANNILRKGISELESGCKTTCRRKTV

SEQ ID NO: 3093 - protein, 248 aa, unknown
  TnpB Polypeptide
MFFQIICHKIIYEGSISVGEYWASFSLNSEIPFFDELPKTGKQVGIDLNLLELVNDSDGKSSENMRFYVKAQAALCKSQRIQSRRAERAKKEKRPLKDASNYQKQRNKTTYLHRKVERQRNDYLHNISKKTVENQDFISAEDLKARNLMKNHHLAKAIADASWRKFLTMLQYKGTFYHKIVILVPPQNTTQTCSYCGYVMKGEERLALAIREWDCPQCKTHHHRDTNAATNVLNRGLQIAKESGLIQI

SEQ ID NO: 3094 - protein, 427 aa, unknown
  TnpB Polypeptide
MVVGMSRYRLCPTPAQQIGLLAHCAHARFVWNLAVEQHSHWRPGRASAPSYREQARQLTEARAEHAWLAAGSVTVQQQALRDFHQAMANFFRGTHRRPTWRKAGQHEGFRQVAVRPDHIQRLNRKAGRVWVPKVGWVHFRWTRAIPTDVKSYRITCDRVGRWHVAFAVVPAPVPAPGTAEIVGVDRGVTVSAALSTGELLRCPDLSDRERHRLRKLERRLARAKRGSNRRSLLKIAIAKLKAKAADRRNDWLEKTSTQLARRFDLVRVEDLNVSGMTRSARGTIDQAGRGVRAKASLNRGILAAGWGRLVARLEDKAPGRVERINPAFTSQTCSTCGHCAPDNRKSQAVFRCIACGHQANADVNAACNIAAGRAVTARGGDRVAGPANREPQLAPPSAAWWVGVGWNPGRSGPGGRQGTRTFGLSQP

SEQ ID NO: 3095 - protein, 337 aa, unknown
  TnpB Polypeptide
MILTYKLKHGKDFSKELSLAKKVAEFAIVNRSQTSKDVKHIGLKSMIANQILRKYSRSKMVKEARSVNLGIPSQGIKVIRKEIHVPCLNLKMPIRFGQRFDEINQIEIGKEYAFVSVTVKEPEKYSPTSIIGVDRNTSKHVLVAANINTGKVLKLGKECQHVHLKYKHLRKQLQKKGRFSLLKKIKHRESNIIRNINHQISKRLVEEAKNNKAVIVLENLKDIRKTARTRRKQRYSLNSWSFYQLGDMIEYKSKKYGVPIAYIAPQYTSQRCSRCGHIEAKNRKLKQFHCAKCGVVENADANAGFNIASLYRQGISRFNKESDLLKGSTDTPKGAIL

SEQ ID NO: 3096 - protein, 393 aa, unknown
  TnpB Polypeptide
VLHYSFHAPFYRFLLVKTTGFSQWMKRANTFKTSFPILTPMRLTIRCGIVLPTKRKLKLLDAEYQNLQLFLKGKNVPLYSANKQQALRFYQKIKMKEYPLSLRNDLIDVQKSKSFYFLKVPIHGIRDGLRLPFKPHRNIPENGKLCESKLFKKNGRFFVNLTYEIPTSLSTRFSSVLAIDLGERTPATAVLLQDGAVMKPMFLGREIRGIRRHYAWLRKRLQEKHLRKDVERIGNVESRKVNEVLHGISKRIVNAAASANSCIVLGRLHNIRKSARKKGKRFNRIVSSMPFYKLQSMIQYKAEALGIPVVFTPEDMTSKTCHICGMEGKRRTQGCFVCFRCGQYNADLNGAINIGKRLLPYMDGSGATCGLAPNCGMTTNHGLTSEATAFRRW

SEQ ID NO: 3097 - protein, 394 aa, unknown
  TnpB Polypeptide
MQRAIVLQTISTASKSAKLEKFSSAALVAYNQLLSSREDCSKFMEFHHKTLSSCKKNTSFNVQVVCSLILDAWRKNTKSVKSVCVKFNVPRNCKTFSTKSNFFVELGIIPRQRIAVPIKKNRNFQRYSTLVSDGWICKTYGLLPDGQVVAYLSKEKEIKPRKNVLGIDINAKHFAISILSPTGKVLYQTYFGKHIWARRKQLVVRRATLQSFKSKRKLAKLKTTERNFVKTNLGKIVKEVIKLARRFDAEISIENLSKFKPKGKFFNRIVMRIPFAEFKSILEQRCFDNNIPLNIIDSWHTSKWCSHCGAVGSGHSTNYSLFRCKDCGQVVNSDRKASLAIAIKSLLERKHNPNQTCFQISNRRVPVNGLMRSYENVGVVAVHDTSTFTECPRF

SEQ ID NO: 3098 - protein, 394 aa, unknown
  TnpB Polypeptide
LKASRLEEFSKSSVELANLLLSKRQSRGMMELYRNEYSSCKKNTSFQNCVILDILRQVARKPESCKAVSNITVKFNAGKSYAKFFKTKSLEFVELALYPKGRLAVPIKKDRSYQRFQTLILGGWQCTTVGYSTQGHLVAYLNKEDVILQPRKNLLGVDVNSKCFAVSVLTPDGKVLHQSYLGKDIWHKRKKIMARRSKLCSLADKGDGKAAKYLARLKYRENCFIKNRLGEIVRDITNLALKFDADISIEKLRRFSRKSKSFNRQVFRIPFCKFKEILQSRCFDKGIILDVINPYHTSKWCSHCGAVAKVGHCSSNYSLFKCSECGQVVNSDRKASLAVVLKSLLSRMKHRDTNLVSFQLGSRRVPVNALFCPNEGFGVSAVHDTSTLTESHRL

SEQ ID NO: 3099 - protein, 393 aa, Glycomyces sp.
VKIAVQVKLMPTPVQASALAATLRVCNEEANRLSERAFRGDAKPTRAHLQRVAYSDFKDRGLSAQPALHVIRKVADAYTVLRANIAAGNLGEPGSRRRVKAESKPVAFRSDAAQPFDDRCLSWQHDAGTASIWTVHGRMKGIRFTGGAEQLKALREHRKGQTDLVCRDGMFYLAATCEVPEADPNERPAGWLGVDLGIVNVATTSDGKVRSGRGRNRQRRREQELRAKLQAKDTKAAKRLLKIRRRKEQRRNRDVNHKVSKRIVAEAERTGHGIALEELKGLRERVRLRKPQRAAVHSWPFAELAEFIAYKAKIAGVPVVYVDPAYTSQECSYCHYIDKRNRPNQAEFRCRSCGVVAHADRNASRNIAARGEMAWNAGRQSRVPAPSLRQCRM

SEQ ID NO: 3100 - protein, 316 aa, unknown
  TnpB Polypeptide
VVQSFYASLKSWRLRRKTDPNAHPPKRRARFYKVQWKDSAIRLKNGYLVLSNGKGNEPLKIPWKWEAPKFMEMGWDGEQFELRACYLLPEPVPVESGIVVGIDLGEIHAAVAHTGSECFILNGRELRSKRQYQNKLKATLSSKLDVKKRASTRRKKLKRSKAKQLAKLNNQIRDIMHKQTTKLVSVLKSRGTQRVVIGDVRDIRQSIDYGKKANQKLHQWAHGTIRRMLSYKVEREGMQVVLQHEAYTSQICPACGAKHKPNGRNYKCPKCRFEYHRDGVGSFNIRQKYLGEIPVVGPMACPIGLRYKPHALCSSV

SEQ ID NO: 3101 - protein, 362 aa, unknown
  TnpB Polypeptide
MNKSFKIRIYPNQEQQVLIDKTFGCVRYVYNRILKFKQKAYNIFELKLNYVKTSSILTKLKQRKSWLCEVDAVALQQCLRDLDAAYIKFFDGAGYPNFKSKRGKNSYRTVGYLQLDQENKKIRIPKVGWIKFKDKTNFSGLTKINNITISKTPSGKYFASISAEVNIKAFAKTKNSCGIDLGLKDFCILNDGTKFDNLKFLVRNEKRLRLLQKSLSRKVYGSKNYEKTRMKLAKFHEYISNCRKDYLHKISIFLVKNYDVICAETLQVKNMLKNHKLAKAISDVSWSEFCRQLEYKCLWYDKQFVQIDTYFASSQICSNCGSKNSNIKNLDVREWTCPECSVHHDRDINAATNILNQGLTLI

SEQ ID NO: 3102 - protein, 307 aa, unknown
  TnpB Polypeptide
LSKEGYFPLIIPRIKLKDGMLAIPMSREFKKEYGEVKIQLPERLKDKNIKEVRIHPKYSARWFEIEYIYEDEAIETSVDSEKAIAIDLGVDNLAACFDTEGHQFLIDGKRLKSINQWYNKRNAELQSAKDKQGIKELTNQQAQLNQWRNDSIRDYLNKSARIIINHCLNHQIGKLVVGYNPSIKQEINIGRSNNQNFVQIPFWQLRQKLKALCSRYGIEYCEQEESYSSKASFYGQDEIPIYNADNPIKQNFSGRRVKRGLYQTKNRHLVSADINGSANILVKSKHRLNFERVSSGFLANPLRIYVS

SEQ ID NO: 3103 - protein, 426 aa, Pleurocapsa sp.
MRKATKVRLYPTIEQKQLLAQQFGCSRFWWNKALSLQYEHRFEQERWLKRTELNAMLPGLKVELPWLSDCYSQVLQATTKHLEQAFKNWFEGRAKKPRFKAKKNNQSISFPQNVKIVENNLKIPKIGLIKAKFSRSIEGEIKTVTISVTPSGKYFAAIGLDLGDVEVEQSTDGVITGIDLGLKDYVTCHNGTETYSIKHPKWLKRHERNLRKHQKQLSRRNGSRSSTACTKQSGVNIALFDETVKTALPLKGSNRKNKARLLVTRVHERLSNTRQDFLHKLSRKITDESQVVVVENLNIKGMVKNRKLSKAIVQSGWGMFLNFLSYKLEHKGGVLVEIDRFFPSSKTCSKCGYIHTELELKDREWTCKQCSTHHLRDDNASRNIRTEGIRILGLGHSPRGDDVRLEACFEQLSVKRVPSFEQLTLF

SEQ ID NO: 3104 - protein, 472 aa, unknown
  TnpB Polypeptide
MLVQNDNSAPAQVLAVTELPRRRVTYKLYPTKAQRAQLERLHAFHKDLYNAALQERADAWRLKQESVSFADQCKSLTIFRRDIQRIDIEATAAGAERAYAPWVGINAQSAQVTLKRADLAFQHFFRRVKAGETPGYPRFKSHDRFPGFGFKTHGDGFRFEPGLGWKHGRLRVSGVPGTIEARGQARTPGQVVCCDLQRKADGNENGGWFLSLVVACAPYRERTGEGIVAGDPGIETLLTLAHEGGGFTEIENDRLWAEEAEAIKATSRALSRRPGRRSNRMKSKLRSLRRQLRSLANRRKNRAHQLSARLAAENRVIALEQMALKNLTASAKGTSEAPGINVQQKAGLNRELLDLGLSQLYSMVAYKAEEADGRLILIDPKTHKPSQTCPGCGAVHKKTLSQRWHRCPDCGLILTRDQASALYLLRIVQQTIADEILAAEIPPAWITGKELAAASGRREASRMAETPTKSAA

SEQ ID NO: 3105 - protein, 396 aa, unknown
  TnpB Polypeptide
MKIIRSAQCSLKFSTSAKRLELGAVLTEYGRVCNLFIDSFWEQCPTKAELLKDIVNAPDSWLSARLRKVCAREAIDMIKASQEKTNNEKKRLLAKAEKAKSATKANQLRQKAESLIAVKPKHKGNRMNVSCTIADLQMSKTNEFDAWLHLASIGNKIVMNLPIRFHKHFNKWDNLGKRLNSYIITKDSVQFCFEIETGEKKQGKNAIGIDSGINALASFSNGEQLGRDIKGCVNRINRCQHGSKGQKRARRALKQQMDEVAKQIVSNEKIDLVVVEKLSNLNHKTKERRRLSKNMRRVIGSWVWRYWLNRVQMGCEENRVSFRTVPCYNTSITCPECGHADKKNRNGEIFLCLGCGHKGNADTNAGRNILNRFFTGPYGAGFKPVSLRIFGALSNA

SEQ ID NO: 3106 - protein, 352 aa, Escherichia sp.
  misc_feature (189)..(284): Xaa can be any naturally occurring amino acid
VKRLQAFKFQLRPAGQQEREMRRFAGACRFVFNRALALQNENHEAGNKYIPYGKMASWLVEWKNATETQWLKDAPSQPLQQSLKDLERAYKNFFRKRAAFPRFKKRGQNDAFRYPQGVKLDQENSRIFLPKLGWMRYRNSRQVTGVVKNVTVSQSSGKWYISIQTESEVSTPVHPSASMVGLDAGVAKXXXXXXXXXXXXXXXXXXXXXXXXXXXXXXXXXXXXXXXXXXXXXXXXXXXXXXXXXXXXXXXXXXXXXXXXXXXXXXXXXXXXXXXXXXXXXXXXTCCGHTAKENRLSQSQFRCQVCGYTANADVNGARNILAAGHAVLACGEMVQSGRPLKQEPTEMIQATA

SEQ ID NO: 3107 - protein, 203 aa, Cyanothece sp.
MYINLYGDCVQDNRGQNQIAVASLPNRFGKFWNGRQIKHLRRHYQKLRKQLQKANKRKVVKRLESKERRIITYINHCISKQLVQFAKDYGMGLRFEDLSNIRQTSKQSKKVRSDAGNSRHTWSYFQLETLTRYKAIKNGVPFELIPAPYTSKSDHRNGVIGKRNGHWFRGVDGYQCNSDWNASQNIGQWLGFSCPLDSRPSRI

SEQ ID NO: 3108 - protein, 405 aa, unknown
  TnpB Polypeptide
  misc_feature (51)..(51): Xaa can be any naturally occurring amino acid
  misc_feature (112)..(113): Xaa can be any naturally occurring amino acid
  misc_feature (335)..(335): Xaa can be any naturally occurring amino acid
MYPILISDSRVRELISWYLKTLQRTIDIIWDNIEWRYVFPKIEKKSGKLKXIAPHKVKAPELPKSNSFKKKLRDELLRDCPYARHWVDAVIRTAYSVMESWRKRYLKGRARXXKPKIKRRFARCKITLMSVDYEKKTIRITIKPGEYLEISWAGSWFSKRVEGWRVGEVILKDDRVLVPFKSTRIVEAGNIIAWDSNELSLDGFSPQLGFIKVDLRLLQSMKIVYEKKKAVTQSKNKREIYEKYVKRERNRERDFINKLTEGLATLFPSAVHVFEDLEKEYLISKNKAPKSRRKRNAKTPWKLVQKKLSEKALVVKVSPKNTSRTCPRCGFVAKXRVGGVFNCPRCGLELDRQKLASVNIYLKYAKMRGLPHSNDPDTWMRGELWAGVTPSGRSPVICTPNEMGC

SEQ ID NO: 3109 - protein, 442 aa, unknown
  TnpB Polypeptide
MKTIKLPIQNEIDTSDIRRVFSSCVRFSYNRHVGGMEQKGIRHLIKERDLFSILPAHIIQCAILEGKYIHTKNKNKNKNKKVLFGGKRNLNLYLRSKITKKEFKENRLHPLTLQGEAHLEGNRNFKFDIMNGKIVFKFKRGQHFDIVLPNLRKKLHMELLGLQTAMEEHKLPVMVKLTKTHVLISYDELITNDFSRNKPTVKNRILGVDCNPNYVGLSVIEFIDGAEFRILHKEVVDMKGLNKPLGVKSSDPKQIAQNNKARFEAIEVAKHVAAVARAFSVSKVIVEDLSIAPSDKGKGRRLNRLCNNQWQRSRLLQNLESRVWMQGMEFVKVNAAYSSTIGNVLHGNDTTPDMVAASIEIARRGYKKFEKGWFYPPLPRNEGAHELWKQTVNLSACRDWKEFHLVVKSVGLKYRAPLDVDKASRVSSLSCIKSCINLYNFI

SEQ ID NO: 3110 - protein, 720 aa, unknown
  TnpB Polypeptide
MQSFIKLFGYVHGIEDCSLKHAFMPERFATLNPQVADAIATDVLLPGPPTGWREVMIDGLSGWDNAINRMMTRFYGNVKVQAMKNVKGAIEGYLNVVPLHTPEVRTALIDSTLYRLRPLIIDADDWAMAMAFRLPLITEPDFFMPKDAQWSDDVFLIHLFLTRFGVKERSYLPVGSMGRQYTYLDSKIASHLLEGAKVKYTASEKIAKQARLANNPDNPDKLENERAKVAERRVKEDVRRSLLKKVNATEALRREKFDKKEAESLANLDYVEVPKTPTLGDLIGMTPNEFNARRKKIVQDIRKRNIEKVTSKGFLSEKARKRFRKAAKHRKRIGYGKMCTDTRFDSLETDSFGVRLVLKTRINMNAWIVPITGPVIKAPIVKKPKKEKISKKERQIKAMNASEEPQVTDPVLKKGIVVGIDEGRAKLFTAVSLKRSGTPSIEKKASCIVTEPQDNCDYKSDKWVTTLLTRNKYHAYTKLKIRRKWEANRIKSNPELRVAYDALSLGSLHSCDPDSWDTRFRTESVHKSVLRTDLFEDKERERWKMIAFRKKKTCLDRAVGEFISVALKGEPKTRPLVVGIGDAAFPPNGPRGEIAVPTSKLATAYKRAFERVRKTGRRVAVFPISEHYTTKACCECGSITEPPLVKRTWCTRDGTRMIVDGESRRLRCCRTCETIGKLRDRDVQAARNMHRATIALVNGRARPAHLCRAAHVVDEPIVNV

SEQ ID NO: 3111 - protein, 340 aa, Microcystis sp.
MYKAYKFTIKPNTEQEIALAKGFGCCRWFWNYSLNLCQETYKTTGKGLTRNYIQGLLPSLKKEYEWLTDAYSQCLQVVALNLSQAYQNFFEKRARLPRFKSKHGRQSISYPANVKFEGDYLKLPGKVGLVYCVRHREFEGTIKTVTISKTPDGKYYASILVDDELELPETSKDGKGIGIDKVAKVHSKISRCREDFLHKLSRKIVNENQVIAVENLNVKGMVRNHNLAKAISDCGWGMFCTMLKYKAEWEGKTYIEVDRFFPSSKTCNVCLNQVASLPLDVRTWTCEHCKTTHDRDINAAINIKNEALRILSLGTSDTAYRGDVRPKVGRKSVLRQSPVK

SEQ ID NO: 3112 - protein, 260 aa, unknown
  TnpB Polypeptide
MQIQLMMQFCGCARYVYNRTLSLEKSLNEKDSKHSFKYTEAANRLPGWKKKNPFLKKCHSQVLQQSLKDLDRAYTNFFAKRGNFPKYKKKYRHDSIRFPQGVELDEVKQQIRLPKIGWMGYRKSRDIIGTIKNVTVSRRGEKWDVSIQTEYEVSSPASNPSEIGIDMGVKRFVTMSNGDFVEPLNPFKQEQEKLAKLQRKLARQKKGSRNSRKTKRKIARLHRYIADSRRDFLHKTSTKIAKNHSIIYVEDLRNLCTKGG

SEQ ID NO: 3113 - protein, 407 aa, Thermococcus sp.
MKKEVQLTVVGKVFRPNKKKVLALNKCLEEYLKLVMWYLNFNSTSKTFLHKNGYEKAKELFNLNTALIQTARDKAVEILKSFNEKKNRVKSEKPKLKRISIRFDKRCYSFAKTTNKLTPYWLTLSLNRKERISLPIFFGERQQKYIEEALQGKWEFCTVEMVKRNGEWYAHFVFKKEIELNDEQKTVVGVDLGEWNVATAIAISRKNPKPMKGRFWSGAKIREIRGKYAHIRRNLQRKKRLDLVKRIGHKEERIVNQQLHIIANEIIAYAKQFEKPVIAMEELDGIRENMNGSAKLNRRLHTWSFRKLQQYIEYKANLEGIPIVYVNPKNTSKRCHKCGHVAQVNGREFRCPKCGLVYNRDLNSAINIAHALKRGLGWGSCEPSELPDEVLVGSRHGTGEAPSVRAG

SEQ ID NO: 3114 - protein, 395 aa, Acinetobacter sp.
MKNDTLVITAKVQIFPNKQQVLELKQMFELYSLACNWLSKKVFQNKILNQVKLHYLVYDQMRSELGTKAQFTQSVIKTVVARYKSAKSNGHDWSLVKFSGNDYDLVWNRDYSLVGNQFSLGVSSGRIKVNFAKKPLNQFQKAKTKFGSAKMVNKFGKWFLHIPMSKEAPALTIDDVTNVVGVDLGINHLATTYASKGKTDFYRGGIVKQKRGIFKAIRKSLQEKQTSSARHRLKQIGSRENRYMTDVNHQITKALTQKHPKGTVFVLEDLTGIRQATEKVRLKNRYVSVSWAFYQFKQLLCYKAKENGQSVILIDPKYTSQTCPKCGYREKSNRDKKKHHFDCKRCHYQSNDDRIGAMNIHRKGIEFVSQSDPSMVIEQASIAKVEVNQPDMPTA

SEQ ID NO: 3115 - protein, 411 aa, Halobacterium sp.
MYMEAHRTVPVKLDVTKEQADLLHETIDEFRWAANYVVDAAWDGEWAETRKSVLHDLTYDELREQTRLHSNHVQSARDRAVDALESVVAKWSKGEYASLPTFTSPFVEYNQRNATFHDDHASLSTVEGRVTVKYVIPELNRETPFSEYLQSNKWETTGATLHYRRGDFYLHVRTKADVDDPVPAENGTVLGVDLGVENIAVTSTGVFWSADELNHWRQEYVQRRKSLQECGSRWAHENVQAVGRKETGRFEQYLHRVANELVDEAAENGCTVIAFENLTDIRHRMPDARRFHEWAFRRLYDYVSYKTEVRGIQVEQVNPKNTSRRCSSCGFTHGDNRPAQDTFCCQSCGYENHADYNAAKNIGYRLLRNQTGGEGGAPVGVRLNTGMVNANGVKPLPNSARAGVHGEHHGP

SEQ ID NO: 3116 - protein, 403 aa, Halobacterium sp.
VATYRRALSDAFNSGAETRSAVNNIVTDDNLTSYAKDALKSYVPQLYNTYNAKELTDDHPVRFTNRGWELDHSPDRTHEFCWRVPQAGRGTSFWIPLRINPDQRELWDRLYDGDVSVGQFRLRQTRTSWTLNVTVEYSVPEQEPPEEPTPIGFDVGESALLVGCAVERGAPQDPLFIDGGHARYLRKEMFTTLRRLRERNAADWRIDERSNYHQNALTDIVEKASREAVEYAGQFEKPVIVLEDLSYIRESLDCGKWMNRRLHTWAFARLQDRIEDKALDAGIPVEYVNPAYTSQTCHACSHIGSRSGQAEFRCTNDSCWVTTYQADLNAAVNIANRLDPWGESLPLKPAGDDSPRDGSACDSTTGHRETSRRPRQMTLSAYSSETSSLRETSFVGDSTVHGG

SEQ ID NO: 3117 - protein, 425 aa, Haloplanus sp.
MAWEITRTVRVRLDVPDDRKSDLHATNTKFQYCANRTSNWAWRYPDEDCITSKSEAENAIYDDLREETDYLHANLVQKAIKRATNDIDNCVDRLAESENTSKPEYDTFSIVYDKRAATYYRDKVSLATVNGRVECEYDLPEDPEGTPHGEYLLNDDYDFSTSTVHYDSEADEFYLHAAMETEVDASSPEKAEDSKVLGVDCNVNDHIAVTSTGEFIGNADYLNHQRREFEKRRANLQQTGTEAAHWTFQRIGGRFGRWSEDYLHQCSKELVAEAQQHGCTHIAFEDLEQIRERISDGKKFQQWAFRALQNQTEHKAKSVGIVVEKVEPQYTSQQCSKCGCTLEENRDGQHFECLDCSYTVNADYNAAKNIARKLAVKLQRGQKSPAGGAFCQYALKLGVMTVNATDVASDTPVRQNESPPASPPL

SEQ ID NO: 3118 - protein, 418 aa, Haloplanus sp.
MHYAYRYRLHPTEAQRETLDYHRDTCRQLYNHALNEFEQIPDSAGTLNQRVRQVRDQLPNLKDWWNELTDLYSTVAQAAVMRIEDSIKALSQLKQNGYNVGSLNWKAPSEFRSFTYIQSGFEFDKKNGQTVLSLSKLADIPISYHREIPEDVTIKEVCIKKERTGEWYASFAVEGKEEPPKPANPDRCVGIDVGILKYAHDTDGRAVGSLDLQDERERLTREQRSLSRKQHGSNNWETQRLRVAECHQRVKRKRHDFLHKLSNYYATEYDLVAVENLNVKSMLESSGNSRNTASSAWDTFTTMLAYKCNREGTHFVEVEPTGTTKECASCGVESDKPLWVREHSCPACGFGMDRDANAAINILSRGFEKLGLGQSEDTTPVETALPMFTSSGTSEVVDVKRVVETGSPTLKEAASAAE

SEQ ID NO: 3119 - protein, 531 aa, Moorea sp.
MQTMALSNVSEPQVDTECSVQLVLPLWEDNKLQSHQPSVIAGSVVPSKEMTSPGKSRTCTRSSRKRKSSKTSVQDSTTKGKDLKPYWDDLCRVVSSRLLLPVETGLPDSVLNCLSTWSVSTVEKSWFSTSLKVVQNPNSPQIFCPSFTSSLAASTDSESTGQKSKKIRIFLSAEQRSLIRKWFGVSRYVFNKTVKILQNGEVKANWKAIKTGILNNLPEWCKEVPYQIKSIAIKDACTAVREAKKKYQKTGKSNRVRFRSRKNPIQSCYIPKSAVSVKGIYHTKLGGLTFAETLPENRGDCRLTSNNGDYYLTVPHQTTQIKAENQGRVVAIDPGVRTFLTFFSENSTGKIGHGDFSRIQRLCAHLDNLISKISKAKRNQKRRMRKAARRIVLRIQNLINELHHKAARFLVDKFDVILLPTFETSEMSKKGKRKIRSKTVRNLLTLSHFRFKEFLKHKASETGKTVVDVCEAYTSKTVSWTGEMVNIGGSKTIRSKIDGRSMDRDINGARGIFLRALVDTPWLREQLALVN

SEQ ID NO: 3120 - protein, 590 aa, Streptomyces sp.
MYSVPRVTTSAGTRPKLTRRPLTSPASSPIPVPTSRTASGPCSVPAAKVPQAKAERPTTEPAERSMFRVMTTTAWPIASSTRIEALSSRSLTPWSDRKRGLAAQVERISRARAPAMLISRARKRASARARAERPAAGGAAGGGRRVVGESNPWAGAAHHAVLSVGAGSVSTPALVRGNGGGGVGVRRAYRFLLRPTVRQERALVEMLRDHCSLYNGALQERRDAYRHSSRTSVRYGDQSAQLKEIRAFDPECQGRWSFSSQQATLRRLDRAFQAFFRRVKAGGTPGYPRFKGVGHFDTVTFPRDGDGCRWDSTPQDARTRVRLQGVGHVRVHRHRSVRGRVKTVGVKREGRRWYVILTCDEVPAEPLPPTGSRVGIDLGTVHFLTDSSGHRVANPTFLQASAEELAAAQRHLATFPKRTRRRTKKHRAAARKVARLHAKIRRRRLDYHHKQALALVRKHDVIGHERLNTAGMTKAPVPRPDPDRDGAFLANGSAAKAGLNRGILDAGWGQFLRILADKAESTGRRVIPVDARNTSRTCPPEIGGCGHVAKENRVTQAKFACVNCGLVANADHVGALNVKHRAGLVLCAGA

SEQ ID NO: 3121 - protein, 433 aa, Planktothrix sp.
MIVLEYKVKGKQNQYKAIDQAIRTTQFIRNKAIRYWMDNSRELKIDKFALNKYSTTLRNQFPFVADLNSMAVQSAAERGWTAISRFYDTSAKLSDHCKKKISGKKGYPKFQKDCRSVEYKTSGWKLHLTKRQITFTDKNGIGKVKLLGKWDIHTYNVKDIKRVRLIRRADGYYAQFCLNITVADVQPKTGKEIGLDVGIESFYTDSNNYQEPNPKFLRKAEQSIKQSQRQIYKKVKGSSGRRKARKFYAKKHLKVSRQRNEHAKKIARNVCTSNDVVVYEDLSVRNLVKNHCLAKSISDTSWYLFRKWIEYFAAKFDKLAIPVTPHYTSQKCSNCGVIVKKSLSTRTHICNCGCQLHRDTNAAINILNLGKQARDGQSRSNANGLETPTLLGETLAEQVSRLKLESSVSSDGESVNYSKMLKYGDSKPLKTRI

SEQ ID NO: 3122 - protein, 685 aa, unknown
  TnpB Polypeptide
MRTVKHKIKPFNISENSEQEIQFLALARAYQFEKNYWSDQLLNLLNRSHESINIDFSYNQIRDNLVKNKYQSKYNLPARIWKMALKEAYDLHIRTYESQISFIKRDINNKIYKFKPASPSPSLLPKLELDKDESSESSDSRSANSALHIFKEFLYFATNSLFYNYKTFRKFEEEFYSKNFRKARIYQRIQPILQKLLKKAIEKEVFKLNHADEINIYKENIEILKRFLHDKSKTRDLVNEEKRELQLYLEELLNHYCNCLVKAIVQFRNCKPIQSQINPTITLDGDCYDLYSKYDNEAKKNRWFLNIMSLENGRRIKGLELTGFNHAKKIMKHKKSPNLTLSFDRTDMTYYAHFTFKQKVKSSRTIVKTKNSISFTEGEANKTLQQNNNNITANMLMTMLTVGGDFGLTENYTFSDGWVSGREQGQILKHIADKTKNSVAGLQRISENGFFGLEKNNPIGKRNHKNNCFNHNKLLDNINKNYRKKQRKYNRFLQNYKYVLVNEIIEHFTSDSIYGQYTQATHESHAPVKLVFESLDYVSLGRNKSQKRQINLIKGILNVLEDKIKAKSYNLPIEIIYVNPAYTSQTCPNCCFVAKTNRDSKAGKFRCQHCGFTAIDDERYKALTDCKAIFREHLPSEDDFVAACNIAARHSAIPDSMKLRVRDIKYRLMQKHESIKVSCKIFNSS

SEQ ID NO: 3123 - protein, 522 aa, unknown
  TnpB Polypeptide
MSFIRTSKILFKPNHTNQRKLKELTNFLYLCSDALNLYIIHFAKYYRLNELFFVNKKHKNKKIFAESSNLTQLNNIFYEKCFDKDKNEYYFSRKLKYYPDDILNDYVEFVDQKFRDIFSARTLKSIKTQAMGIIRSWVEQILNSYQFGYLNRDKYKKSHRKNIRKYCDDKRKVIKNLIRGADKGDSNLWIDKFEFNSVNCQLLRAGVDDKLFDLSDNSNFDLLFSLHSMYTKEYSKLHYPDRKNKLHIPLCSHKHFNELKSGIVANTECKLEKIVNSFLVSKDGIEVRFKLKSVAKESQFKFNKIGIDQGQRKLFSAVYVNENLNNKNINYCYLIEENLQEQLQSYAHTYKEACDKIARRQKGSKGFKRAQSHRKNLINQAVNILAQIFNFEDDVAEIRLEKLRRLGEGKKKSRKLQAFNYADLRHKLERKCIETNVKLTETSNAYRSQRCSLCGFVHKKNRLNGGEEFVCLKCGFTLDADLNSAINQIAELPQLYHNRTLYPNNSTGFYWLSSGVVLPPTI

SEQ ID NO: 3124 - protein, 393 aa, unknown
  TnpB Polypeptide
MIETIRVQLSPNNKQLTKLFQYAGCSRFAYNWTLSREQENYKEGNKFLVDNELRKEFTQLKKLDEYKWLNKISNNVTKQAIKDACNSYKRFFKGLSKYPKFKSKKCSKQSFYQDNVAIKFTDTHVKIEGFAVNRKKNKQKLNWIKLCEKGRIPTNCKYMNPRFTFDGLHWWVSVSVEVDNNTNSPPTGEGIGIDLGLKDLAVCSDGNTYKNINKSPKVKKIDKRKRRLQRSISRRYEKSRKGKIYCKTSNIIKREKELLKLSRRLTNIRHNHLHQITSEIVKRKPSFICIEDLNVSGMMKNKHLSKAIQQQGFYEFRRQIEYKAKWNNISVIPVDRFFPSSKLCSCCGVIKKDLKLSDRIYRCDCGNIIDRDYQASLNLKQYVENVLKQKSVE

SEQ ID NO: 3125 - protein, 516 aa, Planktothricoides sp.
MPAFPAVDKKQTSIAKLQNYSNSTLTPSSSLISPVVLISKEKDLEPFWSESVKGMSDLLWLPTETDLFVSGLTSEPGCANSTKQKSWFSTKTVYPQNENWLRTSLPLFTSSVANSTDLQNISLQSKNIRIYPSPELEKIWKKWRAACRYCFNQAIAMQRQSTTRISKLKLRNLVMQSDLPQWVKETPCHIRQNAIFDAHQAISASCDAKFRSIRDPRQTIKFNNSNFTKGTWYSQLTKTLKFKASEPIPEQWDYGTQLTYRRGKWFAVFPEPVIKSHTSSRKIIALDPGVRTFLTGYDGDRVIEIGNGDMGRIVRLCQHEYDLISRSTKVNAKRRRSMRKAANRIREKIRNLIDEVHKKAAHYLTNNYGLIFLPRFESSHMVAKSRRKIRSKTVRSMLTWGACAVLGFPQVEQLASHYHFKLILKHQAAKRGCVVLDVGESHTSKTCGVCGHRHTKLGGAKIHKCPPCGSQTPRDANGARNIMLRALRDSFFTVSNDGIAIVTVRALEINVQECSA

SEQ ID NO: 3126 - protein, 415 aa, unknown
  TnpB Polypeptide
MKLTQINVIRKLSKQEYFQLRELCFFSNCLYNVGLYNVRQHFFQDKTFLRYEGNYHDCKENENYKLLQSNIAQQTLKDVDEAFKSFFGAKGKVKKSRPPYYREKGGLYQITIAGNSISIQNGFFTIPLSRTYSGVLNKHKIKIKIKFPERLVGKKINEVKIIPCYGGKYFKIAYCYEIEEENLNLNQENSLAIDVGLDNLATCVTSAGTSFIMDGRKINAINRQWNKRKAYLQAILSKQKQKQYFSNLLRRITTKRNNRVEDCLKKTARYIIKFCIENDIGTVVCGYNPDFKREINLGKKTNQNFTQISFGKLRSQLKTLCKRYAMKYVEQEESYTSKASFLDLDDIPIFDAEKTYTGKFSGKRIKRGLYRSKNDRVINADVNGAANILRKSKQRLNFERLCSGFLANPLRIRVA

SEQ ID NO: 3127 - protein, 441 aa, unknown
  TnpB Polypeptide
MSPNDFASGKCFAITAQQYGSISEYHAVSHPIQRAAMSKPPIPAKREPIRTRCPCGDSAGAAACYLSWVIRSFRYKAKLSPSAIRNAEGQLDLLRELYNAALQERRDHWKQAGVSVGFYSQSKQLPAIKQVRPEFGTIDAQVVENCLRRLDRAFDGFFRRVKAGQTPGYPRFRGRDRYDSMSFRQHGWKLKGRRLTLRGIGTLKLFISREIEGRVKTVTLRRDRCGDWFVAFVCDDVPVRPLPATGEVAGVDVGLTSFLTTSGGEKVPNPRHLATREAAVKRSHRVISKRKRGGSNRRKAVRLLAVRLRRVERARRDFHFKTAHALVQRYDLIAVEDLNVKGLAGGMLAKSVNDVGWGQFLTILSGKAEKAGRMVIAVDPRYTSQECSGCGVRVQKSLREREHQCQECGLHLDRDVNAARNILGRAGTPPEASCPASKAAA

SEQ ID NO: 3128 - protein, 402 aa, Escherichia sp.
VKRLQAFKFQLRPGGQQECEMRRFAGACRFVFNRALARQNENHEAGNKYIPYGKMASWLVEWKNATETQWLKDSPSQPLQQSLKDLERAYKNFFQNRAAFPRFKKRGQNDVFRYPQGVKLDQENSRIFLPKLGWMRYRNSRQVTGVVKNVTVSQSCGKWYISIQTESEVSTPVHPSASMIGLDAGVAKLATLSDGTVFEPVNSFQKNQKTLARLQRQLSRKVKFSNNWQKQKRKIQRLHSCIANIRRDYLHKVTTAVSKNHAMIVIEDLKVSNMSKSAAGTVSQPGRNVRAKSGLNRSILDQGWYEMRRQLEYKQLWHGGQVLAVPPAYTSQRCAYCGHTAKENRLSQSKFRCQVCGYTANADVNGARNILAAGHAVLACGEMVQSGRPLKQEPTEMIQATA

SEQ ID NO: 3129 - protein, 455 aa, unknown
  TnpB Polypeptide
MREKEEQNAIYIETNRTNRKLFDEIYIGKFSKSNERRKHMYLTVKQQVKHLSKEDYQSIKELCHIAKNLTNEAIYNVRQYYFTEGKFLKYEKNYTLLKNSSNYKALNSNMAQQILKEVDGSFKSFFGLLKLAKQGKYSFKDCKLPHYLPKDGYTTLVIGFVRLNGNKLILPFSNSFKKTHKAVEITIPPVLLDKKVKEIRIIPKADARFFEIQYIYEAECVQRNLNTRNVLALDIGINNLVTAVSNTGKTFIIDGRKLKSINQWFNKENARLQSIKDKQHFGKRTTNKQKTIARNRNNKVNDYMNKAARKVIDYCIANDIGVLVVGYNVTFQRSSHIGKRNNQNFVNIPYGRLREKLSYLCELNGIAYVEQEESYTSKASFWDRDNIPVYNDDNPKEYRFSGSRVHRGLYKAANGMCFNADINGALNIMRKSSVVDMTILYGRGEVDTPVRIRIA

SEQ ID NO: 3130 - protein, 427 aa, Escherichia sp.
MHQENTMLPRRISVSLFIDQSIIWPVKRLQAFKFQLRPGGQQEREMRRFAGACRFVFNRALARQNENHEAGNKYIPYGKMASWLVEWKNATETQWLKDAPSQPLQQSLKDLERAYKNFFQNWAAFPRFKKRGQNDAFRYPQGVKLDQENSRIFLPKLGWMRYRNSRQVTGVVKNVTVSQSCGKWYISIQTESEVSTPAHPSASMVGLDAGVAKLATLSDGTVFEPVNSFQKNQKTLARLQRQLSRKVKFSNNWQKQKRKIQRLHSCIANIRRDYLHKVTTTVSKNHAMIVIEDLKVSNMSKSAAGTVSQPGRNVRAKSGLNRSILDQGWYEMHRQLEYKQLWRGGQVLAVPPAYTSQRCAYCGHTAKENRLSQSKFRCQVCGYTANADVNGARNILAAGHAVLACGEMVQSGRPLKQEPTEMIQATA

SEQ ID NO: 3131 - protein, 695 aa, Streptomyces sp.
  misc_feature (592)..(594): Xaa can be any naturally occurring amino acid
MLRGGVDEESGEFLTASVVAERVGWCAGMVAGLLAERWNAADVAALASGVDAGGRGLPSNAWMALRRLGWTVTPPEGVRVNDRIVRMVQEQAGRMLRSAAWRAALTAGVLAAWPADPARRTAAEWDAVRDAVPGGRPLPSSTITSRTRQIQAFTRKNGRLPADVFELEPPPRTPQMLLLSACDGQQATIERADEPGRALLRLQLPTRPDPASYRDWTWVACPIALPPTVPAGAVLHLPTLRPHQSRVRADLAYTHTVPKTTRTGHSIALGVDWGLNTLLSAGAVRLHTDGRITELGAGAQFRAAGVLAKQHRLRRLSEHLHVKAGRYQRLTGGDERHPLAARHAVLADEIRYVSARRSNLNDALAWSAARWAVDQAIAAGASVIYLEDLRSMEARGMGRTMNARLSQQVRGRIVDRMRHVAAEAGIAVVTVPARGTSRLCPRCLTPLRHRKAPDRPTTPGWRWGLCPDRTGCGWQGDRDHGAWRRIAARGLTHQTKTVADRTSGAMAIRSVVDSLETLAVVTPTTPETSREDRSKTGPTRPRTTRPAPRRRRAPSPTRPPGLAGKRPEGHAHTDRTRLPRAAHRHQNVTTTXXXPPPRPRISTTMGNDPTDPAPHGSHTITKLTRDAERLPGAAVRRTLVRVGALRPVPVSARGPPRRSSPWAPPSTPTPCAGASRSRPAPRRCCRCTRTTRRST

SEQ ID NO: 3132 - protein, 391 aa, unknown
  TnpB Polypeptide
MDIEKELLDHPAMMSNVELEEKIGGVITPLSARVRKCLLTQLMGIIGASLEKQRKRKWWIDETLKAGLTPKKALMKKYKDNKPVKPNLANANLELNSICESTDSPEHADGFDKWVTLKSLGMFESFDIPLKMHRRALKFQNNGYKLKNSILVGRKSIDLRWEKEEPTRRTEGITVGADQGKKDVMTFSNGLVTPKADNHNHTLDSILAKMCKRKKGTKAFKRASDHRKNFINWSINQMNWNDIKQIKIEKIYNINFRRSTSRMLSHWTNTLIRDKVLSRGQELGVQVTEQSSTYRSQRCSVCGTVKKSHRKGKAYYCSICGLSIDADLNAAFNHEQELPDVPYELRRMKLNRKGFQWKPEGFFNLSGTSLQSVLAHESTTHDANVINDNIC

SEQ ID NO: 3133 - protein, 356 aa, unknown
  TnpB Polypeptide
VSILTFKFRLKDKTRGKHLARHAIAANQVWNFCAAIQREARRRRALGSPVRWPSAFDLIKLCTGSGALLGLHSDTVQTICRQFAVSRDAKHKCPRFRASFGAKRALGWVPFIPRAAKIDGDAVVYLKRRFRFWKHREIEGVFKAGAFVQDARGRWYVTVQCEVADNLPCGTGELGIDLGLKTLATCSDGATIPALRHYRQHERKLATAQRAGNKRRVRAIHAKIANARRHHLHEQSTRLVRKNRFIAVGNVNAAQLAKTRMAKSVLDAGWSAFRHMLRYKAARRQAVCVEIDERWTSQTCSECGSLGGPKGIAGLAVRDWDCAECGASHDRDVNSARLILVSGRNAALQLTESHPL

SEQ ID NO: 3134 - protein, 405 aa, Lactobacillus sp.
VNQLTTISLKLHLYPTDKQSNLLEATMEQYRLACNLVSNYYFDHIFKPKQADLQKSLYHLIRNKFGLKAQMTQSVFKTVLARYKAVNNQISKKPYKYQDKNTGEWYKEKRDLTWLQKPIRFNRPQYDLVSVRDWSFVKSQLSINTIATREKVNYSAKDFEDYLKQGKLGTAKLVKSCGRYYLHVSCTLDNPKFNKTTLKHVVGIDRGLRFLATSFDEHGEVSFVSGKKILATRRKYKRLRQQLQSKGTKSAKRRLKAIGQRENRWMSDINHQVTKTLVDKYGTGTVFAIEDLTNVSFATEKVAKPRRYEQVSWSFYQLEQFLAYKAELRGSTVVKVDAHYTSQRCPKCGVIDKQARNHGTHEYHCKHCGYTSNDDRIGAMNIQLLGTNWVTNEETTFNQLQANQE

SEQ ID NO: 3135 - protein, 472 aa, Desulfurobacterium sp.
MIVKRAFVFELNRLTEEQEIILGHLTYHAGRLWNQANYLIKNKLAKPDYRDLYNKLKDESLHLRSLQSRSAQIVLDELSRGWNNFFKFLKDLEKFKKKGVETVKPPSYVNLEIPHRVVTWDKTGFKIEGSRIRLSLSKNLKEHLLKKFGYSPDYLWIETGYKDLENLKVLNVQIVPYKSYGQVSFKAVVVYEKEVPEVKLQSNKVLAIDYGISNFATCVVEGNPTSYIIDGRGLKTLLRKKLKKIVNLQKKLDNLKNKGLPTIQLEKKLHRLWKNVKNLLRDYAHKVSNLIKELAVRNGVKTVVIGKVQESKNKKNNLPDLVNQMFKLLPHGKVTEHLKYKLKEAGIEVKLIDESYTSVTDSCGENTGAARTNKGNGRRIKRGLFLSAIKGLINADVNGARNILRKFKKSWFDLVTGLKQVVRIRIYRMNKGISESLLFAGIGVEGSVNLPRGIRAGEISQTPSEAPSVRAE

SEQ ID NO: 3136 - protein, 225 aa, Ochrobactrum sp.
VGLVRECFFTPRLGIANALALSNGAMIKAPARFEKLDRQRRKAQRILARRQRGSRNDARQRRRVAALAAKAGRIRKDFLHRISTSIARHYGAVVLEDLKIRNMTASAKGTVEEPGRMVRQKAGLNRSILEQGWAMFATLLDYKLTERGGYLATVNPAYTAQTRSACGAIDTRSRKNQAVFSCLTCGFDIHADTNAAINILRRWNAPLLPVEALVGGPAKQEPTAA

SEQ ID NO: 3137 - protein, 400 aa, Ochrobactrum sp.
MINRGFRYKLAPCDEQEVLFRQFSGVCRLVYNIALEQRRDWYRQFEANTGSRLNYISQARELTTLRAEYDWIAAVSQTCQQQALRDLDRAKQSFFKGIARYPTARKKGLNDSFRFQGREVEVRPLGTKWSAVRLPKIGWVKFRNTRAMRGHIKNATVRLAPDGWHISFACEIEHVAPTNTNPAVVIDRGIANALALSDGTMIEAPARFEKLDRQRRKAQRILARRQRGSRNDARQRRRVAALAAKAGRIRKDFLHRISTSIARHYGAVVLEDLKIRNMTASAKGTVEEPGRMVRQKAGLNRSILEQGWAMFATLLDYKLTERGGYLATVNPAYTAQTRSACGAIDTRSRKNQAVFSCLTCGFDIHADTNAAINILRRWNAPLLPVEALVGGPAKQEPTAA

SEQ ID NO: 3138 - protein, 406 aa, unknown
  TnpB Polypeptide
MITAYKYKLRPNKSQSHQIDEWLNLLRMQYNYRLGQRFDWYESTRSPINSCSLVSCSIAEIVEQPDYYWQKRDLLNTKKLFSEYEEIHSQVLQDCVARVKKSFDRYLSKDKSGKCSGKPRFKGRGRYHSFTYTQMKQDCIENNRISLPKIGKVKIILHRPIPDGFKIKTAQVVKNADGYYVTLTLQDNSVPTISPDVNLDNSVGIDMGLKDFLITSDGDTVPIPQFARKSERVKKKLNRSVSRKKKGSIRKRKAVKKLSKHHQKIARQRKDFHYKTSKRLLNKYDVIGFEDLNIKGLAKTRMSKSILDAGWGEFLSILQVKAENAGLMAVAVNPNGTTQNCSNCGTHVPKTIADRWHSCHVCGLGMDRDINAAINIKNIAVGQTVIKAQDMPYAIAGFTEKPALYA

SEQ ID NO: 3139 - protein, 277 aa, Okeania sp.
MKSIRTKLKLNNKQKTLMAQHAGYGRWCYNWGLSLWNAAYKDGYKPNVRKLREVFTNHTKPLYPWMKNLSSRVYQYAFRNLGDAFKRFFQGLGKCPRFKKKGKHDSFTIDNCGKPIELNGWNHKLPFIGMVKTYEPIEATAKKITISRQAGDWYLSLAFEFTPTSTPKTTEVVGVDLGVKTLATLSTGVVFPGAKSYKKFESKLSKLQYLNRNKKVGSANWQKAQLKIARLHRRVANIRKDGLHKLTTHLAKNHGSVVIEDLNVSGMLANHKLAKIS

SEQ ID NO: 3140 - protein, 265 aa, Okeania sp.
LNAYDLFTISLSLYRGQRKRIPLTVHSASHQETLEKIINGEAFLGSLKISKSRKGIWYAVISVSMDVPDARLVNDWIEVIIGQNNIAVAALPLSFGKFWTGKQVKSLRRKFQKLRKELQEAKKLRKIKDIERRERRIITHINHVISKQLIQLALDYKMGLRFEDLSGIRQSSKQRKKTKSDASKNRDYWAFYQLELFTRCKAVKAGVPVEYVPTPYTSRSDHRNGVIGKRVKHTFIGYDGYQCNADWNASQNIWSVAWFFLSNES

SEQ ID NO: 3141 - protein, 434 aa, Okeania sp.
MVEKAYKFRFYPTPEQENLLRRTLGCVRLVYNKALAARTQAWYEHQGRISYKQTSAMLTNWKKQEDLDFLTEVSSVPLQQGLRHLQTAFPSECCANTNFFSGRTKYPNFKKKRNGGSAEFTKSAFKWKDGQVYLAKCAKPLPIRWSRQLPQNCVPSTITVKLDPSGRWSVSLRVNDTRDLKLKPVNKQIGIDLGITSLITNSDGEKVANPKNLQKLHKKLRLAQKSLDRKTKGTNNYQKARLKVAKIHAKIKDSRGDYTHKLTTQLIRENQTIVVEHLAVKNMVKNHNPPPSPPGRGARGVGSDANWGELVRQLEYKAEWYGRELIKIDRYFPSSKRCSNCGYVVEKLPLNIREWDCPECGSHHDRDINASINILRMGTRVGDRRKGTPTKQAAGLAVSVCGATVRPSESKSRKAGAKKQKVSNSDARESRAVS

SEQ ID NO: 3142 - protein, 432 aa, Okeania sp.
MYSCQQVLVGKNPELIAILTFLCEQSHKLTNMGIYYGRQLYFKSQKGIGKYDLEKVYKKNNHYKVLHSQAAQQILRTVAESFRSYYGLIKAYSSGKISDRPKIPNYRKKGGMATVSYPSQALKLKGNLLRVPLGNTCKRWFGIDSFLIPMPSNLEFSTLKELRILPRNKCFYWEFIYEKEEVVKPQLNQDNVLGIDHGVNNWLTCVSNVGTSLIVDGKHLKSMNRWYNKQVSTIKENQPTGFWSNRLAAITEKRNRQIRDGINKAARIVINHCLENYIGTIVLGWNKGQKNQIELGKKNNSEFVPIPTARLKERIAQLCSEYGILFIETEESYTSVASFLDGDNLPNYGEKPNDWKPLGKRIKRGLYRSSNNCLINADCNGAANIIRKVSRKLSLDLSRLCRGTLTCPQRVYLWSAKKKQSNMDLSCCVVSA

SEQ ID NO: 3143 - protein, 472 aa, unknown
  TnpB Polypeptide
VRCCCTTRRTSPTTAGCSIGSGMWRWSARRPPRFCAPQLPSTRPWTDRCSTEIVSARPYNGSHEGVRVLTGRKYLLDFTPEQQANAERVSEACRYVWNIALEQRRIYRRKDAYISYNEQSRQFTEARRESDWLAEAPREVLQQALRDLDKACRTHGVWKIHWRSARYWKPTFRCPRGYAIRVERLNKRWARVLLPKIGWARFRWTRAIGGQIRNATVSYDAGRWFVSFCIDDEETAPKCHADPSSAIGVDRGVKAAVVTSDAEFYDRLFATTPERVRLRRLLQRRSRSCIDSRKSKQVRLLIQRHYARTRARRRDFCAQLAHLIAVRYAVVVLENLKTTNMTSSAAGTVEKPGRNVRAKTALNRTILDKGWYLFERALRSAARYTGTEVKKVPAPYTSQTCSRCRHVDAKSRESQAVFRCTSCGHREHADVNAARNILTAAGHAVAACGDLGIGQSVKQEPAIRQRIATVGT

SEQ ID NO: 3144 - protein, 369 aa, unknown
  TnpB Polypeptide
MLKAYKYRLYPNKQQEEQIQKTFGCCRFVYNQTLSHRKEMYETQKESMNKTSCNNYCNQVLKKEFEWLKEVDKFALTNAIYNMDSAYRKFFKEHIGYPKFKSKRDNKRSYTTNFTNNNIEVLFKNNKIKLPKLKWVKAKIHREFEDQIKSATISQAPSGKYFVSVLVETEHIPMESTGCMIGIDLGIKDLLTISDGEKFDNIRTTKKYEDKLAKEQRRLSHKVKGGKNWNKQRIKVARIHEKIRNTRIDNLHKISHKLVSENQVIVSEDLAVSNMVKNHNLAKAISDCGWYELTRQINYKSDWNNRQYIKIDRFVPSSQTCSCCGYVNIETKDLSVRQWTCPQCRTVHDRDVNAAINILNEGLRILKVV

SEQ ID NO: 3145 - protein, 521 aa, unknown
  TnpB Polypeptide
MTYNAVNYAQERGIDNRKGMKEFYRSLKDVNLPSCYKTAAIGRACAVIQSRKKSQKRGVEVNHRKPLRSVVCITSGFFITMKGRLFIPLRRDKYFDVQLNQHVLEVLEGKKKVRSLTITSDALSFCYSEDIKSLRVKKVYGVDRNEKNMTFGDKEGVIQIDMERAVKIRQTTREIVGSLKRNDVRVRKQLASKYWSRANHRTDQMLHAATNFIIETTSRNGAALALEDLTDIRKMYRRGDGQGADYRFRLNSWPHWKTKRVLEYKALWKGVSVIQLTKSDTYGSSSECSACGEKLHNPAKDDSEHRRMLWCETCKVWINRDVNAALNLSKRGLARFTSSRRKSKSRSQQTDLAVREKGLVGEAVKGNPMRTTVILRVDASKLSGGYHRWLTPSSVSGQLNRTRAIILTDKERLGSDDRPLTQEALPLRPRRGLPQGEGGPGQDRRDKGSRENQVPGEDAPGDNKQLYRHGPDGTEAPQCPGDRGGEGRDPDEREDDRRVHSGEVPRGDLLPGGRARLRGGA

SEQ ID NO: 3146 - protein, 521 aa, unknown; identical to SEQ ID NO: 3145
  TnpB Polypeptide

SEQ ID NO: 3147 - protein, 447 aa, Sarcina sp.
MKNCVMYSQKIRHYSHIFRETVDAYRAAVDFFISVCLEEWDDISMQGSAKAKMNRLEAMTHPTSHRPAVPYCFDAHDKRFCKFPSYLRRAACMEAIGKVSSYRSNLALWEESGEGKCPGLPKAGHAYPCLYRDNMYLEGEGYTAQIKVYIRNTWDWITVSLRRSDVDYVKRHCGSMKQSSPTLQKRGKEWFLDFMYESSRAITSKPVRDQRVLAVDLGINNACTCSCLLSDGTVAGRRFLRLPAEEDCLRTAAGRIKKAQQHGNRKTPRLWAAAKGINDDIAVKTARFIMETAAEFHADVIVFEHLDRKGKKRGTKRQRLHMWKSAYVQSMVESKAHRAGLRVSRICAWGTSRLAYDGSGYVKRGKESERTGGCYSLCEFPTGKVYNCDLNASYNIGARYYIREITKSLPERERLALEAKVPEAARRSTCTLSTLISLHAVLAAEAA

SEQ ID NO: 3148 - protein, 381 aa, Azotobacter sp.
MASRAYKYRFYPTSEQVELLARTFGCVRFVYNSVLRWRTDAFFQRQEKVGYVQASARLTAIKKQPELAFLNEVSCVPLQQCLRHQQAAFKNFFEGRAHYPSFKSKKHRQSAEFSRSAFRYRDGRLFLAKCDAPLDIRWSRPLPSEPSTVTISRDSAGRYFVSCLCELEPETLPVVPQTLGIDLGLKDLFVTSEGERFGNPRHTAKYVSRLALAQRRLSKKQLGSKNRAKARRKVARIHAKISDCRMDRFHKLSRRLINENQVVCIESLAVKNMLRNQKLSKAIADAGWSELVRQLEYKGGWSGRQVVAIDRWYPSSKRCSCCGHILGRLPLEVRSWTCPECATEHDRDVNAAINIKAAGLAVLALGENVSGMGQVSVSCPR

SEQ ID NO: 3149 - protein, 328 aa, unknown
  TnpB Polypeptide
MEATKKMLRNTPAMYKKAYPFLKEVDSLALANVQMHLEKAYKNFFRDPKIGFPKFKSKHRSRKSYTTNVVNGNIQVEDHQIKLPKLKWIRMKKHRDIPEKYCLKSVTISMEPSGKYYASLLYEKTDCENQAEELDYEDAKILGIDYAMHGMAVFSEDIQRENEGYFRKSEERLAREQRKLSHCVKGSNNYYRQKKRVALCHEKIRNQRKDFLHKLSHEMAETYDVVAVEDIDMKAMSQCMHFGKSVMDNGYGKFRELLEYKLTWRGKKLVRVDRFFPSSKKCCKCGSVKKELKLLDRVYFCTCGNRIDRDLNAAINIREEARRMLLAG

SEQ ID NO: 3150 - protein, 374 aa, unknown
  TnpB Polypeptide
MKAHRAILVELPRDKCDVEYIKRLIALTNLAYRDFEVLAPDLPKNIQYQLYGFKSYKNSLVFGTVPKRWFARTWIPLTTLRIYSDGSMKGNRSALVVLDFRSNVIRLRQVCKNEPRYVVELPMPKWVIERMNEGGDVRYAMIGVKDNEPYLALVAEREAEPYQPSNCMLVVDVNAWNNGVAWGLIKDGSIIRWKPERPRLSEIEGLYNLSVRLSKKYGKLKRLELGKTEEGERLRREIKRVRRKLYAKLRDYVQKLVHRLVRKALRHKALVIIDNMTEESRKELLEEKIPSGLRKLYLMYTRRFVKLLITQLKWYGVPYEFKKLPSTVCPFCEHELTQLPGRTMACPNCGFKAPRDKVPIYWALRGIQLRKGVM

SEQ ID NO: 3151 - protein, 419 aa, unknown
  TnpB Polypeptide
MKRLQAYKFELMPDGEQSRAMRQYAGCCRVVYNKALAWQSAQYQVDNTFKFGYTKIANLLPLWKGELTWLKDAPSQTLQQSLKNLESSFRNFFAKRADFPKFKKKGMSDSFRFPQGFKLEQHNNRIFLPKLGWIRYRNSREMLGFAKNITVSQKCGKWYASIQTEREVEQPEHATTSIIGVDVGIARFATLSNRQVFEAVNSFKQKQTRLARYQRALSRKVKFSSNWKKQKGKITQLHSTIANIRKDYLHKTTSTISQNHAMIVIEDLQISNMSKSAKGTVEAKGRNVKAKSGLNRSILDQGWFEFRRQLEYKQVWAGGQVIAVNPRNTSRTCPCCKHVSAGNRQTQAKFECVECGYTENADLVGAINILAAGHAVLACGVTLQQGRTVKHEPTEGIRKSSREPVGIPPALAGGGCQHS

SEQ ID NO: 3152 - protein, 437 aa, Planomonospora sp.
MLTGRKYRLELDFGQKLLAERIAAACRAVWNTALEQRRAYRRRGAFIGYAEQCRQLADAKKDFPWLAEAPAQALQQTLKDLDQACRRHGTWTVRWKTRTRWRPSFRFPTPKHIPVQTINRRWAQVFLPKIGWVRFRLSRPLGGTVKSATVSRDGAHWFIAFLVEDGQCTPQVHARPETAVGVDRGVITAAVTSDGEFFDRRHATATGVSCPEPPKEGKAERAAEQGYLTPGETERYLRLQRRLARATKGSGRRRRVVRALGVIMGRVRRRRADFTAQAAHRLTRDYAHVVFEDLRVRGMTASASGTAEAPGTRVAQKSGLNKAILDKGWYGLEVAVRAKARYTGSLVSTVPAAYTSQTCSVPACGWVDAKSRESQALFRCTACGQVEHADVNAAKCVKIRGQAAGPVVSGRGDCGGARVGEASSTRSTARGAPRVAA

SEQ ID NO: 3153 - protein, 390 aa, Halomonas sp.
MLKATKVRLYPTSEQVAFLNAQFGAVRFVYNKALHIISSQYKRHGTKLRAKKDLKPLLAVAKTSRKYHWLKDYDSIALQQGCINLDRAFQNFFDPKLPARYPRFKRKHGKQSSYHCTSIKAGDDWIKVPKITSIKARIHRPIAGKLKSITLTRTTTGKYYASLLVDDGMEAPAPLQTVDTVLGVDMGLTHLAIDSTGRKVANPRFLKRARANLRRKQKALSRCQKGSRGRAKARRKLAKAHERLANARADFQHKLSRQLIDDNQAVVVETLKVNDMLKNRKLAKHIADASWFSLIEKLDYKAREQGKHLVKIDQWFASSKTCAGCGHKVESMPLDVRRWDCPGCGTQGIDRDVNAAINIRQQGILTLKAEGLSASALGGLRKPGHAPAAA

SEQ ID NO: 3154 - protein, 377 aa, unknown
  TnpB Polypeptide
MTLNKLSAEVWNHCIDLDKEYVKQTGNFMTMGVMQTAVKGYNNLHAKGISFVYHKYLAARESMWKSIKAKHENSNKVKLPYRYKKYYNTGWDYQSIKIDKDKGTIEMSRSITVIDGKRRRLQPICCYAKTIPDNIVEIELLYRNGLYLAIKYKTDDNITLIQSTNSASIDLGEIHAITSIDTQGHAIVITGRKLRSIKRLRDKEQGKIRSKISKCTKGSRQYKKYSRALYKIKNKSDKCILDCVHKITKLYLDYCLKNRISTIYYGDLDSCTRNTHKDKRANKIVGQKLNEWNYGLIMQQLENKLSRYGIQLVKISEAYTSQTCPVCGKHNHPTNRVYQCECGYKQHRDIVGAINILNNNAGTKIQSYSSKEYLRIA

SEQ ID NO: 3155 - protein, 542 aa, unknown
  TnpB Polypeptide
METKAPSRKKYIGTSGVSSKKHSDFITVECLLAFDTDEDKKKVLGLIRKFSSMVRFAYKRLLEKTEERALRKILPIRYGLNTRYSTAAIFSAQQALESCLERKQNPKKLIFGSRAFFEQLKKKHLTGVKREKLRQKWEEIRYGVLYAIGQKAAKGNLNLRLVNLNSQWHLRINLGNGEYVWAKVIRSAKRKTDKWVSFISDLEHAEKTGEWFPYTVRLKLRDGKIYAQFSREDKIPEVSITKDNGVIGIDINAYPFHLALAHTTKNGNLERFEQISLYDLLEGSSNKREYLSWQAAHRVVEIAKRVRKAIAIENLARLPKGKRGDGLPKLRRKLQKWAYKGLLQKIEIVARRNGIQVIKVNPAYTSLIGKLKYAPLYNIDKDIAGAYVIARRGLGFKERLPKNYKELLKDADFLSYTIAKIEDKIAKLKQEIREEKNEYKRNRLKSALWKTRKELDTLLRYLRGSGESESATQQAVNRELKPMRGGAQALQKSWQVLAVAFAFSCLESLRDFSPLKRVQISRDWAGVAHKASPSHLGQGTIM

SEQ ID NO: 3156 - protein, 420 aa, unknown
  TnpB Polypeptide
MKNTTRHTYNINFRDDKQGTVLNLSRESAEVYNQSIDLFWNNLDNGTFLSKFDLQQYVNIPRTLLLSESYIGSIQLAHTALATYFAALKVFKVNPEAFTGCPRQPIGDKQTQLIIFKKDAIRFKNGYLLLSTKDKPLKFRWNINKGLPVFASISWKRETGWKLNLILEEEKDILEFVEDKLMSIDLGVKRIAATYDLERVITYSGKVVMSLNRLRNKINGETQSKLSGLKKHSRRYKKIKQANRQVAKRINNKISDILHKYSRTIVNDCIKNNIKHIIVGDCAGIHDGPKFTKETNQKIVQCPEQKLLKYIKYKFEEIGGVVLTTSEAYTSRTCPCCGKVKNSSPSGRTFKCQGCGFIYDRDGVGAINIYQKFASDCETIRENVSLENVSFGSSDLDVVGGLTPPIGWKYASSRDCLIRI

SEQ ID NO: 3157 - protein, 373 aa, unknown
  TnpB Polypeptide
VRKTFKYRLYPTKAQAESLRVQLSEACGLYNAALQERIEAYATHRKSINYYEQANQLKEIRAAGHLGLANYSCCQDVLRRLDQAFQAFFQRVQRKQKAGFPRFKSHRRFDSITFPSYGDGSKMQTSGHLYVQGVGNIKVKLHRPLHGKIKTVSVKRECEHWYVCFAVETSVQPLPASEAAVGIDVGLTSFAVLSDGSAIENPRLYRQAQNKLRRAQRRVARRKKGSHRRRKAVLLLKKIHQHIFKQRNDHQHKWARKLVNQFGMIFVEDLKVKGLAGGMLAKAVQDASWASFVAKLAYKAEEAGRLLAKVDPRGTSQRCPCGAKVPKKLSDREHVCPKCGLRTTRDHASAREILRLGQSLHTLTKPEVRVCVV

SEQ ID NO: 3158 - protein, 278 aa, Rhodococcus sp.
VQLRYQFRLYPTPGQQTALARAFGCARVVYNDALAARERARRDGLPYLADAELSRALTEAKKSPDRAWLSEVSSVILQQALADLNSAYRNFFASITGTRKGPRLGSPRYRSRHDHRQSIRFTKNARFQITDGRALRLPKIGDVEVRWSRELPSEPSSVTVIKDASGRYFASFVVAVDDEPMPEMDTEVGIDLGLATFVVLSNGKSVDSPNSSAAPNVDSARRNSICPASRKDRRIGPRPASRLPGHTRRSGLPDSTSRTSSPRRSSARTKRCTSRTCA

SEQ ID NO: 3159 - protein, 329 aa, Rhodococcus sp.
MISSIRLRCLSENTRCRYFVTKTKWAWRAKIQCLPVRISPYSAINQCYCRDVQLRYQFRLYPTPGQQTALARAFGCARVVYNDALAARERARRDGLPYLADAELSRALTEAKKSPDRAWLSEVSSVILQQALADLNSAYRNFFASITGTRKGPRLGSPRYRSRHDHRQSIRFTKNARFQITDGRALRLPKIGDVEVRWSRELPSEPSSVTVIKDASGRYFASFVVAVDDEPMPEMDTEVGIDLGLATFVVLSNGKSVDSPNSSAAPNVDSARRNSICPASRKDRRIGPRPASRLPGHTRRSGLPDSTSRTSSPRRSSARTKRCTSRTCA

SEQ ID NO: 3160 - protein, 372 aa, Richelia sp.
MLLSIKTKLKLSKEQELIMCKHAGIARFTYNWGLATWNNLYKDGLKPNKYILKKFFNNHVKPEYSWIKEKGICQKITQYAFDNLGTAFDRFFQKKADYPRFKKKGVYDSFTIDAGGKPIPVGGKSIKLPTIGWVRTYEGLPHATCKSITISRTANSWFIAFAYEKTHEPTVKEHDLVGVDLGVKVLATLSTGVVFPNPKHYKTHLSKLKRLSKTFARKPKGSNNRYKAKIQLGKHHAKVANLRKNTLHQITTYLCKNHAKIVIEDLNVSGMLANHKLAQIIADCGFHEFKRQLEYKSKKFGCEIIIANRWFPSSKTCSNCGHIQDMPLKERTYDCKNCGHSIDRDLNAAVNLSRLAKACSRSVRSANKLAEG

SEQ ID NO: 3161 - protein, 290 aa, Streptomyces sp.
LVRFRSSSPVFIGVPASGQAASGGRRRLRRAGLRTTPTPAAEQAAELSRTFGCVRLVYNKALEERTRAWYSEQRRVSYVQSSAALTEWKKTGELAFLTEVSSVPLQQALRHLQTAFAHFFAKRAKYPRFKSRKKSRASAEYTRSAFKFRDGQLTLAKMAEPLDIRWSRPLPHGCAWYGRELVVIDRWFPSSKLCGACGTVAARLPLNVRVWTCEHCGAVHDRDVNAARNILAAGLAASAWGDGVRPQRESSRTGRSSVKQEPQRASGARKGPGSPRLIRGAGHSLSRSRR

SEQ ID NO: 3162 - protein, 543 aa, unknown
  TnpB Polypeptide
VTARTTSGLRPIAAPFVTVGPTGVAVRDRLKGLTPEDEQVLRLVGEHLGGLAGRDLRARCAAGPGHDARAWAARKRGLTGGSSSRWAGSITKATHDQWALARRGQAAHLDDLAAGIAAVRHRLSLPVGQKGTRRAPGGYRTRQEWFAKSRRSATLQARYTAVAADRDAGRVHVVRGGRRLANIRHHLGDAGLTESDWRDRWQAARRFLAADGESGKRYGNETIRLTPDGQVSIKLPVPLAHLANSPRGRYVLAARVAFAHRGAEWRDRVEADRAVAYRIHRDVGRGRWYLTASWQRPAVVTIPLETARARGMIGVDTNDDHLAAWRLDTHGNPVGRPHRFGYDLSGTADHRDAQIRHAVTRLLHWARREGVAAIGIEDLDFTAEKTREKHGRRKAFRRLISRFPTARLKARLVSMAAEAGLAIVAVDPAYTSKWGAQHWQQPMTAPNRRTTRHDAAGIAIGRRALGHPIRRRTAPPLHHRSDDAGHRTVQTGPGTRECDGTRHPATDRAPRGTPPGRDRTREPSLPNTVRGRRAEHEITHAQC

SEQ ID NO: 3163 - protein, 543 aa, unknown; identical to SEQ ID NO: 3162
  TnpB Polypeptide

SEQ ID NO: 3164 - protein, 449 aa, unknown
  TnpB Polypeptide
MTPHGSARWAGTALRGNDDQYRLARMAQANHIAGLRAGTAAIARRLALPTRDRGGRGYANQAERYQKQRRLQVLTARLAAAEVDRAAGRVHVTCGGRRLLHARNNLAEAGMTLPEWRERWDAARDVIEANGSSDEPHGNLTITVEPSGRASIRLPRPLEHLANAPRGRYVLDATVAFPYRGQDRTDRIAGGGAVAYTVARRPGRDGWYLTAAWSMPAPGAGGTPGAGGTPGAGGTPGPAAGRTAGVDLNDGHLAVRMLDGHGNPVGAPRRIWFEVSGTGKRRDAQVRHAITRLIRWCVAHGIDTIAVEDLDFVDARRTGRETMGRGGRGRAFRRTVAGIPTGVFRDRLAGMVAHTGLRLIAVNPAYTSTWGGQHWAAPYGVTRHEAAATVIGRRARVPRMTDGGPGRDASKVARPTVTERGHPAGQPLPRHGRPTVADSVCNGRKDASP

SEQ ID NO: 3165 - protein, 449 aa, unknown; identical to SEQ ID NO: 3164
  TnpB Polypeptide

SEQ ID NO: 3166 - protein, 411 aa, Halorubraceae sp.
MEYSYRYHAYPTQEVAEELEYHIDVHRQAYNYTRYEYTHVDADTIGSAYKHHNRLTDWKDKFDLFKEVHSKALQKTVTRFYQNLSNLSEQKKNGRKVGMLKWKSPTEYQSMTYSQSGFKLKNTSGRHATLWLSKIGDVKIRYHRDIPDKATIKEVTIKKETTGDWFVSFGLETDDVDLPEKPLLGSLDTTNSVRIDFGILNYIHTTDGKAVDWLDLEEEYEQLRREQQKLSRNEKGSNNYEKQRLKVAKVKRHIRRKVLDYQHKLTTWLVAEYDAVFVEDLNVESMLQADGNARNKQDVAWRQFITLLEYKGELYGTRVVQVDPRGTTKECAFCGVETDKPLWVRDHSCPSCGFECDRDSNAAMNVLQRGFSKLGLGWPESTPVETALPTDTADYQRVSAKCVAETGSLGA

SEQ ID NO: 3167 - protein, 464 aa, Microcoleus sp.
LIKPYAYGFKNFDKTAEFIPQEHDTIINNKKVILLFGCQQSLIHTSKDIQAIIEYLCRESNKVFNCAVYYARQIYFKAHKYVTKAELDNELKNNRHFQAMYSQAAQQTCHSVFEGFKSFKALNKLFRQGKLVEKPRPPKYRKRGLNIVSYPKQALKLIGNNIRIPLGSKVKAWFGMDSFTLALPSNLEFKDIRELRLLPRNQCFYAEFVYKLETVEAHLNPDNALGIDPGMDNWLTCVSTTGTSFIIDGKHVKSLNRWYNKKVSTIKDNKPQGFWSKKLAHLTEQRNRQMRDAVNKAAILVINHCLENNIGTIVFGWNQGQKHESNLGSKNNQKWVQVPTARLKERISQLCEQYGIRFVETEESYTSKASFVDGDYLPSYGEKPDNWKPSGKRVKRGLYRTALNWYINADCNGASNILRKVSGMLGINLSGLSRVPLTAPQRVSLWSAKKTRRDGVLTRPEVSA

SEQ ID NO: 3168 - protein, 305 aa, unknown
  TnpB Polypeptide
MYKEVAYMHTVVKTYKFKLYKNKKNKHLDDSIDIAASIWNYCIAMHRHYYKAFGKHLSANKLMKHITKVKKTLHPEWKALGSQAIQDVVQRVDRSYKAFFDHMKQKRHGRKSPPSFKKRSRYSSFTLKQAGYAFHNGNKVTIMGHEYKYCKSRPIEGTIKTLTVKRNALGEFYLIIVTKQECNDIYPRAGKAVGMDFGLKHFLNLDDSSVIDSPQWYKASLKELQVAHRAVSRCQKGSQNRRRAIRHLERVYQRISNRRRDWFFKLANQLVGEYAIICIEDLNLDGMKRLWGRKASDQRRMEIPQ

SEQ ID NO: 3169 - protein, 597 aa, unknown
  TnpB Polypeptide
VITYETLVLSADGFPDGVSVDSLLSEVAELEARCAHAYFVARHVKGMAWGALKRDMPKRFGLTNRQFSSVGYVVDGMAKGIAEGMETRRDMLAGRIKSAETEIGKLQKKCKASVEKDKKHREWRAKSKSVELEEERPPKLRKLPKALKGFRPDHAAADRRDWRFRIHQKKRYVGKLKNDLVALDADIKVEKVRLCFGGRKSFRAQYAPNADQAKWLAEWRRVRASSIFCIGSRDETYGSQTASWLGDGGLRLRIPPALEAKYGKHVVLRLKGFRRPGASAEIDRIAALASLREDGNMFLAPDLAKKLDGTLKLLPGAQALSWRLVRRKAKRGDVWVAMASFEQAPAEIVTDSRDGAWGLDFNPDLVAMARIDWRGNIVQRATFPLDLKDKTNDQIKAILGDAAAWAVELAEGYRVPLVAEKLDFSAKKATLRERGARYAAMLSSFAYATFQALTDRRAAARGVAVRRVNPAFTTIIGVAKFGVGYALTSHHAAACAIARRGLGYSERIARRIARRGENTGQSKVGSTIAVSRSTFPLPVRTRGKHVWSDWRRFAKQQGQVRRKAYTLVDEADGRWKKRRSDPVGYGGGNRPAVSRRR

SEQ ID NO: 3170 - protein, 597 aa, unknown; identical to SEQ ID NO: 3169
  TnpB Polypeptide

SEQ ID NO: 3171 - protein, 392 aa, Streptomyces sp.
MVGVQLRYSFRLYPSAGQRSSLARAFGCARVVYNDALRARETARSEGLPFPKTGDLSKTLITEAKNTPERAWLGEVSSVVLQQSLRDLDTAYRNFFDGLKGRRPRMGAPRFMSKRDTRQSVRFTANARWKITPGGKLSLPKIGDVSVKWSRALPSRPSTVTVVKDSAGRYFASFVVETGPDEALPDMAGEIGIDLGLTHFAVMSDGRKISSPRFLRRAEKKLKRTQQALSRKQKGSANRAKARLKVARAHARVADARREFHHQLSTQLIRENQAISVEDLCVKGLARTRLAKSVHDAGWSAFVSMLEYKAARYGRTFAKVDRFFPSSQLCSACGFKDGHKPLAVREWTCANCGTVHDRDINAALNIRTEGHKVAAGRAETVNACGGAVSPAA

SEQ ID NO: 3172 - protein, 371 aa, unknown
  TnpB Polypeptide
MFKAFKFRLYPNKEQEILINKTLGSNRFIYNYYLNKRIEMYVNDKKSLTYNQCSSNLPQLKKQFEWLKEIDSVSLQQTLRNLDRAYQNFFREIKKGNKKQGFPKFKSKKDNRKSYRTNVSNNNIRIDGNKIKLPKLGLIKFAKSREVIGVIKNVTVSQVPSGKYFISILCEFPEPIKLPISKINIGIDLGIKDFAITSEAEIIDNPKYYQKYENKLTKLHRKHSKKQKGSKNRNKARIKVVRLYEKITNTRIDFLQKLSTRLINENQIICLESLDIEEMKKDYKLAKSISDASWYNFTSMLNYKAIWYGREISVIDRYFPSSQLCNICGYKNVEVKDLSIREWICPECGSHHNRDINAAINIRNEGMRLIG

SEQ ID NO: 3173 - protein, 377 aa, unknown
  TnpB Polypeptide
MNLFMTEKAFKFRLCPDENQKIQLAKTFGSCRFVYNNYLAKRIELYKTEQKSMNYNACSADLTILKKEKEWLKEIDKFALQNSLKDLDRAYQNFFREIKNGNKDQGFPKFKSKHNHECSYRTTLTNNNIRIEGNLIKLPKLGLVKFAKSREIQGRILNCTITKTCSGKYFVSICCTEVDVVEFENNKNIVGIDLGLKEFAITSEGEIIDNPKYLSKLEDKLKKTQRKLSKKKKGSKNRNKARIKLNIVHEKITNQRNDFLQKLSTRLIKENQIICLEDLSVKNMVKNHKLAKAINDVSWSEFVRIIQYKSLWHDRIVQKVDRFFPSSQLCNVCGYKNIEVKDLSIREWDCPECNSYHNRDVNAAINIRNEGMRLLSA

SEQ ID NO: 3174 - protein, 182 aa, unknown
  TnpB Polypeptide
VEIPDAQIANNSNEGIGIDLGLKDFAIVSNGKTYKNINKSARLKKLEKQLIREQRRLSRKYENLKKGEVTQRANIQKQKLKVQKLHHKMDNIRTDHINKTIAEIVKTKPSYITIEDLNVKGMMKNRCLSKAVASQKFYEFRARLKAKCDENGIELRIVDRFYPSSKTCHHCGSVKKKFKAFR

SEQ ID NO: 3175 - protein, 438 aa, unknown
  TnpB Polypeptide
MKMLEIVSKSNNLYNVLDTDDGVVESCSFLDIISVIQSGVDIKGVSLVSNEYVFEIDGLKAHKVMKGYKFRLYPNKEQQTYFQKCFGCCRFLWNHMLADKIAYYDEHKERLDTQPPVYKADFPFLKEVDSLALTSEYRDLNTAFRNFFRDASVGYPKFKKKHDNHKSYTTYNQKGSISIVDKYVKLPKIGYVKMNQPQPVLGSIKNATISQVPSGKYYISFNVKIWVQTLPYINKELGLDLGIKELLITSDKEHFENPKTLYKYEKQLAKLQRQLAHKKKFSNNWHKQKHKITLLHEKISNIRKDNLHKISHKLIMENQLIASENLKISNMIKNHHLAKSIADASWYELTRQLDYKAMWYGRLYVKIDTYYPSSQTCNCCGFKNPITKDLTVRDLTCPQCGTYHDRDENAADNILAEGKRIVEVRKTINSSDEFQIAS

SEQ ID NO: 3176 - protein, 441 aa, unknown
  TnpB Polypeptide
MKLISSYAVEVKHINKMFRNTIKIYNDAISFCVKAYEEYWETIKTLETGNKERFAFADALIHSTKSNKAIYPEFDIKFYKMPSYLRFSVINTALGYLSSYHSNLDNWEHSNNNNKAPTLQIRLNKLPTFYKGNMYFDSFKDDTVKLKLFINNDWNWVEVKLKHTDVISIQKHMINTKMSVPTLEKKNKKWFLRFAFDEKVEINKTKLEEQLILAVDLGINTDATCSVMNVNGAILAREFINLTSDKDQLYHTLNKIKKVQQKYGSNNITKLWRYAKFHNEELAHKIASAITNTAIKYDCDVIAFEYLDMKGKKHGSKRQELHMWKKNTIQRIVKHKAHKNGIRVSHICAWNTSKLAYDGSGEVLRGKDAYLDTYELCKFSNGKIYNCDLSASYNIGARYFIREIQKILPAKVWSDIVAKVPECQKRTQCTYNTLLEINRVA

SEQ ID NO: 3177 - protein, 418 aa, unknown
  TnpB Polypeptide
MLLSQKTSVKLTENAANFIGHMCYAAYKLWNVCNYERYHYKELGLKEYPDWYYQKKAWKDSLWFKQLPSQTAQEVCKLLDKSWKSFYVLKKSGGIENPNPPRFKRANMPITYMQNGIVHQKGTEKVRLSLAKKLKEYMGTAYDIHENFLSLENKIFKGMDVIKQIKIYPPEKGRCRIIVIYEIPDVEPLPDNGRYLSIDPGIHNLLTCFDAANGKSFIVGRKYLSFCHRYYKEIARVQSQWYSQQVRRGIRYPKSSRHIKKLYEKKKNVIRDYLHKITRYLVEYCKREKIHTVIMGDLKNIRKEKRLGNITNQKLHELPFDKIKQILSYKLKKEGICFILQNEAYTSQCSPVSPEVKKEYSQKENRKKRGLYKDTDKVYNADAVGAYNILRKYLKASGTEKELSLTGIERTMIVKVAV

SEQ ID NO: 3178 - protein, 310 aa, Microcystis sp.
  misc_feature (18)..(51): Xaa can be any naturally occurring amino acid
MLPKAFTITRSRNGKIGXXXXXXXXXXXXXXXXXXXXXXXXXXXXXXXXXXRIRPSREYPSGFEPKQARIIQKASGFYVSVSFQSTELVPDMTVGKTCLGIDAGIESFVATSRGDLIKAPRFLLKVQSKLKLLQRRLKRKTKGSNNWLKLQDKIARLHEKVANTRRDWHFKLAHYLCDFADNIFVEDINFVSWSRGIVRKQSLDSGIGSFINEILPFVVWKRGKYYLKVDKNGTSQDCPNCGAITGKKSLSERVHRCDSCGHIEPRDTASAKVIENRGKNAVGLTVLENACGGDLTGVVQLNLFDLVKSL

SEQ ID NO: 3179 - protein, 239 aa, Cupriavidus sp.
MTASTARRPTASGGCSGIDMGIARFATLSDGSFIAPLHSFKRHEIALRKAQRAMSRKTRFSNNWKKAKARVQKIHSRIGNARRDYLHKCSTTISQNHAMVCIEDLQVRKMSRSAAGTTEVPGSNVRAKSGLNKSILDQGWFEFRRQLDYKLAWNGGYLIAVPPENTSRTCPCCGHVSADNRRTQEHFACVECGFEANADLVGAINVLRAGHARLACADTSPEVGASGQEPPEATIQFSV

SEQ ID NO: 3180 - protein, 362 aa, Nostoc sp.
MQKAFKVTLIPNHNQEVLINKTIGCVRFVYNRFLALRKELYSTEQKTLNYNGCSQQLTLLKKEIEWLKEVDKFALQNSLRNLETAYKNFFADFKKVKGRKNLGFPKFKKKYGCKQSYKTNLTNGNIQIIQNRLKLPKMGWVRFHKSQDIAGTIVNVTVTRTSSGKYIASILCQTEIEKHSQVAQNIGLDLGIKSYLVTSDGEVVDNPKYYRTQKRKLRKAHKKLSRTVKGSRNRAKVKIKLARTYERITNLRDDFLHKLSTRLIKENSIICIEDLRVANMVKNQKLALSISDANWSKFVAMLEYKALWHDRIVQRVGTFYPSSQTCNCCSFINPLVKDLRLREWSCPQCNSYNSRDKNAALN

SEQ ID NO: 3181 - protein, 469 aa, Lechevalieria sp.
VIVHQAYRFALDPTPAQARALSTHCGAARFAFNWGLALVKAVMDQREAEKSYGIAPADLTPPLRWSLPALRKVWNQVKDDVAPWWAECSKESYSSGLDSLARALNNWTTSRDGKRKGRAVRFPRFRSKRRARRSCRFTTGGVRVEADRRHINLPKLGRIRTHESTRKLARRLEAGTARVLSATVRLEGGRWHCSFTCEVQRADPPPAQPDVVIGVDLGITHLAVLSRPLSGVTNAVGAVPNPKHFARASAALRRKSRAVSRKHGPDSRTGARPSKRWERADQRRNRIHHRVANLRRDGLHKLTTALAAGFGTIVIENLNVAGMLSNRRLARSIADAGFAEIRRQLAYKTRWRGSRLVVADRWFPSSRTCSDCGAAKAKLPLHIRVFRCDSCGLEIDRDLNAARNLAALAVSSTTGTGGTGDLEPPCSNGRGADRKTRALCGQAAVKRPDRSADLPVGCPAGASRIRSCR

SEQ ID NO: 3182 - protein, 387 aa, Sulfobacillus sp.
LKKQFNAQKYAQFPWLRNVHRDAHAQPFADLADAWHRFFTGQNERPVFKKKGKVPDSFYVANDKFQIAGCRVKLPKIGWVRLRESLRLPGKILGARVVREADQWFLAVSVAVPNAVYTRSRCGDGIEGVDVGVKTFATLSTGEQIPGPNAYRRALRRLKMRQRRLTRKMQAAKVSMGFAPQDPLPKGTRLPRSRNWDKAKISVARAHLRVVNLRRDFLHKTSTRLCRENQAIGIETLSVQGMLANHRLARAVADQGFGQFFAQLRYKAQRYGTRLVEADRWFPSSKRCSTLGCGYLKTDLTLQDRTWTCPVCGITHDRDHNAAINLQRLATATALPGATWSARAAAMPEEADIGGKVKPVRHEATPESTLSASGQEEFGGHQRSPNL

SEQ ID NO: 3183 - protein, 722 aa, unknown
  TnpB Polypeptide
VNEFILIELFGLALIISFVASQGGISGAYLLVPAQIYILGALSPVVSSTNLMYNVIATPLSIYRYLRERRVVKQLALTLALGGMAGSIAGSYIRVFLMGAEVFRVFVDAVLLILGIELIMTVRAVRARKQLVTAVKVLGVKSGRLFFLFSDKVFSVSLPIILALSLIIGVVGGIYGIGGASLMSPILLTAFNLPVYVTAGATSIGTLAGSIPSLVTINDKPRPLGWGCFTVWGLSTRFIKPCSAVGWLVPGLVPPRGGSVSSGELVGRLPTLFTNPGTLSSSKSSNVRTVRLRLLPSGAQERRLRKIADATARLWNELNYARLMQFREGGEVDFEGTGYEFYHRYRDRLGVNAGQVVNLNNNAWKSYFELSRLYKQGKLPKFMNKPSPPGFWKDKVLGKRILRILVRNDRYYLEPINNGEGYLVLKDWGLRIKYAGRIKWSGKQGTLIIKLEDNRWFAYVPITIGEKPARSNPKGYIRGIYEKIQIDKPRGSNKAFIDIGLNNLFAVVFNHSDTAILIKGSTIKAEYYWWKREIKTYQSIRDWLRNHGFESWRKFHAYWLHAKYKQHERLRHYYRTAIRFLARTMHEMGVDEVFIGYPYLVSQDYGNEYNTNIWWFNKIIKWLSEVLQEYGIRLNVVNEYGTSKQCSICNMEHENGRVKRGLYVCKLTGIKINADINAARNIAKKAGYKTPIPRKILSYIVTSNGVKPITPKEGVTTETPQG

SEQ ID NO: 3184 - protein, 345 aa, Microcoleus sp.
MLLSFRSALIPNNKQITAFKKASGVARHSYNWGNALIQDLLKQREFDKTLKIPSAIDLHKRLVAEVKSANNWYYETNKNVPQKALGDLRQAWERCFKKTSKQPRFKKKGQKDSFYLESGTKAKPGINNDGKRVKLPSIGWVKLTEPLPLTAVHNCVIGRTANRWFIAIKYEVELPEVATSRPVVGVDIGIKELAVCSDGKVFANPKAYRRMSKNIKRKQRDVSRKVKGSINRAKSIEKLSKLYAKVANIRKDAIHKLTNYLAKNHSEIKIEDLNIKAFLKNHKLAGAISDCGMYEFKRQLEYKTIKFLSKLTVVDRLFPSSQNLLLQLWKTSTQNALKESCLPLS

SEQ ID NO: 3185 - protein, 450 aa, unknown
  TnpB Polypeptide
MQQLYTYETELKPKYNQEIINYFNDYTILFNKIIRNVWQYYNHQDVLISQKAKLNNLLQRQFGISRRTANSIMLHVSGRYNSLKALKKYELKRNDSKIEKLDDLISELALKLDVMAMKAHHNQLKEKELIKYRGLKAKFVAIKKAKDRLQKENIRVQKQLNDKHFSLCFGSKALFNHQYLEADHQNWYNKFKKARDGSILFVGSKDETACNSQCQLIYNKKNNQFTIKLRKEYAYQTNNRDKHLYGQVYFSYGNKELQEVLKTKKSPITYRIVRRDDRYFLQATITIEKNDIAEQDRYMGIDFNKGFIALSEVKEDGNLIDTDKIYYRFKQGNKTTNDLRQLAHDIVIRCRANNMSLAIENLDFGKKKSKTSKYKKDEKYNEMLHSLAYSRFDEYVSRACFSNDVWLSRVNPAYTSCIGKKKYNEIKKLNTHTSASYVIARRGMRFKDAA

SEQ ID NO: 3186 - protein, 390 aa, unknown
  TnpB Polypeptide
MLVFEFSAYAKSAQFVAIDEAIRATQFIRNKCIRYWMENPKVSKYDLNKQCAILAAEFPFANNLNSMARQSAAERAWTAISRFYDNCKKKVAGLKGFPSFQKDNRSVEYKTSGWKLAEDRKSITITDKIGIGKLKLKGTRNLNFYQPDQIKRVRLVKRADGYYVQFCISVDREEVILPTKSTIGLDMGLNHFYTDSNGEQIENPRFYRKAEKSMKRSQRLVSRKTKGSSNRRKARVKLSRIHLKISRQRKDHAIKLARCVIQSNDLVVYEDLRVKNMVKNHCLAKSISDAGWYQFRVWLEYFGKVFGRATVAVNPAYTSQECSSCGVIVKKSLSTRTHVCQCGCVLDRDENAAINILNKGLFTVGHTGRSALDAGNAHGDSSSTITGANL

SEQ ID NO: 3187 - protein, 436 aa, unknown
  TnpB Polypeptide
MTSSNIINYVVSKTIKFKVRELRKGKKELIDLALNNSINAIKDFMELSLKNKTTSNKKLHRLGYKEIVRRYNLSACIVHQSRNKASEIIKSWKSNKRRLNKNIPLPEPRAQRIRYDNVVFDVIKTENKEFQFWASILVAKRKRIYIPLTVNSNWQKSYLNDLIQEKYKQGSADLVKKGNDYFVHIVIKKEVEFKPQENYNPIGIDVGINNLAVVNVNGRSKFFNGKRAIAKKKHLNKVKAIYQNRNNLKMLEAIKGREQRYFNHINHNISSWVINQAKLLNNPVIVMEDLTYILDTTRVRKKQRYIHQTWSFRRLQNMIQYKALWDSIPIVYINPEYTSQVCPKCLSTNKRNKHNYKCRYCDYEANADHVGAVNIRKKFLESISFEDMASINNAIGFSFKETQTMNIGKAKKYATKQEGVSPPITEVKGIRNTYIL

SEQ ID NO: 3188 - protein, 318 aa, Burkholderia sp.
MADGFRPERADDRQQQGARYPLRHVNATCEQYAKSRSQHRRPYLRYRGRKSLGWVPLKGRDLKREGDAFRFAGNTFRVFNSRPLPEGKIKDGTNFAQDARGNWFLNIVIEIPDVPARPIRSGVGIDLGLKDFATLSTGEKLPNDRFGRRAADKLAKAQRARKHKRHIAKLHAKVANARADFQHKLALDLVRRFDYIAVGNVSAVKLARTRMAKSVYDASWSSFRDKLRYKAMAHGATFEEVDESGSTQSCSSCGSKDSTTRPKGIAGLRIREWTCSGCGVVHDRDTNAALNILRCGRASPGVGIASLWGGEDVNVAPD

SEQ ID NO: 3189 - protein, 390 aa, Cyanobacteria sp.
MEKAYSYRFYPTSEQESLLRRTLGCVRLVYNKALHERTQAWYESQERMGYNQTSSMLTGWKKQEDLEFLNEVSCVPLQQTLRHLQTAFTNFFAGRAKYPSFKKKRNGGSAEFTKSAFKFKDGQIYIAKCIEPLPIRWSRQIPSGCEPSSITIRFHPSGRWHVSIRFDDPTIKPLPATDKAIGVDLGINSLIVTSNGDKISNPKHLKKYYHRLRQAQKSLFRKQKGSKNRDKARIKLAKIHAKITETRKDHLHKLTTQLVRENQTIVVEDLAVKNMVKNPKLAQAISDASWGEITRQLNYKCLWYGRNYIEIDRWFPSSKRCSCCGYIVEKMPLNIREWDCPNCGSHHDSDVNAGKNILAAGLAVSVCGATVRPEQSKSVKAGAKKQKPKS

SEQ ID NO: 3190 - protein, 178 aa, Symploca sp.
MARGDGGMGGWGDRGMARGDGGMGRGGDELYERIGNIRKNYHWELAHNLCDQAGMIFAEDLNLKGLAKGMLSKHCLDAGWGQFLQILSQCCLKRGVFFHNVDARKTSQICPNCLVETGKKTLAERVHSCSNCGYTTDRDVAAAQVVAIRGLAAVGHTVKMLSEGKFIGIPEMKESPLL

SEQ ID NO: 3191 - protein, 168 aa, unknown
  TnpB Polypeptide
VGKFAHSQILLDTQHPPAFRYGECQLKKGDIFTRCHEKVSNRRNDMLHKLSTTMVNENQIICVEDLNVKGMLRNHHLAKSISDAAWSELFRQLGYKSAWAGRVVVKVPTFFPSSQTCGNCGYQNKEVKDLSVRHWTCPVCGCTHDRDINAANNILKKGLSLLATPAAS

SEQ ID NO: 3192 - protein, 372 aa, Brevibacillus sp.
MQITITATIKIKPTVEQVELLKQTLHAYRSGCNYVSSLIFETKEMSQPKLHKMTYDVLRTEYLLRSQMAQSVMKTVIARYKSTKSNGHVWTKNAFKKTEYDLVWNRDYSLIQGLFSVNTLQGRIKVPFELKAMERYFDGSWTFGTAKLVHKYGKFFLHIPMTKDIPESDFHTVKQVVGVDMGINFTATAYDSQGKVTFFTGKHIKHKRAKYKHLRKQLQMRQTASSRRRLKKIGQRENRWMTDVNHTVSKALVEGYGAKTLFVVEDLTGVRNATERVRVKNRYEYVSWAFYQLRQMIEYKALMHQSKVMAVDPRYTSQTCPKCGHTKKANRNKKMHVFCCKACHYTSNDDRIGAMNLQRKGIEYIVEVTTGA

SEQ ID NO: 3193 - protein, 400 aa, unknown
  TnpB Polypeptide
MQLGFQYRLNPNKTQEKALRQLLRVACRLYNDALTERKDVWEQEGRSVTYLEQALKLKTLRQKNKELALLNFSAAQHVLRRLDKAFRRFFQGIKNGQKVGYPRFKKPHRFRTLEFTYGDGVKIVHDEYGRLRLRVQQVGSIRIVWHRELPRGAHIKQVWLTLKADGWFATFALEVPDEVVRNPLPPTGKAVGIDVGVENLLALSDGTLLDNPRWMRKTEEKIATKQRILGKKVKGSKRWRRMRGQIAKLHLKIGRQRRDFYFKLTAWLVKKFDLICVEDLHVKGLARSTLRKSVHDAGWALFLKQILPDKAWRAGREVISVPASGTSQTCAACRCSVPKDLSVRWHDCLRCGFSVHRDINAAMLILKLGLEQARRDDWLVQPSCLQEAEGKSRRSFTEML

SEQ ID NO: 3194 - protein, 442 aa, unknown
  TnpB Polypeptide
MKVFSMTQRIYYKDLEPDAELIIKKDLELYNCMLHKAFKICFDRAYKDVTYSETDQRMIKSFYGTSDYFPLSAINEAKALVKSLKCLEKENQDMIKTRLKKIDKKIKKNEKQLKKALKEKEKLINRSKKKKYIEEDYLYEVQVLDPNIKRLKSVIRNLKFRRNRNEFKLKRKMPSVCFGGKKNLKNGDLETYRFKRSRRMLITGRRQGKYSNNLFKLNVDNDMLTYRSTQKDIVFKVQFHKYKDELYARVNEKHNSPDKAVAYELMDYGEYFIVKAIFEKHMNLPKTNTLYGAIGIDINVDHIALCETNKDGNIVLIKKYPIHKENTKNKRNEELYQLAIEIMEQCKSKKKSLVVEDLNFKQLKTRMLYRPKKQNKTLSSFAYKKIIEKVERKCLMNEVDVIKIDPRNTSKIGKEKYTKIKGLSVHYCAAYVINRRGMGFVD

SEQ ID NO: 3195 - protein, 372 aa, unknown
  TnpB Polypeptide
MLKAYKYRIYPTEEQKIQLAKTFGSCRFVYNYYLNKKIELYKSEKKSFSKYDCNNNCNQQLKTEFIWLKDIDKFALTNAIYDLDSAYQKFFKEHAGFPKFKSKHNHNYSYTTNFTNNNIEVDFNGKIKLPRLKWVKCKTHREFVGKIKSATISQAPSGKYFVSVLVEQLEATPLPQNNNVYAFDLGLKEFLIDNKGNHIERPRALYKYEKRLKKLQRQLCKMTKHSNNYKKQTRKIAKLHEKISDIRNDFSNKLSMQIISDNQVIISEDLQISNMIKNHNLAKSIADVGWSDFMRKLSYKAQWYGRTYHKINTWYASSQTCSECGIINKKVKLLSVRDWVCEACGSIHQRDENAAKNILNQGLKELGLEKVS

SEQ ID NO: 3196 - protein, 140 aa, unknown
  TnpB Polypeptide
VRAIHAKIKNKRKDAQHKFSTALVERCAAIFVGDVASSKLVKTKMAKSTLDAGWSQFKTMLEQKCQRAGVVFEVVNERYTTQTCSCCGAISSSSPKGRAGLRIREWTCVDCGTAHDRDINAARNILAAGHRRLAVGIPAL

SEQ ID NO: 3197 - protein, 386 aa, Lactobacillus sp.
MTIKTQVVKLKVNKTMQKHLDALCDYRRYCWNKGLETWQLMYEAHTLNKKDNPSPNERRVRNELVANKADWQYDLSARCLQLAIKDLANAWKNFFDKSQPDWGMPSFKSKKAPRQGFKTDRAKIVNGKLRLDRPRSISKEDWFDLKSYEALKMSEVKVGSIFKEKDSYYAALPYEEEISSKAKTYQKTAVDVNVGHFNYTEGQINVLPAKLQKLYKRIKHYQRMLARKREVNGKSAVKSNNYFAVRIKLQRDYRKTANIQNDLLQQFTTKLVDNYDQIVIEDLAVKQMMMTHVASKGMQRSLFSRFRQILTYKCDWYGKELILADKTYPSTQRCAKCGYVKTGNEKITLQGNKKHGTKHNEYICYECGYSNDRDENAVLNLLALAK

SEQ ID NO: 3198 - protein, 414 aa, Streptomyces sp.
QLRYSYRAYPDVSQCRALAQAFGCARVVWNDCLRDRKEAHVAGLAYVKSAELSRLRITQAKRTEERAWLTEVSAVVLQQSLRDLDTAYKNFFDSLKGKRQGRKVGPPRYKSKKDTRQSIRFTANAFSLQDDGTVYVAKVGNLKVKWSRRLPAAPTSLTVVKDSSGRYFLSFVVDTEPDILPELDTDTGIDLGLSHFAVLSDGRKIGSPRFLRRAEKKLKRMQKALSRKAKGSNNRAKARIKVARQHAKVADRRRDWHHKESTRIIRDNQAVFVEDLSVSGLGRTRLAKSVHDAGWSAFVGMLEYKALKHGRTFAKVDRSFPSSQVCSACGFRDGPKPLHVREWTCGECGTVHDRDHNAAGNVLFEGRRIVAAGRAETLNASQSAGKTRMKVPAQRVEAGSPRKGQPTQAGIPGL

SEQ ID NO: 3199 - protein, 402 aa, Streptomyces sp.
MLSGRRYRLELTAEQSKQCQEFGDICRAVWNTGLEQRREYRRRGVWMDYVPQTAELAEAKLDHPWLKTAPAQVLQQTLRDLDRACREHGTFSVRWRSKMRWSPSFRFPAGKSIAVERLGRKWGRVKLLKLGWVRFRWSRPLGGEIRSATVSRKGGQWFVSFLVDEGREAPQKHALPDTAVGIDRGVTVAAVTSDGTFHDRQFIAPGETVRYRRLQQKLARQKKGSTNRRKTVAALGRIAGRAADRRTDFCAYTANRITACKALVVLEDLRTRNMTASASGSLDQPGRNVRQKAGLNRAILDKGWHKFERALRNAARHTGSQILLVNAAYTSQTCNRCGHVDAKSRKSQAAFECTACGHRDHADVNAAKNQRDAGLAFPACGDLGTSRSPKQEPVSRATGRNP

SEQ ID NO: 3200 - protein, 388 aa, unknown
  TnpB Polypeptide
LLAVKAVQQNYTPTSQLLGLLEEFRQMVNCCIRVGLAENVTGLKSLSLKAYRQLEEYDAMSYYKLCAISKAAGILKNYRKAERRGKPVKQPYAHRPQLTTCYGFKIRNGSLLLPIKPRSKIRIPLNHHTLQVLSETGLTSRSVTLTATRMTIAYSKDVPTLEPSGLLGIDRNLDNVTLADSNGSIIRHNLAEATEIKAMYREVKSHLNRNDSRITQRIYAKYGARQRNRVRQLLHRTSKQIIAEAKRSRSAIVMERLTGIRKLYRKGNGQGRDYRARMNGWSFAELQRQVEYKARWEGLLVIYVKPHGTSVKCSICGSKTKPEENRQLKCSSCGFMVDRDVNAARNILAAGKRALRFGAVAPATEAMVAVQRRPVDAGELTDRHPPKS

SEQ ID NO: 3201 - protein, 372 aa, unknown
  TnpB Polypeptide
MCEYAYKFRIYPTDKQEQQILRTFGCCRYVYNYFLALRRDTYAVESKTINYNECSRQLTLLKPALPWLEEVDATALQSSLRALDTAYQNFFAKIKKGEKPGYPQFKSKRSPDQKYKSKNNRGTIRIEDGKLRLPLLGFVKCRISREVKGRILSATVSRNPSGKYFVSLCCTDVEIEPLPHTGAMVGVDMGISSYAVTSDGIEYPNHKYFAQSEKQLARLQRQLSRKTKGSNRRSKAKAKVARLHEHIHNQRQDMLHKLSTQLVREYDVICIEDLAPSDMVKNHKLAKDISDAAWGEFRRMLTYKADWYGKEVVTVDRFFPSSQLCSCCGAKWSGTKDLSVREWTCPDCGARHNRDHNAALNILNEGLRILAT

SEQ ID NO: 3202 - protein, 400 aa, Nonomuraea sp.
LIGVSRYRLQPSPAQEVMLLEHCGHARYVWNLAVEQHRHWKPGRRSAPGFAEQCRQLTQARAENGWLRAGSIIVQQQALKDFAQAMANSFGGTHRRPTWRRRGQGEGFRIVAVKSGDVRRLTRRVGEVKIPKVGWVRFRWSRAVPEGVKSYRVTQDTAGRWHVAFAAIPEPIPAPAAGEVVGVDRGVAVSAALSTGELLHTPALRDPEKARLLRLLRRLARAERGSKRRGRVKVAVARLKARERDRRKDWVEKTSTDLARRFGVIAVEDLKIANMTRSARGSIDAPGRNVRQKAGLNRGILANGWGRLVARLEHKAPGRVVKINLAYTSQRCSACGIVDRQARESQAAFRCRSCGYAANADVNAARNIAHAAGHAVSARGGPPLGEPMNREPQRDLLLVR

SEQ ID NO: 3203 - protein, 237 aa, Nonomuraea sp.
MLPHAGRTHSCSRMQVGRPERRQAGAVSRKRGPDRRTRQQPSQRWQRANAARNRAEYRVAALRRDGIHQLTTALARTYGTIVVEDLNVAGMVRNRRLARALSDAGFGEIRRQLAYKTAWNGGRLLVASRWFPSSKTCSSCGAVKAKLPLRVRTYVCEGCGLSMDRDENAALNLAALVERTVAGSGPETRNGRGADHKTPPGGAGGHETSTPHRTPTARIRRGPSPTPGESLTILETQ

SEQ ID NO: 3204 - protein, 405 aa, unknown
  TnpB Polypeptide
MVKRREFQRAYRFRFYPTPEQENLLRRTLGCARLVYNKALEARSEAWTSERRNVSYSDTSSMLTGWKKTDELSFLNDVSCVPLQQALRHLQRAFSGFFKQENAYPTFKKKTHGGSAEFTRSAFDWNGRELRLAKTKEPLPIVWSRTLPKGAEPSTVTVSLDPAQRWHVSILVKEHITTLRRKSNAIALDLGVDSFAVTDQGAVIENPRHLKKSLESLARAQRSLSRKRKGSNNHRKAQLKVARINARIADQRRDFLHKLSTNIIRDNQTVIIEDLAVRNMTRRCKPKTDPEHPGQYLPNGQSAKSGLNRSILDAGWAEFRRMLEYKSEWYGRQLIVIDQYYPSTQLCSTCGAKTGPKTLDVREWTCPACGCHHDRDGNAAKNILAAGLAVSVCKDGRIKDGLSQE

SEQ ID NO: 3205 - protein, 386 aa, unknown
  TnpB Polypeptide
MKMRAYKTEIDPTEAQIEKIKRTQGVCRFVYNLFIATNRERHRQGLKYMSGYDFSKYLNHEYKEAHPEHSWIWEVSSKAVKRSIMNADSAFRRFFKEKKGYPNFKKKHGRPVSIYCPRNGADAKNVEVQRHRIKVPTLGWVRLKEYGYIPVGYPSSITITYKAGRYYASVLYETDDSVPASCTADGLGVDVGLKTFATVSDRTVYENVNRSKNVKRARKRLKREQRRFSRKLKKRKKVKPAAGTTSNLDRQRVKVQRAYHRLECIRKDFVNKTVSDLVKAKPGYVTIEDLNIQGMMKNRHLSKAISESLFYYFRSTLVRKCNESGIEVRLADRFYPSSKQCSSCGAMKKDLKLSDRVYRCPVCGLEIDRDLGAALNLKDCTRYYVA

SEQ ID NO: 3206 - protein, 244 aa, unknown
  TnpB Polypeptide
MKQKRAYKYRIYPTDEQKHNFACTFGCVRFVYNWALRQRTDAYFQRGERWYYAHMSNALTAIKKQDEYAWLNEVSSVPTQQALRHLDKGMLNFFEGRAKYPTRKKKSHEQSAEYTTSAFKWDKGTLTLAKQKDPLNMVWSRPLPKDAKPTTVTVTKDGANRYFVSLLVEEDIQPLPVLNKMIGLDLGMKSMVITSDGQTYGNPKFFAQDEKKIAQAERRKARKKKGSKNRHKARLKVARDPHPF

SEQ ID NO: 3207 - protein, 437 aa, Okeania sp.
LNPINLQILFFVQNSKIDVIIKKIKVTFIVMRTAYQYKLRPNKDQIATIEFWFDLLRRQYNYRLGERFSWWEENRCPVNACPLIMPIPQLKDNPDYYSQKKDLVNTKDKFREYKRIHSQVLQDCIKRVKLAFDRWFKTDKNGKKLGKPRFKGKGRYHSFTYPQIKQDCIEENKINLPKIGRVKLIQHRPLPEGFNIKTVTISRKADGYYVTLSLEDKSVPSFNCDVKATSENTLGIDMGLKDFLLTSEGESVPIPQYYRSSQKRLKTLQKRLSRKKKGSKRWLKAVKAVAKQHKKVADKRQDFHFKTANELLLKADVIAHENLNIKGLAKTRLSKSINDAAWGQFLTILTVKAENAGQKTIAVNPQNTSQDCSNCGEKVPKELSQRTHSCPHCGVVIDRDVNAAINIKKRAAGHSVLKARGVRRGTGTTKREAHAIP

SEQ ID NO: 3208 - protein, 438 aa, Okeania sp.
LKARYKYRIYPNHVQITKLNQLFGCCRYVWNQSLAHCNQLYINGIIKPSYTDLTKQFITQAKRELLWLKEVASTPLQQSLKDLDQAYKNFFNSCKGKRKGLKVKPPKFKSRKSKQTARFVGANYQINQDKIYLPKVGKIKIFWSRPLASKPTSLTIIRDSANRYFASFVIETNPESLPKADNSIGIDLGISTFATLSNGEKILAPKPLKKNLKKLVKFQRRFAKSLPGSKRREKRRMKIARLHAKIQDIRTDFLHKLSTNLVRKYDTIVLEDLNVSGMVRNHKLAKAISDLGWRQFRTLTEAKCEKYGREFRVINKWEPTSQKCSCCGFRGGKKELNVREWTCLNCGAKHDRDVNAAINILEVVQPKTKVDVIKTEALETPVQLSLFVSVAPPQEAVVAGGQPETLNKTRSRRNSTRKKVVDGNESSTRPESIQLRLF

SEQ ID NO: 3209 - protein, 461 aa, Actinopolymorpha sp.
MVPVVIFPKQSAPRFGPGRLVVDGLDATVCRKATFAFDPAPAQERGLQALLGACCEVYNAGLQERRDAWRRANKSVSLFDQFTQIKGLRGVRDDVLAWGIQPIRGALRRLDEAFAGFYRRIKAGQTPGYPRFKSHRRFHTVCWDEPTSWKVDTDQRRLRIQGVGTMRLPKSARRQLARLADSGGVPVTLSVTRQRAGGTSEHPKWVWRASVGFKDVAPVRVTPQLSDGLEPAGGRLVGADRGVTVTLATSQGQLHVMPGWMRNARERIVGLQQQQASTVKYSRSWRTLSTRIAREHRKVAQRTDNWARQTARDLVAGAEVVALENLHLQAMTRSAKGTIDNPGRNVAAKSGLNRARCWDGWRHGCASKRKKLDAAPGWSTPRTPPSNAPAAATPTRTSGRAETCSCASAAGIPRTQTSTPPPTSPTEAEPAKPPGDKPAHHHYHDARHAYVDDEPKQHGTG

SEQ ID NO: 3210 - protein, 455 aa, unknown
  TnpB Polypeptide
MKHYAVREVELNHMNPGLKRVLKDTLREFHAAVRLLGEIARKEWDDLKDRTSQDQLTRMEQLVHTTKKNPAKYPEFDTVFYKYPSYYRRSAIHAACGQVSSYQTRLEQYQQKRYETISNGKRFRERPPVLNLETASCPSLYKGQMYQKEGCTIQLKVFIRNTWDWITVTMPSRDRKCLDQALASGGKLFSPKLLSRKKKFYLQFPVLFPQSSFPDLPVKDRTVLGVDLGINRGAVCSVVHASGTVRGRYFDPFVRERDRIGHQLNRLKKAGRQSGKGQTLASCYTKLDGMKKNYTRKLAHWIVQRAKENQVYGIVLEHLGKMRGRGRKKDRIHHWCKRKVFSLVKGMALRYGIRVFEINPRNTSALAFDGSGRVTRDPDNFSLCTFASGKRYDCDLSASYNIAARYLIRAFMKSLPETAWSQCVAKVPALAKRTDCTLSTLWELYRLAGTGKAAA

SEQ ID NO: 3211 - protein, 412 aa, Candidate division WPS-2 bacterium
VASRFDGQLRWLHKVRLYPTCAQERALVTMLRVTRELYNALLMQRRDAWTTRRTGLSSRDQYAQLTELREAEPRFASVFRECEDAVLHRLDLAFAAFFRRLKRGETPGYPRFKPAARWNQLEFPHGDRALKLDIVQGRVRIPGAGAVRLRKGRTVPEFGRAFLVTKNGRWYAVFEAHRPPSPLPASGCSVGIDRGIRVLAALSDGSTIENVRPGSRRRAVVARHQRALDAATRKDAAGRLLNRHDRARMATARRLARAKEREANARREWLHQVSREIVLRFDRIALEALNLRGMTRSAKGTIEKPGTNVAQKTGLNRSLLDAAFGMLATLIREKAEYAARTVIDVDARYSSQTCAACEHVCKESREGPRFAGVRCGHAVDADVNAAQVILLRAESPPMRAPGTARGRQHDAA

SEQ ID NO: 3212 - protein, 162 aa, unknown
  TnpB Polypeptide
LAESAVFRENIPPDRFKADVIVFEYLEMQGKISGKKKQKLHLWRKRDIQKLCEHQAHRNGIRVSRVSARNTSRLACDGSGAVVRNPENHSLCTFRTGKQYNCDLSAAYNIGARYFIRELLKPLPETERSSLEAKVPAVKRRTSCVYADLRRLSQELGSCQAA

SEQ ID NO: 3213 - protein, 469 aa, unknown
  TnpB Polypeptide
MAVLRTETFIHELPLRVTPAQERELNVRFDCARQLYNACLDAALKRLQSMRESRAFRRTCVMKRGSERTDAFRRLDEKFGFREYDLHAVATHVKNACHIGDHLDAHVAQKVASRAFAAVREYAFGKRGCPRFKGRRGLHSLEGKSNATGIRWRDGAVHWMELVLPAILDSRDKWGVEAHALACRVKYVRIVRRLLRGRVRYYAQLVLEGTPLRKAKHIVKRVVGLDLGPSIIAAVGENTAFLEAFCPTVERDERAIKRLRRKMDRSLRTANPDCYDADGRVVKRPRRRSKRYHKLQASLAELSRREAAHRRTEHGRLCNRVLAIGNIVKIEKISYRAWQRSFGRSVAKRAPGLFVSLLRRKAENAGGEVVEFPTRSTRLSQTCLCGRVRKKPLSLRQHDCECGVHAQRDLFSAFLARFVTMERGEAVVDMSRAINAWRGAEPLLSHAVSTTRNNKRRLGRPLSASFTLV

SEQ ID NO: 3214 - protein, 364 aa, unknown
  TnpB Polypeptide
VKLVLKIKLLPTAEQAELLLETFREANLACNAISEVAWEKRIFNKFKLHYQLYDSYKGKFGLSSQMLVRAFTKVAHAYKLDKKTKRAFKTMGSITYDARIMTYKQDHVVSLWCIGGRQNIRFICHNPDYIPYLKGEADLVYKKGKFFLYQTLDIPGPAAQDISGFIGVDFGLTDIAVTSDGGKHSADWMNQYREKRQKVRSSVQRKGTRNSKKLSKRLSGKERTTSAIINHTISKSIVKSAKDQRKGIAIENLTNIRFSSKPRNKKFRTKLGRWSFAQLRSFLEYKCRLNAVKLVVVEPGYTSQTCNYCRYIGKRTNKVFKCTNKNCKVDVIDADFNAAQNIALLGVAVNLPERYDRYSCTVHY

SEQ ID NO: 3215 - protein, 416 aa, Microcoleus sp.
VYHAVKVRIYPTPEQEQYLAQCFGNCRWLYNRMLNLTTTTYKETGKGMSKAAMDKLLPGLKTEFDWLGIAYSQSLQRVTFNLSAAFVNFFEGRTKYPTFKKKGSKQSVSYPQNVKLMVSEKSIKFPGTLGYVKTKFHRSLPDGKQGCVTISQNTDGTYFASILFEVSKQTLEPVNDAIGVDLGLKDFAITSNGVKHNQPKKAQKKLQKLERNKKRKQRKLARKKGYTNRRKAKLLVAKVCSKIARIREDFLHKLSRKIVNENQVIVTENLSVKNMVKNPNLARSISDRGWGKFCTMLKYKAEQLERNYVEINRFFPSSQLCSETLLPIPQLQKGWDSLKVRYVDCPNCGKQHDREINAAINIRNEGLRILALGTSASAFGGGVSPKRSGRKKSTIVEAIPREERSLHHTAPCSWCR

SEQ ID NO: 3216 - protein, 387 aa, Ruminococcus sp.
MKKLLKSFKTEINPTPEQKIRIHKTIGTCRYVYNFYLCHNKALYDKGEKFMSGKGFSVWLNNEYIPNNPDKAWIKEVYSKAVKRSIEDGCTAFTRFFKHQSDFPKFKKKGKSDVKMYFVRNNPKDCVCERHRLKIPTLGWVRIKEKGYIPTTKDGYVIKSGTVSIKADRYYVSVLVELSDNKTADNSNEGIGIDLGLKDFATVSNGKTYKNINKSAKLKKLEKQLIREQRSLSRKYENLQKGESTQRANIQKQKLKVQKLHHRIDNIRTDYINKTIAEIVKTKPSYITIEDLNVKGMMKNRHLSKAVVSQKFYEFRIKLQAKCNENGIELRVADRWYPSSKTCHCCKNIRKDLKLSDRIFKCDCGYIEDRDFNAALNLRDAMTYEVA

SEQ ID NO: 3217 - protein, 287 aa, unknown
  TnpB Polypeptide
MKVNCAYKFELILKPEQRAKCAQFVGNCRYVYNKAVEIQLRQLETKQPFVSYKELASQLVGWKKDDSSLWLSESPAQTLQQGLKDLDRGLMRFKQHKGGMVQFKARGDGDSFRLPQLLKGDFDEANARIRIPKIGFVRYRKSRDIQGKVKNLTISIEARRWYVSVCTEIENFQPQATRDGEVGIDLGIVRTVQLSDGTVYRLDVNEIKKLEDRIAVYQKLLERNKTSRQKLAKLGKAADFGKKVPSRKRRRLKEKIANLVPTHSQYPQGLHVQNCQSHSAEVWLGGN

SEQ ID NO: 3218 - protein, 416 aa, unknown
  TnpB Polypeptide
MITTYQYRIYPTTKQRLTFESTLEACRNLYNQALDQRKQAYETTGKGLTYLVQANQLTPFRQEFPFWASLHIDILQDTLRRLDKAYNAFFRRVKSGENQGCPRFKGKGRYRSFTYSHLAKTLIIPIKGRLARIVVPKVGHVKIRLHRPLPNGKIKTLQILRKASGWYANITIEVDDVAKVRLADSRNGVDIQSLVGVDVGLESFLTTSDGEKIENPRHLRKTEKKLKRLQRRLSQRQKGSRRRAKLRERLAKCHERIVNQRRDFHYKTAHRLYSQYDAVAVEDLQIANMVKNHHLAQSISDAAWGNFVLVLGSKAENAGYHLMKVSPNGTSQRCSSCGEIVKKSLSIRTHRCDSCGLVLDRDHNAAINIKRVASTLRGGMLAVNSPETLSTERQSRESRKTLDGRVPLQASPFRAG

SEQ ID NO: 3219 - protein, 288 aa, Silvanigrellales sp.
VGKIQIRGMSRNGGTPKTMEVLKKGEDWIISVTYQCVAERNSGEHIHAFDWGVTTFLTITNEAQQISVVENPRFLRTASEKIEKVQQKLSRKKLRSNNRKKVKISLSRIHKKVANKCLDFMHKTSCKIVESSKRIITEKLAIKNITKVPKAKIDEFTGAYLPNGAARKAGLNKSILDTSPSQFLQMVRVKAEEAAYELEELETKKLKPSQRCASCSDIVKKNLSQRIHKCHCGFSISRDVNSALVMLKFELGSLKIDEKIETRCRGPALCTGTLSGVLNHETPSIITQ

SEQ ID NO: 3220 - protein, 391 aa, unknown
  TnpB Polypeptide
VKTSYQYRLKPTKEQAEKIDKTLDMLRCQYNYQLAQRFDWYEQNRCFVDRCSLVVCHIPELKNKPNRFSQQATLTKLKKDRPWYKDIHSQVLQEVPKKVEIAFDRWLKGDANDKRSGKPRFKGKGQYKTFTYPQFKKEHFQKNKITLSKIGDVKVIVHRQIPYGFDIKTVSVTKKVDGYYVSLSLEDKTVPTIKPDFDANNIVGIDVGLIDFIVTSDDDRIAAPKFLRRAERKLKSAQRRVNRRKKDSNRRKKAIIKLSKQHKKVANTRKDFHFKTANNLLKKYDVVAVEKLNIKGLAKTRLAKSVNDAGWGQFISILTVKAENAGLKVVAVNPNGTSQECSSCGQKVLKPLSQRMHNCRNCNASLSRDLNASLNIRARGTHALKAQIMSL

SEQ ID NO: 3221 - protein, 305 aa, Hungatella sp.
MDADRAFKRFFKRQSKFPNFKKKGKSDVKMYFVRTDVKVIIPCERHRIKIPTLGWVRIKEKGYLPTNPDTHTIKSDTVSCKAGRYYVSILVQEQEKPQSELNDFGIGIDLGVKDFAVLSNGVVCQNINKINKVKKLEKQLKREQRCLSRKYEDDKKRKKKGEATRQNIQKQIAKIQKLHHRIDNARTDYVNKCVNEIVKTKLSYITMEDLNISGMMKNRHLSKAVASQKFYEFRRKMEAKCRETGTQLRIVDRWYPSSKLCHKCGCIKSDLKLSDREYICECGYRADRDYNASLNLRDAKTYKVA

SEQ ID NO: 3222 - protein, 365 aa, Methanolobus sp.
MHSYLLCDSMLLTIKSKLVTTQEQHDQLLRTMVFFNKACDYISDFAYNNRVFSKYQLQKHFYYQIREKFLLSSQLAVRAFGKVTESYKVDKKTFHRFKPHGAVVYDQRILSIKDNIVSILTLDGRIKTEIKYRKDKNIDNRKGQTNLIYKSNKFYLQIVIDQPEATLVNSEEFLGVDLGIVNIAATSDGKMYSGEKCQRVREKYARIKAKLQSVETHSAKRHLRKISKKERRFKKDTNHYISKDIVQTAKDTNRSIALEELTGIRERITVRKADRDKHSKWAFKELRKFIGYKAKINGVIVRFVDPAYTSKQCSICGHISGKNRKKQDTFSCQKCGHIENADWNASKNIASRAAINQPIVLCSGN

SEQ ID NO: 3223 - protein, 422 aa, unknown
  TnpB Polypeptide
MTQTVMKTLEATLAPPTQHKERKLRGTLTTYREALAEAFDAGCTTQTAVNDIVTPYDLTSYAKDALKSYVPQLRQTYDAGELADDHPVRFTNRGWCLDYDETREHAYCWRVPQAGHGTSFWIPLRVNPEQRDHWRALHDDRADVGEFQLHRDGETWVLHVTTEYEVEAPGYHADDGDVTPVGFDVGESKLLVGCALDHNDAPTDPMLFDGSRARQLRKEMHTTLQRLQERDAADWRRDERFDHFQNALTDLVEKASREAVEYAEQFDRPVVVMEDLNYIRERLDYGAYMNRRLHSWAFARLQGRVEDKAREAGIPVEYVNPAYTSQTCHECGHIGRRPEQAEFRCANPDCWVSEYQADINAAANIAARVNPWGESLPVKSVGDDSPRDGSGSDTATTHPETSAKPAQTTLGEFGSKPSASKK

SEQ ID NO: 3224 - protein, 360 aa, unknown
  TnpB Polypeptide
MRKTFKYRIYPSKSQISKINNILELTRFVYNQTLALRKDSWELDKTHVSLYETSNMLTKWKIDKPELNNVHSQILQNAQRRVDLAFKSFWRRSKAGQTPGFPRFKGFGRYNSLTYPQMGFSLHPDGLYLSKIGRVKIVLHRPIKGTIKTCTIKRTPTGKWFVYFSCEVEKDIPLPKTDKKVGIDLGLITYIQCSDETKIDKPRFFKREQKALAKVQRRLSKLKNYKNRHSVGLVHERIVNSREDFCHKASKSIVDKYDFIVHEELDVQNMLEQKKYSKSISDASWSTFIEFLTYKAESADRIIISVDPRGTSQRCYRCGEFVPKDIEERNHNCSNCGLNVSRDLNSALEILRLGLESVDK

SEQ ID NO: 3225 - protein, 419 aa, unknown
  TnpB Polypeptide
MGTPRTVSQAIKGRLYPSREQAATLSKMRFLLACIRERVRAESREYYEREEKGCSVGWLQKEVAQPMHRRLGMPCDALSVVNVVAMHHQALRNWWRRPDHYDAPSKRAPERYPVNPYVHNQRLEVADGRVRLFGKKVGWMRWRAGRQPSGRIMSGRVSFRGGHWHLAIQFDGPAPEYAQPTALAVGVDPGIRAMTAHDGERSMEFRRVPERSKSRRRRLARKLSRAGWRCGNSECAALPRVAALTGTAMARLRSERRRKAPCGCWLGQYRPSARRRQLMATIARQREHEANVRRDRSHKATRKLIDHARVIGYEDPSAKAWQESKMFGEASREAAAGEFCRQLRYKGGWAGRDVVPVPESEASTQTCYVCGERTRHALGVKVYRCGSCGHTNKRDENSALNVRRKAIEGARAALPEAVA

SEQ ID NO: 3226 - protein, 443 aa, unknown
  TnpB Polypeptide
MSSYSIKLTGDLKALENSILIYRKALAFVIPIADNHWEEMKDFKFNNEKNNYAEKLIHSTKNNQAVYYFDEEFHKFPCYLRRAVVAKSIGIVSSYHSNLANWEEKKLELERTGKKIPQPPCLSTRHYDYPAYYKNGLFQNFNPETQTIELKVFKNNDWVYETYKLKTSDCNYYKKNLANKKQNVPIIKKKGRCFYVTFSYEESVPLIDQNDIKKICAIDLGIGTDATCSIMSEDGTIYARKFIHFSEEHDRLDTQLGRIKRNQRRGNKRNKKLWKRVSGISQDIADKTARAIFEFGHEHGVNVFVLEFLEFKGKQAAKRAHFWRYKRIYSVLGMIAHRHGLRISRVSARNTSKLAFDGSGIVKRGSKVSEDTPYSIVQFTTGKLYNADLNASYNIGARYWIRRILKPISETKRLEIEAKVPQLSKRSTCTLSHLIRLRSEIFA

SEQ ID NO: 3227 - protein, 244 aa, Streptomyces sp.
VTHRKTAWRASRAPDQLQAARQALSRFPRCKAKDRTANHQRAVDTVAQLYGKVCRQRLDHAHKTALGLVRAYDVIAHEDLKIRNMSKAPHPGPDNDRPGGFLPNGAGARAGLNKSIHDAGWGVFLTILHAKAESAGREVIEVDPRNTSCTCPQCGHTAKENRPTHEKFHCVTCGHHAHADTVGATNVLGARAGPAPRQPDLTRSPLQPGEESRSLFGLRLCRSPRERIGGHALDERAEGLSAQW

SEQ ID NO: 3228 - protein, 402 aa, Escherichia sp.
VKRLQAFKFQLRPGGQQEREMRRFAGACRFVFNRALALQNENHEAGNKYIPYGKMASWLVEWKNATETQWLKDAPSQPLQQSLKDLERAYKNFFQKRAAFPRFKKRGQNDAFRYPQGVKLDQENSRIFLPKLGWMRYRNSRQVAGVVKNVTVSQSCGKWYISVQTESEVSTPVHPSASMVGLDAGVAKLATLSDGTVFEPVNSFQKNQKKLARLQRQLSRKVKFSNNWQKQKRKIQRLHSCIANIRRDYLHKVTTTVSKNHAMIVIEDLKVSNMSKSAAGTVSQPGRNVRAKSGLNRSILDQGWYEMRRQLEYKQLWSGGQVLAVPPAYTSQRCACCGHTAKENRLSQSKFRCQVCGYTANADVNGARNILAAGHAVLACGGMVQSGRPLKQEPTEMIQATA

SEQ ID NO: 3229 - protein, 342 aa, Streptomyces sp.
VKLVVQVKLEPTPQQAAALEATLHACNEAATWVSEIAFERGEFKNFALRKHTYDAVKSRWNLGAQAAQHSIKKVCDAYTTLKANLKAGNLGRPGSRRYRKASEKPIAFRPRGAQPYDDRMLSWQIPDRTVSIWTTSGRVKNVAVTASVEQLATLALYRKGESDLLERDGMWFLNATCEVPEAPLHTDPVDFLGIDLGIVNIATTSDGEIMAGRELNRTRLRERGLRTKLQKKNTPSAKRRLKRRRRKEARRARDINHKIAKHVVAEAGGTSHALKAVGEGHPLLLVVRPAGELRRIQGPPGRSAGGARRSGVHLTHLRRVRAHRQGEPGLPGLVRMPELRIR

SEQ ID NO: 3230 - protein, 455 aa, unknown
  TnpB Polypeptide
MKQIITAKLKLTTTPEQHRALRETQLAYRDGLNAVSQYAFAHGKTSSVTKIHKGMYAELRARYRLPSQLACSVERQVAATYKGLWTKLLNNREHRRLKITKKRFKGLDKPPKYSSPTVQYTYERDYTFQCESRVSIGTLNGRISVPYQGYYKHLLLIQQGGHIARVGDAKLWYDQPRKQFYLLVSLAITLPDPSCDDLSEVVGVDVGVRYLAVTSTAAGKATFYSGKRTRHKANHYARLRKRLQKKGTRGAKRRMRRIGLRERRLKMQANHQIATQIMREHPHTLVGLEQLTGIRDRTKRRKRKRKKNGKGYEPVSPKARKSNRVYSQWSFAELHTLISYKAALSGSLAIKVDADYTSKSCPMCGYTADKNRPHKGLLFMCQNVKCRYILHADLVGARNVVMRTLVLRQDWSTTGLLSMAPDASDREAKAARLRRYAELRWSPEVKSPRLEPKVN

SEQ ID NO: 3231 - protein, 404 aa, unknown
  TnpB Polypeptide
MIKTYTLPHELHLDHFFLAYNHVLNGMLSEIWENITWTEKPMRNSKQKRVFPSIPDYSFKKSMRDEFLATWDHAAHWIDSALKTAFSIIDSWRKNYNKGRRKHVKPVVKRFFVRVKQTLMKIEGDRMRITIRPREFVYIDLSNRYFSMAGKIGEPILTDRKICIPITTADAEPEDTIGWDSNKYSIDGYSENRGWIKVDIQPLHTLHVTYDNKFRRINRIYAKNKHVGIKLYQKYRKRCRNRVKNYLCHVANQMTEVPATHGFENLQKKYLFRNHQHVWNRELGHADWRKIYQLVKNNNPVVDVNPAYTSKRCSRCGKTNKALRSEKTFECPAYGLRIDRQFNAGINIYLKMKGVSPEVSWFDATILPAGLPQIAVETRDADELARHLDELVKPQVYLGSAIIT

SEQ ID NO: 3232 - protein, 416 aa, Streptomyces sp.
VATQVKRAFKYRFYPTDAQAVELSRTFGCVRKVYNLALAARTEGWVLRQERVNYNATSTMLTAWKKTEELAYLNDVSSVPLQQALRHLQTAFTHFFARRAQYPRFKSRKKSRKSAEYTTSAFRFRDGRLTLAKMAEPLDIVWSRPLPEGVAPSTVTVSQDSAGRWYVSLLCEDPSVKPLPAAETAVGVDAGLDHLLTLSTGEKITNPRHERRDRTRLAKAQRQLARKVKGDGANRAKARQKVARIHARIADRRRDNLHKITTRLVRENQTIVIEDLTVRNLLKNGTLARAVSDAAWSEFRSLLDYKAQWYGREVIAVDRWFPSSKLCSACGSLQGKMPLHVRTWTCGCGATHDRDVNAARNILAAGLAVSACGAGVRPQRSSPGGQSAMKQEPLRREPWESPSFHEGEEVKLPASP

SEQ ID NO: 3233 - protein, 411 aa, unknown
  TnpB Polypeptide
MLVFDFKAYRSQQQFDAIDEAIRTCQFIRNKCLRLWMDGDAKSQYDLNKYCAILAEEYPFANELNSMARQASAERAWSAIARFYDNCKKQILGLKGYPQFQKDSRSVEYKTSGWKLASSRKSITFTDKKGIGKLKLKGTRDLHFYQPTQIKRVRLVKRADGYYVQFCIQVDRSESVEPSGVAIGLDVGLNDFYTDSNGKTVDNPRFLRKGEQRLKKAQRCVSKRVKKSSNRRQARLILSKRHLKISRQRKDHAIKLARCVVTSNDVVAYEDLRIKNMVKNHNLAKSLNDASWYMFRVWLEYFGKVFGKVTVAVTPNGTSQECSSCGQVVKKTLSTRTHICACGCVLGRDENAARNILSRGLSTVGHTGTFAAPLATTGETPATQWLLDASNDWGEATSTLVGAILPEQVAS

SEQ ID NO: 3234 - protein, 368 aa, Proteobacteria sp.
MKLTLQLRLLPTHAQADALRATMAAFNAAATYAAQAGFAAGLFGQVSLHHLVYYEMRATFALSSQMAVRAIAKAVECFQRDKTVCPTFSPDSAICYDQRVLSFHGLSTASLWAIGGRVEVPFICGPYQRARQGRIKGQTDLVYRGGAWYLLCTIEMPEAPLLAPQDVLGVDLGVVNLATTSDGTTHSGHAVEACRTRYAQCRKGLQRAGTVSQMSGKRPKKIRQALQRMAQKEAAFRRDVNHCISKTLIASAKGTQRGIALEALTHIRSRSRFRQPQRARTAGWAFAQLRAFIEYKATLAGVPVVLVDPRHTSQGCNRCGHVERANRFSQARFSCTQCDYTTHADFNAANNIRDRARVKVPLVAVPLR

SEQ ID NO: 3235 - protein, 418 aa, unknown
  TnpB Polypeptide
MINDQAVYKRNAKFWGIEFTEEFEDAFNRTNSTLNRISRYVRKHIKSGDITNITKLGYVSLRDGVMIDGELKYELTKAQFKNSIQHLFDKDSSNESLKRECVLYVLERYAGYFQRNGQDKVPNISFKRKGLYYKDNFVAIDQKAKYITLPTIYGVFKLRYNCSLKENFVVKPKFGGHFIWRQKAFVVAVDVPFELLYTPLSVLSFDLNKTAKDNVVCNDGEIIPSSAKMAELVKKIKELNEKLDPDKKKPVAKRKRKSKQRRPIRLEWKEAHRRLRNECKKVVMRLVEKAEESKSLMCIDSVKTGQTMGTFGQDHIIPELQKECENRGIPFYVVPCRNTSRRCPECGHIHADNRKDTKTFKCVSCGHEADAQLNAAINIADIGQMLYDGEVPYGNYAKRNVEKLISSYQKESIPVSAE

SEQ ID NO: 3236 - protein, 333 aa, unknown
  TnpB Polypeptide
MTRSRSIKKTKKMLKNTPAMYKKAYPFLKEVDSLALANVQLHLEKAYKNFFRDPKVGFPRFKSKHHSKNSYTTNVVNGNILVEGNRIRLPKLKWISMKKHREPAENCRLKSVTVSMESSGKYFASLLYEGYSCENQAADKDYSNAKILGIDYAMQGMAVFSEEIELEKAGFFRKNEKRLAREQRKLSRCVKGSHNYVRQKKKVARCHEKIRSQRRDYLHKLSRRIADQYDIVAVEDIDMKAMSQCLHFGKSVQDNGYGMFRNMLEYKLEWKGKELIKVDRFFPSSKKCSKCGKIKKELKLSERVYHCTCGNEMDRDRNAAINIREEARRMLAA

SEQ ID NO: 3237 - protein, 419 aa, unknown
  TnpB Polypeptide
VTELTKTLELKLVDPNVHKRQKLRETRDAYQQALQAAFSAGCDTQSAANDVVVESDLSGYAKNALKKYVPQLCGNSYDANEIHDDHPVRFTNEGLQLDHNPENAIEWYAKIPHHEDYHLWIPARANPDQREWLEALYADDAEMGESRLFKRDGAWYLHVTATRDVKDQSEVSDNEQTPIGVDIGEVSLVTVCHRDGSGSPTRPEMWADDGKGVRRLRKTYFTAKRRLQKRGSERIAESYGESLWNQIDDVFHRVTCEVVDYAESVENSVLVLEDLTYIRENMDYGEYMNRRLHGWGFAKLHAQIRYKAAEKGIPVETANPRHTSKACHACGEHGYRPRQATFRCSNDGCWVGEYQADVNGAINIADRYRSGESHRRSDRTSRQKAGDDDSATDGASLTGPQDSQADAETQQVTLGTNAS

SEQ ID NO: 3238 - protein, 402 aa, Escherichia sp.
VKRLQAFKFQLRPGGQQEREMRRFAGACRFVFNRALARQNENHEVGNKYIPYGKMASWLVEWKNATETQWLKDAPSQPLQQSLKDLERAYKNFFQNRAAFPRFKKRGQNDVFRYPQGVKLDQENSRIFLPKLGWMRYRNSRQVTGVVKNVTVSQSCGKWYISIQTESEVSTPVHPSASMVGLDAGVAKLATLSDGTVFEPVNSFQKNQKTLARLQRQLSRKVKFSNNWQKQKRKIQRLHSCIANIRRDYLHKVTTTVSKNHAMIVIEDLKVSNMSKSAAGTVSQPGRNVRAKSGLNRSILDQGWYEMRRQLEYKQLWRGGQVLAVPPAYTSQRCACCGHTAKENRLSQSKFRCQVCGYTANADVNGARNILAAGHAVLACGEMVQSGRPLKQEPTEMIQATA

SEQ ID NO: 3239 - protein, 376 aa, Arc sp.
MLKNKKQGGETLQITVKFKIILTKEQVQLVESISKEYIYTVNSIVSSMIQSETVLKLSSKEVLANMPSAVKNQAIRDAKSIYTKYNKSLKANSKLLAEKQKVINVPTLKKPVCIWNNQNYSLKDGILSFPVMIDGKSQRIQTRTIMTDYQLKQIEGHLGALRITKKSNKYIAQISVEKASTIATGDVVMGVDLGLKVPAVAVTESEKTKFFGNGRENKYVKRKHRAKRKKLGKAKKLKAIENLDDKEQRWMKDKDHKISRQIINFAVKNNVSTICLEKLTNIRNTARTSRKNEKNLHTWSFYRLAQYIEYKAHLEGIALEYVDPKYTSQICPNCGTRNKAKDRKYNCSCGYRTHRDRVGAINIMSAPVVDGNSLSA

SEQ ID NO: 3240 - protein, 395 aa, unknown
  TnpB Polypeptide
MQITHKFRLYPNKQQEEKLFETLNLCRQTYNNLLAEFDSWEYISKYELQSIITSLKICDSRLKTVYSKTLQYENYRLFSNLKALSNKKKKGYKVGRLRFKGEGWFKTFTYNQSGFKLINTGKRCQILHLSKIGDIRIRCHRNIKGKIKQITVKHIQSGKWFASVTEERKQEIKQQAINKIVGIDLGLTDTVYDSDSNKITNPRHLKKKAEKLAHLQRRMSRKKKRSNNRNRWRIRLARQYEKLVNSRGDFLHKLSRYYVDNYDAIAMEDMPIPNIVHNHKLSKSILDSCWGKLRQYISYKAENAGKLYMPVDYKGTTQRCSQCGKLVPKDLSEREHKCPNCGFEVPRDYNSALEIKRLCLQKIRQELPESTLVEMESISHKGQILSLKQEAPCVS

SEQ ID NO: 3241 - protein, 211 aa, Calothrix sp.
MVATSNGLLVKRPKFFVDGSRKLKLLQQSVSRKRKGSTNWLKAQQKVAKLHEYVTNCRKDWHRKLSHQLCEGVGIIFVEELNLVSLSRGMLGKHCLDAVFDQLFNVLEQTCFKRGVYFQKVDSRKTSQIYPNCQHETGKKTLAERVHKCDNCGYITVGSKNGTISTQLVSTNIPVVHPVSQASITDKTGSSNGIVQGLLLLFCSFQLCLKY

SEQ ID NO: 3242 - protein, 509 aa, unknown
  TnpB Polypeptide
MNDDRVNAKNGCISADWPEDISFVFGQADLVVSTVTISSKVHPQAKTFLKQAAREVNDVWNFCNQTSYKAWNNYVGQRTWLSAFEMNNLLAGCGDEFTKIGIDVAQSVAAEHANKRNQTHYSKLNWRKSGGSKKSLGWVPFKANTLRFSVQDGKGKNVCIKGDVKPRIPAWPQKMAGESKEGYALRKKAFEPKRFAAAEELMCWEYRRIQACEKIKVSFMGKTIRLFNAHRLLNAYRLAMQGVGSLRSGNFAQDNVGDWYVNVVVDRVELPLAAVYGMESSIGLDPGQKVAMTGSDGSHYLVNSSGVAEPNVIPQLRSKRYTEMEPQIQQAQRRGHRRKAKRLHRKAARQRKNDRDVFCKEIVSLYQRIWIGNLSPRKMAKSRLNGQAKSIMDAGIGMASTTLKSLGHRAGRVVETIDERYSTRRCSVCMKLLGPSGLESCDVRQWVCGVPIGNIFLGIPGCNTQHLRDVNGGENIRHSGELQWNGWSLQQRRENTAAPRYWRPFAGTR

SEQ ID NO: 3243 - protein, 189 aa, unknown
  TnpB Polypeptide
MSDNTKVDNLKLTKKYEDKLKREQRKLSKRKEIAKTNNKKLSDSKNYQKQKIVVAKIHNKIRNKRKDFINKLSTKIINNHDIICIEDLNIKGMLKNHKLAKSISDVSWSEFARQLEYKTNWYGKKIVRVPTFYPSSKTCSNCGNVKETLKLSERIYKCECCGLEIDRDYNASINILRKGLEILKEEKVS

SEQ ID NO: 3244 - protein, 155 aa, unknown
  TnpB Polypeptide
MKTKIIQKAYKFRIYPTLEQIIFFSKTFGCVRKVYNLMLDDRKRDYEEYKVTGIKTKYPTPAKYKKDFPYLKEFDSLALANAQLNLEKAFKNFLRDKEFGYPKYKCKSNPVQSYTTNNQNTIYIDKGYIKLPKLKSLVKIKVHREIKGIIKECYC

SEQ ID NO: 3245 - protein, 391 aa, unknown
  TnpB Polypeptide
MIEQVLTVNCKLSPTDIQAEAIEDTLKAFADACNWINQNTPPKITNHVRLHGLVYHDVRTKFGLSANLAVRAISRVAGNRKAALQMGSKVKEFKPTSIDYDARIFVFKEKDESVGLTLLRSRQNIKLCLGDHQRGMLEGSKPTSATLVKKGSEYYINIQVKSEAPEQIHVDTVLGVDLGITDIAVTSEGQRFGGKTIKLIKNHYASMRAVLQQKAVKGTRSSRRRCRELQKRLSGKESRYQRQINHEISKAIVTRAQEIPAKIALEDLTGIREGVNQKAGKNQRRRVNGWAFYQLKEFLTYKALRAGIPLVLVDPAYTSQTCHQCGEHGIRNGKSFKCPSCSWSGDADFNGAKNIAFLGRYVVRPGGSEGLSSIKAVLSGLLKARTLQGTG

SEQ ID NO: 3246 - protein, 284 aa, Oscillatoriales sp.
MLKAVKVRIYPTEAQEAHLAQAFGCARWVWNQSLATMTATYQETGKGVTAMSMKKCIPLWKNEFEWLAECYSQCLQQSVLNLGVAFRNFFDGRAGYPTFKKRQGKQSIQYPANVKVLGNTEIKFPGKLDVVKAIVHRSITGEVRTVTVSKNPDGKYFASILVEDGIEKPNSNSDGDVIGIDLGLTDFAVTSNGSKYQHPRATKKHEKNLARQQKKLSRKRDKATKNRRKAKLAVAKVHSKIKRVREDFLARTIAQDSRRKPSHSSRESGSKKHGEKPLPSQRNF

SEQ ID NO: 3247 - protein, 372 aa, Bacillus sp.
MKLTITAKIKMTPTTEQVELLEETLLAYRKGCNFVSRIVFESKNLVQASLHRVTYDALRSSYHLRSQMAQSVMKTVIARYKTNQSNGHDWSMVQFKKPEYDLVWNRDYSLTQQVFSINTLQGRVKVPFETKGMEQYFDGSWSFGTAKLVYKYKKWFLHIPMTKEVQEAVDFGMRQVVGIDVGINFVATSYDSQGHTSFFNGRTMKHKRARYKAIRKQLQRKQTPSARKRLKEIGSRENRWMTDVNHCVSKALVSKYGANTLFVIEDLTDIRSATERVRVKDRYVSVSWAFFQLRQMLEYKASMKQAKVIAVDPAYTSQTCPKCGHTEKANRNKKKHIFCCKTCRYMSNDDRIGAMNLQRKGIEYIVEVTKEA

SEQ ID NO: 3248 - protein, 381 aa, unknown
  TnpB Polypeptide
MVNKAIKYRLYPTTEQVIMFAKTFGCCRKVYNLMLSDIIESYKSTGKFATVTPAKYKADHPYLKEVDSLALANTQLNLQGAFKNRFSKSRKKKNGFPKFKSAKHCRKSYTTNNQHGTVALTGNSIKLPKIGLVKVVLHRKPDSNWFIKSATISQDLDGKFYVSVLFEYEKPVNTYVADRANAIGLDYASDGLYVDNNGNVGTNHKYYRESHDKLAKAQRRLSRMYGSKKQEVKSSNYLKQLRKVNKIHKHIANQRSDNLHKISTEIANQYDVVCVESLNMKSMSNKGFGNGKATLDNGYGMFLKMLEYKLSDRNKHLIKVDKWFPSSQICHSCGSIHPEMKNLTIRTMKCDCGLTINRDRNAAINILNEGLRILNESFDIA

SEQ ID NO: 3249 - protein, 191 aa, unknown
  TnpB Polypeptide
LKTFLTGSDGSKIESPQFFKQSLNAIKRASRQHSKKVKGSAHRERARRNLVRRHEDIANRRSDWFWKLAHDLTDKFDVLCFETLNLKGMKRLWGRKVSDLALGEFLEILGWVAKKKGKQVVYIDRWYPSSKTCFHCGHVLKELDLSVREWRCSSCHAVNGRDENAAQNIKAVGASTAGLGDVRQAVPAIAV

SEQ ID NO: 3250 - protein, 381 aa, Halobacillus sp.
MFGIMSMGGENMATKTILVKLKHVTKKKHKQFMDEQAVYASCVNHCVERLLNGEKLSSKDISFPLKSAIKNEGIRRARKAVSDFKKGLAKTIPVFRNSLTIKINNQNWNTVDQNGRWYIAFTSNQGKKALPVVETKDVQSYFPFLTSHTREFRGTLELFRKGRRWYVAIPIQVSSDLGLGNTYPSKKPLTDYTSIGVDLGLRHLVVLSEPTSGKRQFFSGKEVGYKRRHFRSLRRSLGKKKAQRAIEHVGQKESRWMKDYNRKLAQDIVTFAQQFEKPMIKLEQLDNIRKTCRSMKRADKTIHSWAFYQLKQCIKERAATVNIPVVDIDPFQTSQTCFACKHAERSNRKREVFHCKKCGHKAHADLNASRNIATSTNLAAS

SEQ ID NO: 3251 - protein, 250 aa, Halobacillus sp.
VVETKDVQSYFPFLTSHTREFRGTLELFRKGRRWYVAIPIQVSSDLGLGNTYPSKKPLTDYTSIGVDLGLRHLVVLSEPTSGKRQFFSGKEVGYKRRHFRSLRRSLGKKKAQRAIEHVGQKESRWMKDYNRKLAQDIVTFAQQFEKPMIKLEQLDNIRKTCRSMKRADKTIHSWAFYQLKQCIKERAATFNIPVVDIDPHKTSQTCFACKHAERSNRKREVFHCKKCGHKAHADLNASQNIATSTNLAAS

SEQ ID NO: 3252 - protein, 400 aa, Symploca sp.
MLVYEFKLKAQKHQFSALDEAIRTGQFIRNKCLLYWMDAPHDEKVNRFSLNQYTKILADNPDFPFVAKLNSMARQAMAERAWSSISRFFDNCKKKVPGKKGFPRFKKFSRSVEYKTTGWKLSDNRKYLTITDKTGIGKLKLIGSRDLHFYQKSQIKRVRLIRLADGYYAQFCIDTERTENTNPTGKSLGIDVGLESFYTDSNGDKVNNPRLLRKAEAKLKKLQRRLSKCPKGSANRRKAQNRLGRQHMKVSRQRKDFAVKKARCVMKSNDFVVIENLNVKGLARTRMAKSINDAGWSLFRQWLEYFSNLFDRKLIAVNPNYTSQDCSVCGKRAKKFLSTRTHICECGARLCRDHNAAINILNKGLDSVGHTQISQEYWVNASGQLSLWCIDENQYTKFAG

SEQ ID NO: 3253 - protein, 454 aa, Thermococcus sp.
MKRTVTVKLQPSKEQAKILFELADTGAKVWNRVNYLRRQQFFQEQIVDFNTTEKTVYEEFKREIGSATVQQIARKNSEAWRSFFSLLRKKRNGELPSWLKPKPPNYLKEDGKRKPLIVLRNDQYKIEGNKLILKGLGKFKRLEIQFKGGIHLKGKQGRLEITYDTVKRKWYAHVSLTVEEKLEGVEWIKLPRTPNGDLSAGIDLGVNNLMAIYVENGESSLVNGRPLKCIDFYWRKKIADYQSKLNKSGAKTSRKLKRMHEKAKLQAKHYINTAVRQTVKKLYDLGVSRIVVGYPKGIARNSERGAKQNFLLSHVWRFNYVIKRLTEVAEEYGIQVVLVGEAFTSKTCPVCGKPHKGARFVRGLFKCPATGLVFNADLVGAFNILKKVVKTITPNLSGLYAQRRGNGGKALPEGLKSPFLLGFGETPSNLSTLELGGSSLEPPPFRAGRRSAAL

SEQ ID NO: 3254 - protein, 327 aa, unknown
  TnpB Polypeptide
VWEELAEIPDAKRRFNAAEHLVHTTKRILHALILTFASEDAILPQKSCNPACIGKCIFLQNTDGSVDKVRSKKQRCRNWCMRIMLCLIFYRDVMYREGAEGKEEAYLKLYDGHDWKWFCVRLNHIDMEYLRKNWSGKKASAPILEKRHHKYFLRFFLYGRNNTYKTPAKEQIICSVDLGSIPMQSAPLCGQTELSWEENFIDHPSEKDRMHRTLGRIRRFQREHGSAQAQGRWAYTKRLNIELGKKIAGAIVKYAEENHADVIVFEYLEMQGEDTGKEKNRNCICGRKRDIQKRCEHQAHRKGMRVSRICAWNTSRLAYDGSREGNT

SEQ ID NO: 3255 - protein, 378 aa, unknown
  TnpB Polypeptide
MKLIAQVKLLPTHEQAQMLKQTIEQANALCNAMSEFAWENKVFGAFKLQKVSYKQMRALSGLTAQMVIRCYSKVADAYKLDKQTKRQFRKYGAIAYDDRILRWYTDKQFVSIGSAGGRLVIPYQAGKRQRELLQYQKGESDLVYSKQKKAFYLLAVCEIPDPTEQETEDALGVDLGVVNIAVDSDGEGHTSETIEHNRQQIQRLRSNLQQRGTLSAKRHLRKLAGRQRRFQKDTNHVISKRLVEKAQRTNRAIGLEDLTGIRSRTRAKGAAQRTRHSNWSFYQMRACIAYKARLAGIPVLLVDPRHTSQQCSNCGFVDKGNRRSQAEFLCLSCGYIEHADINAAKNIAFRAANVRQPIVSETVHVAPETSPHPLGMGI

SEQ ID NO: 3256 - protein, 421 aa, Moorea sp.
MCYPELKEESQLFNLTYEFKLKPTAKQVSLFEDWLEQCRKVYNYALVERKDWYKSRSCQINACSLPREYIIPADAKRPTYASQCRGLTAARKAIEELRAVQVHVLQQTLKRLEKAFVSMWEQGHGFPRFKKQGQMRSFVFPQLGVKPLEANRVKLPKIGWVKMRQSREIPADAVVKQARVVKRSSGWYVMLTLAWDVDVPQVMPHGEALGIDVGISHFVAVSNGALFPNPRPFKRLERKLKLLQKRVSRKRIGSRNRVRAQKKVSKLHERIANVRKDYHWELAHNLCDWAGMIFVEDLNLKGLARGMLGKHCLDAGWGQFFQILEQCCFKRGVYFQKVDSKKTSQICPNCLTETGKKTLAERVHHCEDCGYTTSRDVAAAQVVAMRGLAAVGHTVKMLSEGKFVGIPLKKESPSFKGGECQ

SEQ ID NO: 3257 - protein, 394 aa, Streptomyces sp.
  misc_feature (341)..(393): Xaa can be any naturally occurring amino acid
LAQAFGCARVVFNDALRAREDARASGLPFPKAADLSKRLTEAKKTPERAWLREVSAVVLQQSLRDLETAYGNFFASLKGTRRGPRIAPPRFKSRKDNRQAVRFTANARWSITPGGKLNLPKIGPVPVRWSRALPSTPSTVTVIKDAAGRYFASFVVETGPDLLPETDAAVGIDLGLTHFAVLSDGRKIDSPKFLRRAEKKLKRAQQALSRKARGSNNRDKQRIKVARAHARVADARREFHHQLSTSLVRENQALAVETLAVRGLARTRLAKSVHDAGWSAFLAILEYKAARHGRELIRIGRFEPTSQVCSRCGTKDGPKPLHVREWTCRDCGTVHDRDINXXXXXXXXXXXXXXXXXXXXXXXXXXXXXXXXXXXXXXXXXXXXXXXXXXXXXG

SEQ ID NO: 3258 - protein, 362 aa, Paenibacillus sp.
LVRTYKFRLYPTTEQLEKIQFTLERCRLLYNRLLDERIHAYKMEGKTLTYGQQTNTFRERKQHISTLKEVYSQVLQDVARRLDKAYQSFFRRIKNGDKAGFPRFKPQNRYDSFTYPQSGFDLDGKHIELSKIGQVRIKLHRQPQGTIKTCTITVKNGRYYACLSCEVEAEPLPETNRRVGVDLGIKHLAATSDGQMFAAPNHLRNNEAKLKRQQKSLSRKQYGSMRRRKAIMALARQHERVANQRKDYAHQISKTLVDNYDIIAFEELNVQMMVKNRHLAKSIADAGWSILVQFVTYKAESAGRQVVRVDPHNTSQCCSACNKIVKKTLAERMHRCPHCGATIDRDVNAAINILSRAMRQVS

SEQ ID NO: 3259 - protein, 370 aa, Massilibacterium sp.
MANKAYKFRLYPTQEQEQLLVKTFGCVRFVYNKMLAERKEAYEQFKGDKEALKKQKFPTPAKYKEEFSWLKEVDSLALANTQLNLQKAYKNFFSGRAEFPKFKNRKARQFYTTNVINGNIMLLDGYIKLPKWKLVKMKQHRKIPSHHIIKSCTISRTKTGKYYVSILIEYEHQPVQKEVKAVVGLDFSMNGLFVDSEKGKTANYPRFYHQALEKLAKEQRILSLRKKGSNRWHKQRLKVAKLHEKIANQRKDFLHKESYKLVKLYDCVVIEDLNMKGMSQALHFGKSVTDNAWGMFTTFLQYKLEEQGKKLIKIDKWFPSSKTCSCCGQIKKSLFLSERTFHCDCGFVADRDWNASINIKHEGLRLLALS

SEQ ID NO: 3260 - protein, 402 aa, unknown
  TnpB Polypeptide
MELKKMYLTKRIRLLPTAEQEKLFWKSAGVARWSYNFFLSYNQEKYNEWLKDNTKERFISESNVRKYINNVLKKTTHIWLQEVGGNVTKMGVMDANNALKHCFNKISGYPKYKSRKKSKPSFYVNYETLKRTPNGFRGERIGIVKTRESLPKIPKDQKYVNPRITYDGKFWFLSVGYKVEPNKVKLTDEKIGIDLGLKDLAIVSNADNSYLKKYRNINKGYKVKLLEKRLKRSQRKLSRKILNNIENYDENHVPTYIRPLKDCKNIQKQIHIVQNLYRKLTNIRNNYINQVTTEIVKTKPSKIVLEDLNIKGLMKNKHNAKSIADAKWYEFRRQILYKAELYGIEVVLADRFYPSSKTCSYCGNYKKDLKLNDRTYICNECRLIIDRDINAAINLANYQNLE

SEQ ID NO: 3261 - protein, 550 aa, unknown
  TnpB Polypeptide
MSELNSEHLMFLDRYFVAFNLVKRRYARLYKDNRELIKDGKHRKTIKQQCDPDNILPYRVFRGVEQSIKGLADSQQSNRKNYIANKQEKINQVEERLEKEQASLTELLKTPNPSLHKHRLDRRIPKVKKAIYYLKNRLVKLNDQLDTLEQKQADNAFKVCFGGAKLLKQRRSINQNDKQSLSSWREQWFHRRHNEIVTVGDAGDTCGNSNMQVTKEQGEYFIKIAVPESLRPDYSFSFIKVRLDLGYRQDMLDQHIMSHELKKDTAHFIAPRPMTVMLKRNLKGQIKAHLCINNQKPHVITDTCNGTIGVDINADHLAIAETDKHGNIVSHKTIPYDLSGTSGQNEHILSLAVQQVVDKALSKNKSIIIEDLDFKKKKAQLNAQNKTEHNKKYNKMLSSLSYYKITELFASKTFRVGVELIKVNPAYTSQIGQVKYRDKLNLTVHESAAYVIARRGQGFKEKKPKNILRIRKELPKMYCRDHRPCNQIVALLDKKLQAKSMSVILSKVFKKPDWKPLLGDELKAHHQSLPTRILDRWSVLPYNRECYLTY

SEQ ID NO: 3262 - protein, 430 aa, unknown
  TnpB Polypeptide
MIILSQKIRIYPTDKDIENFKKYIGYKRYLYNKAIVVQKELWLKYKEEKAKYKDFDLLDDKEKKIFYNKYYPHMSLVRDNMVRTKKEWEYNYASKLIESVATDVVKSIKNALNPKMPNHKMPKFKKKKNQKMSFAFEGIKISKNNELLIPKAIISKLTGIKPSNPIIFSKIRMGEKLRFGGKITGATVNCNRNGKWFVSLTVKLDEESERKYRSRFDKDRSNKPECGIDANIRGFRYNKVEGGYEDWSTLNNELLNQYRLIKHYSRVLSKKRLGNKDWKRSKTYAKMKTKLSKSYARAYNLQEEILNKFIQYLNENYSSVTIEDLDVNGMKMNRRMCKSLHRSLFGRFKQKIEVKFNQTNIEFIKADKFYPSTQRCSSCGHIKTGDEKLGLSGDRHGNNHNEYKCYSCGEILERDDNAVENLKQYKYLIQ

SEQ ID NO: 3263 - protein, 520 aa, unknown
  TnpB Polypeptide
MFVSLQFKLELKKEDKEKLIKLMRMQSSAIRVAYNMLKELEKGKAKNPHVQIYHRLKQPFPDLPTKYIDSAIYKAKQYPTYKPVVFGGRRLFEKLCKNHLTGKAREKLKKQWRELRQGTLISIGLKADRGNRLTRFEDLYGQLHLRITTGNREFIYAKVLREPSNSKDKWINFMAMLLESWQTQSYFAYTVELKLRDGEVYGSVSFEIPTSEARYTKENGVKAIDTNASPIHLAMAEFSKTGELLSYQTISLHRLMGLSQNRKDHQEWILAHQLLDLALQKNKAIAIENLKKLKKGNCGDGKATLRKILHNWNAKEFLRKLKRVAMLKGVEVIEVNPAYTSVIGMLKYAPQLNIDKDIAGAYVIGRRALDFKEDMPENYKKLLKDRVYLEFALKRYEEREKELRELVEEETNQYKRNALESELKVIENARKLLANLIQSLQGESSGCEGADVRNPEQGRGNLASSSAWQVLSVALLFPILGKVLPRDLSPMKPVLVEGVWDRVRSRSIPLSAGGTVPTQA

SEQ ID NO: 3264 - protein, 460 aa, Moorella sp.
MRLEVDEHTAAVLDGQSRIANWLYNRLLEEANELRRRFRETQDPEAAKVLYTERGLRNRIPALKQEHPFLRTVHSSVLKNAALRLSSAIREYQKGRHGRRAKRAGWPKFRSWKRKWFSLHYDEPWKGFRLDGPTLVLSLGMALNEATGKRKQVHVSTRLAEPLPDWFEPGMVRQLRIVKEGKLFYAVFTVRRPVPAQRSVKRVITIDPNHKNLGYGVGTDGVATEIFNPWFLKILDRRIDEVKSLRDRCQRNSVRVVREDGSEAWLPSRRWRKLNERLDELWRVRREQTKVYLRTVANRLYREYDAVFVGDYTPHGGGISRGMRRAMNNQSLIGRFKETLAWVATRSGKVYGEWDEDGSTRTCHACHYKVPGGIPPEVREWTCPECGTHHIRDENSSINGLEQVLKNLEVPGSGRLGDKIVVRTRRAWRFDGLGIQEIPGAVGGRVRDHAAGRQEIKCGA

SEQ ID NO: 3265 - protein, 568 aa, Moorella sp.
MQKPKKKKPTINPSEGNKYTICGEWFPAIYPARRNDKWAQGTEDPLTTERRLYCACTRWAFNRLLEGYSREALKKQGQEIFGINSRYCDDAILKAQEIIGSQKELLTREIDETQTKLGRAQKKLQQAEKDLARAIKANDAFKSEKAKRTVQGRKTRVKKLAAKLADLQTHQNNGTIPRVVFGGRALWRRVCQGKATREEWRNARQNRLYARGDETKGGNPNMKLSYQNGGFTLAVTISHLSEQIGTDSKGRPIMTKAPRVEGKLWLPAKHRLKVWELLLTGAPYTVELIRDNDGRYRAHITFTIAAPATVTNPNRGYLGIDTNPDGVALANVGYTGQPEPWPEGFSVPYPKALRKYDGELQVTIHPNGFLYIKIPELAYSRGYRRTYLIGVLAQVVVSIARALGKPLAVEKLDFGKDRLDTNKRFNRLAANFPFQKIIAAVMRKAFKEGVEVRPVWPAHTSTIGYWKYRQRYGITIHHAAALVIARRAIGFKEKITKELKRQVQAIKEKLIPKANSLPGEGKGMTRKVKRPFKQLDAKIPVHNGLTRFKQESFYSAWHDLKQLALSSR

SEQ ID NO: 3266 - protein, 273 aa, Lactobacillus sp.
VHSAGVPKFHRKSYRWRYQTNCQYSGQKNALLTNGTVCFLDHRHVKVPKIGRLRVAGSQSRLLKRDIEIRIGTVTLTKDAADRFFISMQLVSDTPFVSSNKANHGSIGIDLNTDNFLMDSKGHVVPNPRYYRTIKDKLAKEQRILSRRQRRAKQAHRPLRDSKNYQKQRLIVAKLRAKVMNQRHNFLQQLSTALIKNHDLVVAEELWSRNMLKNHTLALSISDVGWRTFLGMLAYKADLYGYQFVTVNPQNTTQTCNDCDFVMGTNNTKTNIS

SEQ ID NO: 3267 - protein, 516 aa, unknown
  TnpB Polypeptide
LKRRVFYAYHINLCGSEQDAKAGILFRVPDSPCKKTAKIQQTLSIRNLRTGLKKDPDKRTANENEVIETVRIGIEMANEKLQKDVDRLTKQLQSLPASDPARTKIQKRIDNKQKNHPSMPTSDHWLLTYETLDAVMKNTKNPDYYAMPSQINQQVLRKVLKDWKSYFEALASYRQNPERFKSQPKQPGYIKTPYTTVTFTNQVAKRSYIRGKMYITFPRCPVPVCVGKPEGSYVRTEVKPCYGGYMIYVTFQDAVKTPEAPKNPTRILGLDPGLDNFLTALTNFSSTPFIIDGHWLKSINQNFNRRRAVLMSELTKGLDSTKSVKNSARLNRISKKRACRIDNFFYKAAHYIVDFCLKNKVEVIVCGHNKDQKQEINLGANNNQHFVSIPYTRFFWILTCVAAKAGIPVIETEESYTSKASLIDKDPIPVYKEGDRLEYHFSGKRISRGQYESKEGTILNADVNGAGNIIRKVYPNVFDGVTDFSYTNKTVIRVTREVLCHAKHKKNTPDHKENVV

SEQ ID NO: 3268 - protein, 483 aa, Lactobacillus sp.
MVKLPKKTKYLRVRRFRLVATPALIAKHARNLEVENQLHNYAVRYLEKAYGRKHLERPLPTTKIGKATLINDEIIPRFAHDVYHHEGHWNGKKLGLHSQAAQEFLVTLITNFGEYRKVLKKAAKMTDEEKAAYRDNRDRNNPQHRSWYRKGSLSYLRNGASHKTVSLPDNGQIEVLSPHWIKIQDYGEIQVVENIKHLATARLVTSKIKRKDDGTYELQLVLKNEVERKPPRTMIGADWNMKDNKVFHTSDDEKVYLNYLELPDKRLVDVNVKADQYETTINKLKRCRSIKEKHLSADSKQLADLSKQIRYYSARRANLLTERYRQIAWQMFAKYDLIAIEELDAKEMRKENQAWSEAANRGKNRKLAKVKPYEIALLLKQVADREGKTLLKVDSYKTSQVEFGTQYQEKHDPSERQWVSKYTGKLIDRDLNASCNILTWALDPKKHIKYLERQAAIKAAKKAGIAKDKLPKAIPARSLVTVN

SEQ ID NO: 3269 - protein, 368 aa, unknown
  TnpB Polypeptide
MKTTLKLKLLPSADQHQALVHTLEVFNAACNYLGEVAFENGTANKLKLQKLAYHETRERFGLPAQLAVRAIAKVCEAYKRDRSIRPTFRPHGSAVYDQRVLSFKGLDTASILSLAGRLKVPIVAYAYASDRITAYGMRGQADLILERGTFYLCVVVELPEPLKSEPKDWLGVDMGVVNITTDSDGENFSGAEVNGLRRRHASLRSKLQSKGSQSATRRLKQQSGKEARFARDVNHRISKHVVAKAQGTDRGIAVEDLTGIRERVTVRKAQRRALHSWGFHQLASFVEYKAALAGVPFVKVDPKNTSRTCPGCGHVAKENRPTRDQFLCVSCGLAGPADHFAAVEIGRRAAVNQPYAGALTNHLRTTLL

SEQ ID NO: 3270 - protein, 449 aa, Okeania sp.
MIRCHNYTQILIVYPVEILGKFSYNQKYIQGVNCTLLVIEAKLKGNKNQYKVLDEMILTGQFIRNSCLRYWIDNKDVKRNDLQKLCSVLAKDSNFPWVKKLNSQARQASADRAWQSIQRFYKNCRQKSPGKKDYPKFPSECCANKKFTRSVEYKTTGYKLSPDRKKIEFKDGFKAGVFELWTSRDLVWYSEQQISRVRVVRRADGYYYQFLVNVERKETHNFEGNVVGIDLGLNAFYTDSDGNAVNNPKYLRRSEKRLKKLQRRVSRRHEKGKKPQSNNYHKARIQLARHHLKISRQRKDHGVKTARALTQSHDLVVYEDLKVSNLVKNHHLAKSISDASWYQFTQWLEYYAKLHGIVCIAVLPHFTSQNCSNCGQTVKKSLSVRTHKCPHCGYVADRDHNAAKNILAKGLEILGAIVNSTEGHSEPGGDPFAEHSEGKATGEPDLWRA

SEQ ID NO: 3271 - protein, 368 aa, Nonomuraea sp.
VAQTVKRAYKYRFHPTTEQAQELARTFGCVRLVYNKALDERTRAYALEGRRISYVESSAALTQWKRSGDYDFLSEVSSVPLQQALRHLQTAFANFFAKRAKYPAFKSRKRSRLSAEYTRSAFRWREGALTLAKMDSPLAIVWSRPLPRGARPSTVTVSKDTAGRWFVSILVEEKISPLPPVASKVGIDAGITALAALSTGEKIANPRHEQADRRKLAKAQRALARKETGSANRAKAKLRVARVYARITDRRRDHLHKVTTRLVRENQVIAVEDLTVRNLVKNHCLARAISDASWRELRSMLEYKAAWYGRTVVAVDRWFPSSKLCSACGTLQEKMPLHVREWVCACGASHDRDVNAAKNVLAAGLAER

SEQ ID NO: 3272 - protein, 340 aa, Nonomuraea sp.
LVKRAYNRALDERTFAYASGGRRASYAESSAALTEWKKTEELAFLNEVSCVPLQQALRHLQAAFVNFFARRAGYPTFKSRKKSRASAEYTRSAFRWRDGRLILAKMDSPLDIRWSRPLPEGAEPSTVTVSRDPAGRWFVSMLVEEEISALPPVEASVGVDAGIATLATLSTGEKIVNPRHERIDRRRLAKAQRALARKQKGSNNRAKARRQVAKVYARIADRRRDHLHKVTTRLVRENQVIAVEDLAVRNLVKNRAPARAISDVSWREFRSMLEYKAGWYGRTLVAVDRWFPSSKLCSLCGAMRESMPLNVREWQCDCGARHDRDVNAAMNVLAAGLVES

SEQ ID NO: 3273 - protein, 395 aa, unknown
  TnpB Polypeptide
MFLTRKIRLKPTPEQEILFRKSAGVARWAYNYFLSENNRVWQEYLANGETGEKSVSEGKVRKYINQVLKKTTHTWLSEVGSNVMKQAVKDADTAFKAYFKGISEKPCYKSKRKSKPSFYVNYESLSRRNGGFHGEKIGLVKTSEPLPKLPKGKKYSNPHISFDGKYWYLSVGYEVSEIKCKLTGESIGIDLGIKDLAICSNGKTYKNINKSHQVRRLEKVLKREQRKLSRMQERNLSCYKIVGNKRIPVFIKPLEECRNFQKQKRKIKLVYRKLTNIRNNYLHQTTTEIVKTKPSRIVMETLNVKGMMKNKHLAKAIQKQKFYEFKRQICYKCQKYGMEFVEVPTFYPSSKTCSCCGCIRRDLKLSDCVYRCNECGLVIDRDFHASLNLANYPSA

SEQ ID NO: 3274 - protein, 265 aa, Lactobacillus sp.
LNTLMGRKKVDFVCKNFDQYLDASCWKFGSIKLLQFKNNWYIHLSATTSFSEYELKHTQHIVGIDRGLRFLAACYDEQGQTLLCSGQKVLRTRRKYKKLRAQLQAKGTKSAKRRLKKIGQRENRFISDVNHRLTKTLVNHYGPNTIFALEDLTNVRFATEKAAKKRRYEMVSWTFYQFEQFLAYKANLNSSTVVKVSPRFTSQRCPKCGRIRKENRNHELHLYICDKCGYKSNDDRLAAMNIQFLGDQYYQGVKRPKFTKLRSAE

SEQ ID NO: 3275 - protein, 270 aa, Aphanizomenon sp.
LGWLRFFNSRSIPTGFTIKAATLRKRQDGWYVSIRIEDKTIPDYIKKPLNEVNSILGCDLGITKLVHFSDRHQIDNPRFSTNKKARRTLKIRQRRINRKVKGSKNRKKAANKVGRFHKKITDKRTAYQWSVANTIVSRKVDAIALEDLNISGMLRRCQVKTDEKTGRFLKNGQSRKKGLNRSISDASWSDLILKIEYLAVKQGKVVIKINPQYSSQECRNCGHTDKSNRDGEKFICTECGYHEHADIGAAKTIRDRGFKIVRGDSAKLAV

SEQ ID NO: 3276 - protein, 429 aa, Aphanizomenon sp.
  misc_feature (172)..(182): Xaa can be any naturally occurring amino acid
MLKVVKIRLYPDAQQQQSLAQAFGSCRWLWNYFLNLMNETYKETGKGLSGYEVKKIIPQLKKEHEWLSSTYSQCLQKVCLNLGVAFNDFFEKRAKYPKFKSKHGKQSIQYPQNVKITDNQLILPKIGKVSAIIHREIEGKIKTVTITKNCSEQYFAAILFEDGKEKPELVTXXXXXXXXXXXGKAIGIDLGLTHFAITSDGSKFDNPRILNKYELNLKIKQQQLSRKQKGSNNRNKTRKKVARVHRKITNCREDFLHKLSRRIVNENQVIVVENLHVKGMMQNHCLAKSIQQVGWGMFCTMLKYKAENEGKIYQEVDRFFPSSKTCHVCLNQVGSLPLDIRFWTCKKCQTRHDRDINAAINLRDEGLRILTSGTGDKTMKCGLGGFPHEQLDQEACRPEISRSNRGRKKSTTVLSVGQEADTVPSGQCG

SEQ ID NO: 3277 - protein, 386 aa, Chloroflexi sp.
RAKKGLTRPNKEALTALETLTHATKENPTPVMPLSEIAEHVPAMFRRAAIHAALGSARSFFAHLKKWRARREKAQAKGKKFTERPAVPPHTWNKSTTLYAGQWKDRHAGSILLKVWTGTCWSWLKCRITGRDLPADIEMGSPSLVRHGNHWWLHTPIEKQFSSPPKIEKQVTTNVDTKICAVDLNLNEHLAVCTIQTVEGTCLSTRFIGGGQEIAGFRKKQFGRIARNRRKTGIIAEGEQDNVDRWRKIAHADESLSHLVSARIVQFAKEHGATILVFEHLGNLKPQKGKYSRRGNSKRAFWMKGRIFRYAKYKAWNEGIITSRVNPRNTSRECARCHALVVRYEAGQLAEGYTAGAPLVLCPQCEMKGHADRNASLVIGQRLVAR

SEQ ID NO: 3278 - protein, 407 aa, Blautia sp.
MKTGFCIKTIKYQLRCSHAEWFVSTEGYYRDVLNFYYHLLLHQKELWDLNSFQMQRELECLTIEGRDGRKPEYPLPFSKVPLYFRRSAINKAIGCLKSYLGLSRSVDKTEEYNPPLPETINASLTYFKGMYREFTDTGITLKVWDGSSWHWMECRLKGIPFPANAVVLSPSVVLDSKICWLHVPVKKETTDARNAKERMKSGDNICSVQFTNTDIFAMCCVMDGDGKQLAVRTCRGGDAYRHQCRRLLDKIEFSRQYTDKDNVEQPNKKYYIHLKNLSEYYAHNVSREIVDLCVENKVKVIVLPLYHADFSRMVQYRTGNFTPLHLSSGIRAYLKYKAWEAGIIVLEHSADHTSSRCAICGGTVKKQGSQYICENGHQGSRFLNSARNLGKKCQEDFRKKRGCLNQI

SEQ ID NO: 3279 - protein, 427 aa, Streptomyces sp.
MQLRYSFRVYPSAGQRMALARAFGCARVVFNDALRARETARAAGLPFIPSGELSRRLTASKKTPGRAWLAEVSSVVLQQSLRDLDTAYKNFFDGLKGKRPKMGPPRFKSRKDTRQSVRFTANAGWKITTGGKLRLPKVGDLAVKWSRALPSVPSTVTVVKDSAGRYFASFVVGTGPGTLPATDNVVGIDLGLTHFAVLSDGTKIDSPRFLRRAEKKLKKAQQNLSRKAKGSKNRAKARIRVARAHARTADARREFHHRLSTELIRENQAVAVEDLAVRGLARTRMAKSVHDAGWSAFTTMLEYKAALCGRAFHRIGRFEPTSQVCSQCGVKDGPKPLHIREWTCGACGAHLDRDINAAVNVARAAGLAVSACGARVRPGRLVPAQREETGTHPKPKPVTTGRQAGISVLRGGEDVKSIPTTSGACSR

SEQ ID NO: 3280 - protein, 266 aa, Escherichia sp.
VKRLQAFKFQLRPGDQQECEMRRFAGACRFVFNRALALQNENHEAGNKYIPYGKMASWLVEWKNATETQWLKDSPSQPLQQSLKDLERAYKNFFRKRAAFPRFKKRGQNDAFRYPQGVKLDQENSRIFLPKLGWMRYRNSRQVTGVVKNVTVSQSCGKWYISIQTESEVSTPVHPSASMIGLDAGVAKLATLSDGTVFGPVNSFQKNQKTLARLQRQLSRKVKFSNNWQKQKRKIQRLHSRIANIRRDYLHKVTTTVSKKPRNDSH

SEQ ID NO: 3281 - protein, 417 aa, Nocardiopsis sp.
MRTAYKVRVYPDSEQAAQLGRTFGCVRLVWNKTLAERHTAYHQRGEKTSYKQTDHALTEWKRGEDLAFLSEVSSVPLQQALRHQHTAFGNFFAGRAKYPRFKSRTARQAAHYTRSAFRIRNGQVFLAKQTRPLEVAWSWPQVDLTALNPTMVVLSREPDGRYYATFAVQTHDPQPAPECNSQVGVDLGVKDFATLSTGEKIANPRHVERKAKNLARYQRRMARKQRGSNNRRKAKRKVAAAHRKVRHARQDFLHKTTTRLVREHDLVAVEDLNVSGMTRSCRGAVDAPGKQVAQKSGLNRSVLDAVLGEFRRQLEYKAHRAKRTIAVVDRWFPSSKTCSDCGHLLAKLSLGTRHWTCPACRTRHDRDVNAAKNILAAGRVAAREHSGDACGAGVSRQGSSLPQSATKQETGPVRAGP

SEQ ID NO: 3282 - protein, 395 aa, Limnoraphis sp.
MEKAYRYRVYPTTEQEQILRRTIGCVRLVFNKALAARTEAWYDRQQKVDYVQSSAMLTQWKKLEELQFLNEVSCVPLQQGLRHLQTAFTNFFAGRAKYPNFKKKRSGGSAEFTKSAFRWKDRQVYLAKCSDPLPIKWSRQLPKGCEPSTITVRLEPSGRWFVSLRINAPTDQTMQPVDSAVGLDVGISSLVTLSTGEKIANPKAYEAHYQKLRKAQKSLSRKQKASRNRDKARLKVARIQAKISDSRKDHLHKLTTRLIRENQTIVVEDLAVKNMVKNPKLARAISDAAWSELVRQLEYKAKWYGRNLVKVDRWFPSSKRCGNCGHILDKLPLNVREWDCPDCGTHHDRDINASRNILAVGHTVTVCEASVRPDNHSVKGQLRKTRKGSKQKPKS

SEQ ID NO: 3283 - protein, 390 aa, unknown
  TnpB Polypeptide
MRRTYKYRLYPNRETTSKLYWTLNRCRELYNAALSERRDAYRYAGISIKYYDQQNDLPEIRHEIREEYADIASHVLQDVLRRLDKAMQAFFRRVLAGETPGYPRFQGRDRYDSFTYPDIAGWKLEGNQLHLSKIGTIKVVLHREIEATIKTVTIKKEVDQWYVCFSCEVPDAEKLPVSYEDVGIDLGVSHLATLSNGMMIEHPRYHRRAKKKLEAAHQAVSRGKKGSHRRNKAKQQLGKAYRKVRNQRRDFLHKESRKLVQQYQVMVFEDIKIGNLTRKPKPKKDEKTGQYLPNGAAAKGGLNKSILDASWGMFVGLCSSKAEEAGRTLLKVSPKFTSQICSTCGTVKKKDLSERWHRCDCGAELDRDVNAAMNILARGQTTLVGTQPTR

SEQ ID NO: 3284 - protein, 380 aa, Paenibacillus sp.
MHANICAIINSEIPGKELRGMFVHKAYKYRIYPNPEQQQYLAKVFGCVRFIYNKMLADKIEHYQQTEKMLHNTPARYKKEFPWLKEVDSLALANVQLHLEKAYMHFFRDKNVGVPKFKSKKTNNHSFTTNNQNGTIAIEEGTIKIPKLKTRIRIKVHRPFTGRIKSCTLSKTPSGKYFASVLVETERIPLLKTEKKIGVDLGLKNFAITSDGEVIVNPKHLRHSEQRLAKLQKDLSRKKKGSNNRNKARLKVAKLHEKIANQRKDFLHKTSTQMIRDNQVIVMEDLRVKNMMQNHKLAKAISEVSWSLFREMLTYKSEWYGRELMIAPKHFASSQCCSCCGYKNAEVKNLAVREWTCPECSVQHDRDVNAAKNLLQLAIS

SEQ ID NO: 3285 - protein, 370 aa, unknown
  TnpB Polypeptide
MLLTLKVKLQPTEEQRQRLLGTMETFNRACDDISRAAYETKTYNKYKLQHNHYYRIREQYLLPAQLAIRAISKVVESYKTERSHLHRFKPHGAIVYDQRLLSFKGLEKASLVTLEGRVVVPLLVGGYAKLTQRRIRGQADLLIVKGDFYLCLVVEQPEEPPLTPEGYLGVDFGIVNLASTSDGVSYTGDEVESVRAHYTGLKAELQHVGTESAKRRLRKVSGREARFKRQVNHRISKELVVVAKGTMRAIVLEDLRGMRSRVTVRHGQRERRGKWAFNQLRAFVEYKARVAGVPVLLVDPRDTSRRCSACGHAERLNRVSQSGFRCRSCGHVDDADFNAAKNIQWRAEVNQPIVVCQPVGLEIELQAHPL

SEQ ID NO: 3286 - protein, 472 aa, unknown
  TnpB Polypeptide
MIGSARSLWNDALYHRMNRWNKLRVSTSYGQQCAVLTAERKSNLALRELNAQAAQEVLKRLDRAFHAFFENRARYPKFKKFSASGSFTYPQAYNGSVKPDVLRKRLFLSKVGSVRTVFHRPLPADSRLKVATVTREGSGKWFASLVYEESVPPTGVHTTAWCASPIGIDLGLKSLVATSDGMKIEHPRFLSKAEKRLKRLQRSLSSKQKHSMNRDKARRRLGRQNSRIANQRRDFNHKLSTKLILEHGLIAFENLGIANLVRNRRLAKSTQDAGWGQLVGFAEYKAAWAAKSFVRVPTHHSTQECWFCGGVNEVSLEERVFKCRGCHRELDRDINASRVVMKRGLSLGNTHEELGQDKARITPRSFGENPPKAVPESTKMPVEARLPYSSIQLDGASQVREAGTTRHETGAESPRRRDAGGCHSSCRSLNVPTLKPSGMFLISPILCPIIPFTLALPAASMSLCVTMPSKTR

SEQ ID NO: 3287 - protein, 509 aa, unknown
  TnpB Polypeptide
MFVSLQFKLELKKEDKEKLIKLMRRQSSAIRVAYNTLKELEKEKKNPPAKIYHRLRQLFPELPTKYIDSAIYKAKQYPTDKPVVFGGKRLFEKLCKNHLTGKAREGLKKQWKEQRQGTLISIGSKADRGNRLTRFENINGQLHLRINTGNREFIYTKVLREPSNSKDKWLTFMAMLLESWHTQSYFPYTVELKLRDGEVYGSVSFEIPKPEVKYTKENGVIAIDTNASPIHLAIAEVSKTGELLSYQTISLHHLLGLSQNSKDHQEWILAHQILDLAIQKNKAIAIENLKKLRKGKRGDGKAILRKRLHHWNAKKLLQKLKRVAMLKGVEVIEAHPAYTSVIGMIKHAPQLNIDKDIAGAYVIERRALGFKEDTPENYEKLLKDEAYLEFALKKYEEREKELRELIGKESNEYKRNALKSELKVVENSKKLLTNLIQSFQSEPSSCEGAYGRNPAWQVLRVALLFPILGRVLPRDLSPLKPILVEGVWDRVRSRLVPLEVGGTVPIRDF

SEQ ID NO: 3288 - protein, 486 aa, unknown
  TnpB Polypeptide
MKITHGRSIEITEQLTTRAAQALAQWVGGYTVIYNQKTAQSKEEYANWLGSGKSDEARPDINGQVSYLNDELTFLNDIPCQIRRSAGAKWVQALNAAKLGLRKHPKIKPKHKKRNCYVTHELFDVQAIDDKRCVVQIKQDAKKVNRGNYLIGVVMPFPKEDAGKALYISRKGNRFWVSMSFSLNKDILSEKEIKTALTNMSDSELSSALVGYDLGVKRQVTGSDKTIYHLSDSAQTHIKQLEKRRTRYQRRYARMARANDRRNGTVKRHRTHNEVKLATKVGKYGEKIANIKHYNSHVITKQIADSTPLCAVFEDLKLANMVRRPKPKQCEETGKWLVNGASAKAGLNKAILSVNLGQIRQFARYKLAEKSKLMIVVKPHHSSQECDPCGHTEKANRPSQAVFKCVACGHHANADDNAAQIVKKRGIKHIRSDAFSKEKTVRKIHAKRKTKAQELASSGSGESLSLVSQAVFNDAPNSQQTTSPNR

SEQ ID NO: 3289 - protein, 369 aa, unknown
  TnpB Polypeptide
MLIAHKVELRPTKSQAEYLNKCIGHSRNIYNNLLHHFSQEGVKWSKKEARIKFMELRATDCQYYDEISADFLRESINNLDNAYKHFFRRVKSGKGKVGYPTKRKLGVNDICALRDKKKFTVDDDGLRFEKFNKRKTQSPIKLREKLRFTGIVKQMNISKRAGKYFCSFLVDTEDYNPKDHDRQRSVGVDFGIKDLAICSNGKKFKANQKLKASLNRLARKQRRLARQVKGSNRRAKTKQAIQKLHKRISDQRAATLHEVSDYLTRSFDRIVIEDLNVSGMMKNGKLARAVADCGFYELRRQLEYKSQWRNCELVIADRWFASTKTCSHCGYKNNDVVLGMDSWTCPSCGTWHNRDLNAAINLDNYQIAA

SEQ ID NO: 3290 - protein, 460 aa, Sutterella sp.
MDSGTERQLGPVCFRYDADMQRTERILIKPGHPNFGACHRLCGQARRLGNCAVYALRQRFFAKAPLLTRRELDKTVRSDNAEVYRSMPSAASAQRQTQIVSEQMKSWLKACASYRENPEKFKAHPNLPGYKKRYRSFIVGRNGYKIENHRLYLTGGKEYGFAPIKIRCCETQAFNAKISETVVGDVRIVPLGNSFVLELTFECEDAQVEKLKLDDSAACSIDLGIDNFATMISTKAEAPFLLVKGGKVKSINQWWNKQVAELKSLGKFGHIAAKSRRRYSQMEDYLHKASRLVIEYCLTYDIGTVIIGYNPQWKTECDMGKVNNQKFVAIPHARFIDKVKYKAQVYGIKVIVREESYTSKASALDFDAVPDYRTDDESVKAKFSGNRVKRGLYRTADGTEINADINGALNIARKELGDEWLKKQLKANGGRMNRPVSVRDIGQTLKEGLRPLETASLRAR

SEQ ID NO: 3291 - protein, 505 aa, unknown
  TnpB Polypeptide
VTNREAEVCVCGLPPLPFFRAVPPEPSVSEQRGVPSSALREFFMDTIKNSDLPRGFKAGTAAAGFKAQGRDDLGIILSDRDAVVAGLFTLNVFKAAPVMVCKDILRRFGKARAIIANSGQANACTGEEGIARCHETQRMVAGPLGISPDAVMPMSTGVIGDQLKMDLWEKAGEKAGKPRLAYENHAMPVFYRDVMYREEKEGKDEAYLKLYDGHDWKWFCVRLNHTDMEYLRRNWSGKKASAPTLEKRHHKYFLRFSYTEEVTLTKTPVKEQIICSVDLGINTDAVCTIMRADGTVLGRKFINHPSEKDRMYRTLGRIRRFQREHGSAQSRGRWAYTKRLNIELGRKIAGAIVKNAEENHADVIVFEYLEMQGKISGKKKQKLHLWRKRDIQKRCEHQAHRKGMRVSRVCAWNTSRLAYDGSGSVSRDLKNHSLCVFQTGKRYNCDLSASYNIGARYFIRELLKPLPVTERSLLEAKVPSVKRRTSCVYADLKELHLQMEILKAA

SEQ ID NO: 3292 - protein, 451 aa, unknown
  TnpB Polypeptide
MLLDAAGLGTAAGCGEVGRGSEVPVHDVPVDVERGNHVPADAVLLRDCHRPVACCGVVQVRYRYRIYPGPGQQQALARVFGCARAVYNDCLVLRDGCHAVGEKISDTEVQRRVITLAKLTPERAWLAGVASVALVQACQDARRAYRNWFDSLRGRRKGPKIRHPKPRRKHGRQSIRLTRNGFVLHGDRLYVAKVGDIRVAWSRVLPSVPSSVTVIKEADGRYYASFVVEREAAPLPACDREIGVDLGLASLAVTSAGEMIPNPRFLRTAQRRLRKAQRVLSRRQKGSANRAKARHRVAVLHRTVRETRLDHAHKTALRLVRDNQAVYAEDLAVSGLMRTKLAKSVADAGWSQLVRCIEEKAAQYGRTFARIGRFEPTSQVCSACGVKDGPKPLSIRIWACAACGTVHDRDVNAARNILAAGRADKENGCEAGARPHHVAAGAEAGTHRSAA

SEQ ID NO: 3293 - protein, 404 aa, unknown
  TnpB Polypeptide
MPDKRIRTAVASLVEPTVHKEQKLQTLQSLYQEALCEAFDANATTMTAVNDIVTPYDLPYQAKDALKRHVPGFLKGGSTELSETQPIRFTNRAAMFDHSTDRTHAFCWEVPQPGRGTNFWIPLAINPDQREWWLQLLDGEATAGQLQLINRPRQARWELHVPLTLPTTKPEVDYGTCTPVGFDVGEAILLTGCALLDGRPVDPLLVDGGRARHLNQTLQTTLQRLQERDAAEWRIDEQAAYFRNALRDEIETATRNAVEYAARFDQPVIALEQLTSIQEDLNFGPHMNRRLHVWAFDQLQTRIADKAADAGIPVRYVNPAYTSQICHACGEIGTRPKQAEFRCPNDDCWVSVFQADINAAANIAGRLNPWGESCPWNPDSDDTPWSGCTRDSATGPREQNSSQR

SEQ ID NO: 3294 - protein, 201 aa, unknown
  TnpB Polypeptide
VETEHVELPHIKQNTGIDLGIKELCITSAGKKYENPKIIRKYEKKLVKLQRQLAHKEKRSQNYYKTKKKIAICHEKITNTRKDYLHKMSHEIISENQVIVSEDLQIKNMVKNHRLSKSISDVSWYELTRQLEYKAKWNGRKYVKIDTFYASSQLCSVCGYQNTETKNLSVREWTCPVCGTNHDRDINAAKNILEEGLRQIA

SEQ ID NO: 3295 - protein, 448 aa, Moorea sp.
MANLRQTFRIYPNQTANSKMFYARKLHQLLYNAGIADRRYEWKANKKSIGYFDQQNCLPDFKKCWPEYKELYSTSLQATLKRVDLAYNRFFQGLSEIPKYKPIRKYSGWTYPSKAGWKVNTDGKNGTLTLNDLGITIKMRGQTKSWGTPTTLTITYKPSVNAWYASITVKIESQTAKYGSGSDLTYEKIVAYDLGTETAITAFNGREFEEIANQRFTKTLESKVKAAGKEKRSKQAPNFKKGIKASKRWKKANKKESKLKRKVGLARKDWQHKVTSDLSSRYDIGVTEKLNTKGMTLKAKKGSKRKKQKAGLNKAILDVGFGTLNKMLTYKIELKGGIVLQLPTRQLKPSQRCPECGKVHKSWAELSNRYHVCDACGFEFDRDKTSAMVMFNAANGKQPGYGTDLDKRGFSSSTSKTSKHTGSMRQLGKMKRQKSRSKDGSADTPSWP

SEQ ID NO: 3296 - protein, 332 aa, Moorea sp.
MKVERNATHLKSGITNKRYKGLDTPPKFIARTCTFSYKRDYSFVKGKASLVTLEGRIKVDYSGYKKHLDLIHSGIAKIGAAIICYAEKTKTYYLLVSLELELPELKPEAIKRVVGVDVGQRYLAVTFDTNKTAGFFSGKSVIHRANRYYKTKQTLQRKGTRSATRRLIVLSKRERRFNADINHCIAKRVVIFGSLIGLENITHNPDQIKLIQLGHEPSIKLCKPHINKRIWEFTKLHDFIDYKAVLGGALAIRVDADFTSQSCPRCGHTSKANRPNQGLDFDCMACGYKLHADLVGAKNIALRTLLLRQDFERTGRLSTVPDVSQDETKTLD

SEQ ID NO: 3297 - protein, 338 aa, Moorea sp.
YSQVLQDVVKRVKHAFDRFVKGDCNGKRTGRPRFKKQHRYRTFTYPQMKEGCLDGNLINLPKIGKVKVVLHRPIPVREASATPNGFKIKTASITKKCDGYYLVLSLEDQTVPEVKPDINPDSIVGIDVGLKEFLTTSEGETIEIPQYYRKSQKRLKVIQKRVSRRKKGGSNRLKAIKQLGRQHKKVADKRKDFHFKTANYLLSKYDVVAHEKLNVKGLAKSRLAKSVLDAGWSSFLTILASKALNAGLLAVPVSAQNTSQNCSNCGKKVPKKLHTRWHDCPHCGCSLVRVAWPTANRDHNAAINIRNRAAGQSVLKAQRLLSDGRIGWEAYTEPNGSV

SEQ ID NO: 3298 - protein, 418 aa, Moorea sp.
MNYTYRIYPDSTQQTELLEWLEICRGIYNYALRELKDWIASRKCMTDRCSLQKEYIIAADQPFPSYHRQQNNLPKAKKQFPHLSKVHSQVLQTTIRRLHDTWDSFQKRGYGFPRFKKLGQFKSFVFPQFKNNPLNGFTIKLPKIGLVPINLHRPIPDRFKIKQVRVLSKVRGTQWYVVVTIESDVSVPDAPLHGRAIGIDLGLERFLTASDGSFQQRPKFFKSMQRKLKSLQRRVARKQKRSQNWEKAQIQVARIHHRIANRRKDFHLKTAHQLCEQAQTIFAEDLNPKGLTRGMLRKDCVDAAFGQFLSLTEWVCWKRGVYFAKVNPNGTSQTCPKCLGTVPKGLEVREHHCPDCGYRTHRDHAAAEMVLHHGLEPIVAQGLWGMETACQVGLSGVDDLDKWRGAGISNREVGKPGL

SEQ ID NO: 3299 - protein, 406 aa, Moorea sp.
MRTAYQYRLRLTKMQEAEIERWLDMLRHQYNYFLADRFNWYEQNRCSINSCPLVCYLPELRDNPDYYSQKRTLPQLKKDRQWYKAIHANVLQDCVKRVDLAFKRFLKGDSNGKRSGRPRFKSKSRYKSLVFSAFSKNPIRGNKFNLPKFGWVKMIYHRPIPKGFKIKTATVTRKADGYYVTLSLQDDSVPELIQIEQVSNPIGIDMGLKSFLVKSDGTEVPIPKYYIKAQKRLKKIQKAVSRSKKGSNNRKRAVKKLGKAHKKVADTRKNFHFKTAKNLLDDHDLVAHERLNIKGLAKSNLAKSIHDAGWGQFLSILSNKAENAGLVTVAVNPRNTSQNCSNCGKKVPKKLKDRIHSCSHCGYTEDRDVNAAINILKLAVGHSVGSKAFRVSEPVGGVGKKPTLNL

SEQ ID NO: 3300 - protein, 523 aa, Moorea sp.
  misc_feature (466)..(499): Xaa can be any naturally occurring amino acid
MNKLTMFLPESLLPGSGSVPGHLKGGLTKAKSKELKPLEDFEDTILTQLSLFQQKKQIETKEQQSYMQGFQAALKEMISINKYSFLSLVTQTQKSSETSAAVSTSKEKVFTPYWTEFSAALASILSLPTKIGSVALDSILSHGCALNSKLKYWFSTKRTSAQNKRWLKMFWQLSTSSVVGSTDSGSTREKSLKTVSYRVYPSKELEKIWKKWVSAVRKVYNISIEQLNRNQGYTKVGKKGGKHGFRTWLKQSGLIPQWCRDLNVSKILDNASMEAYTAWKETAKQPKSVGKGKNLLPNPQAGLKIGKFRSVRDHHLTIQFDPTAYKAGRWMVSKTKHLPKPEFKGQDFCVLTDGSTELTYNKGRWFAHFPVEFDIEPTETKKVIALDPGVRTFMTGFDGTDFLEFANNDFQRIAKLCSHLDKLKSEHDKSKGRTHKRRRYKLRIAMEPTFRRLVRPVNNIFGREHXXXXXXXXXXXXXXXXXXXXXXXXXXXXXXXXXXPPSPPILGGTKLLKSPKVGGFRGL

SEQ ID NO: 3301 - protein, 366 aa, Moorea sp.
VKTPNKVIRTDKWKLNPSSEQKALFAETVKVYRQACRYLVGIIYTDWSELGGLTADQLTPAVEKLMHETAKRPNIKYPQFNKAFYKFPSYYRRAAIAFAAGQVSSFVTRYREWQSGNRKNRDSKPPRLNADAGCYPALYKGQCYKLYGFDQVEIKVFDGKNWVWTMVQITGLRQRHQVTTNKMMSPSLIFNDRCCHLSVPFTCKPEKRKPEANVTAVDLGINTTATVAVVTHDGTVIHSAKPTLRERDFIHLGRDIDRRDKRLKSVSKRASKTMGRGGKLHKGFCSNTYQKCQRINNQISHVVSKGIVEIAEKFNSVRVAWPTALAIVFENLKGWKPRGGKKRSNLRQRFHGWLKAKIRSFTETKP

SEQ ID NO: 3302 - protein, 426 aa, Moorea sp.
MYGCQQHLIRRDADTKAILEFICSEANKLTNCATYYCRQILFKTGKYVKKYELDKLLKSNVHFRAMRSACAQQTLHGVIESFKSYRALSKLYRSGQLKYQPRVPKYRKKGGLAVVTYPARWVKLVDNQLKFPLGKQVKAWFGIDHFLLPMPSNLEFKSIKEFRFVPRNGCFYLEFVYKQSDLPPINHSPHAIGIDPGLNNWLTCVSTTGKSFIVDGRKIKSQNQWYNKQVAKIKKDKPQDYWDERLASITERRNRQMRDNINKAARLVINWCLINQVCTVIFGWNQRNKDKINIGKKNNQEFVQIPTARLKNRIQQLCDQHGINFIETEESYTSKASFLDNDFLPTFGEKPGGWKAAGKRVRRGLYQSARKQLINSDCNGAANILRKVATQLDLSLAKVGRAALNLPQRYKLDYWVGQRDYSLFAP

SEQ ID NO: 3303 - protein, 258 aa, Moorea sp.
MEFKAVTNKAQKLAIDEAIRTSRFVRNKVLRYWMDNKGVGKKELYRYNTDLRAEFKFVEDLNSHACQASVENVERAIHSFSDNCKKKIPGKKGYPRFKKSSRSVEYKTSGWKLCPDKKSVNFTDKKGIGKLKLKGTWDLWRFDVKLIKRVRIVSRADGYYVQFCVKVDNSETVETTGKIIGLDVGLKDFYTDSNGYREPSPRFYRKGEKRLKFYQRRVSRKKKGSANRKKAINRLGRTHLKVSRQRLEHAKRLGTKLP

SEQ ID NO: 3304 - protein, 383 aa, Moorea sp.
MAPNHSYTTKLKLNNRQKTLMAKHAGFSRWVYNWGLGMWKDAYNEGLKPNIKTLKRLFTNHVKPEYPWMRELSSKVYQYAFINLGEAFKRFFKGWGKYPRFKCKGKNDRFTIDNSGRPIRLGGLIHNLPFLKQVRTFEPLPDCLTKKVTIYKKAGEWYISFSIEKIFEPTLKERERVGVDFGIKTLAVLSSGVEFEGLKPYRNAQRKLSRVQRKLSKKERGSQNYLKTQLEVQKLHHRVANLRKDYLQVRPVANLIRQRKAHLYKMTTYIAKNHGEVVIEDLNVSGMMANHKLAKAIGDLGLHEARRQLTYKCERYGTLLVVADRFFPSSQLCSNCGNQQPMPLSQRVYSCDCCGNKIDRVGHASVNLERYNEYGSTRKPVEG

SEQ ID NO: 3305 - protein, 483 aa, Moorea sp.
  misc_feature (447)..(480): Xaa can be any naturally occurring amino acid
MPKKVDAAKNRSTQIVTVIGMSESVEAELLSTMKKLGIVRAESYNKLGSINYWSLDWKKAYPDVRSFRTPESLGLPSKLMEWTVSDVAKAITASQAACTDAVIKKVYKRFPGKDNNNTRKDLCKQLKSLAFLDNPLLHRLVRKEFQRGHSWIKNQIVYQQGGYSCRRLYRNTYQLEIAGLRRGKRNQIIVRSNRKIKGQIRLIYNQLLSKFEVHFLVNHGQVVIPAKLRNIGLDKGYTEAFYDSDGQAHGKELGKVTTNKSVRICAKNRNRGKLWTLHRKLEKIDPAKSARILENNLTRKTENKRYRQNQSEIKAIIGAASKSVFGGKSLKVFAEDLTQPIKNKRQSKAMSRKLNSWMKGELRESLQKWADWTGSVVTEVQPSYTSQVDFRNGTLLGKRTGDNFTGFDGVVLQADYNAARNILSRGTDKGAIRWLETKTSYGILGDXXXXXXXXXXXXXXXXXXXXXXXXXXXXXXXXXXVRF

SEQ ID NO: 3306 - protein, 430 aa, Moorea sp.
MRLTYCYRIKPNAEQIATMERWLELLRRHWNYALGQRLDWLNRTRCSIDRCSLEKEAIGEIPQVVNYYTQQAALKETKKLFPEYKQIYAETQQVNLQRLNKAWDRWRKPDKSGKRGGRPRFKKQGQLRSFVFPRVNNAKAGAHLNVYWAAPKHLSKDGVLKLSRIGEIPVVMHRPIPNGFTLKQCTIIKKADGWYACFSMQDDRVPELLPMDLVKSAVGIDVGLEKFLTTSDGDGIEIPQFYRLTQNKLAKAQRVLSRRVKGSKNWEKAKHKVALLHLHLARCRKEFHYQVAHWLCSKYDLIGYEDLNIKGLARTKLAKSIHDAGWGLFLEILQAVAVKRGLLVQKVNPRGTSIECFNCGKRVEKDLSERVHHCPSCGVKVDRDWNSGINILNRALMAVGLPLNGCGKSVQGTEEQQVSFVNLRSLHHNL

SEQ ID NO: 3307 - protein, 510 aa, Moorea sp.
  misc_feature (456)..(489): Xaa can be any naturally occurring amino acid
MMPKKVGVTKKISTQIVPVVGMTESVEAELLSTMKKLGIVRAESYNKLGSINYWGLDWKKAIPEVKSFRTPDTLGLPAKLMDWTINDVAKAITAQQAACIDAVIKKIYKRFSGKKDQKTRKELCKQLKTLAFLKNPLLHRLVRKQFHRGHSWVKNQIVYQQVGYNCKRLYQNTYQLELAGLTRGKRNKIIVKSNRKIKGQIRLIYNQLLPKFEVHFLGDHGNVRIPAERRSIGLDKGYTEAFYDSDGQTHGKGLGKAATQKSDRICEKNRKRGKLWALHRKLEKIDPVKSARVLKNNLARKTENKRYRQNQSEIKAIIGAASKSVFNGESLKVFAVRVAWPTASDLTQPIRNKRQSKPLSRKLNSWMKGELRESLQKWANWTGSVVTEVQPSYTSQVDSRNGTLLGKRTGDNFTGFDGVVLQADYNAARNILSRGTDKGAIRWLETKTSYGILGDXXXXXXXXXXXXXXXXXXXXXXXXXXXXXXXXXXFSKSPFFKGDLGGSPRQENTP

SEQ ID NO: 3308 - protein, 312 aa, Moorea sp.
MIILEFKAYGNKTQYQAIDKAIRTVQFIRNSCLRLWMDNKGLSKYDLNKYCKTLAKNFPFANELNSTARQAAAERAWSSIARFFENCKKKVPGKKGFPKFQKHCRSVEYKQSGWKLSPEKKSINFSDKKGIGKLKLKGTWDLWRFDKKLIKRIRIVKRADGYYVQFCISVDVKEQLNPADATVGLDVGLKEFYTDSRGKTEPNPRFYRAGEKKLKLYQRQVSRKKKGSSNRKKAINRLGRQHLKISRQRQEHAKRLARCVIRSNDLVAYEDLRVNNLVKNHCLAKSINDAGWYQFRRWLEHFGWGGDMRAKK

SEQ ID NO: 3309 - protein, 400 aa, Moorea sp.
VSLTLIVYEFKAKGKDSQYKAIDEAIRTYKFIRNSCLRYWMDNKGVGKYDLNKYCRVLAKEFPFANQLNSQARQSAAECTWSAISRFYENCKRKIPGKKGFPRFKKHPRSVEYKKTGWKLSENRKAITFTDQNKIGKLKLKGTYDLHLYQLEDIKRVRLVRRADGYYVQFCISVDLKIETEPTGKAIGLDVGIKYFLADSLGNTIENPKFYRKSEKQLNRANRRKSKKYVRGAKPQSKNYHKARCQYARKHLRVSRQRKEYCKRVAYCVIHSNDVVAYEDLNVKGMVKNRHLAKSISDVGWSTFRHWLEYFGVKYGKLTITVAPHNTSQNCSNCGKKVNKSLSTRTHICSCGYTEDRDINAAKNILKKALSTVGHTESLKLGEFNPLLMLEQSCIRKIEL

SEQ ID NO: 3310 - protein, 350 aa, Moorea sp.
  misc_feature (6)..(6): Xaa can be any naturally occurring amino acid
MPKVPXKEQEYGFPRFKNRYRMRSFVFPQFKTNPINNEWIKLPQIGLVKLRLSRPIPDGFKIKQVRIVRRASGYFAMLSLQSEVSVPDTPPRGHPLGIDVGLDKFLATSDNKLIERPRFLSEMHGKLKLLQRRLKLKKKGSKNKHKLNCKIARLHQKISDTRKDFHCLDAVAHGGNHGSRSWGEPPRPRCLPKTALHRFKLANYLCDQAGMIFVVGEACPKDMDLDFRTWAKGMLGKHTLDAGFGQFFDILAWVCWKRGVYFGKVDYRYTSQICPNCGINTGKKYLSERIHKCPECHYEINRDVSAAQVICQRGITAVGQIVGKKIDCVGGLSGVDNNLDKCLRSSKPKL

SEQ ID NO: 3311 - protein, 364 aa, Moorea sp.
VLKKQRPWYKQIHSTVLQQMLRQLDTAFTKFFKGEARYPKPKRRSRYRSFKYSPGQVKLDGNRIYLPGIGWMGFYNSRPIPDGFTMKSVTVRRKSRGWFVSIQIEDKSVPLPPVKTRDEIDPGRVKGCDLGIRKLVSISDGQIIANPAKSSKFNRQSRRLKLRQRAASRKRKGSKNRKKSFKKVGSLHERIENGRSVYHWETAKKLVDGADALVFEDLNIKGMKSRCKPKPNENGGYDSAKPTLRERNGQSAKRGLNRSISDAAWGELIKKIEVVAAKSGIPVIKVSPRHTSQECPKCHHTSAENRSGEKFVCTECGYHDDADVNGAVNIKNRGLKKLGINPSQLPSVRSRSVAYGQGKLRPRR

SEQ ID NO: 3312 - protein, 285 aa, Moorea sp.
MQRAFKTQLKLNNRQKTLMAQHAGYSRWVWNWALNIWNEAYQAGLKPSANKLKKFYTNHVKPQYTWQATLSSRVYQFVFMHLGEAFNRFFKGTAQHPKFKKKGRNDSFTLDNCGKVMEFSGTRLKLPFIGWVSTYEPLPEIQTKRVTISRVANSWYISVAYEFESESTPKSREYLGVDVGVKVLATCSDGTVFHNPRAYKQAQNKLARLQRELSRRQIGSNNRNKTQLKLAKVHQRIANIRKDAIHKLTSWLCKNHAVIGLENLNVSGLLKNHKARRCYSRCRSL

SEQ ID NO: 3313 - protein, 531 aa, Moorea sp.
MPRSVGVAKRISTQVVPVVGMTKSVELELLSTMKKLGVVRAESYNKLGSINHWGLDWKKAIPEVKSFRTPDTLGIPAKLMDWTINDVAKAIVAQQAACRDVVTKKIYKRFPSKENQKTRKELCKQLKTLAFLNNPLLHRLVRKEFHRGHSWIKNQIVYQQEGYQCKRLSRKTYQLEVAGLTRRKRNKIIVRSNRKIKGQIRLIYNQLLPRFEVHFLVDHGNIEIPTERRSIGLDKGYTEAFYDSDGQAHGKGLGKAATQKSDRICEKNRNRGKLWALHRKLEKIDPAKSARILENNLTRKTENKRYRQNQSEIKAIIGAASKSVFNGKSLKVFAVREAWPTASDLTQPIKNKRQSKAMSRKLNSWMKGELRDSLQKWADWTGSVITEVQPSYTSQVDSRNGTLMGKRTGDCFTGFDGVVLQADHNAAKNVLARGTDFEITRYMSKAEVQAVLLRRTARFLEGMGLSLLDAVKLGWLDSKHSKTKAFKQLLVEMPGTPRKMSGRLDSNCCMTTPPSGNNKMHLDRFVPDYPD

SEQ ID NO: 3314 - protein, 412 aa, Moorea sp.
VIILEFKAKGQESQYSAIDEAIRTVKFIRNSCIRLWLDNKGTGKSDLSRYSKILAKEFPFANELNSTARQAASERAWSSIVRFYDNCQKKVPGKKGFPRFQKLARSVEYKKSGWKLSPDKKSITFTDKKGIGKLKLKGTWELWRFDKKQINRVRIVKRADGYYVQFCVAVNVKEEVEHTGEMVGLDVGIKEFYTDSNGHSEPNPRFYRKGEKRLKFYQRRVSRKKKGSSNRKKAVNRLSRQHLKISRQRQEHAKRLARCVIRSNDLVAYEDLRVKNLVKNHCLAKSINDAGWYQFRKWLEHFGTKFDRITVAVNPAYTSQNCSECGEVVKKSLSTRTHVCECGCELDRDHNAAINIRNRAISTTGHVGTWIINPNASGDLASTVLDSGQVQQVESMNEESPRLMTGECQPIS

SEQ ID NO: 3315 - protein, 278 aa, Moorea sp.
MEFKAVLKEPQRFAINEAIRTARFVRNKVLRYWMDNRGTGKKELYRYNTQLRDEFKFVKDLNSHACQASVENVERAIKRFFDNCQNKIPGKKGYPRFKKHSRSVEYKQSGWKLSPDKKSIKFTDKKGIGQVKLKGNWDLWRFDQKLIKRVRIVQRSDGYYVQFCVKVDNYDQLEATGFTVGLDVGLKEFYTDSDGYSEPNPRFYRKGEKRLKFYQRRVSRKKKGSTNLRRAINRLGRHHLKISRQREEHAKRLVRSYRKNKEAFMVSRLCIKGLNLCY

SEQ ID NO: 3316 - protein, 410 aa, Moorea sp.
MIILEFKAWGKKHQYSAIDEAIRTVKFIRNSCIRLWLDNKGTGKYDLSKYCKVLAKQFPFANELNSSARQAASERAWSSIAKFYDNCKKKVPGKKGFPKFKKKVRSVEYKQSGWKLSPDKKSITFTDKKGIGKLKLKGKWDLWRFDKKQIKRVRIVWRADGYYVQFCVSVDINEELESTGKTIGLDVGLKDFYTDSDGNTEPNPRFYRKGEKRLKFYQRRVSRKKKGSSNRKKAVNRLGRTHLKISRQREEHAKRLARCVIRSNDLVAYVRAACRRQDLRVKNLAKNHCRGLSINDAGWYQFRKWMEHFGVKFGRITVAVNPAYTSQNCSSCGEVVKKSLSTRTHTCKCGCELDRDHNAAINIRTRALSTVGHTGTWIIDPNACGESTSTLPDSGLVEQVGSLKQESPFF

SEQ ID NO: 3317 - protein, 417 aa, Moorea sp.
MVTLIIDTMRSAYQYRLRLTKTQVTEIERWLEMLRYQYNYLLADRFRWYEQNRCSINACPLVCYLPELRDNPDYFSQKRTLPQLKSDRPWYGEIHAHVLQDCVKRVDLAFKRFIKGDYKGKRSGRPRFKSKGRYRSLTFPSLGKNPIKGNLLKLPKFGWVKMIYHRPIPDGFKIKTATITRKADGYYVTLSIQDDTVPEIIPAAEVSNPIGIDMGLKSFLIRSDGSSVEIPQYYRKAQKRLKKIQKAVSRSKKGSNNRKKTVTKLGKAHKKVADTRKDFHFKTAKNLLDSHDLVAHEKLNIKGLARTRMAKSVLDAGWGQFLSILATKAVRVAWPTAINAGLLTVAVNPRNTSQNCSNCGKKVPKKLIDRIHSCPHCGYTEDRDINAAKNILNLAVGHPVRSKACRATVRVASGKAR

SEQ ID NO: 3318 - protein, 403 aa, Moorea sp.
MIVLEFKAYGKQKQYSAIDEAIRTAKFVRNSCIRYWMDNKGVSRSDISKYCTVLAKQFPFANELNSMARQASAERAWSSIARFYDNCKKKVPGKKGFPRFKKHCHSVEYKTTGWKLCPDKKSIIFSDKKGIGKLKLKGTWDLWRLDVKLIKRVRIVRRSDGYYVQFCIKTDIIESVEPTGTSIGLDVGLKDFYTDSNGNTVPNPRFYRKGEKRLKFYQRRVSRKKKGSTNRKKAINKLGKTHLKISRQREEHAKGLARCVVRSNDLVAYENLRVNNMVKNHCLSKSINDAGWYKFRIWMEYFGTKFGKITVAVNPAYTSQNCSNCGETVKKSLSTRTHICQCGCLLDRDHNAAINILERALSTVGHTGTWILNPNARGDLVSTVLGENQVQQAESLNQESPRL

SEQ ID NO: 3319 - protein, 326 aa, Moorea sp.
SSISRFFENCKKKVPGKKGFPRFQKHCRSVEYKQSGWKLSPDKKSITFSDKKGIGRLKLKGTWDLWRFDKKQIKRVRIVKRADGYYIQFCVSVDVNEQLAPSHSTIGLDVGLKEFYTDSTGNTEPNPRFYRTGEKRLKFYQRRVSRKKKGSSNRKKAVNRLGRQHLKISRQREEHAKRLARCVIRYNDLVAYEDLRVKNLAKNHCLAKSINDAGWYQFRKWLEHFGRKFNRATVAVNPAYTSQNCSECGEVVKKSLSTRTHVCQCGCKLDRDHNAAINILNKALGTVGHTGTWIIDPNASGESTSTLPDSGLVEQVGSLNEESPRL

SEQ ID NO: 3320 - protein, 164 aa, Moorea sp.
LTFFSENSIGKIGEGDFSQIQRLCQHLDNLISKISKTRGKQKRRMRKAARRMIIRIQNLVNELHHKAARFLVDNFDVILLPTFETSQMSKKQHRKLRSKTVRNMLSFAHYRFKEFLKHKATEDGKVVVDVCEAYTSKTISWTGELVNIGGSKIIKSKIDGRSMD

SEQ ID NO: 3321 - protein, 412 aa, Moorea sp.
MLTLNYEYKLVPTKKQTAIIEDMLAVCRKVWNYALRERKDWHESKRCSINYCSLQKEYIISANEPYPSYHLQAANLTKAKKTNPELKRTNAQVLQQVLKTLDLAFRNIKEQEYGFPRFKNRYRMRSFVFPQFKTNPINNEWIKLPQIGLVKLRLSRPIPDGFKIKQVRIVRRASGYFAMLSLQSEVSVPDTPPRGHPLGIDVGLDKFLATSDNKLIERPRFLSEMHGKLKLLQRRLKLKKKGSKNKHKLNCKIARIHQKISDTRKDFYFKLANYLCDQAGMIFVEDLDFRTWAKGMLGKHTLDAGFGQFFDILAWVCWKRGVYFGKVDYRYTSQISPNCGINTGKKDLSERIHKCSECHYEINRDVSAAQVICQRGITAVGQIVGKKIDCVGGLSGVDNNLDKCLRSSKPKL

SEQ ID NO: 3322 - protein, 422 aa, Moorea sp.
MILNYTYRLKPDARQVELLCEWLETCRVSYNYALRELKDYISSRKCAIDRCSLESEYIMSADYPFPGYQQQQNNLPKAKKEFPRLKAVPSQVLQTNIRRLHDAWEFFVKRGFGFPRFKKYGQMKSMLFPQFKTNPITGWHIKLPKLGRVPINLHRPIPEGFAIKQVRVVKKAVGWFTVVTIESDLQIPDPMPHGHVIGVDVGLLSYCATSDGFVEPGRKFFKDLHRRLKVLQRRLSKKQKRSANYEKARIKVEKQHNHIAFKRKDYQFKLAHCLCDMADTIFLEDIDFRIMAKGFLGKHTLDGAFGQFRTILKYVGKRRNVFVDQVDHRGSSQTCPNCRVEVRKELEDRVHTCPQCSYCVDRDVAAAQELCNRGIEKLSTQGLWGKEIGCQVGLSGAFSLDQWRRAAMSNSDIGNPALYPSG

SEQ ID NO: 3323 - protein, 299 aa, Moorea sp.
MIILEFKAYGKRNQYLAIDEALRTVKFIRNSCIRYWMDNKGVNKFDLNKYSKILAKQFPFANQLNSTARQSSAERAWSSIARFYENCQKKVPGKKGFPKFQKHCRSVEYKQSGWKLSPDKKWIVFSDKKGIGKLKLKGTWDLWRFDKKQIKRVRIVRRADGYYVQFCIQADNNEQLKPADATIGLDVGLKDFYTDSKGNTEPNPRFYRTGEKRLKFYQRRVSRKKKGKAVGHASRTANRRKAINRLGRTHLKISRRREEHAKRLARCVIRSNDLVAYVRAACRKARFEDKKSGQKPLSS

SEQ ID NO: 3324 - protein, 396 aa, Moorea sp.
MYKTVPIKATFTDEENAFWLFQCQQANSLWNCAVYHAKQKHYSWLQQQTEALTIYWIEDDIRYGWKTYKCATKYADLCKELKENPHYKAMAAQSAQQTLKSVAESISSYNQLVGLYYKGQVDRPRLLRYRKKGGLAALTFPRQALTYKNGLFHPSISKESKPELLTEITLDPPEFIDPDWIKEVTIRPYLGQLWVDWVIDDGKQPVEHNPHLDYSQAWSFDHGGDNWVTGVSTHGKSLIIDGRKLKSMNQGYARLVAKYKTGKPDFYWDSNLDRVQRKRNNQMRDAINKAARFIINRCLIDSAKPTLRERIGNLIIGWNERQKDSSNMGKRGNQNFVAIPTKRLINRLEQLCPEYGIKLTITEESYTSKASYLDDDSLPKHGEKPAGWTPSVRFVG

SEQ ID NO: 3325 - protein, 364 aa, Clostridioides sp.
  misc_feature (294)..(350): Xaa can be any naturally occurring amino acid
MYPNKKQQELINKTFGCCRFVYNKYLAKRIDVYKNNKETFTYKQCSSDLTNLKKELKWLKEPDKFSLQNALKDLDNAYKKFFKEKAGFPKFKSKKINRFSYKTNFTNGNIMYCGQHIKLPKLGMVKIRDKQVPQGRILNATISKEPSGRYYVSLCCTDVDIEVFENTNNQIGLDLGIKEFCISSCGEFIENPKYFKKSLNKLAKLQRELSRKTIGSLNRNKARLKVARLQEHIANQRNDFLQKLSTKLIKENDIICIEDLQVKNMIKNHKLSRLISDVSWSEFIRQLEYKANWXXXXXXXXXXXXXXXXXXXXXXXXXXXXXXXXXXXXXXXXXXXXXXXXXXXXXXXXXKYIKRRIKTNNNSK

SEQ ID NO: 3326 - protein, 403 aa, unknown
  TnpB Polypeptide
MIVLEFKAKGKTTQCKAIDEAIKTAQFVRNKCLRFWMDNRGIGQKELYSHNTALRAEYPFVKALNSHACQVAVEWAYSAIARFYENCRKSVPEKKGYPRFKKDCRSVEYKTSGWSLSETRKQITFTDKKGIGKLKLKGTWDLNFYQLEQIKRVRIVRRADGYYVQFLVKVDNKIDCQPTGRAIGLDVGIKEFYTDSNGRSEPNPKFYRASEKRLKFRHKRVSRKKKGSANRKKAINKLGRVHLKISRQREEHAKRVARCVIQSNDLIAYEDLRIKNLVRNHCLAKSINDAGWYQFRKWLEHFGVKFSKITIAVNPAYTSQKCSSCGAIVKKSLSIRTHICKCGFLLDRDWNAALNILKAALSTVGHTGTWILDPNASGDLASTLAGVILSEQVESLNEESHRL

SEQ ID NO: 3327 - protein, 379 aa, Runella sp.
MLKAFKYELDPTLEQKTQLNKTFGCVRFVYNWGLNEKTKAYQNDKSKISCFELINRIALLKKQDEFKWLSEIHSQPLQMAMRNLDNAFTNFFNKRGAFPNFKKKSNNQSFQYPQGVRTNDNNIFLPKVGWVHFYKSREYFGEIKTATVSKTPTNKYFVSILCETAIEKPVKKPIEEKTSVGIDVGIKTFAVCSDGQVFENQKYLNRNLKRLRIEQRTLARRYKKGVKISEQSKGYHKQRLRVAKLHEKISNQRNDFLHKVSTKLVNQYDSIIVEDLNVKGMLKNDKLSKAISDVSWSKFNTFLQYKCDWYGKNYIQIGRFEPSSKMCNHCGHINKELKLKDRFWTCQECQKTNDRDFNASLNIKSFGLGTPPKIHNVSR

SEQ ID NO: 3328 - protein, 415 aa, Bacillus sp.
MYLCVKQQLNHLTKDEYSNLKELCHIAKNLYNVGLYNVRQYYFEHKEYLKYESNYHLAKTNENYKLLNSNMAQQILKEVDGVFKSFFGLIKLAKQGKYDFKSINLPRYLKKDGYYPLVIGFVRLNGNQLTIPYSNLYKKHHAPIIINIPPILLDKKIKEIRIVPKNNARFFEIQYTYEVAEEQRDLNYQKALAIDLGLNNLATCVTTERQSFIVDGRKLKSINQWFNKENARLQSIKDKQKIKGTTRKQSFLTYNRNNKVNDYINKTCRYIINYCLENQIGNLVIGYAETLQRNINLGRITNQNFVNIPVGNIKEKLEYLCKLYGIKFFKQEESYTSKASFFDNDEIPKYNADNPKDYQFSGKRVKRGLYKTKSGKLVNADINGALNILAKSKAVDITVLCSSGEVATPQRIRIA

SEQ ID NO: 3329 - protein, 226 aa, Bacillus sp.
MSKIYQTEFWDQKIDEIKSKRDFCERKSIKIETEHGNAYWQPSKRWARYNNTLNKAYHTRREQIKVALYSIAHWLYNHYDLVIIGDYTPTNGTARSKNMKRSMLNQTHIGEFRKILQWVASKRGKQYKMVNERNTTKECCVCGHKEKKEPEVRLFICLSCGHTIVRDLNSAINMAKKIQILSGSDWVKKWKLACITYAVRYDLFANHEKPIASVRNSGANKLNPMA

SEQ ID NO: 3330 - protein, 341 aa, unknown
  TnpB Polypeptide
LWLDVQRRALICIHIRRCAFVFNMRRQHRRPWLRWRSKRSLGWIPFNTGHVQFRDSSFVFRGERYDVFLHRPLPESAKIGAGSFSQDTRGRWYINCPVEVAEATQAPLKRVGLDLGVKDLATLSTGEKIEMPSFYRKSEEKLAKSQCARKTKRVCAIHAKVANRRKDFLHKASNKLARKYGLVVVGDVSPSKLAQTDMAKSVLDAGWSRFKDMLSWKLRLRSGGMLLEVSERFTTQICSECGCVPPSRPKGIADLGIREWTCSVCGTRHDRDVNAARNILRVGLHTLVEGAHPSCLKFGSHRLQAGEQSLGGGAVTPRADSAQTVAGPQHLRVGFAYMIPA

SEQ ID NO: 3331 - protein, 272 aa, Calothrix sp.
MYRAIKVRIYPSDEQESYLAQCFGNTRWLWNYMLNATTTAYKETGKGLSKAAMDRLLPGLKKEYEWLGLAYSQVLQRVTFNLSSAFVNFFEGRTKFPNFKSKHGKQSIQYPQNVKLIPEDSVIKFPGNLGLMKTVFHKQMPNAKFTTVTISKNADGRYYASILFNQEDAPVVAIRDAIGVDLGLKNFCYNFGRLKNMTYLKKQLAKLEKNRKRKQKKLAKKTDKTSNKRRKAKCLVAKVSSRGARVREDFSTQAISQNSIRKPSYLCRRFGS

SEQ ID NO: 3332 - protein, 536 aa, unknown
  TnpB Polypeptide
MSDKAYNTILKQYHKFSDRHILVVETDMPYFDVLKVVVLSDKIRKAGNELVSLMRKNYDQLLRTKRYRKLLFLYGNTEDKDKRKIYANQLNEMQKTHHVTWDYCRTSMIPIGKKYGIGAVFALTKAEDIWRGIEKCLYGNGNSIHFSKYGELPCIRAKQINRGIPMSVKDDKLQFRLGKTAFGIQVNDRFQQDEVNAVLTYLAEPEIVGNKAVNTLIKDAYCIDTYRPCYATLVPKMIRGKYRVYLHLTIEGKAKPKYDKHGNPRHKYGKGMIGADIGTQTVAYTSDTEVGLKNLSERGNSIQTSERKERLLYRAMDRSRRSTNSQNYNTDGTVKKGYKTWKYSNHYKKLKAKHTELCRINAVNRQLAINEDANHLRSLGDIFVTEPKNASKLMRRAKETTKNDKGKFNKKKRFGKSIKNRCPSGFQTTVEKKFKITGGTYIEVPNSYRASQYDHTVDDYIKKKLSDRLYKLQDGTEVQRDWYSSFLLYCYNYKTQDIDKDKCITEFDDCYKKEKALITWIKAHKIKVLNSGIKIA

SEQ ID NO: 3333 - protein, 433 aa, unknown
  TnpB Polypeptide
MTITTSYKIKIKGYNNIFNATIAIYREALAFIINVIDAEWDVIGCSGNSTAQFNAAERLIHSTSKNTAAYAGFDNLFYKFPSYLRRAAISESIGVVSSYRSNTDNCINNGRKGNPPKLRLDHYAFPCLFHGNMFKWLNNYAAKIKIRHKNDWVWFTVALRKSDADYIARHKARAIESSPMLAKIGRSWYLRFAFTETAALSDNQGVITAVDLGVNNAAVCCAMLPDGTVIGRKIVSFPVEKDRMVHKLNKLKKAQQHGAKSTPRLWAYVNNYNRGISEGTARAIIDFAIKYNCDVIVLESLNLKGKKRGSKKQQLHLWRNKAVLAMVTSKAHLLGMRVSTVCAWGTSKLAFDGSGVVVRDEGNHSLCTFVSGKRYHCDLSASYNIGARYYIREILKSLPETVRSACEAKVPRIAKRTTCTLSDLFNLHAALAA

SEQ ID NO: 3334 - protein, 501 aa, unknown
  TnpB Polypeptide
LRSPPPQREEGQEAKDRPSPSPGGSRSHEVPGEDSEAHPHCAVSLLWPGGFTFAMLPHPPNPRRVPPDPEAQPSTVIPPLRIIIGVTQLDSSSSPCKGWVIIMMEVAKMPTVCLRFQFEEHPRIRALMEACADIQRQAVDYALENGKTATFTLIQALYPALRAQHPDLHSNLIYGAIRSGARVVHGFRNQQRRGKTQTDRPEIRRPSIYLVRQTVKIEWDGEILTVTIPVSPRDPEPIVLAFRPHHQYRRLLDEWKAGQARMGEPTLTAHSLSIPLKFPDPIPYEPEGVIGIDRNEGNLTAFVTSTGEIREIDTSYVGKVNRDHLRREIKGTRGKRNPKAKKKIASKHRRIRKQKVENFWHHLALALMAWAIGMKAALVLEDLRGMKERIGEGESRRMRQRLLNFWSIMKFHRILEHKARFYGVPVIWVDPQNTSRACPVCGRVGERRRGHALACPCGARMGRHEAAAVNIARRGVEFLEGSGLRGRGRWATPVAGPLALG

SEQ ID NO: 3335 - protein, 376 aa, Serratia sp.
MKRAYKYRFYPTPEQSALLAQTFGCVRFVYNSILHWRTDAYYERQEKIGYIQANARLTALKKEPEFTWLNDVSCVPLQQSLRHQQAAFTHFFAGRAAYPAFKSKRHKQTAELTTSAFKYREGKLYMAKSKMPLDVRWSRPLPSVPSTVTLSRDATGRYFVSCLCEFEPVSLPLSAKTVGIDVGLKDLFVTDSGLKTSNPRHTAKYAVRLALLQRRLSKKARGSKNRTKARLKVARLHAKIADCRMDNLHKLSRKLINENQVVCVESLKVKNMLRNPKLSRAIADAGWSELVRQLQYKGAWAGRSVVAIDPFFPTSKRCSSCGFTMEKMPLDIRNWHCPECGEDHDRDINAARNIKAAGLAVLAHGEPVNPESQHAA

SEQ ID NO: 3336 - protein, 402 aa, Escherichia sp.
VKRLQAFKFQLRPGGQQECEMRRFAGACRFVFNRALARQNENHEAGNKYIPYGKMASWLVEWKNATETQWLKDSPSQPLQQSLKDLERAYKNFFQNRAAFPRFKKRGQNDVFRYPQGVKLDQENSRIFLPKLGWMRYRNSRQVTGVVKNVTVSQSCGKWYISIQTESEVSTPVHPSASMVGLDAGVAKLATLSDGTVFEPVNSFQKNQKTLARLQRQLSRKVKFSNNWQKQKRKIQRLHSCIANIRRDYLHKVTTAVSKNHAMIVIEDLKVSNMSKSAAGTVSQPGRNVRAKSGLNRSILDQGWYEMHRQLEYKQLWRGGQVLAVPPAYTSQRCACCGHTAKENRLSQSKFRCQVCGYTANADVNGARNILAAGHAVLACGEMVQSGRPLKQEPTEMIQATA

SEQ ID NO: 3337 - protein, 509 aa, unknown
  TnpB Polypeptide
MHTVQLLLKPSKYERYEIDRRFRALEHLHNVCVKHARKCMVRLQYDKDYAALRQQYLELSKKLSKKEELSKEDKAEKKALSAQLAERRSAYGLSKSALECYLKVCGKQFSKLLSSQQVQTEADRVWCGVEKCLFGNGKVLRFKRFIDFDTIGGKSNKNGACFDSEAMMVSWVGLSLKCFLPKSASSRSYVEESLKGTVCYCNIKRKMFSSGWRYYAEIILKEDAPARKRSIGTSTMGIDPGVSTVAGVSETACVLEELAPKAIRYEKKIQVLSQSMDRSRRISNPDKYNEDGTIKRSKHEPWRHSENYLKMSRMLKTLHRKRHAYIVGSHRQLCNKLLLDSKYFLVEKMQFQALQKRAKETKRQEAVSEVRQKNGGIKLIQKFKRKKRFGKSISRRAPARFLLELKQKAEAVGGGYAEVDTKEFKASQYNHVTGNYEKISLSQREKQIGGRIIQRDLYSAFLIHNADPELKHPDIEKCKYEFKKFADKHDQLILSMKKNGLFMRQCFGF

SEQ ID NO: 3338 - protein, 442 aa, Streptomyces sp.
VRRDRDADSFLVVKLIVQVKLLPAPVQAAALEAALRACNEAATWVSEVAFESSVYKNFTLRKHCYAELKRRWGLGAQGAQHVIKKTADAHTVLHANLNARSSGKRDSKWKRRDVKRPLAFRPDSAQPYGDRMLSWQTEARTVSVWTTRGRIKDVSFVCGPEQFATLSRYRGGESDLVHRDNAWCLLATCEVPEAALKDSPVDFLGVDLGVVNIATTSDGEIASGRHLNRSRARDGALRRKRRTRDINHKIAKCVVAEAGGTAHALGPWGSTGRGIALEDLTGIRERVRLRQPQRATLHSWAFAQSRRFIAYKARRAGVPVVYVDPAYTSRTCAECGHVDKANRVSQAWFACRSRGFVDHADRNSSRDIRARAWELWRSGARSVAPAGPGGGRLNAGDASPPVVPATQALPRERRAADLSARDRPPRSVSVGGAGRSGLSGTR

SEQ ID NO: 3339 - protein, 537 aa, Bacteroidetes sp.
MTKNNKTDDVFGTFEIRINNNKDKAYLFKYIYAYKHIQNILTILVTYLFKDNNPDYKYFLDYRVVRACISDTKGSKEVVDKISYIKYKYKENQLYKNLLQVGSNLKTHNIVMIIRRYKKDFSNYFRNLKDYQTNPSKYTGEPSLPRARKLSTLDNYAIPLDNSKAWIIKNDMLGINLNDKMRYFYLGKIIKNGKILNKEIQSISIKMRLKEIYISFSYKVEKQEYYSNNNESLSYDTTNAGIDIGLNNLISLFIDDKQSKSIIVSGAKYKHYNSKFNRLIAKINQSIDEEVIEYKTIIKPVLPTKEEPKEGAYDTSVYIPIKWTKRGHRLKRYVSFLYRKRNDFFETEFHKISKRVIEYLKLNNVKKLVLSKSLASLMNNGKCNLRKSVKQNFIQIPFIKLIHYIEEKAIKNGIEVIFIDEAYTSKTSCISGDVLEVQTKSKTCKKLSTANEFKGTRAKRGLFKDIVLNKIWNADLNGAVNHIKLAFSNSSFQWLDKHLFKLCNPYKIKSASDFLLFLNRNNDVGKVWLSNTMQTIK

SEQ ID NO: 3340 - protein, 417 aa, Methanobrevibacter sp.
MCEEFFILTDKCEFIPDEELEKVFEFNMRASAYVYNKTLEFSIYRSNLVNEFAIGNKFKVNRSYTQDIVKTLKKQKPFLKKAESTCLQASTDRLIKAYEGYYNKKTGFPKFKSSKRNPVNSITLRNNNYKTKEGIKETLRWEKDKFRLNKIGYIKVKHKRNINGKIKEATIKKENGRWYVCIAYQLDKINPREEFPHGHYLGIDLGLTDFLTFSNGRVITKPDLKRINERIKYYTQKIARKKEGGSNWKKTLKKIHKWINKKNNVVNDYYHKISYNIVKHYRFIAMEKLNIRGMLKSNLSRSVHEIGWGKLVEMIKYKAKWYGREFIQIDRWFPSSKKCWVCGEINSELERGEREWECPYCHTHLLRDLNAALNILYEGIRAAGSSVLSLVDFMHMLSQECLEIFLSNCEVRTICVA

SEQ ID NO: 3341 - protein, 453 aa, Nocardiopsis sp.
VTGQVVQAYKFAMDLTPAQGRDLSRHAGAARLAYNWGLARIKANLSQREAERSYGIVNDDLTPPVNWSLYSLRREWNQAKHQVAPWWSECSKEAYNTGLDQLARALKNWSDSSKGTRKGKRVGFPRFKSKRKATRSVRFTTGTIRVEADRRRLTLPKVGTLKTHESTRKLQRRIQVGTARVLSVTVRQESGRWFASLTCRVDRNDPSPTRPDAVVGVDVGIKALAVLSDGTVVDNPHHHTNALRKLRRLSRTVSRRQGPDRRTGQAPSNRWHKANRTRNRVHHQVTNQRRDGLHKLTTELAATHGTVVVEDLHVSGMLANRKLARHVADAGFAEVRRQLTYKTQWRGGSLVVADRWFASSKTCSDCGAVKAKLALSERTFVCTECGVVLGRDLNAARNLAALVERYVAGSGSETQNGRGADRKTGLVPAGGCEAFTPHRDDSRVRRGLSPSNR

SEQ ID NO: 3342 - protein, 436 aa, unknown
  TnpB Polypeptide
VNLTEWAHAQGIHVTTAYRWYRKGTLPVPAQKVGRLIPVSPGTAAGTAAGSSPQGGAGLYARVSSHNQKAGLHLGSLAGRDLAARCAEGRLDAKGKTASRARRKRALTAESSSRWAGAITRTSEDQHRLAWQNLRAGRAALQARIRRVEARLLVPAGGKAGPSPAPSLDELRAAPVLAVDLNHGHLATWALTPDGNPAGPPVTIPLVLAGLPAPQRDGRLRAAISSLIRLARQRGCRAVVIEDLDFTDAREQGREHSGSRPGRGRPGRGFRRLVAGIPTGKFRDRLTQMAANAGISVIAVDPAYTSRWGREHWLAPLQEQASPVPASGHAAAVVIGRRALGHQARRRAGVTGGDQRISRRGAAPRAPVARQTTRNGRPREAQRQPPRWRKTATAGRTHPPDQATQDRSGPPASRDYVLLAQQERSAVGGYRQWVGR

SEQ ID NO: 3343 - protein, 436 aa, unknown; identical to SEQ ID NO: 3342
  TnpB Polypeptide

SEQ ID NO: 3344 - protein, 437 aa, Caldicellulosiruptor sp.
MPNGFYNYNQEDVYKIFMKGVKRKTYICARVSTPKQKRCLKIIVKRVERIQIKRNHEFWNYCDKVCFAAKNLYNFANYTVRQEFIHKGRWIRYRELDKMLKEHETYKNLPAQTSQQILRLLDRNWKSFFKAIEEWSKDKTKFLGRPKSPKYKKRDGRSIAIFTNQQCRIKNGYLTFPKTELKLKTRITDKLKEVRIIPKGSIYVVEIVYEKEIAKIQRPPKRIAGIDLGLNNFVTLVNNIGIKPIVINGKVIKSINQYYNKKRAQLMSYVGNRGSSKRIEKLTLKRNNKIKDFMHKASRFIVNWCKQYDIDTLVVRYNPNWKQEIELGKVNNQNFASIPFYQFVNMLKYKCEEEGINIIITEESYTSGCSFLDGEEINEINYNPRRRIKRGLFRSNKGILINADVNSAYNIIRKVFPEEFAKGIEGVGLHPVRLNIV

SEQ ID NO: 3345 - protein, 245 aa, Herpetosiphon sp.
VGITKGATIKQDATGSWWVVFVCHSDRPDTTPTADRPVGIDVGLESFTTLHTGAKTAPPKFYRRAHKKLAHAQRNLSRVQKGSNNHKKARQRVAKIHQKIKNQRTDWLHKHALGIIQNHDTVCIEDLNVRGLARTKLAKSFMDTALSTFMQMLREKAEWHGRQVVQVGRFYASSKTCHACHTKAALTLSDRVWMCPTCGTTHDRDVNAAINILHEGVRLLAVGTTESQNAAGDPGSPAKRRRVGR

SEQ ID NO: 3346 - protein, 167 aa, Oscillochloris sp.
VERAHYEQEQAAPHRKESRFQRDVNHCISKRLVQKARTARKALALEDLTTIRTRVTVRRAQRRARHSWAFRQLRSFLAYKAVQAGVVIVAVDPRNTSRTCAVCGHGAQANRVDQSHFRCLQCGHTAAADTNAAVNIAARAARQTAYGAAPPSGGGASTSPAASALGS

SEQ ID NO: 3347 - protein, 367 aa, Coprococcus sp.
LNIAYRFRIYPTEEQKIFLGKTFGCCRFLYNQMLNDKIQEYEKTKKMLKHTPAMYKKEYPFLKEVDSLALANVQLHLEKAYKNFFRDPKIGFPRFKSKHHSRNSYTTNVVNGNILVESKRIRLPKLKWIAMKKHREPAEGLCLKSVTVSMEPSGKYFASLLYEGYSCENQAAEPDYSTARILGIDYAMQGMAVFSEKIETEEAGFFRKNEKRLAREQRKLSRCVRGSHNYELQKKKVARCHEKIRNQRRDYLHKLSRKIADGYDAVAVEDIDMKAMGQCLHFGKSVHDNGYGMFREMIDYKLAWRGKKMVKVDRFFPSSKKCCQCGRIKKELKLSERVYHCVCGNEMDRDRNAAINIREEARRMLTA

SEQ ID NO: 3348 - protein, 392 aa, Tatlockia sp.
MILGFKTELKLNNKQRTALKKHSGVARHAWNWGLGLTKQILDHNKVNPEQKIKFPSAIDLHKWLVALVKSENPWYFESSKCAPQYALRDLRTAWDRCFKKISGAPRFKKKGRSDSFELDGTIKLRGTKKIQVPKLGILRTYEDLPQAPVKSVTISRTADRWFSSFRIDTEPTETPKIVDIVGVDLGVKTLATLSTGRVFESLKSYRLFEEKLSRLQWLNRHKQKGSANQKKAQVKIARLHRTIANIRASTLHKLTTYLAKNHSTVAIEDLNVSGMMANHKLAKAVGDMGFYEFRRQLEYKTKLYGSKLVIVDRWFPSSKTCSNCGIKKETLSLSMRIFNCENCAFSLDRDLNASINLKNVVSHTMSACGSGEADFSESKQENFSLLANVSKL

SEQ ID NO: 3349 - protein, 192 aa, Pantoea sp.
LSFHNDYCNFVQIKRACKYRFYPTPDQVELLAQTFGCVRFVYNSVLRWRTDAYRQRQEKIGYIQANARLTALKKEPEFTWLNDVSCVPLQQVLRHQQSAFTHFFAGRAKYPTFKSKHHRQSAELTASAFKYRDGRLYMAKSKVPLDIRWSRPLPSAPSTVTISKDAAGRYFVSCLCESEPVSLPITAKNGRH

SEQ ID NO: 3350 - protein, 390 aa, unknown
  TnpB Polypeptide
MLKAFKYKINPTKEQTTLLNKHIGASRFVYNLALECKQMAWAGNKVNLSCFALHSQLKDLKTECEWLKEINSQSLQQSITNLDKAYTAFFKGQNSFPKFKKKSNGGSFNIPQNVVLENGKLIIPKFKKGIDIVLHRPIKGLIRQATISITPTGKYFVSILCETGEAIKPKAKVKEKTTVGIDLGIKTYLVSSDGQEFDNPKFLRKAQSKLKYVQRKYSKHKGKRTKHRLAILHEKVTNQRKDFLHKTSSELIKNHDSLAIEDLAVSNMVKNHNLAQSISDASWSTFVTMLEYKAEWYGKNILKIGRFEPSSKLHANCGYINKDLTLSDREWFCPKCGELVSRDVNAAINIKNFALKNILSGTDRKNQGELSTMVEVLTLEAQPIAYGVGG

SEQ ID NO: 3351 - protein, 633 aa, Streptomyces sp.
VDEETGELLTGTVLAERVGWTADLVSGMVSSLMTEHGNTADVDMLASGEDAGGRKLPSNAWMALRRLGWTAVPPEGVKVNDRIVRMAQEQAGRCLRSAKWRADLTAGVLAVWPADPAGRTPAEWDQVREATPGGCFLPSSVIKSRTRQVAAFARKHGRLPADVFEMEPEPRVARMLLLSACDGQQAAIERADEPGRALLRLQLPTRPDPRSYADWTWVACPVSLPPTVAAGAVLHLPTLRVSGGRVRADLAYTHAVPRTARTGHTVALGVDWGLNTLLSAGAARLHDDGQITVLGAGAQFRAAGVLAKQHRLRRHSERLHAKADQYQRITDGHAPDPALTGKHAVLRDEIRHVSDRRSNLNDALAWTAARWAVDQAVAVGAGVIYLEDLRSMEAGGMGRTHNTRMSQTVRGQIADRMRHLAAEVGIAVVTVPARNTSKHCPQCLTPLRHRKAPDRPTIAGWKWAICPDRDGCGWQGDRDHGAWRRIAARGLTHQTKTVTDRTSGAMVIRSVVDKLEARAVITPAKTSRDRSKTGPTRHQTTRPAPRRRRAPSPTAPSGPAGKRPEGHAPTDRHRLPRAAHRHQDVTTTSTPTTGRHRPRGAALGAGFHLHAHATPPRWETPLPDAMSDKGSLS

SEQ ID NO: 3352 - protein, 397 aa, unknown
  TnpB Polypeptide
MYLTERHIIKPNNPLFKELDNVCFLSKNLYNKALYIVRQHYFNTKEYLGFYKVNKLLVDTKDVDYYAIGNTKVANQTLRLLDRNFKSFFSLLKKKKNKDYDKSVRIPRYLDKQGRYATIFEKQAISKTFLNKGLIKLANISNVVKTKVTESNLVEVRVLHRSNHHIVEVVYEKEEKPLLPNNGRYAAVDLGLNNLATVSSNVEKPFIINGRPLKSINQRWNKHKANLQSCLTSKNSKQLELITNKRNNRVKDYLHKSSRKIVNFLVSNRISTLVIGYNEEWKQNINIGKVNNQSFVTIPFLIFVQQLEYKCKLEGINVILTEESYTSKCSFLDNEPLEKKDSYLGKRISRGLFKTSTNKLINADLNGSLNILRKVIGEFQYPIGACCTPVRVTPTYS

SEQ ID NO: 3353 - protein, 235 aa, Geobacillus sp.
VAARPYQEAWLNRLLDGTAKQRAVKLYKKRKKWYFAVAITFSVEPRNEPKVMGVDLGLRYMAVASVGTKSLFFKGNPCAFIRRRYAALRRTLGKAKKLHMIRKIGHKESRWMKDVNHKISRQIVHFALANGVGVIRMEDLTGIRKRAASLKEAGRSLHSWAFHQLQTMMAYKAEMAGIRVEWVNPNYTSQTCRCGHREKANHNGILFQCQECGYTIHADLNGAINIAKAISGLSA

SEQ ID NO: 3354 - protein, 416 aa, Geobacteraceae sp.
MDIKRAYKYRFYPNPAQGVILARTFGCARFAYNYMLRLRTDAWYQEQKRISYNDTSSELTKLKREPEYVWLSEVSSVPIQQSLRHLQTAFTNFFAKRAGYPTYHSRRGAQSAAYVATGFNFNAEKRELTMAKMSEPLNIRWSRTIPKAAKVTSVTIVRDTAGRYFASMLCDDSVETLPPSENQIGIDMGLDHFLITSDGEKVNAPQFFRKHAKKLAKLQKLASRKFEVAKVKAGIPKGKAIPKGAKIERTKNYRKAQRRIAKVHARITDSRRDFQHKLSTRLIRENQTISVETLAVKNMSRSAKGTTEALGRMVKQKSGLNKSILDASWSEFIRQLEYKSLWYGRTLIGIDRWYPSSKRCSDCGFTMKSMPLSIREWACPECGVIHDRDVNAARNILAAGLAVSALGESVSPGVTY

SEQ ID NO: 3355 - protein, 415 aa, Mollicutes sp.
MYLCVKQQIKKLTKEQYTDLRELCHVAKNLYNVGVYNVRQYYFTEKEYLNYNKNYVLCKSNENYKLLNSNMAQQILKEVDGCFKSFFGLLKLAKKGKYDYKSIKLPNYLPKDDFTTLVIGFVRLSENELIIPFSNTYKKEHKPIKVTIPPILKDKKIKEIRIIPKFKARYFEIQYTYEVEEIQSDLDNNKALGIDLGLNNLATCVTNTGESFIIDGRRLKSVNQWFNKENSRLQSIKDLRGIKNVTKKQYLLARKRNNRVNDYINKTCRYIINYCIDNQIGNLVIGYNETLQRNINIGRKNNQNFVNIPVGNIKEKLEYLCKLYGINFTKKEESYTSKASFFDSDEIPKYNQDNPIDYKFSGRRIKRGLYKTKKGMLINADVNGALNILKKSSVVSLKTLYSSGEVDTPVRIRIA

SEQ ID NO: 3356 - protein, 607 aa, Allocatelliglobosispora sp.
VYGLFRRKQRAGVWLRLVAGLQRRADALGLIGWDVSVDATTVRAHQHAAGARRNGDAQAEPPVGEPADHAFGRSRGGWTTKLHLACEQGRKPLSMLLTAGHRGDSPQFAAVLAGIRVVGRVVGGVWHGVVARFTAFRFTVDPTPGQEVLLRRYAGASRFGYNQCLRLVKDALDAKVRGGVMKVPWTGFDLVNAFNAWKRSGDAGRVMVAAGDGTVSIEATGLVWRAEVSQQVFEEAAVDLGRALAAYTGSKAGARAGRRVGFPRFKSKKRTRLGFRVRCKTSRAGKADVRVGDNVARSVTLPGIGVLVVREDTRQLRRMLSKGRAKVLSATVGYRAGRWFVSLTCEAADLHQARQHPQPDPADAATGTTGCGWVGVDRGLSAFVVAARADGTPVLRVDDPPRPSRAGMGWQRRLARSVSRKQLGSANRRDAAARLANHHAYVRTVRQRFLHHVSNQLVKTHDRLALETLNITGMLRTHRLAAAIADAAWAELARQVTYKQAWHGGRVVLVDRWYPSTKTCSACRTITPAMPLGQRVSTCGTCGYRADRDHNAAVNLAVWAEQHHARPGTSTQGARSPTPAEGKALARAPARVKPAPTTWEPHPPPPE

SEQ ID NO: 3357 - protein, 401 aa, Allocatelliglobosispora sp.
VKLVVQVKLLPTPEQVSALESTLRACNTAASEVARVARNRGVYRNYDLRKYVYQNIKDNHRLGAQAAQHVIKKVCDSYKALKANIRAGNLGRPGSKRRRRAETDPISFRWEAAQPYDARMLSWQRNARTVSIWTVAGRLKGVAYAGSPDGLKAVAELPVGESDLVHRDGMWFLHTTVEAAEPELVDPKGFLGIDMGIANIAYDSDGDRYAGTTLNSYRRRQLRLRQRLQRKDTNSARRLLARRRRKEARHAANVNHCIAKTIVTKAERTGRGIAVEDLTGIRERVRLRKPQRVTLSSWSFHQLGEFLTYKARRAGVPLVEVDPRYTSQTCHRCGHRDKRNRVDQETFNCRSCGVVAHADHNAALNIASRGVEAGAQSTARTRPDLAASEGGDLQTRPFTGG

SEQ ID NO: 3358 - protein, 360 aa, unknown
  TnpB Polypeptide
MVEDSATRTVPIKLDVDGSAADLLHQTTDYFLDAANYVVDAAWEPDWKITSKQTLHDLTYYDVRDDSPLPANLVQAARNRAAEAVKGVVERWKQGEKASKPHFTSRFASYDARTVTVNDDHCTLATIEGRVTAEFVLPDEQRDTPHSAYLFNDDYDLKGATLHYDEVEDCFYLHVRTKPTVENDDAEQGDAEHVSVLGVDLGITNIATTSTGRFWSGAELNHWHREYEKRRSDLQQTGTRWAHENVQRVGRKQTGRFEQMLHTISNELVEEALENDCTHIVFEQLNGIRERLPYAKAVHKWAFHRLYEYVTYKAESEGLVVRQINPAYTSQRCSKCGFTHEDNRPHNNGQDEVRLSEVRV

SEQ ID NO: 3359 - protein, 392 aa, unknown
  TnpB Polypeptide
MHKVFKYRIYPNKAQQSLLQVTFGCCRFVYNKTLDIRKTAYETDKTKLSKFDLIKRLKPLKDEFPWLRDVPHVCLPQAVYNMDRAYQNFLKSDKGYPKFKTKHRSRKSCKFPYPFCDVLQEQARLKFSKLGLVKYKKDREFVGTLRHIVVTQDSDGKYYASCLVETTTEIPEPQPVDASTTVGIDLGLKDFIVTSDGHKIPNPRFYATIDRRIARLQKHEARKTKGSKRRAHIRLKINKLYIKKRNLIKNYIYHVAKTLLRESQTLVMEDLNIVGMVKNHKLAKSIQNICWGELRRVLEYKSKWLGHNLIFIDRWAPSTKTCSCCGFHNSTLTLSDRSWMCPGCGTQHDRDVNAALNIKRMGLETLLPAVSGFDGRGEVGYGFDEASICASY

SEQ ID NO: 3360 - protein, 369 aa, unknown
  TnpB Polypeptide
MLTYKYKLYRTHRTIWLDRMLRECAFVWNHALSLERRYYRMYGKYISTVDMQKHFAKRIKRNLLYSHNSVEVLQRLDAAYQRFFRKLAKRPPKFRRAADFQSFVYKLSEGYKIDGNRFSINRIKKIYKFHKSRDFSGNIKTVRVKRDPCGDFWLYVTTDAKVESSNTTHDGAVVGIDFGLKTYLTLSDGRVYENPQFFKQTLRDIRKVHRRLSRSIKGSNNYRRRRLELGRLYRRISNHRDDYQWRLTHELCRRYSTICLETLSLEGMRRLWGRKLSNLSHASFVFRLEHVAVKYNTNVVHVDKWFASSKTCSGCGYVNKELRLVDRSWTCPQCGARHDRDFNAALNIKRSGMDALISGCKPAFSGSHV

SEQ ID NO: 3361 - protein, 244 aa, unknown
  TnpB Polypeptide
VVTQENDGKYYASCLVETGVEAPKPKPVDDSTTVGIDLGLKDFIVTSDGRKIPNPRFYATIDRRIARLQKHEARKTKGSKRRARIRLKINKLYIKKQNLIKNYIYHAVKTLLRESQTIVMENLNVGGMVKNHSLAKSIQNICWGELRRVLEYKSQWLGHNLIFIDRWAPSTKTCSCCGFKNDILTLSDRSWTCPGCGTHHDRDVNAALNIKRMGLEKLLPTVSGFDGRGEIGYDLDEASICASY

SEQ ID NO: 3362 - protein, 395 aa, unknown
  TnpB Polypeptide
MKKAFKYRIYPSKVQQALLQATFGCCRFIYNKTLDIRKTAYEADKTKLSEFDLIKKIKPLKDEYPWLRDVPAVCLVQAVGDMNAAYQNFFKSGKGYPKFKSKHRSRKSCRFPSSHCGVLQDISHLKLSKLGLVKYKKDCEFAGILRHIVVSQDSDGKYYASCVVETGVEVPKLQPVEVNTTVGIDLGLRDFIVTSDGHKIPNPRFYAIIDRRIARLQKHESRKQKGSKRRARIRLKINKLYIKKRNLIKNYIYHVAKTLLRESQTLVMEDLNIGSMVKNRKLSKSIQNICWGELRRVLEYKSKWLGHNLIFIDRWAPSTKTCSCCGFHNSTLTLSDRSWTCPGCGTHHDRDVNAALNIKRMGLESLLPAVSGFNGCREVGYDFDEASICTEYGCI

SEQ ID NO: 3363 - protein, 394 aa, Metallosphaera sp.
LPTTRKKLHERFYNHYKEKYLFLPSRVIEGAYIVASRIVKSFRERRKKGLTRKDKPEYKRVVITIPNTINWRFNKVSVSVLTHKGWVEIPLRITKQFTHYLYDGWRVSQELKLRLVGRKALVWLGFEKEVEVETEEGNYISMDVNENNVTLAVFEGFKLKELRRYETGLGRIVLNYSLRREEITKGYSTKGELIKKKLRRLRERERKLDILRKTVKRIFELANELKAKVIVGKFSFKAKDRMEGNKDSRLRHRIHQWSVVKFSEMLKTQPVDVEEFSEAYTSSINPFDGKKLRKGKQIKEMITKVFNPYLMTGTAHEGGGIRVLKVNARYLESNQGLLERDSVAPLNLARKVDGRVVMFPSTSPNDLRVTVYDPSAGVPVAELEVIKEDKLRHG

SEQ ID NO: 3364 - protein, 254 aa, Metallosphaera sp.
VIKEDKVHLPFRYKLPWFTPLDYLAIDSNLYTLDIYDGEKFVTFFMRELYSLKFGMELKRGRIKSFASKHGRKGKVLSRKYSHRERNRVLDYVHKFVNKLLEMYPVTTFAVEKLNKQEMFEDADDKLSKKISRTVWRTVHRVLKYKAPIYGSFVKEVNPHLTSKSCPRCGRVSRKVGRTFRCERCGFTLDRQLNASLNIYLKVCGFPHLFLTPTGSRWVGVTLLRGRRGMNGAMPRDPGEAQRLRIDIKYYEIL

SEQ ID NO: 3365 - protein, 233 aa, Metallosphaera sp.
LRRYETGLGRIVVNYSLRREEITKGHSTKDELMKKKLRKLRERERKTDVLRKTVKRVVELARDLKAKVIVGKFSSRSKEKMESNKTAKLRHRIHQWSVVKLVEMLKTQPIDVAEVSESYTSSINPFNGEKLKRRKQVVERVIRVFNPYLMTGSAHEGGGVKVLKVNARYLESGEVLLERDSIAPLNLARKVDGRVVVFPSTGPNELRVTVYDPLRGVPVAELEAIKEGKLRHG

SEQ ID NO: 3366 - protein, 431 aa, Coleofasciculus sp.
MLVLEYKVKAKPSQDKAIDEAIRTVQFIRNKCLRYWMDAPKDAKVDRFKLNKYSTELRKEFKFVKDLNSMAVQASAERAWQAISRFYDNCKSKKPGKKGFPRFQKDNRSVEYKTSGWSLNPTKRRITITDKKGIGELKLLGKWDIHTYPVKAIKRVRLVKRADGYYCQLAVNVECLDIQPKTGRELGLDVGLESFYTDSNGHQEPNPKFLRKAEPAIKHAQRRIYKKVKGSSGRRKARARYSRKHLRVSRQRTEHAKRLARHVCKSNDLVAYEDLRVANMLKNHCLAKSISDVSWHQFRQWIEYFAAKFGKTAIAVPPHYTSQECSQCKRVVNKALSTRTHVCVCGCKLHRDENAAINILLKAKSRGGHPRSNASGVETSTLLGETLVEQVLTLSEESSPIRGRRVSTQANIEKDAIAPHPTPPAKHVKPS

SEQ ID NO: 3367 - protein, 365 aa, unknown
  TnpB Polypeptide
LEKAYKYRIYPNKTQQELIQKTFGCTRFVYNYYLNKRIEAYENDKTTFTYNMCSKDLTKLKTDLVWLKEPDKDALQKALKDLDMAYKKFFKEHTGYPNFKSKKNRSKSYRTSCTNNNIRFENKRIKLPKLGFVQTRDKQIPQGRILNATISQEPNGHYYCSLCCTDVEFKELPKTNQKIGIDLGLADFAIMSDGTKIQNPRFYEKSEQKLAKLQRELSRKTIGSKRWNKTRIKVANLQNHIANQRKDFLQKLTTDIVKAYDVIAIEDLDVKSIKETDSTIRNKRVNDVSWSEFRRMLTYKTQWYGKQLSIVDRYYPSSQICHCCGHKDGKKSEDIRVWICPECNSELDRDINAAVNILNEGLRIL

SEQ ID NO: 3368 - protein, 374 aa, unknown
  TnpB Polypeptide
MRGGVTSLNKSFKVRIYPSQEQMDIIEQTFNSTRFLYNYMLNLRDKLYKFFGISLSSNHSCKVLTELKRHKTWLKFVDSTALQQCLMDLDNAYQRFFNGHSNYPKFKSKKRSKNSYRTVSSAISLNIENHIIKIPKVGSIRFRDKSKFRGVTKIYNATISKTTSGKYYASISVEVDIKHFEKTNQNVGIDLGLKDFAIFSDGDKITNPKFFIHTQKKLAKMQRKLSKKVYGSQNYLKYRVKVAKFYEKIKNQRLDFLHKLSTNLIKTYDIICIENLNIKGLMKNHRLAKSFQDVSLYEFVRQLEYKAKWYGKTISKVDRFYPSSQICSNCGHKNKEVKNLSIRDWTCVSCGTHHDRDINSAINILHDGLRLLSL

SEQ ID NO: 3369 - protein, 367 aa, unknown
  TnpB Polypeptide
LNKTFKVRIYPSREQQDIIEDTFNSTRYLYNYMLNLKEKLYKFFGISLSFVRMSNILTELKKHKTWLKLVDSTSLVQCLRDLDNAYQRFFSGKSKYPKFKTKKRSKSSYRTNSSAISLNIENRTIKIPKVGSIRFRDKSKFRGVTKIYNATISKTTSGKYYASISVEVDIKHFEKTNQNVGIDLGLKDFAIFSDGDKITNPKFFINAQKKLAKMQRKLSKKIFGSKNYQKYKIKVPIFHEKIKNQRLDFLHKLSTRLVKEFDVICIENLNISGLMKNHKLSKSFQDVSWYEFCQQLGYKAKWYGKIISKVDRFYPSSQICSNCGYKNKEVKNLNIRGWNCPSCGIHHDRDVNSAINILNEGLRVLNS

SEQ ID NO: 3370 - protein, 386 aa, unknown
  TnpB Polypeptide
MIAYKYRIYPNKTEEQKLNKTLDLCRFTYNQLLEELNKQEKINQGKIQHKIVELKQEFPELQEVYSKTLQYECYRLFSNIRALSQLKKKGHKVGRLRFKGRDWFKTVNYNQSGYKFIKTDKHFSILKLSKIGEINIRLHREFDGKIKQIAIKKSNNKWYAVLITDGKKDIQKGIGNIGIDLGIINFVADSNGNKIESPLFLKQDLKKLKVVQQNLSRKKKGSSNRRKARFVISKIHETIENKRNDFLHKLSCDYVTNYNTICIEKLNIKNMSKKQKYWNKRNILDCSWGKFTSLLKFKAESAGAKVIEVNPRNTTKTCSCCGAIRDMPITQRTYNCECGNSLDRDINSARNILAQGLGIVESENIVSSSSMKQEAISSTPEVLGYE

SEQ ID NO: 3371 - protein, 670 aa, unknown
  TnpB Polypeptide
MCTVKIKKKIEIENKDILTFDQPKISDYKCFTYYDNDQFHHKIFNELGKISKNIYNLSIYSIQIFNLFKIKLYENLYNELKKNNKINTSEFVKNKLIEYFELYSSIKDKLQNNNSYIYKFIINYITTNKIIIKNSNYENTKNYLFNILKKDVNIYLDGNNNYLLFDNIIIRIINSLYIKNHKIIEDEMLAHKKYSFNDDEIIQTIKDKKIMDFTINTSYKEKIENELKIELKSDQNYIGRLVYAKLDNNHHKLETTMICSIITKAYQSYTSFYALRNKGIKANQPKFLKKNDLYNLIYAYSKTNKLDQNNINAYTSTFMAKHFDEIFGSNFIKLSNNKYIDCKYLLNTNSKKILKKDNYIYKDKYVSKDNKNIIDSRYVKIYIPDKLKKYNIKVIEIVFENESIKICISYENNEKIDEKKIQIQSDESISIDMGVKNLMTIYDPTGTQKIIDGKYISSINIFYNKKIGDMQSVNNNIMVNKLNLKRKNTINNYFNLIAKWIATEYHHKKLIIIGYNKEWKQNSNLWGKNTNMIFNKIPYCKLIDKIKNKFIQQDKIVLTNEESYTSICDALSLEEICKHKNYLGNRTERGLFVSAKNKKINADINGAMNIMRKIFKNMKEIKGKKLCSPERINIFRDVINQRIRCNSGTTTSVVIGKNIDSLTVFNTFSH

SEQ ID NO: 3372 - protein, 458 aa, Paenibacillus sp.
  misc_feature (100)..(100): Xaa can be any naturally occurring amino acid
VFTSFGQKSLQPLQQQVMSTLEAHINAMNERLSEKNRSHLFKLPSKEKPFVSYNFLDALFKVMDQSDYRALPAQSSQGIMKIAFQNWLSFFASMKDYRKXYRALPAQSSQGIMKIAFQNWLSFFASMKDYRKHPGKYSGKPCIPGYARSKVKEVVFSNQDCVIKEQKFLKLPKTKLQLNIGKLGCTGGQLKQVRVVPSHGQYVVEMVFVYLLEKKEAVKKYVLAIDLGVDNLATIVTTTGLKPMLVQGKMVKAINQYYNKMKAHYIGILRQGKKPCEGAYTSSRLERLHLKRHRRIKDLFHKVSRRIVQLAVEQQIGTIVIGHNDGWKQASAIGRRNNQSFCHIPHQMLVEMIQYKAAEQGIAVTLTEEAYTSKASFLDQDPLPRYDEEGEWLFSGKRIHRGLYTSTKGLIHADVNGAANIMRKVFPNVSAQGMDGIEGLDGNQTVNVSTPLVLSILK

SEQ ID NO: 3373 - protein, 404 aa, Trichococcus sp.
MTMMIHKAYKFRIYPNQQQRILIGKTIGCSRFVFNHFLSEWNKTYEQTGLGLNYCACSAQLTLLKKETETLWLQEVDSIALQSALRNLSASFDRFFKKQNRAPRFKTKSNPVQSYTTKQTNSNIAIVGNKLKLPKLGLVKFAKSKEVAGRILNATIRRNPSGKYFISLLVETAVQELPKTGSACGVDVGLKDFAVVSDNTVYENPRVFHKLEQKLAKEQKILSRRTRQAKKDGRKLSESKNYQKQRVKVARIHEQIRNARTDYLQKISTEIVKNHDIIGIEDLHVTNLIRNPNLAKAISEASWSQFRSMLEYKAGWYGKQIVAVARNFPSSQLCSCCGYQNKDVKNLAVREWACPKCHAHHDRDLNASINIMNEALRLLTAGICGASLLNEPGDTPVFVGISHP

SEQ ID NO: 3374 - protein, 496 aa, unknown
  TnpB Polypeptide
MIRFAYNRLLEGCREYEVVERLYELFMPNARWCQWAIKEAKALMEAQKELLPLYIEDLKWRIDRARKRPMKAEDPLKKKGITRRIEKLERKLKELEEHKKNKTLPKIVFGRKKTLKKMSRSKIKAKDEWLIRRRWGFISIGQRNQGGNANTKIVKREDGYSLLIRNTIFDDFEVKLYMPEEFKHYVGNVLEEAAQYTIRVKRTLRNGYQVLITFELEESKVEWNGRKIAGFDVNPLGMAVTIVDRNGNLLASKWFFYPDLVFARREKRNWLIGNLVKKAFKWLKGHGVNTIAIEDLKFKRSLDFPNWVNRLVANFVRKRLIETIKIRALKEKLSVVEVQPAYTSKIAWHKYAKNFPKLNNHQLAAFIIARRALGCGEKLKEPVEISYKLPDYKRIRRVKVLYVWPSIYGHSFHGLVRACSSDGRIELASRAHGGYDRRVTLHSPVASKLCCEEARRRGGCLGDEPRARGHRGSPPLSISLNVNRLADTKGTVKRNL

SEQ ID NO: 3375 - protein, 416 aa, unknown
  TnpB Polypeptide
MWYDYRFRAYPDRTGVTAEVERHIDIHRQAYNHTRYEYQALDTDEDTIGSAYQHHKRLTEWKDEWPVFSEVHSKALQKTVKRFYDNLSTLSEKKKKGYKVGELRWKSPREYQSVTYSQSGFELKNTSGRHATVWLSKIGDIPIRYHRPIPDTASIKEVTLKQETTGEWYVTLGLKVEDTALPEKPDVDELTAEDWVGIDLGITNYIYTSDGDSVDWLDLSDEYERLRREQRSLSRKEHGSSNWEKQRREVATVKRRIKRKVEDFQHKLTTWLVKTYDAVFVEDLNVEGMLQSEGNARTKQDAAWRGFIEMLEYKSDLYGTHVVQVNPAGTTKECAECGVETDKPLWVREHSCPSCGFEADRDANASYNVLSRGLQEVGLGQAEVTPVETATAVETDGGQSSSVPVSRVVETGSLGA

SEQ ID NO: 3376 - protein, 426 aa, unknown
  TnpB Polypeptide
MKLVEKHIISKNHKNYKEIDHLAFLSKNLYNKGNYIIRQEFIKTSKEVEQGKRENAKWIRYHELQKMLQNSKDPDYIALPRKVSQQVLRQLDNNWKSFFKAIKEWKKAPDKFKKRPSLPKYKHKTKGRNILIYTIQAISKVELKNDIVKLSNTNIQIKTKQKNIQQTRIVPLPCKTYKIEIVYEKEIEKRNIDKNKIASIDIGVDSLAAVTSNVKEFKPLIINGRPLKAINQYYNKRKAELLSKLMNQDENRRTSNKIEKLTLKRNNKIEDYMHKASRMLVDKLVEFNIGTVIIGKNDGWKTGVNIGDKNNQNFTLIPHSKFINMLEYKCRLVGIDVILQEESYTSKCSLVDLEPIEHRDEYVGRRISRGLFKSKDGIIINADINGSGNIMRKAIPNCLTTNGIEGFVVSPVRITPKGYYPYKQVS

SEQ ID NO: 3377 - protein, 426 aa, unknown; identical to SEQ ID NO: 3376
  TnpB Polypeptide

SEQ ID NO: 3378 - protein, 431 aa, Candidate division WPS-2 bacterium
VASRFDGQLRWLHKVRLYPSCAQERSLISMLRVTRELYNALLQQRRDAWTTRHVSLAGREQYAQLTELREAEPRFEGVYRECEDAVLHRLDLAFAAFFRRLKRGETPGYPRFKVAARWNQLEFPHGDRALKLDVVQRSVRVPGVGSIRLRKGRAVPEFGRAFLVTKNGRWYAIFEAHRLPCALPVTGRSVGIDRGVRVLAALSDGTMIENLRAGSRRRAVVERHQRSLDTATVKDAIGRPLNRKDPARIAAVRRLARAKERAANARLDWLHKVSRTIVLRFDRIVLEALRLRSMTRSAKGTQEEPGARVRAKAGLNRALLDAAFGTLATLIREKAEYAARTVIEVDARYTSQTCAACGCVCKESRKGARFACVRCGHVADADVNAARVILLRAESPPMRAPGTARGGQHDAAWPRSRRWESIGGLTKSVGL

SEQ ID NO: 3379 - protein, 410 aa, unknown
  TnpB Polypeptide
MKVRRAYMYRVYPNNGQADRLTWTLDRCRELYNAALEERREAYRMCGVSVSYYDQKRQLPAIKEVRPEYKQIGSQVLQDVTARLDKAFQAFFRRVKAGVDPKKVGFPRFKGRYRYNSFTLSQAGWKLDAMDSGRLYVAGIGHLKLKWSRPIVGTIKTVTIKRDADQWYVTFSCEVEIDAAPVQDKPAVGIDMGLEYYATLSTGEHIENPRYYRKAQATIARRQRLFERKKKRVKLKDGTYRYGKNRARAGILLKRAHRHVANQRKDMQHKAARKIVQTYGAVAVEALSIDNMTKRPAPRPNEDGTYAPNGAAAKGGLNKSIQDAAWGQFIAILSSKAEEAGCLVVAVNPAGTSQTCSDCGAHCPKTLDVRWHQCAACGLSIQRDTNAALNILYRAGLARCVAGAQESHSL

SEQ ID NO: 3380 - protein, 392 aa, unknown
  TnpB Polypeptide
MSTRTIALTLRPTVAEKTALARLQERFNAACNYISGVAWDAQEFNKVRLQRIVYGDVRAEFGLMAQHTIRAIAVVADAYTLDHDTKRAFRADAAVVLDTPRLYRVKHNRANITTLDGRIKVELGIGGHQRRQLADAVKLAEADLIRDRKGRWRLLVSAHYTDPSTMDTDGVIGVDLGRTDIAVTSDGATFSGGTVTATRDHYARVRRSIQRKASQGTRSTRRRARAVGKRIAGREHRFQRNTNHIISKRIVGQAVASGQAIACEDLTGIRERTNRQARTKTERRRSNSWAFAQLRLFLTYKCVGAGVPFVLVNPAYTSQMCHCCFVLGERCGKRFSCVNPACAWRGDADVNGAHNIARLGLALMQPGGPPLCCSYQPGGRATASPGASALGS

SEQ ID NO: 3381 - protein, 529 aa, unknown
  TnpB Polypeptide
MARRSKKRDKRWMWVVEPGDKIVVSRTAILPSKQISRREFRALEEILNIYSRMLGDVLPHASRNIIESYYRLKNEKYRELRNMYPNIPSHYIHGVCQDAVERISSLRRNRARQYSREIFDELVKYLDLGKRGLRGRRIREYLWRRSWEIARHQVDLEMMEGKLVPRINSASLWLVDDHVWKPIDATKIRINGFENTFFTSVAINTHRGWVYLDLEPSKEFYKLLARGFKPTSHAKIKLDRRNRRVLFHLSLEKETKIYRPEDIKPVDVNENSVATIHEAFTVILETDLAKTTLGYSYRKKSIQRRNGSSGKEARKAMKKLREGEKKRDYRMKTANLIVRDALRMRGVIVIERITGEDIRVMIARYRDRQLRHRIYQSALKGELNIIIDKAREYGVPVLMVDPRNTSKICPIHNASIEYGEDRIGICSKGGKRWHREVAALINIYLKALEALYEGNAQKGFGDPSLDGSPVPLGSTATGEPIEIPRSLWGRWKSLDDHRDVIASLWVKKQSNTNKLIPMTINNHRGTSGR

SEQ ID NO: 3382 - protein, 479 aa, unknown
  TnpB Polypeptide
VKKRESPGFSRGECQQGKASSFTHGRDPLLERASGAVKGLAQAVEEIDAVRFRIYPDRIQQQVLNRWIGAQRYIYNQKVEELEYQLWLKNNAKFSNRFQEPDENCCPWDQTFSKYALSAPWLKGIPSFIRRNGCSRFRSAMAKWGKGGGRPQLKTRKSVRSVLLTSECFTLPTHDGEDCLFIGTKSKNLGVLKWVRHCEYKEPRQISVTQEPDGKWFVGFSFESGRMLPESIIPERKEEVLGLDRGVVNPVTDGTGRFYDFTPAEKVKLERREKKRTKLQVRLARQKKGSKRRAKTRRAVAITHARDRRLRASAAHRIANHVVAHAIHTGCKAIALEDLRLGNMTRTCKAKQDDDGSYLPNGQAAKSGLSRSLLGRALGQIKTFVEYRCRRVGLIFAQVDPAGTSIECPQCHHKDKRSRLSQAEFECVRCRHTEHADVVAGSNVRDRAFQKITEISPGTSLKNARPLKSPRKGQPVGFV

SEQ ID NO: 3383 - protein, 409 aa, Arthrobacter sp.
MSIRQRLYPSPEQAAALEMHCSHARFVFNVGLEQRKMWHPFKRHTFKITAASQMRELTEAREAFPWLAEGSSAVQQGALRDLDRAYRNWWSKPSKFRHPTFRSKNERQGFIIRTLKVQRLNRKWALVSIPKAGKIKFRLSRPWADVAAAKSARVTLSKSGQWHVSITTHPAPFNRTTTGKMVGIDRGIKQTFSTSDGVHARIPTLTKTERDKFLALERRLSRQVPGSARREVTKLKLNRLRDKLRNRQNDWIEKATTSLVIDHDLIALEALNTVNMARRAPARPDPDNAGGFLPNGAGAKAHRNRGIYAACWGKFARRISDKAATTPEHHRTQVILVNPSYTSITCNECKHISKENRESQAVFHCKGCGHKAHADTNAGRNILDRAHDKLPLDGRSTDASATHWAQRQA

SEQ ID NO: 3384 - protein, 504 aa, Lachnospiraceae sp.
MHTVRLLLSTTEYDKQVLEKRFRAVSHIHNVLVKHAKKCLKRLSCDKEYQSLKTEYSKILKKSKPSKEDKVCKKQLSQKMTDIIRSYGLSEYSFQAYIKVCAKQFRKCLSSQQVQKESTRVWRGVEDILYGDGKELHFKKCRVFNTICGKTNTNGVKFHKDTCSIEWLGLDINCRFSKDKDYILEALDSDISYCEIKRMMFPNGWHYYVVVYLKGDAPLKLKTVGNDYNITGVDIGTSTVAAVSDNAATLKELAPKCKDYNKRIEKLLRSMDISKRISNPAKYKPDGTIDKTNHDKWIYSKTYLKNLNRLKCLYRQKSAYIKQSHEEMINRLLEESVNFVVEDMSFKGLQRKSKNTERNDKISNIKQKDGTIKQVHKYKRKKRFGRSLNNRAPASFITILSRKALLYGGDVYKVDTKRFRASQYNHVTDDYVKSELSERDKLIDGHKVQRDLYSAFLLKNCNNGFNKPDRDKCIDGFNRFLELQDNLITEMKTNNISMKQCFGF

SEQ ID NO: 3385 - protein, 532 aa, unknown
  TnpB Polypeptide
LFKYLCFILLLGEFLKEKELKQTLIFRLHPTASQKRQLHEIFTINNRVRRIGYKMLFEEREVFFSKNKIAKDELNSKIHANLMEICKNNPYVNTIERDNQTRLKQQKTWLKKRKKYMKNQVAEIKNKIDFIKSTNKRDRRLRGLYTRLSSIQNKLNNLQLKPVVFGTRRWFRERSKGNISREEFKIHRDASFSCEGKKQYGVVNLNIKVFPNQTVRIKTFHKEKDKKYLYVPFTVNISQEKWYREILTAEKYMGTIKRKMIKGELRHFAHISYDIPEAEVRYNFKDGAIGLDFNYNFVSLSHIDKNGNFKSYHQISFGNLHTKRKNSRKNYISYKMDKVINYCINKNKGLVIEDLSFDQEFSYNKKRNRKLNNFKITALDLLERKCLKSGIALRKVHPHYTSLIGKYKYSRSYNLSTHVLASYVIARRGLGFKENLPAIYKWVLSQVGEIIEPRLKKGSPYYEWSQIHDFFKHSGITSFKTSEVIRKVLRMKYVLNSGTSEQPDNLKVGLSSQGKIENYYKFWNFIEITNFL

SEQ ID NO: 3386 - protein, 242 aa, unknown
  TnpB Polypeptide
MAKVEIVGPTKHSKETVSRAVEKALEARYVNITVQKQARLKRSYAAVLPVDMGIRKLATTIEQGKPCFYGKQVRTIRGHYFHLRRSVRKPTTIRKWKHSEQRSVRHEVHTITRRIVEHAKRMNALIVIGDLQGIRNKDCGRSFNRRLSGQPFYLFKQLLTYKANWEGIRVLMVPEAYTSQTCNRCGVRGQRVAGRFSCSNCGFMCDADVNGAWNIAKRAHGMLNHEAGAVLIPPRTLAVCEP

SEQ ID NO: 3387 - protein, 435 aa, Lachnospiraceae sp.
VGDELQKNEKEHLFYNKIHGIIESVDKIIIQKKDWFYGKYESQCTFSVFDVLSLSNPSIHRNPGREKALNIAYRFRIYPTEEQKILLGKTFGCCRFLYNQMLNDKIQEYKKTKKMLKNTPAMYKKEYPFLKEIDSLALANVQLHLEKAYKNFFRDPKVGFPRFKSKHHSKNSYTTNVVNGNILVEGSRIRLPKVKWISMKKHREPAENCRLKSVTVRMEPSGKYFASLLYEGYSCENQAADKDYSNAKILGIDYAMQGMAVFSEEIETEEAGFFRKNEKRLAREQRKLSRYVKGSHNYVRQKKKVAKCHEKIRNQRRDHLHKLSRRITDRYDIVAVEDIDMKAMGQCLHFGKSVQDNGYGMFRDMLDYKLAWKGKELVKVDRFFPSSKKCSKCGKIKKELKLSERVYRCTCGNEMDRDRNAAINIREEARRMLSA

SEQ ID NO: 3388 - protein, 371 aa, unknown
  TnpB Polypeptide
MLQAYKYRLYPTQAQIPLLMRHIHACRFVYNHSLEQKIRAYEQNGKRLSCFDLNNHLPTLKAEHPWLTEVNSQSLQYVNRNLDNAFTRFFREKKGFPKFKSKKNPVQSFQVPQHYRVDFESNRVKLPKIGDVKTKLHRVFTGKMKYATVLVTSTGKWFISILVDDEQPDPNPVPFSSETTIGIDVGLKDFATISTGEKVANPRYLKNSLQRLKVLQRRISRKVKGSKNRQKAIQKLARCHDNVANQRNDFLHKLSYRVVSENQAIAVESLNIAGMQKNHNLAQSISDVSWSAFFTMLEYKCRKYGKTLLTIGQFDPSSKICNRCGYSNRDLKLSDREWTCPDCGIVHDRDINAAINIKTFALQDQNLVGVV

SEQ ID NO: 3389 - protein, 559 aa, Beggiatoa sp.
MKPSGSTYPCFVATRIHADLGEIPTKLDTLVDWCEQALTYANCVIVATDDVLFDTVHDLLQPLDSLIHPLLISPWRGVAVPLNAIIAEATLLGGKSLLLQSIEVQTNAINIYRLHAQLHSDTLVVGAKLLDIHGENTGLQPLNGLNSPWNTLALWDLHKLNIVGFLGLSNGFLNAVPAGIEEVATISLLQHMYPDTAQSKLITLSHLHWDQSWDSPERFNYHQQKIVTKLERAEIQLKHLPYPRGRFKMKKAKKVTRIAYSDDLNQAKYDALNEIAKRCGSIRTEVWRNYGSVGGLYARFRPVRQGWHDGKRIKNLPRRLWEPTLNDSLDDIKANREAAKEKVIRHIFKNIDDNEKRKELFKKLKNDSVWVNDDYVRRLMRKYWKHGKNHTFNQIVLDPGCYKCFQHNGKNYIKVISLVKCKRIAIPIGTNYPISGRIRLILRDGGVEIHYTIDNVDDRVCGSQKIGIDKGYTEAFVDTEGEFHGKGLGEILSKESDYLKKKYKRRNKIKAVLGKVEQKNPKKAKRIIKKNLGRKKLNRRKHQHQARVKTIVFTATKLG

SEQ ID NO: 3390 - protein, 586 aa, Streptomyces sp.
LREFTSLDTATFGGKFTRRWTWLFSPLNSTSSASKSSHTARMISSHRVRCRSPKTECRYFVTKTKWTCMRKMQWRPVRTFSSIPINQLCSMIGVQLRYSFRLYPSAGQCSALSRAFGCARVVYNDALRARETARSQGLPFPKTGDLSKALITEAKNAPERAWLGEVSAVVLQQSLRDLDTAYRNFFDGLKGKRPRMGAPRYKSRKDTRQSVRFTANARWSITPGRKLRLPKIGDLKVKWSRSLPSTPSTVTVVKDSAGRYFASFVVETGPGELLPQSMPEVGIDLGLGHFAVLSDGTKADSPRFLRRAAKRLKKAQRDLSRKEKGSKNRDKARVRVARAHARVADARREFHHQLSTKLIRENQAVAVEDLAVKGLARTRLAKSVHDAGWSAFVSMLEYKAARYGRTFVRIGRFEPTSQVCSQCGVKDGPKPLHVRVWTCGACGAVLDRDINAAVNIARAAGLAVSACGAQVRPGLVPAPRGEAGTHSTPQPATARQAGIAVLQGGEDVNYRCWWPRPGPVPSRPRRRTSPVRTGRDHGPCPGPAPGHPCRHRHRRRHRARWRAARRSEPTSTCPRACRSAGRARSR

SEQ ID NO: 3391 - protein, 502 aa, Leptolyngbyaceae sp.
MGRSKTPSFTVDIPLIVDSRAEAELLSRSQAGRQLYNACLSEAMVRMRLVRNSDAYQLARAMPKGKARTEAFSEARKAYRYSEYDLHSFAKLTADRSGWIAQKLGANTQQTIATRAFKASERVMFGKAKQVRYKVPTRFRSMEGKTNKQGIRWVKDSLVWGKLTVPGRIDLQNEVVMHGLSSPIKYVRLLWRELNGVRRWTAQLICEGLPYAKPKNYVTTGVVGLDLNVSNVAFVADSYAGLLPFAEGVPTYEKEIKALQRQMERSKRANNPDNFEPDFTAKRGRKTVKKKGKSKKGRRRWNNSNRYRVLSRKKRELEQRKVAYAKSKNRELVNDILRHGNQIRTERVSVKGWQKRYGKAIAAKSPGYFQSELVRKAVNAGGTVLKFRVQTTALSQTHLNGERAKKSLSERIHYDQTGIVMHRDLFSAYLARYVDGDKLSLQDAQLEYLGMESALLGAWERYKQSANRVGVAESRKTCPPSEQIPSNSEKANQISQFGLKVC

SEQ ID NO: 3392 - protein, 463 aa, Actinomadura sp.
MTRRVRGSFSSSRASRSSADRVCVLHEISVPPDSRWTNEVSSRAASARHGALLGLSVAVGMLRRMSRYRLCPTPAQEAGLLEHCRHARFVWNLAVEQHAWWTFRRGPAPGYVAQARQLTEARAANPWLAAGSQTVQQQALKDFAQAMANFFGGTHRRPTWRKAGLHEGFRIVGARGRAWGVRRLSRRIGEVRVPKVGWVRFRLSRPVPAGVKSFRVTRDRAGRWHVAFAHVPEPVPAPGNREAVGVDRGVAISAALSTGETLTVPGLTTAEAKRLDRLLRRFARAREGSNRRARLRAAIARLKARESDRRKDWGEKTSTDLASRFDIIAVENLNIAGLTRSARGTVDAPGVGVRAKAGLNRGILANGWGLLVSRLEHKAPGRLVRVDPAYTSQTCNACGHRAPDNRKSQAVFRCVACGWCANADVNAACNIRDTAVGRTVAARGGGASARPVNREPQPTLLSV

SEQ ID NO: 3393 - protein, 387 aa, Thermus sp.
MTMRKAFKYRLYPTQPQRRDLDKTLMLCRQLYNAALQERRDAYKKAGRTVGFYEQKRYLPEIRAELPEYKHIHSQVLQNVIERVDLAFKGFFRRVKAGQKAGYPRFKGKGRYDSFTFPQAGTTGVKLQEGGKRVLLHGIGSVKVKLHRPLEGKIKTATVKREGEHWYIIFITEVDPKPLPPSEEAIGIDLGTNPHFLVTSEGEMVEAPRYFQKAQAKLATAQRSLARKKRGSNRRRQARRRVARLHRKIANQRKDFHHKLARRLVNRYGTIVHEDLNILALSRSYVAKGIHDAGWAQFLAILAYKAEEAGRRVIKVDPKYTSQDCPVCGHREKKPLWVRAYTCPQCGTLLHRDVAAAQNILAKAWTGPSGETLRAFPQGNTPRSPGL

SEQ ID NO: 3394 - protein, 339 aa, Mycobacterium sp.
MLTAEMTRHTTFRFCLDPTVEQHSLMSRHAGASRFAFNQCLRIVKTALTQRDAGRDTEVPWTGFDLINAFNAWKRSEEAGRIFAVGNDGVVTALVTGLPWRTEVRQQVFEEAAVDLGKGLKAWSDSQSGQRRGKRIGFPQFKKKTNTVPSFRLRNNRPNGQLPPIRVGECNRPRSITLPGIGQIGVFDDTRRLRRMLTNNRAKIRFATLTRRRDRWWVSLNLEAVDLHPGRHHPSRDPADDTRWVGLDRGLSAFVVAATADGKEVARITAAPKALAKGMVKQRRLAKSLSRNRKDHETARTPQPNWADITTTSPTSDAISFTMSPTRWSRLTTGSSSRT

SEQ ID NO: 3395 - protein, 351 aa, unknown
  TnpB Polypeptide
MSLLTYQYRIKDSTTRTALGKMAGAINYVWNYSQEVSLLAFRRDKTFLSAYDLHKLTAGTSKELRLSADTIQQVCTEYVTRRKQFKKLKLKWRSKKRSLGWIPFKAAYIKLQGDTLTYCGHRFRLWLSRPVEGTIKTGSFTQDARGRWYVNLQCEVPDAVAPVGHVELGIDLGLVNQIACSDGVIYSRENLTRAHEDTLAMAQRAGKKKRVKAIQAKIANTRKDWTHKVTTAITQRAKYIVVGDVSSAKLIKTPFAKSTLDAAWHAVRFQLRYKAMRLAGLCVPGRENWSSITCSGCGARSGPRGLRMLGVREWTCMPCGAVHNRDTNSAQNILVWSPCGASQANTGIRLL

SEQ ID NO: 3396 - protein, 424 aa, unknown
  TnpB Polypeptide
MDRTIKIQLNPTPEQAQSLGNTLEQHTACFNAVAHAGFTTQCSNGVELHKRTYYPLRAHYPDLPAQLVCAARVKATEAVKSALTWQKKHEQSYPKKGEKALKKGKPVPVFKPVKCPHSKIACIRYDQRSYWVKWDTLTCSLATVDGRIELPLSVPEHLMQYVGYKDRSFPEGRVCSADLCSRKGRFTLHIVVCIPHPTRPLGRVLWERSDEERSITPSDEVSGVDLGLNRPAVTSKRQFLGERRWKEQERRTFRLKRKLQAKGTKSAKRHLRKLSGKQFRRRRDHDHVLSKRLVQNAPPGSTIVLENLTNIRETSKMGRGKDNKNSENKRRLHSWSFAQLYSFVEYKAEARGIEVVKIDPRHTSQTCSCCGYQHRYNRRSQSLFLCRDCGYCWYPHPLLPRPPRLLRLSHHHLRPALCSARRYG

SEQ ID NO: 3397 - protein, 385 aa, unknown
  TnpB Polypeptide
VYKGYRIRIYPTKNQIQSLNKHIGHCRFIWNYMLETQIKRFENKEKHLKCFEMNKLITSLKKEFPWLAEVSINSLQLICKELDQAYQRLFRGVSKRPKFKSKRKAKPRYPITSDIKAFYFKDGLVQVPKVGKLKYKADYSSLDLEKVTAFRNVRISFVNGKWILSFAIEYENQVLKQEDKHGSLGIDLGVGRLAVVAYEGTKREYININKTKTVRNLNRKLTHVQKVLSRKYEAAKKDGKDPKEKSNQILKYEALLKRIYYRIACIRLNQRQQIARELVNLHPERIVVEDLNVKGMMKNRHLAKSIGEMGFYDFVKILEYKCEQLGIELIKADRFYPSSKTCSHCGCINKGLKLSDRTFVCPDCGFIIDRDYNAAINLMNYSNSL

SEQ ID NO: 3398 - protein, 486 aa, unknown
  TnpB Polypeptide
MLTGRKFAARFKNSSAREAYLTWSAGQMFIYNECVLEQRFFDSLSRLIAETERHKQPIRNECRIARPKPDQKYAHFVDKAQRPWLSQVPSAILDIGAFRFCQASKRAAAGLVARPKLRAIKDAERHLLLTRAYFTIALTSRAGWYELRFGSARIPGGTILFRAHREFVVPAMVSVTLTSKALFVSMSYEETEQERFPETEKEMLERLRQYSEEELIACGNGIDRGVVRPVQTSNEPEPYVLTKDQLERIRRKERQRKHYQKRMARCEKGSRNRAKMRRKVARTFDYRKNVINDFAHQTSHALVSDDKVQFFVLEDLRVKNMTKRPEPKYDDNAKALPNGARAKAGLNRAILSSGWGKTEEYLKYKAKKAGKLVIKVEPAYTSQRCPKCGRVERKNRPSQSVFRCVSCGFESANADYVVAGNILMAGVELIREGRLEPKKVKATLRGKPAKATNIKLGPGRADVMPVEPERCLRKLRCQTRYEAGSP

SEQ ID NO: 3399 - protein, 231 aa, unknown
  TnpB Polypeptide
VFVTRRNQRWYVSFEMELPDTPVQRKSTGKQVGIDVGLKSIAALSTGEWIENPRWLHSSLARLRRLQRRASRQVTGSQRQHKTYRQIARLHERITNQRMDFLHKVSRRLVDEFDLIAIEDLTLAFMNRNPHLALASHDAGVGILRQMLEYKAESAGIPLVAVNPANTSQVCSGCGSIVPKDLSVRVHACSHCGLVLDRDVNAARNILTLAFQNPLGRSGQAVTWAAAPCVA

SEQ ID NO: 3400 - protein, 433 aa, Crocosphaera sp.
MLVVEAKLKNGTLEQYQKLDEAIRTSQFVRNTCVSYWMDNKGITRNDLQKLCSTLAKNKDTPWVTLLNSQARQSAADRAWQSINRFYQNCGAPTRHLMAHVAAPSSRAKISGKKGFPQFKKYSRSVEYKLTGYKLSDNRRKIKFIDGFKAGEFDLWCSQRTLVYYSEQQIRRVRVVRRADGYYCQFLIDVERQENHKPTGQVTGIDLGLKEFYTDAQGNTVDNPRYLRKSEKRLKKAQRRLSKRFRKGKKQSNNYHKQRVKVAKLHLKVSRQRKDKAIKDALALVQSNDLVVYEALKIRNLVRNAPPLSTADPAGFEIQQERGSAFHALNSIQGRSAVKNRKLAKSISDASWYQFTQWLNCFSKIYRIICVAVPPHFTTQDCSVCSTRVQKSLSTRTHQCPNCKTVLDRDHNAAINILKKRFSAVLGVSPMSD

SEQ ID NO: 3401 - protein, 395 aa, unknown
  TnpB Polypeptide
MLRGMKIALDLTDEQEQQMWKSVGVARWSYNYAINRDRECYLNYLDDNTLPKTLISGEIRKELTVLKNTTHPWLKEVGSNVIKQAVKDWDDARNRFFKGLGKAPKYKSKSNSKPSFYVNYESLRRVDGGFRGERLGFIKTTQPLPKIPKGTHYKNPRISFDGKHWYLSFSYEVPEISVELTDLVIGVDLGIKTLATLSTGEFIENINKSRRVKQLEKQLRREQRHLARQLQVNTKGYLTTEKGGRKPIYKRPLELCSNIQDTKRKIKLLYRKLHSIRMNHLHQTTSYLVKQLPKGIVIEDLNVKGMIKNRHLARNIQNVRFYEFRRQLEYKCSQYGIYLVVADRFYPSSKTCSYCGCIKSDLKLKERTYKCDSCGLNKDRDLNAAENLAYYFYRG

SEQ ID NO: 3402 - protein, 380 aa, unknown
  TnpB Polypeptide
LKEEATATKAYKAPIEAPKDLIEAYFEAKKKALREVLNHVTHSENGKAHLSFKAGDRRRLRNNLLKGWKYSRHYVDSAINSAIGLVKGWVKLYNRGRAKSKPKVTGKTVYVKSTLFTYRDGKLKISIEPNKRYLEVDLTRYDYLPGDFDSIGGLLLAENGLIINFKRKVEGVEPRGWASFDVNLANVTALISGRIVRYDLRQLYHVHRVYEEERRKLQKLSKRKPRTAERLMWKYSRRERSRARDFMHKLTARIAGELEELRSGAILEDLKGIKGRLLHGAKSLNRKLSKWNARTFQLMLKYKLKWLGLPVKYVNPSYSSRTCPLCSGRMAAYGGRLMRCKKCGFIADRDAIAVLNLRMRGSGVTPKALIEASASMMGKR

SEQ ID NO: 3403 - protein, 451 aa, Streptomyces sp.
MGAGRVKRAFKYRFYPSDAQAAELSRTFGCVRKVYNMALAVRTEAWARGERVNYNQTSAMLTVWKKTEALAFLNEVSSVPLQQTLRHLQAGFANFFGKRARYPRFKSRKRSRRSAEYTTSGFRFREGRLTLAKMSDPLDVVWSRPLPEGAAPSTVTVSQDAAGRWFVSLLCEDASVCSLPATDAVVGVDVGLDHLLTLSTGEKIANPRHERRDRARLARAQRALSRKAKGDGANRVKARRKVARVHARIADRRRDHLHKLSTRLVRENQTIVIEDLTVRNMVKNHALARAISDASWSEFRFLLEYKAAWYGREVIAVDRFFPSSKLCSACGTLARAMPLHVRVWTCASCGASHDRDVNAARNLKAAGLAASVCGAGVRPQRRTPGGQSATKQKTPGASRRNPPSFTKGKKSSCEPCSSPRSCYLASPQVRGIMCPPGQQTVSMRPGRVPAC

SEQ ID NO: 3404 - protein, 342 aa, Scytonema sp.
MQYNGNMMLTYQYKLNPTSEQVVTLETWGQLLRRHYNYALGQRLDWLNRTRCQIDRCSLVCEPIGEIPDKPDYYTQASDLKQTKELFPEYKNIYTDCQQQNLMRLDKAWKRWLIPDKNGNRGGRPRFKKRGEICSFTFPRVNSLKAGAHLTGKTLKLSKIGEVEVILHRPIPDGFEIKQATILHKADGWYCSFALEDKTVPTFVPIDEIKTATGIDVGLEKFLTTADGQGVEVPRYYRKAQATLARGQRKLVRKIKGSKNYQKQASKVARLHLHVARQRKEFHYQVAHWLANSYDLIIFENLNIKGLARTRLAKSILDVAWGAFLQIMQAFFGQTRQAHTRS

SEQ ID NO: 3405 - protein, 195 aa, Mycobacteroides sp.
MALAAELMSTYGAGAPDGAAGRGSVKDRRTRNRELRHKLQAKNTKSTKRLLRKRSRKEARFAADVNHQISTRIVAEAERTGRGIAVEELTGIRERVRLRKPQRATHSSWAFAQLGAFLTYKAARAGVPMIAVDPAYTSQRCTACGHTDKRNRTSQARFVCRACGFAAEHADILGADNIAHRAPTTWAQSTVPSAA

SEQ ID NO: 3406 - protein, 412 aa, unknown
  TnpB Polypeptide
MSLFMRVLATARVEAAAPKGGEALLTQFLKEYRNAVQYIVDGIWFLDYVPSEESLHKMFYSELRRLGFRAHHVSEIYKRAKEVVEGAKKNRGSKPILKKLTARIHPLDYKIDFNAKTLRIAVLNNERIELKLKWYNYLNKYLDGSWRPGEILISCRNGKILVYITFHKDVEPTDFRAVMGVDINFSNITYTVLDLSGNLVTIGVIPFKGLRRALHLKKLAEELQKRYSKSWRFLKWVGGVRGRWLSKARNILIDSAHRASKKLVEIAKEYNALIVFEDLDKLKENGNGGYKLSWGKSLWCYKRIQMFAEYKAAFHGIKTVYVNPAKTSRKSPNGKKLRFINYRYAILGNVVTSRDVIASWNIALRGLEKLKRMRGFGVKWSPDSPADEGMRTRPNAGNPEARYSQLTTAIYK

SEQ ID NO: 3407 - protein, 355 aa, Salmonella sp.
VYNKALSIQNEAYSSGRKYTSYNKMASWLKEWKSNPETEWLNDAPSQALQQSLIDLDKAHKNFFEGRSLPPKFKKRGSHDSFRVPQKFKIDQENNRISLPKLGWIRYRGSRKVTGEVKNVTVSQTCGKWYVCIQTEIEVEINPHPSRSMVGLDVGVARLVTLSDGTFYSPVNSYKSRMKNLARLQKTLSRKVKFSSNWRKQKRKIQRLHFKIFNIRNDYLNKITTTISKNHAMIVIEDLHVKNMSKSSSCSKSNPGRNINAKSGLNRSILDQGWGELRRKLEYKQAWLGGNLLAIPPAYTSQRYACCGYTSKDNRISQSKFMCKECGYEENADTNGARNILAAGHAVLACGETVL

SEQ ID NO: 3408 - protein, 382 aa, unknown
  TnpB Polypeptide
MLRKGVYLVSKSFTKNFNKSFKVRIYPNEEQRVLIDKTFGCARFIYNFMLNLKQKLYKNFNITLSYNHMSKILTELKRHKTWLKEVDKWSLINAVKDLDKAYQKFFKGNGFPKFKSKKQDKLSYRTNDYLFLEQDSRKIRIPKVGWIKFRDKSKFDGLTKINNITIYKSSSGKYFANISAEVDITYFEKTNQNCGIDLGLKDFCILNEGTRFENPKFLVSNEKRLRLLQKSLSRKIYGSKSYMKAKVKLAKFHEYIVNSRKDYLHKISLYLVRNYDIICAETLRVKNMIKNHRLAKAIQDVSWYEFCQQLEYKCLWYGKKFVQIDTCFASSQICSKCGYKNSDVKNLNIRKWTCTECGSHHDRDINASINVLREGLRTLKLV

SEQ ID NO: 3409 - protein, 367 aa, unknown
  TnpB Polypeptide
LNKTFKVRIYPNKEQIRLIEQTFNSTRYLYNYMLNLKEKLYKFFGISLSYNNSSKVMTELKRYKTWLKLVDSTALQQTLRDLDSAYQNFFSGKSKYPKFKSKKRSKNSYRTNSNAIRLNTENCTIRIPKVGSIRFRDKSRFSGVTKIYSINISKSSSGKYYASISAEVYIPHLEKTNQNVGIDLGLKDFAIFSDGDKVDNPKFFVHAQMMLAKMQRKLSKKIYGSNNYQKYKIKVAKFHEKIKVKRLDFLHKLTLRLVKEYDIICVETLKVKNMMRNHKLSKSFQDTSLYEFIRMLEYKCSWYGKVISKIDTFYPSSQLCSSCGFKNKDVKNLTIREWVCPKCGTHHDRDINSAINILNEGLRVLNS

SEQ ID NO: 3410 - protein, 366 aa, unknown
  TnpB Polypeptide
LNKSFKVRIYPSQEQKDIIDNTINSTRYLYNYMLNLREKLYEFFGVSLCYSQSSKVLTELKKTKTWLKEVDSKSLQQTLRDLDSAYVNFFKGKSKHPKFKSKKRSKNSYRTNHRIKVDNRYITIPKVGKLRFRDNYRFDDKNILKIYNVTISKSSSGKYYASISAEVGIKHFEKNNQNVGIDLGLKDFAIFSSGEKVDNPRFFIHAQKKLAKMQRKLSKKVFGSNNYQKYKIKVARFQEKIKNKRLDFLHKLSLRLVKEYDIICVETLKVKNMMKNHKLAKSFQDTSLYKFIRMLEYKCVWYGKVLSKIDTFYPSSQLCSKCGFKNSEVKNLNIRDWVCTVCGVHHDRDINSAINILNEGLRVLNF

SEQ ID NO: 3411 - protein, 366 aa, unknown
  TnpB Polypeptide
VNKAFKIRIYPNEEQKVLIDKTFGCARFIYNFMLNLKQKLYEYYGLNLSFKHMSKVLTELKRHKMWLKEVDKWSLTNALKDLDYAYQKFFKGNGFPKFKSKKWDKNSYRTNDYLFLDKDNRKIRIPKVGWIKFRDKSKFNGLTKINNITISRSSSGKYFASISAEVDIKVFEKSNQNCGIDLGLKDFCVLNDGTKFENPKFLVANERRLKMLQKSLSRKNQGSKNYEKAKVKLARFHEYIVNCRKDYLHKISTFLVKNYDIICAETLRVKNMVKNHKLAKAIQDVSWYEFCRQLEYKSNWYGKKFVQIGTYFASSQICSNCGYKNSDIKNLDIREWSCTECGSHHDRDINASTNILKEGLRILELI

SEQ ID NO: 3412 - protein, 338 aa, unknown
  TnpB Polypeptide
MTGKDFSVWLNNEYLPNNPDKMWIKEVSTKSTKKAMEDAYTAFTRFFKHKSRFPRFKKKNKSDVKMYFVKDHKTDCLSERHRIKVPTLGWVRLKEKGYIPTSKDGFIVRSGTISCKAGRYYISVLVEIQKQDTEVRDDFGIGIDLGLKNLAICSDGSTYHNINKTNNVRKVEKRLKREQRKLSRKVVSIKRGGTTQKNFVKQRLKVQKLYQRLSNIRTDYLNKTIHSIVKIKPAYIVIEDLNVLGMMKNRYLSKAIAQQKFFEFKTKLVHKCKENNIELRIVDRWYPSSKLCHNCGHIKRDLKLSDRTYKCSECGYVEDRDINASLNLRDANTYTVIQ

SEQ ID NO: 3413 - protein, 285 aa, unknown
  TnpB Polypeptide
MYLTKKIRLLPTKEQEVLFWKSVGVARWSYNLFLGYNQEKYKEWLEGNTKERFVSEGEVRKYINNVLKKTTHTWLKEVGSNVMKQGVKDANIALQNFFKHNKGYPKFKSKKRSRHSFYVNYEHLKRLPNGFQGERLGYVRTRESLPKIPKGQKYVNPRITYDGKFWYLSVGYKVAIKQVKLTDDKIGIDVGLKDLAIVSNTDNSYTKKYRNINKGYRIKLLEKRLKRSQRKLSRKILDNIMSYTKNRIPKYTRPLKDCKNIQKQKHIIQGLYRNCLILGLIIFIK

SEQ ID NO: 3414 - protein, 364 aa, unknown
  TnpB Polypeptide
MNKSFKVRIYPTKEQRVLLEKTFGVSRFVYNHFLKLKGYLYQEFKIKITFNHMSKMLTELKRQKPWLKVPDKWALGNALKDLDSAYKRFYKGSGYPRFKRKDDKNSYRTSSNIRIDNSFIKIPKVGLLRYRDNYKSEDKNILKIYNVTISKTTSGKYYASITAEVYIPCFERTNQNVGIDLGLKDFAIFSSGIKIKNPRILKHLEVRYRRLAKSLSRKVKGSSNYQKARIKLARFHEKVTNIRKDFLHKLSTNIVKTYDIICIENLNIKGFMQSKLAKSFQDVSLYEFIRQLEYKAKWYGKAISKIDTFYPSSQLCSNCGYKNKDVKNLNIREWVCPECGVHHDRDINASINILNEGLRLLEII

SEQ ID NO: 3415 - protein, 366 aa, unknown
  TnpB Polypeptide
VNKAFKIRIYPDKEQQSLIDKTFGCARYVYNFMLNLKKKLYKNFNVSLNFTCMSKVLTELKRHKVWLKEVDAVALQQSLKDLDFTYQMFYNGNGYPKFKSKKRDKNSYRTNNWSQLDQDAKMIRIPKVGWIRFRDKSKFDGLTKINNITISKTSSGKYFASISAEVNIEHFEKNNQSCGIDLGLKDFCILNDGTKFENPKFLVANERRLRLLQKSLSRKIYGSKNYEKAKIRLAKFHEYIVNSRKDYLHKISLFLVKNYDIICAETLRVKNMLRNHKLAKSIQDVSWYEFCRQLEYKCLWYGKQFVQISTYFASSQICSNCGYKNSDVKNLNVRKWTCTKCGVHHDRDINASTNILNEGLRILKLI

SEQ ID NO: 3416 - protein, 413 aa, Janthinobacterium sp.
MERYQAYRFELRPTGEQERAMRRFAGSCRFVYNKALALQKENHAAGNKFISYVAMAKYLTAWRNSSETPWLSDTPCSSSQQALIDLDRAFKNFFEKRAGFPKFKRKGTGDAFRYASSKEFKLDKGNDRVFLPKLGWIRYRNSREVFGELRKVTISKSCGKWFASILTRREVELPLPKAATAIGIDVGIARFATLSDGSFIAPLNSFKKHQQRLARYQRRMGRKVKFSSNWRKAKARVQKIHTRIVNARKDFLHKTTAAITQNHVLVCIEDLQVGKMSRSAKGTVEQPGKRVSQKSGLNRAILDQGWGEFRRQLDYKMAWNGGMLLAVPPHHTSQTCPACGHVSEDNRQTQANFQCVNCGYTNHADTVGAINVLERGHRLLACGEMAQSGRSKKQEPAEACRNSSRRAVEISVL

SEQ ID NO: 3417 - protein, 292 aa, unknown
  TnpB Polypeptide
MKIQKSFKIRIYLTKVQEAMLAKVFGCKRFMWNQMLGERIAYYHEHGKGIGKFRRTEKEWKILFPFLKAVDSIALQQARIDLDTAYKNFFVERARFPRFKSRKDNQSYRTEYVSGNIRIDMQRLRIKLPRLGWFSYRDDRVITGTIKNATVSKTKSGRYFASVLVSQEIEIEQKATLNEGSIAAFDMSAKEFLVGDIMKYENPRFYRNNEVKLARLGRRVSRKVKGSANRNKARVQLARLYDRIGNQRTDWMQKMSTDLANHHDAIVIEDLNIDGMKRWNGGFAKSVTLDFS

SEQ ID NO: 3418 - protein, 362 aa, Gemmatimonadetes sp.
MDGTRRFGCRLKLYPTVAQAERFAVWARAGSGLRDLLLERDQACFEETRGHLSLNALRDVTYEFAEGHPGLDWPAHSRNQHARDHAVAVRLAFRRLKAGKRGRNVGWPVPRRSRPTTIYVHNQTLKVSGTYVRLSRARHGWTRYRGTIPAGRILSGRIRHDDTAWTLSLSMEAPVPVHVAPRRSACRVTLSPGSIVMADNRRTRSYSDIASSTTDDRRLARLRRRVARRSWRCTECGNLMRSDRRSGLLAGDKRQAPCGHWIVDYEKTARLRQAETAVRKLTLKNRNRLKDEIHNVTASLVRNYGQIGVDVRAGRGTATVDFLHQIAYKGSWYGREVTLRGTAAQAETGPEANGANGRGDLA

SEQ ID NO: 3419 - protein, 248 aa, Blautia sp.
MRIVSNYGVELRKQNIPICQTLDIYRSAVSCLIGIYAQTWDELAVITEPKKRFNTAEQLVHTTKKNQARFDFDLRFPKMPSYLRRAAIQHALGSVSSYKTRLGLWKKTNQKGGRPKLVCDNHAMPVFYRDVMYREDTEEKDRVCLKLYDGHDWKWFRVSLSHTDMEYIRKNWAGKKAVAPVLEKRHRKYFLRFSYTEEVPLTKTPAKEQIICSVDLGLNTDAVCTIMRSDGTVLGRRFIDFPSEKDRM

SEQ ID NO: 3420 - protein, 187 aa, unknown
  TnpB Polypeptide
LKEFAILSDGTIYSNPKFFRRLEETLAKAQRILSRRKKGSSNWNKQRIKVARIHEKITNARTDYLHKISTEIIKNHDVIGIEDLQVSNMLKNHKLAKSISEVSWYQFRTMLEYKAKWYGKQVVTVAKNFPSSQLCSCCGYQNKDVKNLGLREWECPKCHTHHGRDINASLNLRKEALRLTVGTTGIA

SEQ ID NO: 3421 - protein, 187 aa, unknown; identical to SEQ ID NO: 3420
  TnpB Polypeptide

SEQ ID NO: 3422 - protein, 299 aa, unknown
  TnpB Polypeptide
VSLATTDGRIEADYLLPDEDSDTPHAEYFFSDKYETTGAELHYTNSNWMLHIHCKQDVEADASEQATPENGTVLGVDLGVNNLAVASTGTFWTGEEFDHWQREYEKRRGDLQEHGTRWAHENMQAVGRKEEGRFKPTLHRIANEIVQEARENECSVIVFEDLTDIRERTSASWGHKWAFNRLCQYIDYKAEEYGIAVQQVDPKNTSRRCSTCGFTHPDNRGSESFTCQKCGYENHADYNAAKNIGLRYLRRNQTGGDEGAPLGVRLNSGTLNVNGEYESPADVSARTGVHAEPHRFSGG

SEQ ID NO: 3423 - protein, 354 aa, Scytonema sp.
LSPDWVAECPYSPREEAVFDAKVAFSKTATKNKPTPRFKSYREPVKSLRIGAKYWGAVYDRKGNSKQIIGFTHYISNKAIINGETVAIKDLQLNPVEPLCEEMPSEFTILLDKGRWFICFSIPFIPLENSQRNCIGIDPGVRTFLTGFDGESILEIGNGSISQVAILCQRLDQLQSQIAKSKGRRNKRLRWKLRRQSEALRTRIRNLTNEIHNKASVFLTKNYKHIFLPTFETSKMIVKKRRKLNSKTARNMLTWSHYRFKQTLKFHALKRDCVVHDVTEEYTSKTCSKCGHIHEKLGGNKKFKCPNCNHEISRDWNGAINIFIKSINDLVNASAMVEAGEDIPQYTGEFSTCY

SEQ ID NO: 3424 - protein, 338 aa, Nonomuraea sp.
MARARCAGSRRRSGGPRFGSPPPNTCPCSGSPASGDGCSCPNSGGRAFACRARSGGPSSPRPCPRDGEHWFISFLIDDGTPERREHACPQWVGVDRGVVPAAVTSDGEFFDRRHAGTGGVSSMKPPGERNRGRKAGPGYLNARRSGTLPAAAKKARPHDEGIEAVRTVMAAMRQIMRRVRWRRADFNAQAAHRLTRGYGHVVIEDLNTEGMSAAVKPKPDPDRPGRFLRNGAAAKSALNKAILDKGWYGLEVARRTPLDRARPADHAHRRAHRPAAGDPRRPAGRAAAGRVVPRRPDPGRRRHRGGGPQDRPRRARGAGRSGAHRAAAAVRGRALGLG

SEQ ID NO: 3425 - protein, 395 aa, unknown
  TnpB Polypeptide
MQVRYRYRLYPAPGQKQALARAFGCARVVYNDCLRVRDECHARGEKISDTEVQRRVITLAKATSERAWLGDVASVALVQACQDARRAYKNWFDSLAGRRKGPKIRHPTCRRKRGRQSIRLTRNGFALHGKQFYVAKVGNIKVAWSRDLPSVPSSVTVIREPDGRYYASFVVKREAAPLPACDREVGVDLGLASLAVTSDGEVITNPRFYRAAQRRLRRAHQALSRKKKGSANRAKARHRVAVMHRKVRDTRLDHAHKVALRLVRDNQAVYAEDLCVSGLARSRLAKSVADAGWAQLMRCIEQKAARYGRTFAKIGRFEPTSQVCSACGVKDGPKPLRVRTWTCVACGSVHDRDVNAAKNILAAGRAERLNDCGTGVRPPLTVAAGAEAGTHRSAA

SEQ ID NO: 3426 - protein, 399 aa, unknown
  TnpB Polypeptide
MEFRAYPTKAQEARLEEWTVLHARLYNACLEQRIFAYRRRGVSLNYYDQQNELPAFKAALPEYLPLGSHALQETVRRVDRAFKAFFGRVKRGEKAGFPRFKSAKRYKGFTYPDPAGWKFALGENGRHGRLSITNFGILKLRGKPRQWGEPTTLTLTRRPTGEWFASITVKCEPVRAAGRKAAGLDLGCETAVTLSDGVTFENPRHLKASLVQLKAAQRSLARRKRGGGNRDKARRRVAKLHQRVANQRRDFQHQVTNSLIKTYGLIATEKLNVKSMTASGGVHKAGLNRSILDVGMATITKFLTYKAEEAGACRLVMVPTRQVKPSQTCPACGHQKKKPLDERTHSCNECGYRAPRDVAAAQVMLAWALNQSGTGWLASGSSHTALTQETAPRAARLGA

SEQ ID NO: 3427 - protein, 289 aa, Deinococcus sp.
VKRGEKAGYPRFQGRNRFDSFQYPQVWRGGKWTGGGKPVDEGRKVYLPKVGNVRMKMHRPMEGMPKTLTVKREGAAWYAVYACEVMDTPLPATGSSVGFDLGTNPNFLITSDGEFVEAPRFFKKAERKIGQLQRKASKKKRGSRRHRELKRQIARERGRVANRRRDFHHKTARVLVQQHDAIFHEDLNIIGLARTRTAKGVLDAGWADFLGILNAKAESAGRLVRGVRPEYSSQDCHVCGHRQKVPIGRPYICAACGQESNRDVNAAKNILLRGLDGAFSEGHGVAHSH

SEQ ID NO: 3428 - protein, 492 aa, unknown
  TnpB Polypeptide
MIVKHGHSIEITRQLSPQAATAIAQWIGGYTVIYNQKTLTSRASYQAWIDAGKPVNHRPGADAAAAHLQAEFTFLKDIPSQIRRNAGAKWFEAHQAALKGVRSRPTVRPKHKKRSCYVTNELFDVQALNGERCLIQLKVNSGKRHRGQYLAGVVMPFAAEVAGKALFLSRKGRRFWLSMSFDKTLDVMTEEDVRHYAASLTDEELAGQVIGYDLGVKRQATDSTGEVYHLKEDAIASLDRLEKRRIRYQRRYARIARANDRMADTNKRPRTRGEQRLQVKIGRHSEKRAKIQFNNSHHISKKIADNTPLIAVFEDLKINNMVRRPKAKLCPETGHWLRNGASAKRGLNKSIHSVNMGQIRQLAAYKLKDRGKLMVRVKPHYSSQECSACGYIHADNRPNQKTFLCLQCGFAANADDNAACVIRQRGITHVRSEAFSTGKTPRTIKVRKKQARELASSGSGDLVSPGFQATIGDALHSRRTIENHGLSEARRL

SEQ ID NO: 3429 - protein, 405 aa, unknown
  TnpB Polypeptide
MKHKAFKFLLLPNTQQEQQLIQLAGISRWIWNYMLQKNKEQYEAEKKFVFKFAMNNLLPELKKEHPWLSQMPSQALQQKCSDLDAAIQRVYKQGFGFPKFKSKHVEHHNTFRIPNQSKCIRPTKDRVKLPKLGWVKWVKHRNIEGLLKSVTIKKENNRWWCVCLCEIEEVSPSTALIDSDIIGLDLGIKDFAVCSDGEVIPSNHFYRKSERKLKRTQKQLSKKQKGSNNYNKKKKELNAQHYRVKCQRQNFTHQASSSIAKNYKLVCIEDLNVAGMKRNRSLAKSISDQGWRQFVNQLEYKMDWVVKIGRFAPSSKTCSCCGNIQDMPLEERTYSCSNCGLEMNRDLNAAMNVRNWGIEKIIGQGSVQIYACGDTSDGDSEQSESSYVSLNQENIPSLEGKRSVL

SEQ ID NO: 3430 - protein, 372 aa, Enterococcus sp.
MKKAHKIRVYPNHRQEIQLQKTFGCVRFYWNFLLDQRITNYKMKEENAEYKEDKTTYAALKKLEEYAWLKEVEAQPLSQTNMDLNKAYNNTFKSNFGFPKFKSKKYSKKSYRTAAGMKVNNNYFYISKVGWVKMAETLRFNGKLMNVTISQSKSGKYFATFLVDTENFKKEPVTDTIGLDLGLTHFCITSTGEKIDNKNFYRSLGKCLVAEQRKLSRRLEVAKKHNRKLDECKNYQKQKLKVARVHEKISNQRSDFLHKLSSRLTDENQVICVEDLNVKGMVKNHKLAKSIVDVSWSEFVRQLAYKCEWKGRKLVKIDRFYPSSQICSSCSHKDGKKALDIREWTCSNCGTHHDRDINASINIRTEGLSGIA

SEQ ID NO: 3431 - protein, 492 aa, Symploca sp.
MPKGTNTIQTEKLSTQIVPIIGMTKSVETEIVSTMQRLGIVRSQSYNKLGSVRHWGLDWKKAYPLVRALRTPESLDLPSKLMEWTVNDVAKAISAQQAACIEALGTALHHRYPGKENEKRRKQCYKQLSDTSFLDNPFLHRVVRKQFQRGHSWVKNQIVYQQGGYSCKRISRHTYELELAGLRRGKRNRILIRSNRKITRQIRLIHNLELDRFEVHFLVNHGTVTAPGQPREIGIDKGYTEAFYDSDGNAHGKGLGFLATAKSDRITAKNRNRGKLWGLHRKLEKIDPAKSARILENNLSRKTENRRYRQDQEAIAQVIGAASKSLLGSESLKVFAEDLTQPIKSKRQSKAMSRKLNSWMKGAMRDSLQKWANWTGSVISEVGSSYTSQVDSVTGTLLGRRNGDNFIRFTGVVLQADHNAALNILARGTDKEISRFMKREEVQGVLLRRTARFLKGMGLTLRDGIELGWLDPKHSKCKAFKELLAGMRGTSR

SEQ ID NO: 3432 - protein, 379 aa, Ktedonobacteraceae sp.
MSLETQRTLTLLLPDDADIRCTRLSFQQVQQDLSAPCYNAGQPLGALSLQRQCYHQVKGTLNAQMTISAIRLTAGAYASAQRSGKPAKRPFAFRRARALFLIGKRGRDADFRADGTLSLWTVAGRKRVSYTIPDYFQPLFAEALELDSLTIVERNGKLIGRLTITLDVPEPAAIHPVGIDLNETNALVAVDPDGRTLFISGKAVKVKNRRTYKTRNRLKRKLAARKAERKSTRSVRRTLKRLGRQQSNRTKTFAQQTAKTLVTWAPKSAVLVFEDLHIPQPQKGAIKGKSVRRLSEWQHGAIRRAVESKAQLAGLAIVEVNPAYTSKICSRCGLRGKRKRHTFTCPSCGFTEHADVNAALNIRNRFTADRGSWADVKQP

SEQ ID NO: 3433 - protein, 412 aa, unknown
  TnpB Polypeptide
MQLVEQHVINKHDPRYSVIDEAAFKSKNLYNAALYEIRQSFIHEGKYLNYTEMDRRMQSSDSYKALPAKVSQQVLVLLDKNWTAFFEARAAYEEDPSTFTGRPRLPKYKHKTEGRNILVYTVQALSKPGMRDGLIRPSGLPITIVTEHTVVDQVRIVPRNGHYVVEIVYTKEPVQTKVDPSFCVGIDLGVTNLAAIASNREGFVPRLVNGRPVKAWNQWYNKRMKELKKRLPKADRERVTKQMERITNTRNRQIQHYLHTASKRIIDFLVKEGVGTVIIGKNPLWKQETGMGRKNNQNFVSIPHARFIDMLTYKAALVGIQVEVREESYTSKASFLDLDPIPTYIPNAEEKHVFSGKRIGRRNRLYRTKDGRTICADVNGAYNIVRKSRPDAFADAGAKGIAAYVVCAQRGL

SEQ ID NO: 3434 - protein, 190 aa, Klebsiella sp.
MLQRQLSRKVKFSASWQKQKKKIQRLHSHIANIRRDYLHKVTSEISKNHAMIVIEDLKVSNMSKSAKGTAERPGRNIRAKSGLNRSILDQGWYEMRRQLEYKQLWRGGQVLAIPPAYTSQRCACCGHTAKENRQTQSKFVCQVCGYTENADINGARNILAAGHAVLACGGMIKSGRPLKQEPTEASQAPV

SEQ ID NO: 3435 - protein, 353 aa, unknown
  TnpB Polypeptide
VTLNVKKTIKAKIVHLTKVKQRLLEEEYENLQRFLRGESAELYSANRQQAKRFYRKIKPYKEYPLSIRKDLLKVERRNTKIAEYWAKIPVKGRRGGVWVAIKPHCPITSDMKICESKLFKRNGDFYLHIIVQKEVEPKADCDGILAIDMGIHNVAVTVNSKTKEARFYGKKLRAIRGHYFHLRRKLPNRKAAKKIGSHEKRIVNHELHKISKVIVQEAVENNSIIVLGKIKGIRKNHKGRRFNRKLNSFPYYKLASFIKYKASWQGIPILKVSEAYTSQTCSICGERGFRRNGLFKCSCGAELNADYNGAKNIMKRAFGLVSKVGATANLPRTPPTDSLNPMMRGEASLLVER

SEQ ID NO: 3436 - protein, 399 aa, unknown
  TnpB Polypeptide
MFLEMDVPLCVVGKIFKPNEQKVLALNRCLSEFMRTVKFYVKLEDLSRRHNKVFYEEAKARFKLPTALIQNARDKAGEILKSFKENRKEDSVLILKRVSIRFDSRCYSFSKTTNVLTPYWLNLKLNHGKRVSLPIVFGERQRKLIEEAFQGRLQFANVEMVKRNGNWYAHFVVKKAVSFKKPETVIGIDIGENNLAVAVAFKDKPRKARFWRGSNLKQLRWQNSKVRANLQQKHRLDMVKRLRGREHRRVKQELHKLANEIVEYAGKFEKPVIAMEDLTRIRTSIHYGKKMNRRLHTVPFRQLQQYIEYKALWQGIPVAYVRAKNTSKTCHRCGNVKKTLNGEVYRCSVCGMTYSRDLNASINIAKRLLRQEAKPKSEEFGGDVNLPNQQMQIKAENLI

SEQ ID NO: 3437 - protein, 487 aa, Hamadaea sp.
MIVQLRYQFRVYPTPGQQIELAKAFGCARVVFNDGLRLRQAARESGQKYISDGELSRRVITEAKLTPERAWLGEVSAVVLQQALADLNTAYRNFFSSLSGKRKGRKVGPPRFRSRKDNRQAIRFTKNSKFKVLDNGRLRLPKIGDLEVRWSRALPSDPSSVAIIKDAAGRYFASFVVTTAVDETLPPVDSEIGIDLGLTHFAVMSDGTKVTAPKFLRRAARKLKRLQQDLSRKAKGSNRRAKAVVKVARAHARVADTQRDWQHKLSTQIIRDNQAVYVEDLAVAGLGRTRLAKRVHDAGWASFTSMLEYKAARHGRTFGRVDRFFPSTRMCSDCARINDKMTLDVRAWDCPCGSHHDRDVNAAINIKAAGQADFNDRRAQVRPGLVPAPRDEAVTHQNAARTTHSVAGIAVLQGGEDVKRTTTATGPEPAASPPPGRRSSPTPASSATRSRSSASRWPGRSASAPPSSAPSPSSSTAAPSAARTTRT

SEQ ID NO: 3438 - protein, 371 aa, Hamadaea sp.
VQLRYQFRVYPTPGQQIELAKAFGCARVVFNDGLRLRQAARESGQKYISDGELSRRVITEAKLTPERAWLGEVSAVVLQQALADLNTAYRNFFSSLSGKRKGRKVGPPRFRSRKDNRQAIRFTKNSKFKVLDNGRLRLPKIGDLEVRWSRALPSDPSSVAIIKDAAGRYFASFVVTTAVDETLPPVDSEIGIDLGLTHFAVMSDGTKVTAPKFLRRAARKLKRLQQDLSRKAKGSNRRAKAVVKVARAHARVADTQRDWQHKLSTQIIRDNQAVYVEDLAVAGLGRTRLAKRVHDAGWASFTSMLEYKAARHGRTFGRVDRFFPSTRMCSDCARINDKMTLDVRAWDCPCGSHHDRDVNAAINIKAAGQAD

SEQ ID NO: 3439 - protein, 384 aa, unknown
  TnpB Polypeptide
MKTLIIRIFPTEEQEKIIWRHIGACRFIWNWSLGNQIKEYNLTKHRIGYTKTCKELTELKSLKEFNWLNDISITSLQQSLRELDRAYNDYFINGRGFPKFKRKKNIKKSYPVESRKFYFNGEFVQIAKLGRVKFRSSYKFNIPDGNHAYRFRNVRIHYKNNKWLLTFVVDDDICDNQANKKELNGYSVGVDLGIKVLCSIAVNDKNIVVSNINKSHKVQKLESKLRHLKRVQSRKYNQNGRTFEKTNNIIKVENKIRKIYYHLKNIRKNYTHQTTTMITNLYPKSIIMEDLNVMGLIKNRHLSKSIQDQYFYEFKRQIEYKSKDRGIEFILADRFYPSSKTCSCCGNIKKDLKLSDRTYRCTECGLVIDRDYNAAINLMKYSKH

SEQ ID NO: 3440 - protein, 415 aa, unknown
  TnpB Polypeptide
MAPQGSHTPRDSRDRVGSANYRRKTQSGLNMRRAFKFRLYPTANQARELGIMVETHRRLYNAALEQRKLAYETRGLSLNYYAQSNQLKELRASDPYQARTNFSSEQATLRRLDKAYQNFFRRCQQGSKAPGFPRFKGREHYDSVTFPAYGDGIRLADNRLRVQHVGTVRTKIHRSVDGTVKTATLKREADKWFVVLSCDLGDVVVAPSTLPAGGIDVGLEAFLTTSDGQRIGNPRYQKAELPKLRRLQRATSRKKKGGRNRRKASRRVRVLHARVRNLRHEHHHQVALKLIRLYGLIGVESLSVSNMLKNHSLARAISDAGWAGFVNVLRCKAERAGAEVVAVNPRGTSQECSGCGVVVAKTLADRWHTCPDCGLSLHRDENAARNVLARALQARTGPAGLKSNPALVREAVCFS

SEQ ID NO: 3441 - protein, 469 aa, Serratia sp.
MLTGIKLRANPNAAQKQTLSQWMGCARVIWNGKVDEEKYHRTYARKYCTIGTYPPIDQKTAQFKSEELTPWLSDCPSQILRNSAVNWYQTYRKFMKGQCGRPKRKIKSDKGSIYLTRELFNFELCSDGNVRLFIGTKTNNIGYLSFKAHSKFEKPNSLYVRKARGHYYVSFCYENGVDESTLSSNAEHLAFLQGASREFLEQHTIGIDRGVAIAAQAGEISFDFSARQKRHLSKADRYLHRLQRKLAKQQKGANRRTKTQHRISVYHGQKSNIRRDFNHQTSRALVNSPARIFVFEALRTAQMTRRPKAKLDGQGRFLPNKAKQKAGLNKAILHSGWHMLESFTKYKAYQAGKAFFKIPATYTSQECAVCGNIHPNNRKSQSLFVCGQCGNTDNADHNASLVIKKRAITLILDSGTELSAADVLTASADIGRGGKGKTGGVKSSTSSSQRSVKREKVAVSGCALGSSLL

SEQ ID NO: 3442 - protein, 174 aa, unknown
  TnpB Polypeptide
MALSNGEFIDNPRFFRRDEKALAKAGRKQAKTKKRSPARKKVNKVLARIHERVRNRRHNFVHQTARRLVNKYGVIAVEKLSVKNMLGNHCLAKSISDASWSMFRSVLTQKAESAAREVIPVDPRYTSQDCHACGYRAKKKLSERWHFCPNCSASLDRDTNAAINILNQATGTSL

SEQ ID NO: 3443 - protein, 420 aa, Haloferax sp.
MKRTNTFEVRPLSESDEALLQEVMDATASFWNELTYARRQRFFDDENIWETNEFRGQYKGQLGAAGVQTVTRKNNAAWKSFFALLESGEDASPPGYWGNQEDGRDLRLFVRNDSYEIEWGDYSRIEIPVGQELKEKYGLGYYERLRLEVRGDPKWSGEQGELEIQYDEVEDTYRAYQPVSVDDSELDSPLASEEAALDIGVNNLVACTTTTGEQYLYDGEELFEQFRTTTEEIARLSSKLPPERDTSQRIRRLYRKRSRRRTHAQNALIRDLVERLHDEGIATVYIGELTGVIEIQPSPEINEMLENFWAFKQFVDQLRSVCEEYGIEGVEKSEAWTIQTCLECGEQDETVRHRETLTCPCGFEGHADLTAAETFLRRNTEQQVRPMARPVRFQWDNHEWRSTTDAPEFETNPNEQRTNP

SEQ ID NO: 3444 - protein, 356 aa, unknown
  TnpB Polypeptide
MKITLKVKLMTTNEQARILLETMESFNKACDWISEKAFEAKVFNAYDLHYLLYKEGRDVFPSLPSQSMIRAIAKVSDSYKLDRKKRHFFRDRSAMEYDKRTLSFKDLSQASLATVRGRIKVPLVFGHYAPLDKNKMLGQADLTYSKGTFFLNLVIDRPDDPPFKPEGSLGVDMGIVNLSTDSEGESFSGKTVDHVRERSTAHKARLQKKGTKSAKSRLKKVSGREARFKKDTNHVISKRLVSKAKGTCRAIVLEDLKGIRDGITVRHGQRERFGKWAFGQLRSFILYKATMSGVPVLFVDPRNTSRQCSCCGNVDRKNRKSQSEFQCVQCGFSLNADWNAAINIASRASINTPIAV

SEQ ID NO: 3445 - protein, 391 aa, unknown
  TnpB Polypeptide
MYLTERHIIKNNKELDLVCFNSKNLYNRALYLVRQHYFKTEGYLNFFDVYRLMVDSKDKDYYALPTRVSTQTLRLLDRNFNSFFSLVKKKQSGNYDKPIRIPRYLDKEGRTITIFPKENVSKVYLRKGVIKLSSLFIEIPTKVTESNLVEVRVLPRNNHHVVEVVYKVEQKEPKSDNGRYASIDLGLNNLATVSSNVVKPFIINGRPLKSINQYWNKEKARLQAHLKGNQRTTKRIKSITNIRNNKVKDYLHKSSRRIVNFLVSNNISTLIIGYNEEWKQNINLGRTNNQAFVNIPFYTFIKQLEYKCKLEGINVILTEESYTSKCSFLDGETLEEHENYLGKRIERGLFRSAKGELINADLNGSLNILRKVVGDFSYPIEACSTPLRVTL

SEQ ID NO: 3446 - protein, 315 aa, unknown
  TnpB Polypeptide
MTGIKKSPEERTHLETEVLHYVFTGIQKANEAIGQKRMKKKFEDLKLAQIGGMNCAVIAYSLASQEPFQYPTVKKWFLSYNTLDAIFKFTDNPVYKRMNSQVNQNAIRKVIAAWEGYFESLKQYKTNPAGYTGKPKIPGYKNTEESTAWFSKQVAKLKEEDGKSYLQFVNQKERFCIGKTSTYKGLQYVKTEIKPVYGRYCLLVTFDDNVKAVEPPVNPERILGLDPGVNNFLGVSNNFGAVPFVIKGGAVKSVNQRFNKRRSALLSALTKGSDSQHSVKYSEQLNTLSKNVILLCVITFINAHGMSVDMHRLPG

SEQ ID NO: 3447 - protein, 400 aa, unknown
  TnpB Polypeptide
MLKAYEYRIYPTSQQEEIFNQTLGLCRLYWNIIVFNKNQDHNFQIEGYKQVFTKYKPEALKWVKETACSIPLAQMWSDVRAAYTNFFKSCKGTRKGKFSKPPKFKSKKNPKDSFRYSCSNCTPKINKNGLYLTKKLGYISGSFQCRFAEGKWKNITFRRTTTGKWFVKICVEKKDEPKNNNKKIIAIDWNCRDEDFIVRSDGVKIKCPRYFRNSLKQLQHWQKTMSKRYVSSNEIQSNNYKKAKRKVALLHEHVAWQRKDWLHKESRKLCNEFETIIVEDINLQNMAENLSHGKVIGDQGFGMFRQMIAYKGNLVKVNSKNTSKTCHCCGFVNPKVKVGVNYWKCQVCSSEHDRDINAALNILSKYVTSQSIVGWELTEITNACGEPKSSAKQENELISV

SEQ ID NO: 3448 - protein, 451 aa, Delta sp.
MKVTKTVRHKITSHTNRLKATLNIYREALAFIVDAINNEWETLSLMETSKERYNHVEKLIHETKENPSPQYPKFDQQFHKFPSYFRRSATAEAMGIVSSHRSNLANHYEKQRLFESEGKAFKDKAPTLSKKHDAFPVFYKSNMFNKLGDGEAMIKVFHKNDWVWIKISFEMKNLEKRDLLNYKAFNPTLVKHGKKYYLAVPYQKNMPLKNTKLEDQTIISVDLGLTNSAVCSAMRSDGTVTDRIFINQSVEKDRLLHRLGRLKKAQKKSGQNSKNNFPNHWRKINHLQKQIVHDTASQMIKFAEKNGADVIVFEYLGKFKLPKGQSSWVMKFRQKMQYWAKSKIQDKVEDMAHKRGMRFRRVSAKNTSALAFDGSGLVKRNRRKDIALFQSGKTYQADLNASYNIGARYFIKEIQKTSSEKKWSQALAKVPELELRTRGTLSSLISLAKAM

SEQ ID NO: 3449 - protein, 496 aa, unknown
  TnpB Polypeptide
VPYAAFGKTGEPLDLGEVMDGIRRDAELVAHYSLKEMTEQNLALVTYFDRLKPSGAGYMMGLKLPVEVKGRFKSGSSRLERMFREQVVTNLRSWAARSGVVDQTYSDYISAGWRRTVRDSKPRTLQPRLALSATDRGYHKNFRVTPEHISLEMVVQGKWITLHFPTPPQLLEPDCEPGVPDIWVDSQNRVMFGFHGRTNPGRPEFSSRYVVGVDVGATNPAAYVVWDTEKKQVVKKSLLGQRARSLNNKIKRGQTQVSSLKRKGKDEEAISHRQHLSNRRKELSILVAQEIADAAWHYNNAIVSFEDLSHIKNTMMFGRWFRGEVYRRTRDMVEADGGRVLKVNAAYTSRKCHVCQSDLDMSDYSQPRCTACGTAHHRDLNAAANIAQRANVKKACQTRRRHATKTKRVRRSKCRVKPLKHPGTKNRPTPKAPQNRPKSLAHSSLPKKEVSVRMCPADTRVSVVDHDAWFQTTSGTTIPTRDLSVANTVDVVYPKE

SEQ ID NO: 3450 - protein, 509 aa, unknown
  TnpB Polypeptide
VKYYDTVTRHRFTTDNGVDAEQVSADLAQMIFWMAEAEREVLASQEFHDLAMKALKGDRPTGALSAWGRKKLSRYNFSFQKHNMNEMLVSNVVSTLELYAMSVGLFQVMSTHTKETKPERILTHYRSTYPKALQPTSGMVRAHLRRYHVKGDRKASLPGVSAKLNLAVCDTHFAPKASRDDNEPLSIVVQVKTPSYDLTKIYIRLPENTERFGTGKVCRPTIRLNSKGQIVFDIAIEHEVHQRDTNKFVGVDLGRVEPFVATVIDPDTKHRSAPYHTNYKKRLGSLIKKEQQRRDLSRHLYERANLCEKYNRDQHAQVLRTEAKRVSAKATRIKHEISQCIASQIVSMADKNDSHIAVENLSWLDSQGGRWPHAEIQSRIENTSKRYGLKVVKVSAKDTSRTCSRCGVKTINNSKTRVGVCTICGFELNRDVSASREIALRAASNTRNRERMRSLLRQRALERSSAATRQSKSVTALGGNQGHTGTSSMSLEATLMMVRKILDSRGSPT

SEQ ID NO: 3451 - protein, 337 aa, Rhodococcus sp.
MIGSSVPLQQCLRHLQAAFVNFFDKRARYPRFKSRKKSRASAEYTRSAFRWRDGHLTLAKMTEPLAIVWSRPLPEGAEPSTVTVSRDTAGRWFVSILVQTGVDHHATTDTAVGVDTGITSLLTLSRPIDGLTDSQGKITNPKHEQRERARLARAQRRLAKKTAGSANRGKARRKVARIHARITDRGRDHLHKLTTRLVRENQTIVIEDLNVSGILRKHSLARAISDASWSEFRSMLEYKADWYGRTVIAIDQWFPSSKTCSDCGLLLDSLPLGVQEWTCPRCGAVHDRDVNAARTILAAGLAVAACGGGVRPTRQQSVRQSPVKQETRPARVGIPRL

SEQ ID NO: 3452 - protein, 464 aa, unknown
  TnpB Polypeptide
  misc_feature (387)..(390): Xaa can be any naturally occurring amino acid
VRLRLKPTNTQAAVFLRAAGARRFAFNWALAQIKANQDQWAAEATYGIPKGARTRPLSYFDLVRAWDATKNMAAPWHAEQSAWTFRYGIRAAATAHTDFLRGKSRFPKFKARHSDRLRFTVAGDEGLHLQPGRLRLPKYGWVALAAPCRAQSKLRRLLARGRARVLNVTVSRDAGGVWYASVCFERAAPAGPASYNRPTGATVGVDVGIKTAAVVATSDRVLVETLEASRALRDALAHIKHLQRALCRAQKGSANRAKARLRLGRAHAKVGAARNTRLHQFTAELSKSHGVIVVEHLAIANMLRNHCLALAISDQGWGELARQLGYKAPRAGGTFVPADRWFPSSKMCSACGAVKSKLLLSERTYRCDACGLVVDRDINAAANLAAXXXXSERTYRCDACGLVRRPGHQRCRKPRRLGRAETGPGPSLQLPGRGPPPGRTVSSELWACLWRGQRAGQDDGGSSL

SEQ ID NO: 3453 - protein, 373 aa, Alicyclobacillus sp.
LLLKPTTKQEEILLRTLVEHTACFNAVCAVGWQKRCKNGVTLHHETYRTLRVEHPDLPAQLLIAARVRATEAVKSALNRLKKGSKTSCPHGNLVPIRYDARTYTFHPNASVVSLSTVASRQSVEFARNPHADRLLAQATGFDSADLVYRKGRFWLHLVVTIPDASFSPTGNVVGVDMGLNHPAVTSTANFLGEKRWKEIDRRYFRLKRALQAKGTRSAKRHLRRLSGKVHRFRRDCDHVLSRRIVDSVEPGTVIVVENLNHIRTRVKQRGRESRRRLHSWTFAQLRSFLKYKAVEKGCVVVGIDPRHTSQMCSCCGYVHRSNRRTQSRFLCRNCGFELNADLNAARNIARKYLASSGMAATGGLLSASLSCQP

SEQ ID NO: 3454 - protein, 167 aa, Scytonema sp.
LQATTLNLTTAYKNFFEKRAGFPKFKSKHSKQSIQYPQNVKIVNGNVKIPGDIGIVKAKIHRPIEGKIKTVTISKTPSGKYLASILTVSVCSAPPMPNGRLGLSRLGGGQRPTVDGENPATTDGKIYGIDLGLKHFAVVTDGEKVSKYDNPKHLAKHEKISNVNSKN

SEQ ID NO: 3455 - protein, 517 aa, unknown
  TnpB Polypeptide
MPCMSSPSFIFEMPIRDSDDVVRFLEPKFDFGLAVYNATLGTALGRLERMRASAEWREATAMEKGKERNRRFNQIRQFWGLTEYGLHEVANAHRNGAKRFVRKNEPGAGRTKDECLLGVHVAQKLGTRVWGAFERFMFGKGGRPRYKSRRRGLHSLEGKSASSNIIWHPKEQAFSWNKRRIPVVIPRTAYATDALSDPSNPSKPRKVKYCRVVRRMIRGRMRYFLQLVLEGLAPVRFVPAPREACVGIDPGPSKIAFVSEYGAALLRASPRSTDHAIEKKRLLRMMDRSRRSTNADKYDADGVAKNGARQWKYSKRYEKLRERLSEIFRLERETRRTDHGLIANTIIELGGTVKCEKNSYVAFQKNFGKSVGRNGTASLIQRVRSKAESAGGAEFVELNAWQCRLSQYDHVTGTMAKKPLSQRWTRVGGTVVQRDAYSAFLAMCVVNNEHDPGLLREKWPSVETFLRRAGLARDFNQSTDFDLSKSTKEPEFAAAFSSEMMHARIIRSEWSEVHFPV

SEQ ID NO: 3456 - protein, 388 aa, Thaumarchaeota sp.
LQAVKAVKQNYRPTEEILSLLEDFRCMVNDCVRIGLKENLTSMKSLSMKAYHQLSAYDAPTYYRLTAISRAAGILRNYRKELKRNRSARVPYVTRLSLTDCYGFRVIHRLVRLPVRKGEYVFIVLNDHTLRTMSGRTPRSLTLTANGLSICLSKETAEIEPVGAIGIDRNLDNVTTADSDGSILRHDLGRATEVKARSRETKRHFKRNDVRIRRVVYGKYGRIQRNRVAWLLHNVSASIVKRAKEKRFGIVMENIEGIRRLYRKGNGQGTTYRARLNSWSFYELQRQIEYKARWEGVPVSYVAARGTSVNCSICGSRTTKYPNGRRTLHCPRCDISIDRDVNAARNILAKGGVRFTPDGPPEVCTEAMKGNETTTPILRVDGGKVTPG

SEQ ID NO: 3457 - protein, 398 aa, Streptomyces sp.
VKTTHVKRAFKYRFYPTDAQAAELSHTFGCVRKVYNLALAARTEAWTRQERVNYNATSAMLTAWKKTEELAYLGEVSSVPLQQALRHLQTAFTHFFGKRAKYPRFKSRKKSRKSAEYTTSPFRFRDGTLTLAKMTEPLDIVWSRPLPEGATPSTVTVSQDAADRWYVSLLVEDPTVKPLPAAGAAVGIDVGLDRLLTLSTGERIANPQHERRDRTRLAKAQRQLARKAKGDGANQAKARRKAAKVYTRITDRRRDHLHKLTTRLVRENQTIVIEDLTVRNMVKNRSLARAISDAAWSEFRSMLEYKAQWYGREVIAIDRWFPSSNLCSTCGTLQDKMPLNVRTWTCDCGTTHDRDVNAAKNILAVGLTASVCGAGVRPQRNTPGGQSATKQKTPRREP

SEQ ID NO: 3458 - protein, 257 aa, unknown
  TnpB Polypeptide
MEVNCAYKKLASQLGWTKNDSSLWLSELPTQTLQQTLKDLPRGLMRFKQHKDGMVRFKARGDGNFDETNACIRIPKIGFVRYRKSRNIQGKVKNLTISIEAGRWYVSVCTDIERFQAQATRNGEICIDLDIVRTVRLSDGTVYRLDATEIKKLEDRIAVYQKQLEGNKSSKQKLAKLGKAADFDKKVPSRKRRRLKEKIVHLHRHIRNVRKDFMFKTARAIAQKYGWVAIEDLQVWNMTKSTRGTIEEPGGLRSSVK

SEQ ID NO: 3459 - protein, 456 aa, unknown
  TnpB Polypeptide
MLKYIQAKTEKDVDILKYAMETRLYIKDNKDIVDYFNETVKEYSYIFRKVYYIIINNPKLKINMLNTELQNEYSISRRTANSIIKTVQGIISSIKELKKTEIKQKQYKLEKISKKLEKLIPVLMELKLKAEKNNIKDLIKYRNLKTKIAFLKIRKDKLINKINSLNYQIETNKFKITFGTKKLFRKNLEEFLNKRDNQMVFIGSKEETACNQTFQLKYITKLNQFIIKMRKDFKYKNEKGEERYAYGKCFFNNHKKLLKEILRSKSSPLTYRIIKRNNKYYLQCIFEIDNKNTILTRKNHGVIGVDFNKGFVTVSQTNKYGHLVKTDKMTYRFGSGNKTENDILLIINKLTELAVNTGKDIVVEDLNFLKTKSGVMKGKSEKGKKYNKMLHSLAYRMFLNRTEQICNRKNVGLIKVNPAWTSWIAKNKFCDKMKLNIHTGASFVIARRGMNIKDVI

SEQ ID NO: 3460 - protein, 365 aa, unknown
  TnpB Polypeptide
LRTTKAISFSYEASGELSSLLEDFRLMCNDAIRIAFEYEREHGGEKVKSRFRLIELAYPRLKEYGLQTHYILSACEVAFSAYRNEKRKSAPYVKRAFMKLDNQSYALNHLILRIPIRPRRFVYLTLHASNYHLSFIDDLTMKRGSITLTESKVVICFSKQVRGIEPRGQIGIDVNERNITWSDSAGMVGREDTSEVVELKEIYRGIRAKISQRTHNDRRVQRRLLSKYGKRERDRTTQRIHVVTKKIVEHAKISQFGVVMEKLKGIRKLYRKGNGQGTSYRGRMNSWTFREFQRQVEYKASWAGLPVTYVNPRGTSRKCPKCGSSLIILEGRKLMCPSCRQTEDRDVIASKNIMACAVPQVRPSG

SEQ ID NO: 3461 - protein, 427 aa, unknown
  TnpB Polypeptide
MRKCSDEKKNKIKQTMAETREKRKDQICKVFPLKIDISHLNKSEREVLKMFFVEAKWIYNHILSTGKPFDYDYKNKKVIVLNKDREGEERTLKYLPAKNRQDVLKTLQCNIRGLSARKKNGGKVGKLKYKSEYKSIDLSQYGVTHKITGRNRIKINGLKRPLIVRGLDQISKDYEIANGKLIKKPSGYYIHLTCYASVRPPILINKKNDSIGLDYGIKTTITTSDGEKYNISIGESKRLKTLQKRLHRRVKGSKNRQKIRLAIGREYEHISNQRRDKANKIVSELLRDNEVICMQDENIKGWHKGLFGKQVQNSALGTIKSKLEQCKQVVIINRSLPTTKWCHKCGNIVEISLSDRVFNCNVCGYSEDRDIKSAKTIKYIGTSDLKDILVPMEYRELTPVETMPLPEVFQPKASTVNETGSLRIHRR

SEQ ID NO: 3462 - protein, 369 aa, Thioalkalivibrio sp.
LTAPTQTVIKTLSVRVKDRHARVLDRMAIETNQVWNLANEMAYEAWHVPVPGVGWIQGIWRSAFDIQKAMAGINKQRGWMIGSAVIQEIIAVHGKSRNQFKRSKLRWRVSRGAKRSLGWIPFKSRAARFEGGKVRFAGQSFSVWDSYGLDDFQFRAGSFAQDARGRWYFNVQVEAPVQPRSEGTRAIGIDLGLKDVAACSDGTRLEGRKPYRTLEQKLGIAQRARKKQRAKAIHAKIKNQRKDALHQFSSRLVKQNAAIFVGNVSSSNLAKTRMAKSVLDAGWSMLRTQLQYKAIAHGVWFEEVDEAYTTQACSCCGAIGPNSPKGRAGLGIREWTCHACGTAHDRDINAARNILALGHERLAGGIPRV

SEQ ID NO: 3463 - protein, 546 aa, unknown
  TnpB Polypeptide
MIIQSKYTKVFHSKDLTRQKYDELYDFAILIQNHKNIVSQHVNSYLLHYLDCTKFQFVKEMRTKFKGTVTSSYYWEIYTQVFTCYENKFKNIQRRLVFKVYTFKGFELYKRDTKKYKKGDLKRVLIEKKQTKLSSCLTYLVRYGNENTIAYIKSNFDKCDANKREFYNNIIRCCEKFGFERLYALALSKRQRIISKYANKPIEFRSLTFSGRCRKKRIIDYNHRFGSVINSFISLSGFSRKSFDIPVTFNKGWHGNMRNYRKKNPDYEYTLTFDEKKHQVTIHLCKDGERYIPEPNGKTIGIDVNCKHNLLSLSDETTYDYDRKLVNDFCKLSIEIDKLKEGRTYVVGKRKQWKLNKLKEKIIKNEQQTIATMCKNEKAKGVGHIVMENLNNGFGKCYIKDGDNEDINYNRKVKFLGLSSLKQEVEHIARKHDIAVSTVQASYSSKMCPICGCIEDGNRPNQETFECVECGHKDNADFNAAKNIRNRVLVTVLRESLLKQLDNGAFEPKKLKREKVKEVLLSFRRNLQKTARSECIESGLSTFEYV

SEQ ID NO: 3464 - protein, 163 aa, Parasutterella sp.
LHRYIADSRRDFLHKTSTKIAKNHSLIYVEDLKVSNMSASASGTKESPGKNVRQKSGLNRSILDQGWYSFFRMLSYKLKQRGGKLIKVDPRNTSRTCPRCGLVSAENRKSQATFACIGCGFRSNADEVGAINILRAGQARLACGMSGAVRPLSAGTRGDLLQH

SEQ ID NO: 3465 - protein, 223 aa, Parasutterella sp.
MQSQLMKQFCGCARYVYNRTLSLEKSLYKKDSKHSFKYTEAANRLPEWKKKNPFLKECHSQVLQQSLKDLDQAYLNFFRKQANFPRYKKKFQQDSIRFPQGVELDEAKQQIRLPKIGWVGYRKSRDIIGRIKNVTVSRRGEKCDVSIQTEYEVVSSAPNPSEIGIDMGVKRFVTMSNGDFVEPLNAFKQEQENLPSFKGNLCGKRREETAERQSEKLFDCTAI

SEQ ID NO: 3466 - protein, 246 aa, Sulfurimonas sp.
VDIRLTDEHGQLPHQIFQVLHHSFYSYQTSTATIKNNKLYLPKIGEVRAKFHRGIVAGKIKTVTVSYEANQYFASINYEDGLNECVGSNNGKSIGIDMGIVVFAYTSENQPINPTKEHDLTKDIKKMIKAQKSLSRKKKGSENRAKVKAKLAKKHLKIKNKRNDFLHKISNKLSENQTVKVEDLKVKNMSKKAKGSIENPNMRASAKSGLNRSILQQSWGKFFELLEYKLKRNGGELIKVDPKHTS

SEQ ID NO: 3467 - protein, 252 aa, Cyanobacteria sp.
MGVCGKEFYPTDRGVRFPKIGELKLKWSRPLPSPPTSVTLVKECSGRYYASFVVEVKEVKLPWTPKEVGLDLGLASLAVGSDGEKIAPPKFLRSALRTIGRLQGSLSRKAKGSSNRQKARLLVARAQEKVANQRLDLFHKLSTKYIRENQTVALEDLNVSGMLKNRRLAKSISDSGWRMFKTLLEYKAVLYGREVVVVSRWEPTSQRCSSCGHRDGKKPLSIRRWTCSACGAAHDRDINAAKISSPSDRRRG

SEQ ID NO: 3468 - protein, 369 aa, unknown
  TnpB Polypeptide
LKVHKGYKFRLEPTEEQEVKINKTLGCCRFIYNSILDRRIKAYRRRGESMSYIDTQNLLPQMKTYLPWLAEADSQALKYSCRQLDNAYKGFFKDGKGFPQFKRKRGEESYTTTKAKSIKVDDKYIQLPTLGKVRYRKSRNIEGRICKATIRRSASGKYYVSILCEVEVAPLPVKNAAIGLDVGIKSFAVDSNGNEHPNHKYLQKAEAKLKREQKKLSRKKKGSANWEKQRIKVARCHEKITNKRKDTLHKLSSTLVKENQIICVEDLNVKGMVRNHNLAKSISDASWGEFFRQLDYKSSLAGRVVVKVPTFYPSSQTCSCCGYQNKEVKNLNVRHWVCPKCNTSHDRDKNAAENILKKGMDMLAMPAAS

SEQ ID NO: 3469 - protein, 440 aa, unknown
  TnpB Polypeptide
MYQVLTAKLKLMPTPTQHAALRATQLAYRAGLNAASQYAFAHNKLSNAAKIHQGVYAELRAHHGLPAQLACSVSRQVAGTYKGLWTKCKQNAAHRKAGLTKKRYKGLDQPPKYVAPTLSYTEGRDYGFKAGQQVSLTTLSGRVVVPLVGYDTHLAWIKAGARCGAAKLWYDAPRKQFYLFVSLTVEIPDPAPDQQRAVVGVDVGVRYLAVTATPDNRQTFYSGRPVTARASHYHRKRKHLQQKGTRAATRRLRILAGRERRFKLDVNHRIARQIVTAYPQAVIGLELLTHIRERTNRRRFKKASRKQRRANRQQATWSFAELQAQIAYKAALVGSVAVWVDADYTSQACPVCGHTGRENRPNGGLIFACRGCGYRLHADLVGARNVALRTLAIRQDWVATGGLSTRPDVADREAKAARLQRWAELRQSPATSHPLQGVGR

SEQ ID NO: 3470 - protein, 316 aa, unknown
  TnpB Polypeptide
MAMEKAYKFRIYPNRMQEILMQKTFGCVRFVYNYFLDKRIKAYEADKTTLTYNKCSGELTKLKQELVWLKEPDKCSLQNALKQLDAAYQNFFKRIEAGYPKFKSKKNRHKSYKTNRTNKNFVRTDKYVGIDLGIKDFAITSDGYKYSNHKYLKQSLTKLAYLQRELSRKTKGGSNWEKARIKVARWQEKIANQRKDKLNKLSSAIVKSYDVICLEDLQVKNMVKNHTLAQSISDASWSEFTRQLSHKAKWHGKEVVKIDKFFPSSQTCHVCGHRNKGTKHLGVRTWLCPNCHTEHDRDINAAVNILHEGLRILKIA

SEQ ID NO: 3471 - protein, 365 aa, unknown
  TnpB Polypeptide
MVIGFKREFIPSQEQKEYLERLFNIRNWYWNKLHEVMQNESGRGSKLSCIYKITEIYNTAPDYFDTFHTRMLRGIARAYSEAWKACFHKIRKAPKEHKRDLGNHASVTFDDIGTLKPSITCSEHKELALKNLLLCEPLPSDAISYKSVCFSRHNGKYFISGTYECPDRIKHSKEGQIGLDLGIKTFAVDNTGKEYKVPKRILRIQQRINKLQRALAKKQERSAKRQRVITKLEKAYTRKSNIVRDFTEKLSTQLLEGHSLIALETLDFVQWRKGQGKKGNNKLAASQVGYFVQRLKAKSVFYPDCKLVFIDPYYKSTQTCSSCGNVKPMKLSERTYICPHCGMILDRDQNAAVNILAEAVRSLSV

SEQ ID NO: 3472 - protein, 170 aa, Lactobacillus sp.
YFAQCEVWKWNHDRFDHLEELDDYSNWQRARVNKARCQKRIANKRRDYLHKLTTDLVRNYDVIVIEDLKTKNLQKNHHLARSIANASWYQFRAMLEYKCAWYGRQLVVVKPDYTSQICSNCGFSSGKKPLEVREWTCPKCGIHHDRDVNAAVNILHKGLKAIGQGLALVK

SEQ ID NO: 3473 - protein, 299 aa, unknown
  TnpB Polypeptide
VTHEGAVEAPGCGRGCVDLGEIHAAALVTDTGTGLIVSGRGIRTVKQGRNRAIGDLQKKQARCTRHSRQWMKYQHARDRINGKSERQVRDLRHKGTHLVIEQAQKEGVGELYVGNPDGVRRHKTGRRHNQRMSQWEYGRDIRYLKEKGARAGITVRTGPERGTSSTCPNPSCRHKQKVRGRRWVCRLCGGSWHRDLVGATNMFALAFGGTPVVTVPERQNTTYRRPGPVGLRQRGRAGNARRSSPDRGLRGTPIPTELITSAVGHPPIPGSAKANCGMGSDECVMDALDGHGSARAALA

SEQ ID NO: 3474 - protein, 380 aa, unknown
  TnpB Polypeptide
MRKTFMYRLYPTPAQASALQGTLNECRWLYNHLLEERKTSYEEQGASLSLYDQQATFGALKATRPTLVGVHSQVLQNVAVRVDLAFQAFFRRVKAGEKEPGFPRFRGYGRYDSFCYPQSGYKVEERNEGATKGRVFLSKIGHVKTIIHRPLDGTVKTCCIKRTATGKWYATFACEVEDAPLPATDSAIGIDVGLASFATLSDGSEVANPRFFRKDERALAKAQRRLAKEPRTPKGQRPTPARRKKRKVVARVHERIADRRKDFTHQQSRRVVTHHGVIAVEDLSINRMAHNHCLAKSISDAAWSMFSAFLSYKAASAGRQFIAVNPAYTSQDCSRCGHRQKLTLADRLYHCPCCGLEIGRDHNAAINIVTLGLQSLGANP

SEQ ID NO: 3475 - protein, 430 aa, unknown
  TnpB Polypeptide
MAVVQAYRFALDPSPRQERMLRSHAGAARFAWNWALARCRERYAAEKRWYSAVELHRVWNAEKKVSPDLAWWSDNSKCAYQEAFRDLDRALGDFIKSKKGLRKGKRLGFPRFKKRGKCRDSFRFGAGVMRCDGATVTLPRIGIVNTHESTRKLARRLANGTARILSATVSRTAQRWFVSFTVEVERDIPERHARPGSAVGVDLGVNALLTGVDDAGNVIKLAGPKPLRASLRKVRCASRAHSRKEQGSVNRRKSAARLARVHARAASVRADALHKAASDLARRYETVVIEDLNVAGMARNRKLSRAIADQGFGEVRRMLGYKTGWNGGSLIVADRWFPSSKTCSSCGAVKAKLPLTERTFRCEHCQFGEDRDVNAARNLLRLAASGAERANACGGTVRPGHAGRVLVKQEPGTPFGDETGTAVPQGVAAA

SEQ ID NO: 3476 - protein, 409 aa, Gammaproteobacteria sp.
MRCSASPASSGISSSGCGRPTWRWPSTSAGQAPTAIASTRRCEAYRECGLKLSGTDLSRWLTQWKRTLGHEWLAAVPATCLTQCLRDQDTAFGNFFAHRARYPRFKRKRMSGSLRFQNAGRSWAQGVMSLPKLGPLKIAESLPKVERPDQVTFSRDAAGRYYVSFCVEVETSLLPIVQRSVGVDVGLTHLATLSSGEKIPNPKRYHARLRYLRQQQRCLARRQKGGRRREKQRLRVARAHVRVKQERQSALHRLTTRLVREFDLICIEDLNVKALARGRHSRAIHDAAFSEVRRQLAYKSDWYGRTLVEVNRWYPSSKTCSQCQFTFDELRLQQRQWGCPRCGFCHDRDVNAARNLLVEGVRQLAGCDDRDLRVDAGDACPEDQILVQVLAEEARSGHRNRACMEQARF

SEQ ID NO: 3477 - protein, 402 aa, Escherichia sp.
VKRLQAFKFQLRPGGQQEREMRRFAGACRFVFNRALALQNENHEAGNKYIPYGKMASWLVEWKNATETQWLKDSPSQPLQQSLKGLERAYKNFFQKRAAFPRFKKRGQNDAFRYPQGVKLDQENSRIFLPKLGWMRYRNSRQVTGVVKNVTVSQSCGKWYISIQTESEVSTPVHPSASMVGLDAGVAKLATLSDGTVFEPVNSFQKNQKTLARLQRQLSRKVKFSNNWQKQKRKIQRLHSRIANIRRDYLHKVTTTVSKNHAMIVIEDLKVSNMSKSAAGTVSQPGRNVRAKSGLNRSILDQGWYEMRRQLEYKQLWRGGQVLAVPPAYTSQRCACCGHTAKENRLSQSQFRCQVCGYTANADVNGARNILAAGHAVLACGGMVQSGRPLKQEPTEMIQATA

SEQ ID NO: 3478 - protein, 398 aa, Thermomonas sp.
MIVAHKIALDPNNVQASYFAKAAGTARFAYNWALAEWQRQYEAWKQDNSLPKPTEAALRRQLNAIKREQFPWMLEVTKCAPQMAIIQLGQAFQNFFAGRARYPQFRKKGVHDRFTLTNDQFSIDGSRIRIPNLGWVRMRESLRFAGKIMSATISRVADRWFVSITVQTEDLSHLPKAENQGVVGVDLGVSALATLSTGETIPGPKPHKALLGRLRRLSRSLSRKQKGSANRKKAKAKLARLHARIANIRQDALHKLTTDLTRRFHTIGIEDLNVRGMVRNRHLARSIADMGFFEFRRQLEYKAAMRGGQVVIADRWFPSSKICSACGSVQEAMPLSVRQWICPDCGTRHDRDLNAARNLATYAVSSTVSACGEEGAGSGLATGVKPASMKQEVSFVPV

SEQ ID NO: 3479 - protein, 387 aa, unknown
  TnpB Polypeptide
MEEGAVDLVQRSHKIRLSPNNKQRVYFAKACGVSRLAFNWGLAEWKSQYESGEKPSFYGIKKKFNSIKKDQYPFVYEVTKCSPEQSFNDLDHAFKRFFNKMSEYPKFKKKGIKDSFYISGDKFSVKNNYVKVPKLGLVKMTEPLRYSGKIVSATISRKADWWFISITVKIDEDDNKSENQAFNPVGIDFGVSKFATLSDGAVFENPRITKKFSQRLRLLNKSLSRKVKGSRNWYKTKLSLQRLHVRIGDYRLDAVHKFSRSIANSYSDVCLENLNVAGMVKNHKLSKAIQDASFYEAKRQLTYKCKAVHEIDRWFPSTKMCGDCGSINDMKLSDKVFKCDCGLELDRDLNAAQNILRQGLPSKLVERQALVLQPSLVYETGLWETRN

SEQ ID NO: 3480 - protein, 282 aa, Streptomyces sp.
MGGHLCLPKIGDVRVTWSRSLPSRPSTVTVIKDAAGRYFAPFVVATDPQALPEVASAVGIDLGLGHFAVLSDGTKIDAPRFLRRAEKKLKRQQRRLSRKAKGSKNRDKARIKVARAHAQVADARHEFHHQLSTRIIRDNQAIAVEDLAVKGLARTRLATSVHDAGWSAFVTMLEYLEYKAVKFGRGFLRIGRFEPTPQVCSQCGVKDGPKPLRIRVAQGAEVNRQPPRPGGRPRASGRDSYCAVASRAAPSRPALRQGAKVPGGRPPSHGGRPPGLRVCVSP

SEQ ID NO: 3481 - protein, 256 aa, unknown
  TnpB Polypeptide
MEYLRKYWAGKRTAAPVLEKRHRKYFLRFSYTEEVTLTKAPVKEQIICSVDLGINTDAVCTIMRSDGTVLGRKFIDFPSEKDRMYRVLGRIRRFQREHGPVQVKSRWAYAKRLNTELGRKIAGAVAGYAEENHADVIVFEYLETKGKISGRKKQKLHLWRKRDIQKRCEHQAHRRGMRISRICAWNTSRLAYDGSGTVVRDPGNHSLCTFQNGKRYNCDLSASYNIGARYFIRELLKTLSGNGKVFAGGKSPFSKA

SEQ ID NO: 3482 - protein, 249 aa, unknown
  TnpB Polypeptide
MEIFYVLKKTGGIKAPNPPRFKNDNIPVTYMQMGIRHEKGSDRLRLSLPKDLKSYMEETYGIHEKFLYLENKIFRNMDHIKQLRIYPPENGTCDLIVIYEIEEQEQLSHNGHYLSVDLGLHNLMTCYDSGNGRTFILGRKYLSLERYFHKEIARVQSIWYAQQSERGIKYPRSSKHIQRLYRKKQNAVKDYLHKVNQIGLQNTAEKKTSAVWLWETSETSAKKMIWGIRPTRSYTNCHITSCISCWNIS

SEQ ID NO: 3483 - protein, 340 aa, unknown
  TnpB Polypeptide
LLRARQASAERSWSAISRFYDNCKKKTPGKKGFPQFQKSNRSVEYKTSGWKLAADRKSITFTDKQGIGKLKLKGTRDLHFYQITQIKRVRLVKRADGYYVQFCIQVDRSEVVEITGNAVGLDVGLKEFYTDSNGIVVENPRFLRKGESRLKKSQKRVSKRVKGSSNRKRARVVLGKRHLKISRQRKDFAVKLARCVIQSNDCVAYEDLRIKNMVKNHCLAKSINDASWYMFRVWMEYFGKVFGRITIAVSPNGTSQECSSCGTIVKKSLSTRTHICRCGCVLDRDHNAAKNILSRGLSTVGHTGTWGNNTLNACGELTATDVEVILHRQVDSMKQESQRL

SEQ ID NO: 3484 - protein, 193 aa, Streptomyces sp.
MAAGGARGRRGDFYARTAARIVAKNALVVLEDLRIKNMSASACGTVAEPARNVRQKAGLNRAILDKGGHRLELALTNAARYTGTRVVKVNPAYPSQRCSTCGFVTETNRESQAVFWCKAHRGHRDHADVNAAKKRSTATSAGRSSPRSWPRKSSSVPGSPPPSAGGRRAERAHGLGHREARVRRMPPGAGCGL

SEQ ID NO: 3485 - protein, 343 aa, unknown
  TnpB Polypeptide
MAQHAGYKRVAYNDALSAFKTGFDTDNWQSEQDLRKAFNAVKREKYPWSANLSQNASKNAIRDLGDAITRWKKGQNRFPTFKKRSDKCSYQADNGAGRVEVYKQRINLPKIGGVRMREELRYTDEITKVVVSRKKDRWFVSILIRCDSNNYKHQPPLFDDKPPIGVDVGINTLATCSDGDTFDNPRPLKRYERKLARANRALSRKVKFSKNWYKAKKQLVSLHHRISNIREDAHHQATVRIVRKASAIGIETLNISGLLKNRKLAKPLSDSALSRFLTLLKYKAERRNVEIIQADRFFASSKTCSHCGQKKAELDLSERTYHCSECGISLDRDLNAAINLCPA

SEQ ID NO: 3486 - protein, 408 aa, Calothrix sp.
VLHKAVQVRLYPNKEQQILLAQTFGCARWWWNFALNKSIEIYKETGKGLGQVALNALLPKLKKAEETKWLADCYSQVLQATTLNLTTAYKNFFEKRAGFPKFKSKHGKQSVHYPQNVKIVDGNVKLPGNIGIVRAKIHRPIEGKIKTCTVVKTPSDKYFASILTEVETDKLAVIEGKIYGVDLGLKHFAVVSDGKKVSKYDNPKHIAKHEKNLKRKQQKLARKVKGSKSRNKYRRLVAKVYERVSNSRQDFLHKLSYKLVSDSQAVIVENLHIKGMVRNHNLAKAIMNCGWGMFTNFLSYKLERKGGKLVEIDRWFPSSKLCSNCFYQVSEIPLDVREWTCPNCGTHHDRDGNAAINIRAEGIRMLKADGSTVSAVGGEVRPKLGRKSKLRHSPVSTEAPPRAEGRVG

SEQ ID NO: 3487 - protein, 466 aa, unknown
  TnpB Polypeptide
MYLVEQHIISVNDKRYKDLDRICFLSKNLYNAALYEIKQEFLRTGKWIRSGELNKKMVAENNVDYRAMSGSSSQQVLMSLDKNLKSYFSAIKAWKRDNKKFTGCPKFPRYKHKTKGRNVFSYSYAQFKHKGNFIFFPKKEGLSPLKTNCKEGSVKQVRFIPKADCYSIEVVYESSVKEQLPELKPEQILLEPTRRNTAPCIAWASYHIRALNPNANIVVAPSDHLILKEGEFLAAIEKGLDFVSQSDNLLTLGIKPNRPETGYGYIQIAEAAGDNFYKVKTFTEKPELELAKVFVESGEFYWNSGLFMWNVNTIIKANEALLPELTSKLAPGKDVYGTVQEKQFIDENFPACPNVSIDFGIMEKADNVYVSLGDFGWSDLGTWGSLYDLSPKDEAGNVALKCKSLIYNSKDNIVVLPDNKLAVIDGLEGYLIAESDNVLLICKKDEEHTIRKYVNDAQIKLGEEYI

SEQ ID NO: 3488 - protein, 439 aa, unknown
  TnpB Polypeptide
MKQVLSAKLKLQTNAAQFAALRQTQLMYRDALNYVSRYSFAHGKLSNKVALQEATYDDLRMRFGLPSQMACSVPRQVGATYKGLWTKVKQNAQHRADGRTKKRYRGLDQAPKYVSPTVEYQYGKDYSFKKEHHVSVLTLSGRCIMAYTGYHKHVELIQHGAQIGAAKLWYDKSNKQFYLLVSLQIEVPEPTPEQHTHLVGVDVGIRNLAVTSTMQGSCSFFSGKAVVAKANHYARLRKRLQKKGTRSATRRLVAISGRERRLKQDANHVVSKRIVQSHPHSLIGLEELTHIRERTRRRSGKQASIRQRKANATHSKWSFAQLHGMIAYKALLQESMAIKVDADYTSQACPRCGHTCPQNRPDKGLLFSCTTCHYTLRADLVGARNVTMRTLLVRQDWAKTGTLSVSPDGSDKKAKAARLQRYAELRWSPDPSPRREDVG

SEQ ID NO: 3489 - protein, 408 aa, unknown
  TnpB Polypeptide
MKKPFFLAKSSKNDRKLIKKKTFIYKAKINQETRKNFNRSLDLCHQLYNHCLEQRIMAWKRSRTSLSYCDQANELPTLKKEFPEFKTIGSQTIQSVLIKIDQSFQSFYKYHKSFKTKKSKPRKDGQLHGFPRFKSTYRYNSLTLTSQAGWSLNGRDLKINKIGSFRLYLSRPIEGEIKTITIKRRSNGSIYVSFICINVPTKELPKTNKSIGLDMGLTHYITDSDGRHIDNPCYFKNSQKKLANRQRKLALKEFRSKNWVKNKILIDKSYEKIVNQKKDFLHKLSNFYIKNYQIICIEDLDIKSMIENDFSKSIADASWGRFFYYLGYKAEDAGRLRIKVNPKGTSQRCCRCGRLVPKDLSVRIHDCPYCGLRLHRDINSAINVLGLGTSLAGLPFNIEETISRISLL

SEQ ID NO: 3490 - protein, 542 aa, Streptomyces sp.
MGGLREVAAPLVVPGPSGVAIRTRLKHLTAGDEKVLRLVGDLLGTLASRDLKARCAAGLEHDGEQWAQRKRVLTEESSSRWAGSITKATHDQWALARRGQLAHIQSLQAGIATITHRLSRPVGEKGTRQAPGGYHTRREWFAKSRRLHLLEDRLQAARADREAGVVHVVRGGKRLLNTRHHLKAAQLSEAEWRARWEAGRRFLQADGESGKRYGNESIRVTDDGEVSLKLPATLAHLANAPHGRYVLAARVSFPHRGEQWRDRITANQAVAYRIHEDVGRARWYLTASWTIPSVSTVPLATARARGLIGVDTNADHLAAWRLDEHGNPVGEPLRFGYDLTGTADHRDAQVRHALIRLLHWAKRHGLAVAVEDLDFQAEKTREKHGRRKRFRNLISGIPTSRLRARLVSMAAELGITIVAVDPAYTSKWGSQHWQRPLTSNNRKATRHDAAAVAIGRRALGHPIRRRTAPPPHDRSDRVGHRTVQARPGIPGREGNRPRIPGPRTRSVRAGRGENAVDQNAQHRSGHSAEQGSWQQDSLPLSL

SEQ ID NO: 3491 - protein, 395 aa, unknown
  TnpB Polypeptide
MLKAYKYRLYPNSEQCTALSKNFGCARWVYNWALSRKIEAYQKENRSLSCFDLSKELPKLKAAEETKWLAEADSQALVMSLRNLDNAFTRFFREKKGFPKFKSKKCKRQSFQIPQRVKVDFEGRKIILPKIGAVRAKLYRKFDGKIKTVTISKTPSGKYFASVLVETDEKPLPKPEIKYETTIGVDLGLTHFAILSNGEKIENPKHLQKSLNRLKFLQRRLSRKKAGSKRRDKARICVAKLHEKITNQRNDFLHKLSIRLIRENQTIALETLNVQGMMQNHRLAQSIGSASWSRFVEFLRYKAEWYGRNIVFIGQFEPSSKICSVCGYHNSELTLADRTWTCPSCQTEHDRDVNAATNIRKLALQSQNLVGRGPSEISSQSVHDGGTMKRETFPP

SEQ ID NO: 3492 - protein, 375 aa, Shimazuella sp.
MHKAFQYRLYPTTKQAALINKSIGCSRFVFNHFLGKWNDTYKETGKGLTYLLCSSLLTAKKKEFEWLKEVDSTSLQNTLKNLADAFSRFFQKQNNAPRWKSRRNKMQSYTSQCNYPKKGKPTIEVEGNKIKLPKLGWVKFVKSREISGRILSATIRRTPSGKYVVSILCDGCFCRHVPARKDAVGIDLGLNDFAILTDGTKVKPNRFFRHYEKKLAKAQQILSRRTKDGSNWKKARIQVAKIHEKIVNARHDFLQKLSTKLICENQVISIEDLQVKNMVKNHKLAKSITDASWSEFTSMLEYKAKWFGRNLVKVGKQFPSSQLCSCCGYRNKDVKDLNLRSWTCPKCNEEHDRDINAAHNILQEGIKLIAAGLAV

SEQ ID NO: 3493 - protein, 523 aa, unknown
  TnpB Polypeptide
MKNKNKNIKNVDIFNKNIKKLNSEFFTCLNKFKFLFDFNDIFFPSSLNEIKKYTNIKPFWNSHISDISNNIFMPSFDNIKSYNTPYKLNNTWFNCSFFRAKHKQNPIIIDEHNNNNIKDEKIIKTKKFIIYPNQIQKHYLLQFFSCYRYFYNRTIEYFNNIDLNNLSSFYTFKDDDKNEKIELKFNNKNDMYNKYNLRKLLTQNKPKWIIDLKFDTHSIYNSIYEAIKNFNTNLKLNKKQKRIFKMKYKSKKDKNYIMNLDGRIWSKNYNILFSVYKINNSYIFRNLKLNVKHKIISNMNYKSFTIQYNTLLNKFYLLVSYEDNIKDLNNNKSVSIDPGVRTFITCYEQSNVFKIGEEANKEINKLCKEIDKIQSIKDKEENKRKKKRLKKAINKKYEKINNKIEELHNKTINYLVNNYKEIIIPPFETQEMVRTLKNKTSRELNNFKFYKFEEKLKSKCKEYKIRIINYNEAYTSKTCGTCGNIDLNLGNKEIYKCKNCGLIIDRDINGARNIMLKNKYGNC

SEQ ID NO: 3494 - protein, 355 aa, Variovorax sp.
MEHTRTLKLRIKDKHAAVLSAMAREVNQVWNFCNETSHRAIRERRQWLSGHDLQKLTNGFSKCDGVQIGSPTTQQVCEEYTKARNQFNRSKLRWRVSDPRSSRYSLGWIPFKARALKAKGGQVRFAGKTFSLWDSYGLADFELRAGNFSQDSRGRWYLNVVVKAEPKPGSGTASVGVDLGLKDAVTTSDGCKLEGKWYRELESALGIAQRARKKGRVNAIHSMIANRRKDELHKFSTRLVRQSGAIFVGNVASAKLVKTKMAKSTLDAGWSMFKTMLEYKCHKAGIVFEVVDENYTTQTCSCCGAIPASSPKGRAGLRIREWICSCGAMHDRDVNAARNILALGHQRLAGGIPVL

SEQ ID NO: 3495 - protein, 428 aa, Variovorax sp.
MPADSSLRAYRFQLRLRPAQEKQLARYAGMMRWLWNRALAEQQSRRERGQKYAGYASMCGWLTVWRNAPETSWLAEGPAQPQQQVLKRLDTAFRTFFANVKAGRTPGYPRFKKRGEEPGIRFPDSKQFKLDAANGRLQLPKLGWLRLRMSRQVVGELRNASVTREGVRWYVAIQTLQAGVVPAACVAPSLGIDLGVANFAGLSDGRLIEPLAALKAQQRRLRRYQRSVSRKVKGSYNRKKAVVKLRALHKRIAQQRNDWLHKLTSGLASEHPVIAIEDLQVASMTASARGNAALPGKMVRQKAGLNRAILDAAWGEYRRQLEYKLAARGGQVLAVDPAYTSRTCRICGHQAAENRKTQSVFACVACGHTEHADINAATNILAAGHAAWISGTSARSDACGGVVRRAAFARTKRAAPVKQEPTEGLTDA

SEQ ID NO: 3496 - protein, 428 aa, unknown
  TnpB Polypeptide
MPYRTRDTEFRVHLIALRVLSSALLAQCQALRQEAGRLWTDLVERHAQARLAGQWLSSQDLEQATKGGQYALGSQTVQALCQKLTANVATATELRRQEYADTGRIETEYLHHGKSYQTVIWKDQGVVWDRPGHIGLKNGLGRPYLYLPVPAKYGGANVRKAELLWRADHYELALTFDTGQAVPPPRETGEVAGIDLGEVHVAAITTSRRHALVLSGRLLRSFKQWRNKSHARISEKLDRCQKGSRRSKRLVEAKAKVSAKGYRQQRDFLHKAAKLTVDFCAAEGVRRIVVGDVRDIQTGVSLGKVSNQKISQWPHGQFTRYVTEKAARRGIAVDWIDEAYSTKTCSHSGHVRKTSPRGRRFRCCGCGARIHRDVNGANNICSKGVHGVYAKVQADTVKYLRPIGVAPPTRAKSLARARTSRFQAGECQ

SEQ ID NO: 3497 - protein, 359 aa, Thiorhodovibrio sp.
MEMQTKTLSVRVRDKHAPLLRQMAFEVNQVWNAANAEAADLSWVPVPGVGWMDFGTSAFDLQKTVIPSVKERTPSLHSHTRQEVIAEHGKKRKQFKKNKLRWRCSSGPKRALGWVPFKVGSAVWKNGQVRYNGHFFKVWDSYGLSEYQFRSGSFSEDARGRWYFNVVVEVPVEPSNGSTSAVGIDLGLKDYATCSDGTKLPATQFYRNAQKDLAKAQRARNKKQVRNIHAKVKNRRNDALHKFSDKITRKHAVIVVGDVSSSKLAKTKMAKSVLDAGWHQLKTQLKYKAIRQSAVFIEVNEAYSTRTCSSCGAIPDSSPKGVSGLEVRHWVCSSCGAEHDRDTNAAINILSAGLGCQSQ

SEQ ID NO: 3498 - protein, 405 aa, Richelia sp.
MLVFEFKAYGKKEQYHKIEEAIRTGQFVRNKCLRYWMDNRGVGKKELYRHCTQLRAQFHFAAELNSHACQAAVENAERAINRFYSNCKKKVAGKKGYPKFKKHSRSIEYKVSGWKLSECRKRIAFTDKKGIGLLKLKGSRDLHFYQIEQIKRVRIVRRSDGYYVQFCIDSPRIGLKASQLKNRAVGIDVGIKYFLADSDGGIVENPKFYRKSEKGLNRANRKKSKKFQKGKPQSNNYKKARNRYARKHLRVTRQREEFVKSVALRYIQSNDLVACEDLNVKNMVKNRKLSKSISDAGWSKFLMWLDYFGSVYGTKTVAVDPHNTSQNCSNCGKKVSKSLSTRTHICPHCGYVANRDTNAAINILKRAQNTAGHAEINAWGEMPSSLVGETLLGYGDSLNQESLPL

SEQ ID NO: 3499 - protein, 470 aa, unknown
  TnpB Polypeptide
MGLIKAALGAAGGVLSDQWKEYFYCDALPADVLAVKGRKRVSGGSNNGLDNIISNGSVIAVADGQCMMIVEQGKVVDVCAEPGEYVYDISTEPSLFAGESLASNIKQVFQTIGKRFTFGGVAPKDQRVYYFNTKELVGNKYGTPSPVPFRVVDEAAGIDLDIAIRCFGEYSYRITNPLLFYTNLCGNVEAAYTRDKIDSQLKAELLTALQPAFAKISAMGIRYSALPGHTMEIAQALNDVLSAKWRDLRGIEIVSFGVSSVKASEEDEQMIKQMQQAKAYMNPGMAAANLARAQANAMQDAAKNQGGAAMAFMGMNMAQNAGGFNAQNLYQMGAQQQQQAAPTPAAPAGGWTCTCGQAGISGNFCPNCGSKKPEPKPAAGSWKCPQCGATATGKFCPECGTKKPEVQADGWTCSCGAVNKGKFCAECGKPKPAGVPQYKCDKCGWEPSDPAHPPKFCPECGDPFDDGDLK

SEQ ID NO: 3500 - protein, 467 aa, unknown
  TnpB Polypeptide
VQTLANIGRRSSSLSFVNPSRLYFVTKNQFLLQRLTEFASYRYNFYTGELVIYLDRANIIQGMKRLQAYKYELMPNGDQVRAMRRFSGSCRFVYNKALALQKENHEAGNKFIGYVAMAAKLPVWKRETETAWLKETPSQALQHALRDLEKAFKSFFAKRTGFPRFKKKGSGDSFRYPEPKQIQLDQSNNRILLPKLGWLRYRNSRDVLGQVRNVTVSQSGGKWFISVQTQRELEQPLPTATTAIGIDVGIARFATLSEGSYIAPLNSFKTHQQRLARYQRRMSRKVKFSNNWKKAKTKVQKLHTAIAHARKDFLHKTSTTISQNHALVCIEDLQVKNMSRSAKGNREQHGKRVKQKSGLNRAILDQGWGEFRRQLDYKVQWNGGILLAVPPQHTSQTCPACGHVSKENRQTQAKFLCIDCSYENHADVVGAINILERGYRLLARGESVQSDHSMKQEPTEVTQAAFA

SEQ ID NO: 3501 - protein, 467 aa, unknown; identical to SEQ ID NO: 3500
  TnpB Polypeptide

SEQ ID NO: 3502 - protein, 195 aa, unknown
  TnpB Polypeptide
  misc_feature (34)..(39): Xaa can be any naturally occurring amino acid
  misc_feature (178)..(180): Xaa can be any naturally occurring amino acid
MTLSPILRKDSRSILESCIFPRSGRSRSSSTGPXXXXXXESFATLSNGVKIANPRFFREEEHELARVQRKLSKAPKGTPERKKALKVVERVHERIANKRYEFAHRISNQLVNRYGLIAFEDLNIKGMMHNHNLAKSIGDVAWNMLVTLTSYKAASAGSMVVLVDPRNTSKMCSRCGIXXXVNSLAGPTTSRQKIC

SEQ ID NO: 3503 - protein, 124 aa, Enterococcus sp.
MEQLKAYKFRIYPTEEQEIFFAKSFGCVRKVYNLMLDDRKKAYEEVKNDSSKKMTFPTPAKYKKEFPFLKEIDSLALANAQLNLDKAYKNFFRDKSVGFPRFKSKKNPVQSYTTNNQNGTIAFD

SEQ ID NO: 3504 - protein, 175 aa, Enterococcus sp.
MVQLLLIDSKFIKVPKLKSLVRIKLHRQPKGIIKSATISRHSSGKYYISLLCKEEIIELPKTNSTIGIDLGIMDFAILSDGQKIDNNKFTSKMEKKLKREQRKLSRRALLAKNKGTNLFEAKNYQKQKRKVARLHEKVMNQRTDFLNKLSTEMIKNHDIICIEDLNTKGMLRIIN

SEQ ID NO: 3505 - protein, 527 aa, Acidimicrobiaceae sp.
LRRNSRRTSRSVRSSIAFSVPLTPPRPPFPAMTRRRPVNFSKQRFAVTYHRPSEATSRPYHAVSQLASILTLVTSRATTPTTPLTSHTGQVLLRAVTFQFALDPNAEQRVLFAKCAGARRFTVNHHLARVKANLEVRSVERDSVTDGEDGSDRLTPSLSWSGFSFINEFNAWKNGKFEGSPANEDGSQGLSWRHELPGDVFECASVDAARALENFAASRGGKRNGPPVGFPRFQAKGKVTPSFRLRNRATSRQIPSSQPIRFCDPAHLLLPKFGPVKLFGPTRQVRRMIDTGRFHVYSVTLTERAGRWTVSLTGVAAELHQAERSRSTRHPVPVGVDRGITSLAVAADANGVPFETFEGVKTLREAQRTLKAANQALARTTPGFKGRQRARARLAKTHRKVANIRRHLVHQVSKALVTRYQVLVIEDLNVAGMVRNRHLAKSISDAAMGELSRQILYKAKWHGVEVRVADRYFPSSKTCSGCGEVKSNLSLSERVYSCDLCGLAIDRDLNAAINLARWQPKAPPSSL

SEQ ID NO: 3506 - protein, 410 aa, Cyanothece sp.
MEKMKLVERHIIKKGHKFWAEIDELSWQSKNLYNAANYIIRQNFIYGHGYLTYNQMDSLMKQTPQYKALPAKVSQQVLRGLEKNWKSFFRGLSEYKENQSKFQGKPKIPGYKNPKKGRNLLVYTIQAISKVSLKKGLIKPSKTTIEFPTKVGQSIAEVRIVPKCDCYVIEVIYEANKQFLNKNDHIGAMDLGVDNLMAVTSNQPGFVPLLINGRPLKSLNQFYNQRRSKLQSLLQGNRKHSQRIRHLTRCRNQKVDDYLHKASRYLVNFLMSQEIRTLVIGYNPGWKQEIKLGKVNNQKFVTIPHARLIDMITYKCQLVGISVILQEESYTSVSNFLNLDPLPVYGQETEKPIFTGKRIKRGLYKTDQGLLIQSDVIGSYNILRKAFPNAFNRYGIERCVVHPRRINLSK

SEQ ID NO: 3507 - protein, 393 aa, unknown
  TnpB Polypeptide
MLYAIRVRLYPNATQRDFFAKTFGCCRWAYNDALAYCQRQYEAGAPRPSAYDLMKRLPQLKTEYPWLAEADSQALKQVCKDLDGAYKHFFRRVKNGEAPGFPRFKSKHRGDATYTATAGVGIALEPRQLKLPKAGWVRCRGGRAWEGKIKRATVRQTPTGKYYATVLIDDVRDLPAQPTTNLTPLGIDVGCKTEGFTHQFAALSTGEIITAPAEYKRQIKRLRRASRRLARKQKGSANRVKHKRRVAQLHERISAVRRDFLHKLTHRLTCENQALAIEDLNVKGMMAKPAPKPDPERPGTFLPNGASRKRGLSRSLASASLGEFFRQLEYKSAWRGVALLKVSRWEPSSKRCSCCGEINDALMLADRRWQCPACGAELHRDINAAMNIAARAV

SEQ ID NO: 3508 - protein, 371 aa, unknown
  TnpB Polypeptide
MIRAHKIRLNPTPDQEVYFRKACGIARFAFNWMRAKWEEDFKSGGKPSALALVKDLRAVKADHFPWIAEVTKCALDGARIDLGSAFSNFFREAKSGKVGYPKFKSKHRSKPAFYLANDKFSVDAHTLHAPKLGPVNMTEPLRFVGKILSGRISFKSGYWWVSIQVELPDPAPVPHTGPAIGIDLGLKELAVCSDGRRFPNPRHFHAGLRKIKSLSRSLSRKVQGSANWLKAKAKLARAHYRIACRRSDAIHKTTTDLAKGASLIGLESLNVCGMMQNKRLARSISDAVWGEIKRQLGYKAPDRCVQIDRWFPSSRLCRFCGTINADLTLADRTWTCTCGAVHDRDLNASINIRDEAIRILNRVPVMAMSGL

SEQ ID NO: 3509 - protein, 381 aa, unknown
  TnpB Polypeptide
MIRAHKIRLNPTPDQEVYFRKACGIARFAFNWGRAKWEEEFKAGNKPSAFGLKKAFNAFKSDLPWIYEVTKCAAEGAFSDLGSAFSSFFREIKSGKVGYPKFKSKHRSKPTFYLANDQFSIDGHTLHVPKLGPVNMTEPLRFVGKILSGRISLKSGYWWVSIQVELPDPVPVPHTGPAIGIDLGLKELAVCSDGRRFQNPRHLQVGLRKIRSLSRALARKVKGSANWLKAKARLARAHYRIACRRSDVVHKMTTELARGASLIGLESLNVCGMLQNRRLARSISDAVWGEIKRQLGYKAPDRGVQIDRWFPSSRLCRFCGTINQELALADRTWTCACGVEHDRDWNASVNIRDEAIRILSQVPVMAMSGPKYACGEISALD

SEQ ID NO: 3510 - protein, 371 aa, unknown
  TnpB Polypeptide
VIRAHKIKLNPTPEQEIYFRKACGCSRLAFNWMLAEWKKRYESGEKSTAISMTKAFRSVKGELFPFMAEVTKCVVDGARIDIGSAFSNFFREAKSGKVGYPKFKSKHRSKPAFYLANDKFSVDKHILHVPKLGPVNITEPLRLTGKILSGRISFKAGYWWVAIQVELPDLSAAAHTGPAIGVDLGLKELAVCSDGRRFPNPKHLQTGLRKIKSLSRSLSRKVQGSANWLKAKAKLARAHYRIACKRSDAIHKMTTELSRSASLIGMEDLNVKDMVQNRRRARSISDAVWGEIKRQLLYKVPDRVVEIDRWFPSSRLCGACGVVNQDLTLADRTWTCPCGREHDRDLNASVNIRDEAIRILKLVPVVATSGL

SEQ ID NO: 3511 - protein, 371 aa, unknown
  TnpB Polypeptide
MIRAHKIRLNPTPDQEVYFRKACGCSRLAFNWMLAEWKRVYESGEKPNALRMTKAFRSVKGEIFPFMAEVTKCVVDGAKIDIGSAFSNFFREAKSGKIGYPKFKSKHKSKPSFYLANDKFSVDKHILHVPKLGPVNMTEPLRFAGKILSGRVSFKSGYWWVSIQVEMLGLPATFRTGPAIGVDLGLKELAVCSDGRRFPNPRHLQAGIRKIRSLSRALARKIKGSANWLKAKAKLARAHYRIACRRSDAIHKMTTELARGASLIGLEDLNVKGMLQNRRLARSISDAVWGEIKRQLLYKAPDRVVQIDRWFPSSRRCRLCGTINADLTLADRAWVCACGVEHDRDLNASINIRDETIRLMQLVPVMAMSGL

SEQ ID NO: 3512 - protein, 370 aa, unknown
  TnpB Polypeptide
MHRAHKIRLNPAPDQEVYFRKACGTARFAFNWGRARWEEAYKAGNKPSALGLKKAFNAFKKDLPWIYEVTKCAAEGAFTDLGSAFSNFFREANSGKVGYPKFKSKHKSKPAFYLSNDAFSVNAHTLRIPKLGPVNMTESLRFTGKILSGRISFKAGYWWISIQVELPDPVPVPSTGPAIGIDLGLKELAVCSDGRRFPNPRHLQAGLRKLRSLSRSLSRKVKGSANWLKAKAKLARVHYRIACKRSDAIHKMTTELARTASLIGLEDLNVRGMLQHRKLARSISDAVWGEAKRQLGYKAPDRIVEIDRWFPSSRLCRFCGTINDQLTLADRTWTCVCGVKHDRDWNASINIRDEAIRILSQVPVMAMSGL

SEQ ID NO: 3513 - protein, 405 aa, Acetobacter sp.
MKIQKAYVVRLYPSLTQEEFLCQIGGATRFLWNLALEQRQTWGQRHGLNRFSQSKELTQLRSEVDWLKACPSQVLQQVLSDLERAFRNFFARRAGFPKFRKKSRGDSFRFPDGKSALYERLTRNGGRLKLPKLGWVRFRGWRSIPGVIRNVTVRCDAGQWYAAIQYEYDLPEPEKKILPAVGIDRGVVATVAVSGQGRVKGPDAYRKAMKKLRRAQRVVARRKKGSQNRRKAVLRVARLHRTVRRVRADFLHKVSHSLAENQGTLVFENLKIRNMVRSASGTVAEPGRNVRQKSGLNRSILDQGWGMLRQFCGYKTAERGGQCLDVSPRNTSRECRKCGHTAAENRVSQSRFVCVRCGHAENADDNASAVIVKRALDSGLLPVEALRQHALEAGISVGSLLASRQ

SEQ ID NO: 3514 - protein, 390 aa, unknown
  TnpB Polypeptide
MVVYKVAQRIPFTPSKTQAALLEQCFGARRFAYNQQVEAFNSYDKDANPHPSYPNVTDMKSENEWLRDSPIPSNALSNAIQDFRRAQSAYFRQAQYGKNRPRFVSKRDAVQSFRNAVPMRRMEGNRYPLSKKLGSVRIRRRDRIRYPLESLSSWTVKRENGVYYLILLFDVDVQPKLPVDGQVGIDLGVKDFLALSTGEKINYPDRLRQLEENVRREQRKLSHRVKGSGNYCKQKAVVAKARAKAHHYRENFQHQLSHKLIEDNQFIGMETLAVQNMTRKAKKKLDANGKYARNGQSAKRVMNRNILRNGWSSFVDKIAYKAQWYGRTLVQVDRFYPSSRLCNGCGHKYAGLLLSEREWACESCGASHDRDVNAAMNILEEALRLSQTGQ

SEQ ID NO: 3515 - protein, 407 aa, unknown
  TnpB Polypeptide
VQDDLDSLGFAASKLWNVGRWVCDRVWSETGYIPGHNELTTYLKSHERYDDLHSQSSQRVLQELAEAFNGWYGKRQNGGQRANPPGYRKHGDDHPRSTVTFKAAGFKLDTEYERVRLSKGSNLKEYWSDFALCEYQTRPDVDLSTVESVQQVRTVWTGDEWELHFVCKVEIDVSDAPGEKTVGVDLGISNFAALAYEDRHAELYPLNCLKQDDYYFSKRVARCDDSHSVQATRLNQKKSTRRTHYFHTLSKHIVQRCVDDGVGTIVIGDLSGIREDEEDGESKNWGKHGNLDLHSWAFDRFTEMLTYKAEMEGITVEEVSERDTSKSCSCCGRKRDANRVERGLYVCDKCETVANADVNGAENIRQKVSPSLATDGGDRSNGWLAQPSTYLFDSESGCFAPREQDTS

SEQ ID NO: 3516 - protein, 411 aa, unknown
  TnpB Polypeptide
MAVEVTRTCVGSIENQQQVRDDLNLLGDSASKLWNVARWTADRIWNQTGEVPDEGTLKAYMKNQECWKDLNAQSSQKVIEELSDAFQSWFDLRQTDSETNPPGYRKHGNERPRSTVTFKTDGFRLDTDNNRVRLSKGSNLKHHRSDFTLCEYTTRPDVDLSEVNRVQNVRAVWNGDEWELHFVYKVELEPDNSAGDGVAGVTLGNSTIASVAFPSEYVLYPGNTLKEDAHYFTQAEGGTERLDTPTNQARRTLTKRETHFYHVLTSTIITECVDRGVGTLAVRWPNGADVEEKRANGQTSHSWAYDRIYQHLKYKGKDRGVEVLKEAVETGAVCSECGSDAELHSVEPGLYGCSVCELVANADCNLAENVRQRVTPSPHGEDRSTGCVAQPSIRLFDRERGTFTTRGQAVS

SEQ ID NO: 3517 - protein, 370 aa, unknown
  TnpB Polypeptide
VEYSYKFRIYPNAVQATQMQKTFGCCRFVWNHYLALRKSLYENQKETLPCNKCMSDLTKMKKDLPWLSEVDSTALQASIQNLDMAFKNFFRRVKNGEKPGYPKFKKKRDHRKSYKSKCVGTNIKVFDGYVQLPKLGLVKCRVSKQMQGRILSTTVSQNPSGKYFVSICCTDVDIDPLPSTGAAVGIDMGLKSFAITSEGVEYPNHRYLRKSERKLALLQRRLSRKTKGSKRWEKARIAVARMHEKIANQRIDMLHKLSTDLVRQYDVICIEDLSPKNMVKNHKLAKSISDASWSEFRRQLEYKSQWYGKHLVVVDKFFPSSQICSKCGTQWPGTKDLSVREWTCPACGEHHDRDVNAAHNILNEGLRLLA

SEQ ID NO: 3518 - protein, 189 aa, unknown
  TnpB Polypeptide
VKNVTVSLSCGNRGAGRWFVSIQTEREVKQPIPNGSAVGIDMGIARFATLSDGSHFEPLNSFKRHEIALRKAQQAMSHKVKFSSNWKKAKARRQLDYKLAWSGGHLIAVPPQNTSRTCPCCDHVSADNRQTQARFGCVECGFEENADLVGAINVLRAGHARIACGVSGAVRPPAAGTHRSDSRAAQCRT

SEQ ID NO: 3519 - protein, 411 aa, unknown
  TnpB Polypeptide
MTRSVTVVGTLVAGVSPESGDDLAKVIDFLRAYRDAKQYVIDKIWDRRADLPSLEKLHHEFYEELRKLGFRAHHVKEILKSARELVKAMHEKEKKGEDVSKPELRRLTARLDIYDIKIDFERRTVRLPLLNGESVTLKLRVYEGRVRKFEGWKFYNCVLRFCCGKLFLHIMFRKVVKLGKPKTVLAVDPNFRNFTVAIMNRKGRILRIKRYENPLPRALTLRIWAERIQKRYPKSWRFSKNILAVVRKFHRRSRNVLRTNLHKVAKMIVELADKHNSIIVLEKLDGLKRKEENGSYSFRKSMTFFAYRTFQEFVEYKAKERGIPVTRVSPRGTSSRCPRCGKRRRKYEGRILKCRCGFAGDRDVVACINLVRKYLSRCARVRGHGRTGTNPSSEGHVSQADESMRVKVNNS

SEQ ID NO: 3520 - protein, 568 aa, Mycobacterium sp.
VAARKLRPWRGVKPVAAPAGVAISTRVRTTAEDERVLDLVAAHLGRLRRTDLVAVSHEQPVDAGLDAEDRRTVRRGRLNARKKTLTGRSSARWANAIIAANDDQCRLARDAQYRHIVGLRAAIATIDKRLAAPTTDTLTAAQQRKARRKAKAPKGYVTQAERFAKQRRVQRLRGELARAEKDRAAHRVHVVEGGKRLAKTRHHLDKAGLTPAQWRDQWEAARYRIAANGSPDEPFGNLTITVTPAGQVSIRLPKPLEHLANAARGRYVLSGAAVFSHRGDEWAQRITSAMSVSYTITRKPGRAGRYLSASWAIPSVPYWVGRDDCAVGDDVHAEGPVVGVDLNDGHIAARRLDAHGNPVGAAERIDIDLTGSASRRDAQVRHALTRLLHYARRHGVTAIAVEDLDFADARTVGRETLGRGARGKRFRKTVSGIPTAVFRNRLSGMAAAAGIQLLAVNPAYSSIWGAAHWQRPYRNVTRHQAAATVIGRRAQGFPARRRKGVTPTRPEDRAVRATNQTGPDSHRANTGSRRRSGMRGTESRPPNRNVRGDHPRRATVTPAPANNGQHHV

SEQ ID NO: 3521 - protein, 332 aa, Paenibacillus sp.
MKRFNEACNYISKVSFESKTFGKIGIQKLCYYDVRERFGLSAQLVVRSIGKVAESYKTERKSVHAFREFGAVVYDQRILSFKGLEYASILTLEGRIDVPMIISAYHKGVLQGRRVRGQADLILQDGSFYLLLVVDLPDGTPFEPEGVIGVDLGIANIAVDSTSEVFSGSKVNSIRARHRRLRKKLQAKGTKSAKRLLKKRRRKEQRFVRDINHCISKKIVEKAKGTRSMIALEDLKGIRERTEKTVKKAQRAKHSSWAFYQLRQFIEYKARLAGVPVVLVDPRNTSRTCPECGLIDKKNRATRDTFHCQCCGYAAPADNVAARIIASRATVI

SEQ ID NO: 3522 - protein, 420 aa, Methanomicrobiales sp.
MLQAYKYRMYPNGGQIATLLQHIHACRFVYNHSLEQKLRAYEQEGRKLSCSDLNTRLPALKEEHPWLKEVNSQSLQSANKNLDNAFTRFFREKKGFPRFKSKKNPVQSFQVPQYYTVDFDQGWIKLPKIGEVKTTLHRTFTGKLKYATVSVTSTGKWFISILVDDGAATPDPAPFALDTTLGIDVGLTDFATLSTGEKVENPRFLKNSLQRLKVLQQRVSRKVKGSKNRQKAILRLARCHEKVANQRNDFLHNLSFRVVSENQAIAVESLNVAGMQKNYKLARSISDVSWSTFFAMLEYKCQKYGKTLLKIGRFDPSSKICSTCGYLKRDLILADREWVCPDCGTHHDRDINAAINIKKFALQDQNLVGVSGVERTVEPVDSLPLGRRMKQEAPPKRSGVVHPELFPWSRGLHQRAQNLA

SEQ ID NO: 3523 - protein, 411 aa, Symploca sp.
MIVREAKLLNGTKEQYLAIDDAIRTAQFIRNKALRYWMDNQGTSKADLYALCKDLAKEFPFAKKLNSAARQASAERAWQSISNFYSRCRNIEKKKGYPKFQKHGRSVEYKVSGWKLSEERMNIAFTDGFEIGTLSLYCDKQTREDLFRLKINRVRVVRKADGYYAQFCFDADRKEQGEYTGNVIGLDLGLKYFYKDQSDNALVYPQYLRKSEKRLKKQQRRLSKKFSKNKKPQSNNYHKARKRLGRTHLKIQRQRKDWAIKQARCVVHSNDVIVYEDLKVSNMVKNHHLAKSICDASWYQFTQWLDYYGKIWDKAVVKVAPNYTSTDCSNCGHRGSKSLSTRTHSCPNCKTELCRDTNAAINILKKGMKVLGIEWHNSTFGQKESASQEGKHGEKTASVIDGRPDIASGFL

SEQ ID NO: 3524 - protein, 365 aa, Desulfohalotomaculum sp.
VNLLQLTIVLELLQPTKRKEAVMFSNVREVVKNRQAIASELKKGNTKLSSAHFKQSRLPSAVKNQNIREVKALYRLFKQSESKKENMTFKDNQPICFNNQNFALDGHMISFPLYDDKVRRFVFPVKQTERLTLLNDYMKQGAKLGKASLFYRQGKWYFAVTIQTKVNQSTNKQVMGIDIGLRQLAVASVFNEQNEEINRVFHNGKQVGFIRKKYRSVRRKLGKAKQPKLIKRLGDKEQRWMTNKNHQISRQLINLAVQEQVGVIVMEKLENIRQTARSLRRVDRSLHSWAFYELQSFIEYKAKLAGIKVVYIDPKHTSQRCSSCGVVKKQQRKRNIYHCSCGNHIHADLNASRNIAQIYNEQQSA

SEQ ID NO: 3525 - protein, 323 aa, Okeania sp.
VATWRGYFQAIKEWSKHPCKFLGKPKIPKYKNKTQGRNVVIYSKESVYKAPLKDGICHLSMSEVKIPVVVDTVIEVRIVPATSCYIIEVVYEKKHQPQIDSTYVAGIDLGIDRLVALSTNKPGVKPLLINGKPLKSVNQLYNKRKAKYQSVLKGQKKTSRKIETLTYNRNRFVENYLHNTSFLVVEYLTRNNIGTVVIGKNDNWKQSANIGKKNNQNFTQTPHYKLIQQITYKCQLVGIKVIETEESYTSKTSAIDLEKPICHKNYVGKRVKRGLFRSATGKVINADINGSLQIIRKKFPGAFTVEGIVSCAVQPVLVNPISR

SEQ ID NO: 3526 - protein, 383 aa, Okeania sp.
VITLTYQYKLRPSKQQQVEINQILDVCRSVYNYALRERKDWLRSRKSPINSCSIIFEYIIPADTSYPNYNHQAKNLTIAKKTHPKLKSVNAQVLQQTLKQLDRAFSDMKSQGKGFPRFKKKLRSFVFPAMLKNCLGSSKIRLPQLGWIKIRKSRLYPDVMTAKQAIIVKKASGYYLMIIFQSLESVPDNPVGKKSLGVDAGIESFVATSTGKLTKAPKFLLSKLRELKLLQRKVKKKTVRSKNWLKIQNKIAKLHEVIANTRRDWHFKIAHQLCDLADNIFVEDINFKSWSKGIVRKQSLDSGIGQFINEILPYVCWKRGKYYGKVDKNYTSQECPKCGHIQKKKLSERTHNCSNCSCQINRDIAAAKVIRNRGLMAVGHTAR

SEQ ID NO: 3527 - protein, 402 aa, unknown
  TnpB Polypeptide
MMLTYRYRVLPTRRQHRALEKILEDQRQLYNAALEERIDAYRKRAITRTYIDQSKALTEWRQSDPEAASFPVNLQRWTLKRLDDAYQGFFRRVKAGGKPGFPRFRGKGRFDAFGFREFAGIRFEDGRIRIKGMAGGLRIHLHRPLPGGVAIKSCVFRRDVRGWTVGFVVEKIEAAPRREGSTVGVDLGISTFAALSDGGFIPSLRAARQAERRLRIAQRALARKVRGSCGRGKARVALARCHAATARKRADHLHQASARLVRDYREIVVEKLNVKGLARSALAKDVYDASWAKFISMLRYKAACAGARLVEVDPVNTSQDCSGCGLLIPKQLHDRLHACPHCGLAIDRDLNAARNILNRGGVVPGLRNVAVVKASVQAETSMRLQVTSNRSCSQNESLPYTT

SEQ ID NO: 3528 - protein, 373 aa, unknown
  TnpB Polypeptide
LEDYVRGYKYRIYPTKEQEAKFNQMFGNARVVFNYFLDVRQKAWKEERRSVGYSETSRLLTELKRKPDFVWLNFSDSMSLQESLRDLDNGFQRFFAGDARYPKFKSKHNAKKSYRTRNQKNGIRIKENKLHLPKVGWVKIKLSRIPDGVILNATISKTPTGKYFVSLCVREDWNNVLKRNSGGEVGVDVGIKSFYVDSNGNIVENPRTFTKFQRKLARAQHRHARRKDGSRRKQKARAAVAVVHEKIANIRRDFLHKESTKLVSDNQVIGIEDLNVTGMLRNHKLAKHIADVSWSAFFRLLKYKAALYGNDLVQVGRFYASSQTCSHCGEKNPVVKDLDVREWDCPHCGTHHDRDRNAAINILHKAKELLAAS

SEQ ID NO: 3529 - protein, 371 aa, unknown
  TnpB Polypeptide
MKTAYKFRLYPNRQQKAMLELTLETCRHLYNLALVDRKNAYEVEGINRTYEDQAAMLTAEKKNGNFKGVFSQVLQDVLRRLDKSFKAFFRRVKTGEEPGYPRFKGQGWYKSFTYPQAGFKLEGSKLTLSKIGSIRIFKHREVEGKIKTCTIKKDNLGHWYAILVSEVEDVPQVEPNTAIGIDVGLKNQVTTSTGETIEYPRYYVKAEQKLAVAQRDLSRKKKGSSNRRKARIKVARLHQKIQNHRNEFLHQVSRKLVDCADLIVFENLNIPEMLKNHHLAKHIQDHAWGKLIQFTESKAEKAGKIVELVDAKYTSQKCSQCGIMVPKTLADRTHACPNCGLELDRDLNASINIRTLGLRGRAYRDTAIADR

SEQ ID NO: 3530 - protein, 186 aa, unknown
  TnpB Polypeptide
MSRKQKFSNNWRKAKTKVQKLHTAIANARKDFLHQASTTLSQNHALVGIEDLQVKNMSQSAKGNREQHGKRVKQKSGLNRAILDQEWGELRRQLDYKVQWNGGILLAVPPQHTSQTCPVCGHVSKENRQTQAKFLCLDCGYENHADVVGAINVLERGYRLLARGELVQSDRSMKQEPTEVTQVAFA

SEQ ID NO: 3531 - protein, 186 aa, unknown; identical to SEQ ID NO: 3530
  TnpB Polypeptide

SEQ ID NO: 3532 - protein, 382 aa, Rhodococcus sp.
VQLRYQYRVYPTPGQQDMLARSFGCARVVFNDALRARQDAYAAGVTFSDTDVQKRVVTGAKKTLERVWLSEVASVVLVQACQDARRAYRNWFDSMSGKRKGRKVGAPRYKSRKDNRQAIRLTRNGFGIRGNRKLYVAKVGELKVAWSRDLPSVPSSVTIIEDSAGRYFASFVVAVDQAPLPDVDAEVGIDLGLTTFAVLSDGRVVESPRFLRRAERTLRKAQQTLSRKEKGSRNRAKARWKVARAHARVADSRRNFVHQQSTVIIRDSQAVYVEDLAVSGLARTRLAKSVHDAGWGMFTRMLEEKAARYGRTFVKIDRWLPSSQTCSACGVVDGPKPLSIREWTCAACGAVHDRDLNAAKNILAAGRAERLNACGGTVSPAA

SEQ ID NO: 3533 - protein, 306 aa, unknown
  TnpB Polypeptide
MLRAYKYRIYPTDEQKVLFAKTFGCCRFVYNWALNLRIEAYRSDKRTVPYKEIQDCMVNELKAEHDWLKEVNSQSLLYSLRNLETAYTNFFRNTRAVGFPKFKSRKSRQSFLCPQHCRVDFERGTITIPKAKDIPAVLHRKFRGAVKTVTVSMSPSGRYFASVLVDTSIQELQAAEPQEKTTVGIDLGVKSLVVCSDGRTFENPKNLQRSLHRLAMLQKRLSRKQKGSANRDKARVKIARLQEHISNCRKDNLHKITHTLTHDSQVRTICMEDLNVKGMQRNHHLAQAVVDASFGMFLTMLEYKCR

SEQ ID NO: 3534 - protein, 395 aa, unknown
  TnpB Polypeptide
VCGIPPTTANVGVLGSATAQQVIRKNSEAWRSFFAAKEDGEDTAPPGYWGNEDDGRELRTYIRNDQYTLETGGRSRLEIPVGQDLKEKYGLGYHERLRLKVSGDPKWEGEQGRLELYYDEVDDTFRAIQPVTVPDSRRDSPLAEESAALDVGANNLVACTTTTGQQYLYEGRDLFVHFRETTEEIARLQSKLREDRYSSRRIQCLYRKRTRRRDHAQDALVRDLIERLYDEGVATVYVGDPTDVLSEHWSARVNEKTHQFWAYRSFIDRLATTAEEYGITVEVRSVHDGGVSGVWRARQYRTGRQRVPVFVWIRGARRSRRVADVPRTTGWRIRSRVDGTARAPQVGRPQLVGATTLSREGKSQRGAHKPEYRRRETCLRGYGIANIPIGGIPPL

SEQ ID NO: 3535 - protein, 375 aa, Streptomycetaceae sp.
VSVVVLQQALRDLEAAYRNFFAGLKGKRPRVGAPRFKCKRNQRQAVRFTANAGWSISPSGRLRLPKIGAVRVKWSRTLPSVPSSVTVVKDAAGRYFASVVVETDPAADSARMPETDRRVGIDLGLTHFAVLSDGRKIDSPRFLRRAEKKLRRRQRNLSRKERGSSNREKARHKVARAHARVADARREFHHQLSTALIRENQAVAVEDLAVSGLARTRLARSVHDAGWSAFVAMLEYKSARYGRTFTRIDRFEPTSQVCSNCGAKGGPKPLHVRAWTCRECRTVLDRDINAAVNVAQAAGLAVTARGAQVRPEPVPAQRREAGTHRNASRPGLEPQATGEAGIPVVCQGGEEVKSPAFSSRARKRRCASTPTSSAS

SEQ ID NO: 3536 - protein, 470 aa, Lactobacillus sp.
VPNKKKYGFTRQYHVLLTDEQKIQYEKALETQNALFQYALKYLFKTYGVKHIGRPMPFSQKPIQYVLNKVKAGFIKDKYGLARWNKSVLFLSSHSADEFLKTVYTNFSQYRRRLEKADKSMDEKARYNFKMNVTKDKHGKHKNPLHKSWYRKGSINFLRNGASFKTVTSQKLPKDSKGGIRIEDKHTDNHTFLTVADFGTVEVIEDLSEVSLKDVALTKIKKLSDGTYRLQLTFSLPRKKNKSQTIKGFDWNMANNEAFCSSDGKRVKVSDDTIKRADQYEQKINKIKSERDLEENVHGKNKRYRKLHRRQQKLNAKRRNLLTNEYRHLVHQVVDDCDTIIVEHLDAYEMRKCGNGSAQSKGVNRRLAILKPYELMTILGSLVKKQNKTLIKVDSFWTSKACNNCGYINKELKVGQKEWQCPSCKKTIDRDLNAARNILDWGIHPEHHAKLKKAIEEGKKLSPSSLVEEV

SEQ ID NO: 3537 - protein, 461 aa, unknown
  TnpB Polypeptide
MQTLKIKYHTNKEEDLKLIRQYQKQYSNTLRWMYNRCVDGIGDTKRKQLAKTTLNNIPLMECWFISSASKDANAKYIADPQKRIIFGGKKNFIRRCKGLITKEEWQKCKLMPLCSIGEANQKGNRKFKLSEDLSKITFKPNANTHIELIFNGLGKNYRKTLRQLYLLQESKATPITYYLDDEYVFISFDEVKMQITDKRQVIENRIMAIDLNPNYIGWSIVDWNENGKYNVVKYGVYSIKDINDKEFNLKNLPSNDKRKVYLSNKRNYEVMQISKNLINKALYYGCETFVCEGLTIDSSDKGKGKKFNRLCNNLWCRDKLVNNLKKRCNLFNITFNEVKPEYSSFVGNILYRKHKLPDMVLASIEIGRRGYEFTRQYIKKDKEINKNIILPEIKDFVEDYLKSLEEFGVIEKSIKMVDLYYLLKKSKIRYRFSLDDWLNEPNSLKFLRCFSKRSLILKISN

SEQ ID NO: 3538 - protein, 367 aa, Methanosaeta sp.
MLQTLMVKLDPSPEQHKMLCETMKRFNEACNRIAETVFAMHSANKVEIHKTVYYPVREHFGLSSQLTIRAISKVCEAYKRDKSIKPEFHLDGAIVYDQRILSWKGLEKVSLITLQGRQTIPIRFGEYQKARLDRIRGQADLILVNGIFYLCVVVEVDEETPYDPKGTLGVDLGIKYLAVDSDGEVHSGEQINQTRERLDSLKARLQSKGTKSAKRHLKKLSGRTARFSRDVNHCISKHIVTKAKDTLRSISLEDLQGIRSRVTVMKAQRRRLHTWNFGLLRTFVEYKAKVAGVPLVFVDPRNTSRTCPSCGHVSKSNRPTRDEFRCESCGFAGPADHIAAMNIAFRAEVNQPIVAGKHLTSVTSSGL

SEQ ID NO: 3539 - protein, 249 aa, unknown
  TnpB Polypeptide
MLDDKIKYYEETKKMKQTTPASYKKEHPFLKEVDSLALANAQLHLEAAFKKFFKETDIGFPKWKSKHQAKQSYTTNMVNGNIRLFSMIQNQTTYLRLPKAGNVRIRMHRIPQGILKAVTISKQQDRYIATCLFEYENKVERKEVVHVLGLDYSQKHLYVDSEGHVCDYPHFYRASENRLAREQRKLSKMVKGSNNYKKQRKKIARLHAHIGQQRKDFLHKESRKIANSWDMVVVEDNESGIEARKESYG

SEQ ID NO: 3540 - protein, 357 aa, unknown
  TnpB Polypeptide
MAGRGRVGGAGAGMPGCPAGLPELVRFPVRPAEGPQDRAPGIPAQARPAVDPAYPERFRGARPQAVRGQGRGHHGPVVPGSAVRPVVGHGDPRAGRRYYASFVVERVATPLPVCDREIGVDVGLSSLAVTSDGEKIGNPRFMRAKERKLARAQRALSRKQEGSANRAKVRHRVAVVHRKVRESRLDYAHKTALRLVRDNQAVYAEDLCVSGLARTRLARSVHDAGWSQLVRLIEEKAGQYGRTFARTGRFEPTSQVCSACGVKDGPKPLHVRQWTCAACGTIHDRDVNAAKKSWPPGGRTSQTPVEGVSDQGLPWRFPVKQEPTGARREPRWRNPRRSRWGGRQCPSSQREKCARAC

SEQ ID NO: 3541 - protein, 219 aa, unknown
  TnpB Polypeptide
MLSYKFRIYPSKTAQAKLNEQLELCRWLYNKLLEEVNKARKEGRKITRKDTQALIVKLKQEKPELKSVYSKVLQMVNYQLWSNIKALNELRKNGKKAGKLRYKTSPNSFKTLNYNQSGFKIDSENSRLILSKAGSIPIKLHRSVEGRVKGVIIKREKSGKWHAIIQVEDEPRSKSKPLPKAGKVVGIDVGVRHFLTDSEERQIENPKYYERTLERIRIL

SEQ ID NO: 3542 - protein, 388 aa, unknown
  TnpB Polypeptide
MTRHKAYKFRIYPNKTQSASIGKTIGCVRFVWNQFVNEFNSNIKHRSIKELRNSFEFLKGVSFGALQQKQRDFLSTTKQYFNKSRKKKIGRPQFKTKKKCRLSYRLAKIQFHLLENKIQLERIGKVKIKYDRVIPDDVKLLSCTVSKNNINEYYVSICVEEDIDHKPKTNKSVGIDFGIKQFVTTSDGVQVKMLDFSETQRKIKHLQRHMARKEKDSSRFKKVKNKIDKLHLKIARKREHFQHQVSNYLINNYDQIVIEDLNVSGMMKNHKLAGAIQKQAWNQFVNQLNYKSKWYGKEVVKIGRFFPSSKTCNSCGSIKDELKLSDRNFACECGYSVDRDLNAAFNIKDVGINASQRSSMGYKTSCESGSSNSLLAIPNEMTTILNLH

SEQ ID NO: 3543 - protein, 593 aa, unknown
  TnpB Polypeptide
LTKQGFGAIIKPFNRCFFMLKKDYSTYCTHVSLDASTEAAVHDFMQAWLHYQTHRIVHLKKHGLLGKYDKADCDRYRKTQTFKNKQKQILETFDARYSRAMDIDLQARAESSLECKALEIEDKQIKLDTMKKEVAKALEKYKNRQSITHDDNRELLHQAYNHYYRLLGKQQRLEGRIETLEKEIQMQKVKITLGGKALFHQQFKKGVDFKAWQQAWANRGDRFGCGGSKSEEFGNKKMHLTFAKDYDPASGKRPRFDLRIILPACLQEEHGPFITFRNIVFRYGEAVIKQSVMAHQAYRQAKSDHEKAKRKINKLVDEHEKEQALNVLGESPKADDFGVLSFAFQVLRKDKGYYLHVSVPKVPKPKKTHAQNGVIGLDINYDNLSYANVSKGGQLVDSKVLRFNFGPKYSAEHREQMINQHLKALVNEALAKKKDIVLERLDFTHKKSLQTKGLDKDTNRMLHSLAYRKIKENLRRLCLDNGVGYREVNPAYTSMLGRFLYTKRYGISTHQAAAYVIARRYLNFEERFYSKNLSFVYKDRSCHLELPEGMIKEQDKLKPFQFWGKLYRWIAAEFKAPSRFYQPTLCSDSSPAC

SEQ ID NO: 3544 - protein, 437 aa, Streptomyces sp.
VFECAGPEGPGSVAAVKLVVQVKLLPTPVQAAALEATLHACNEAASWVSEVAFEKDAKNNFALRKLTYDQAKARWGLGAQAAQHVIKKTCDAYAALKANLRAGNLGRPGSRRHRKATGKPVAFRPDSAQPYDDRMLSWQIPGRRISIWTVSGRVKDVAFTASPEQLATLALYRKGESDLVCRDGMWFLNATCEVPEAEPNTDPVDFLGIDLGIVNIATTSDGEIMVGRGLNRIRARERGLRAKLQKKNTPSAKRRLKKRRRKEARRARDINHKIAKHVVAEAERTGRGIALEDLTGIRERVRLRKPQRATHSSWAFAQLGAFIAYKARRAGVPVVYVDPAYTSRTCAECGHLDRANRVSHAWFACRSCGFVDHADRNGSRNIRARAWELWRCGAQSTAPAPPPRQRGGAGRKRSATASGARCASPSPQRRVVDERSS

SEQ ID NO: 3545 - protein, 429 aa, Streptomyces sp.
MPRFRMYPTSEQAGIMLEHCAHARYVWNLAVEQHAHRRTGGKSAPSFAEQCRQLTEARHENAWLRAGNADVQQQALKDFAKAKAAKFTSGFGEPTWRRKYWHEGFRVIGTDRVPECNEDGSPKLNARTGRQVMGRLVVVQKLNRRWAQVKVPGCGWVRFRLTRAELPQAKTFRVTFRNGQWHVAFAVVPQPVGAPGTGEVIGIDRGVTITAALSDGRKLNCPQLTTKERAQIRKHQRRAARAPKNSDLKTAEYAKAAKLKAREVNRRKDWCEKTSTMLARTYDLTRFEKLNIKNMTASAKGTVEQPGRNVRQKAGLNRAVLAQGWGLLRRRTADKAPGRVEDVPAPYTSLRCSACGWIDKKSRKSQADFECVSCGFTCSADENAAKNVAAGQGGIPRPRCTAGAGGVTAATDRSSAREPQPARVGIPLS

SEQ ID NO: 3546 - protein, 378 aa, unknown
  TnpB Polypeptide
MLVKRGYKVEVDLNNEQRTDCLKHCGAARWAYNYALTRKKENYQAGLPTPYASGPHREINVLKKTEIPWAYEVSKCAFQEGLRDADDAFKHFFRKCKLKREGKHKGKCGYPKYKSRKKQIGSARFTGSIHVSPDTIQLPRLGMIRLKERDYLPMNEKIGSSTISEHAGRWYVSICVHEEQKEPTHATGEAIGVDLGIKTLATLSTGETFDNPKALRKKRTALKRASRKHSRQKKGSNNRRKAKQKLARVHVRIANVRKDTLHKTTSAIVARTKPDCERPSVIVLEDLNVSGMLKNHKLARACADVGMGEFKRQILYKAAFAGVEVKLASRWYPSSKTCYCCGWVKEDLTLSDRVFVCKDCGNITDRDYNAAMNLAALA

SEQ ID NO: 3547 - protein, 503 aa, unknown
  TnpB Polypeptide
MAKATTTIKQVLTYQTGYSAWFAANQVLFNRVVAFYFGVIQAHEKVLDFSNKDALTALEKLTHTTQKNPTPVMPLEDIRADIPALFRRAAINAALGSARSFYSHLSKWRKCKEKTLAKGKQFTEHPPIPPRSWNKSATLYGGQWKERTNSSIVLKVWTGTCWSWIKVRLTGREIPDGVEVGSPSLIRRGNQWWLHTPIEKPFRSPAKIEKQVTTNAQTKICAADLNLNEHLAVCTIQTVEGTILATRFISGGREISGFRKKQLGRIGRNRRKTGLLAEGEQDNVDLWDKINQVDEYISHLVSARIVQFAKEYEASVLVFEHLGNLKPAKGKYSRRGNSKRAFWMKGRIFKYSKYKAYHEGILTSRVNPKNTSRECARCHSLVARYDEGRPAQGYTYGTPLVLCHQCGMKGNADRNASLVIGQRLITRYQKTSQGKPPPPLLVERVEKSTGVEVRQDATCEEEPSIPQARHAESNEHGTAQDRVLGMAEHTSDIPHPLRFSFES

SEQ ID NO: 3548 - protein, 379 aa, Nocardia sp.
VTKAVKRAYKYRFYPTSEQVEQLARTFGCVRYVYNRALAERSRVWTEEQRRVNYADTSLMLTRWKRDPETLWLAEPSKGPLQQALRNLQCAFDKFWCKQTAYPKFKKKGKSRDSATYFSNCFTYRDGRLKLAKQSEPLNIAWSRPLPAGAVPSQVTVSKDTAGRYHVSILLEDTVVEHEPTETTVGVDAGITSLYTFSTGEKVPNPRHEKRDRVRLAKAQRLLATKQEGSANRAKARLTVARIHARIADRRRDHLHKLSTRLVRENQVIAIEDLSVRNMVRNRSLARAISDASWSEFRSMLEYKADWYGRTVVAIDRYYPSSKTCSTCGRITDKLPLNVREWACPCGAVHDRDVNAAKNIQAAGLAVLACGDGVRPSRS

SEQ ID NO: 3549 - protein, 207 aa, Bacillus sp.
  misc_feature (151)..(206): Xaa can be any naturally occurring amino acid
VDVGLKELFVASNGLKERNINKDAKVKKLLKRKKSAQRDMSRRFKKGVKIQSAGYEKAKAEHLRLSRKITNIRNNHIHQATAKLVKTKPMRIVVEDLPISNLLKNKKLSKAFLFQKLNFFFQCLSYKCEKYGIEYVKADKWFASSKICSCXXXXXXXXXXXXXXXXXXXXXXXXXXXXXXXXXXXXXXXXXXXXXXXXXXXXXXXXR

SEQ ID NO: 3550 - protein, 404 aa, Nostoc sp.
VFNLTYEFKLKPTQKQILLFEEWMETHRRVYNYALAERKDWYKSRSCQINACSLHSCYIIPADAPRPTFASQCKSLTAARKENEYLKRVNAQSLQQTLRRLEKAFVSMWEQNHGFPRFKKSGRMRSFSFPQLGQNPLNNGYVKLPVIGVVKLRQSRSIPDGGVIKQARVVKRVSGWYVMLTVQWDVSLPQTMPHGEAVGIDVGLTSFVATSNGLLVKRPRFFTDAERKLKLLQQRVSRKRLGSNNWKKAQNKVASLHEYVANCRKDWHRKLSHQVCDGAGMVFVEDLNLIGLSRGMLGKHCLDAGFGQFFNILEQTCFKRDVYFQKVDARKTSQTCPNCRVETGKKELCERIHICSNCGYTTDRDVAAAQVVSMRGLAAVGHTVKMLAEGKFIGIPAKQESSHL

SEQ ID NO: 3551 - protein, 195 aa, unknown
  TnpB Polypeptide
MEWNHDHVHVLVLFRAHPKSEISKFINACKSTCGRLIKKVFPSIKTKQWKEYFRSQSFCLITAGGVPLSVIKQSIESQGGKQSRQITNAYDAVVVENLNMKEMYEALRFGKSVHDNGWGRFIRFLQYKLTEAGKQLVKVDKWFPSSKTCCVCGKKKDELALSERVYLCECGNIMDRDQNAAINIRQEGLRVLGIA

SEQ ID NO: 3552 - protein, 336 aa, unknown
  TnpB Polypeptide
MHSVITAKLKLQTTPDQFRALRQTQLAYRAALNDVSRYAFEHGKMSNKVALQDGTYLDVRAKFGLPAQMACSVPHQVGATYKTLWTKVKANAAARAAGHTKKRYKGLDQPPKYVSPTLTYQLGHDYGFKTGQQVSILTLDGRMIVPYTGYARHVALLQHGARLGAAKLWYDKPHKQFYLLVSLEIAVPDPLPEQHQRVVGVDVGQRYLAVATDTQNRAAFFPGTAARAIADHYARLRKRLQHKGTRAATRRLVVIAGRERRLKHDRNHLISRRLVDAYSHSLIGLEDLTHIRERTKRKHTARRPRSSNAVPIGMPPSGRSPSCTATWPTRRCSRGA

SEQ ID NO: 3553 - protein, 420 aa, Streptomyces sp.
MGRKVKRSFKHRFYPTREQAAELSRTFGCVRFVYNRALEERTRAWYGEQRRISYAQSSAALTGWKKTEELAFLAEVSSVPLQQALRHLQAAFANFFAKRARYPRFKSRKRTRQAVEYTRSGFAWRDGRLTLAKMAQPLDIRWLRPLPESAEPSTVTVSRDSAGRWFVSLLCEDTVAPAPPTSSAVGIDAGITSLLTLSTGEKITNPHHERRDRTRLAKAQRDLSRKTRGSGNREKARRRVARIHARIADRRRDFLHKLTTRLVRENQTVAIEDLAVRNLVKNHTLARAVSDASWAELRMMLEYKCAWYGRCLVVIDRFFPSSKLCGVCGTVSARLPLNVREWICDCGAVHDRDVNAARNILAAGLAVLACGGGVRPQREPSRTGRSSVKQEARRATAGLARLRGGGGSQDGSLPDAITAG

SEQ ID NO: 3554 - protein, 291 aa, unknown
  TnpB Polypeptide
LRIPVSRGKRFSIPLTKHTLDIVSQPGVKVRSFTLTWNKLSLCIARDTPMIECASTVGVDCNLRNLAVGNDDQTTHYDLSKTVRIASTTTRIVASFTRDDNRIKTRIASKYGGRRISRTAHLLHNATKTIVAFAIQRRTAVVLENIEGIRSLYRRGNGQGRKYRGRMNGWSFGEAQRQIEYKARWVGLPVIRLSRRETRATSITCPRCGERLQSDKRLTRKLWCGKCRIVMDRDMVAAINLAWWGRVRFARSRPPILLEAQGRAVEAVKGNPTPMVIPGVDAPKLTQPTKS

SEQ ID NO: 3555 - protein, 371 aa, unknown
  TnpB Polypeptide
MKKSFKYRLLGDKETFAKADGWLTFCRRLYNVGLEQKITAYRQNKGRISCYDQINQLPELRAEFPEYRDVGSQVLQNVLERLDSAYKGFFRRIKSGDKAGFPRFRGRDRYDSFTLKQTGWKLDGKYLTIRNVGRFKIRLSRPIDGDIKTVTVRKETEKWYICFSCDNVHEKKLPQSDKAIGLDVGINSFLVDSEGISVDNPKYLRQSEKLLRVRQRTFSRRVKGSGGRKDARLLVAKAHENVKNQRNDFLHKVANHYITNYGVISIENLNVKGMVKNHHLSKSISDASWSKFFNLLAYKAEEAGRQLVKIPRFEPSSKTCSSCGAINQELKLSDRQWVCKNCGVLHDRDYNAAKNISRVGQTLQELTYGNG

SEQ ID NO: 3556 - protein, 329 aa, Archaeon sp.
LFIVLAIKSVWQYYAPSREVLVLLDTFRRMVNDSIRIGLVNDVSSLRRLSLLSYSHLAHYDSPSYYKLCAISRAAGMLAARKKSIKRGFPTREPYAFRAQLISCYGFKVKNGGVEIPVSRGKRFCIPLTTHTLTAVSQPEIEVRSFTLTRNRLSLSISREALRIECTSTVGVDRNLRNLTVGNESQTRHYDLSETVRIAQTTVRIVASFRRDDNRIRTGIASKYGQRRTARTGHLIHNATKTIVARAVNGREAIVLEDIRGIRCLYRKGNGQGRMFRGRMNGWSFGEAQRQLEYKASWTGLPVIHLSRHETRGSSVTCPRCGERLQSDK

SEQ ID NO: 3557 - protein, 437 aa, unknown
  TnpB Polypeptide
VTAAQEAYFYRACGTARWTYNKAFELSKPFVSEHDKPPTFFTLEKWIRDLKKENEELAWLNDVGARVRNGACEALAKAWKRYYQRRRYWQRLQEKKGKPNLGKPKFKKKGKAKFSFRAAYAGECKVEPAGTKSQRSRIWIPRLGWVKGREPLRFEGELIETRITRDGKGRWYAVILVKMPWTPPVRENQVDGGVDMGVKTLAVDSDGYCYESPKTAYARLQKRKRRWERKRSRRQPVKGEKPSKGYLKACARVAGYAARMADIRQSNTHRVSHALVHKYTRLAIEDLNIRGMMAKGGSRKRGLNRGLAEASLATLRTQLEYKGDLYSCEVVPVDRFFASSKKCSHCGYEKQDLKLSHRTITCKNKKCGRTYDRDVNAAINIREEAKRIKLNELGRTTPEVTPRECDTKPDVQRRRLATRRTRNPRRSRAAAIQLPLL

SEQ ID NO: 3558 - protein, 367 aa, Methanosaeta sp.
MAKAYRYRLKPTKAQIAKLNEQLELCRWVYNETLAIRKNAFEQEGKSVSYFESKRMLPIWKESKPELSTVHSQVLQDVVLRVNLAFKAFFRRVQSSEEDPGYPRFKGKNRYDSISYPQSGFSIDGNKLWLSKIGEIKFWLHRPIEGFVKRLTIRRSATKKWYVSFLVEESINHPLAPSQKVVGIDMGILNFAVLSDGEVVDNPRFLLTDEERLKTAQSKRDKLSKGSQKRRKATKAVNHLYERVANRRDNFAQKVSREWVNRYGTICFEDLNITKMVENHNLAKSILDVAWNKLVQYTSYKAVDAGRRVVLVNPANTSQMCSGCGQIVKNDLSVRVHDCPYCGLSIDRDLNASKNILRLGLQSVAYA

SEQ ID NO: 3559 - protein, 174 aa, unknown
  TnpB Polypeptide
MLKVQRNFELPFQEMQKLIREQRRLSRKQKDSHNREKQRIRVARVYEKVTNQRNDFLQKQSTMLVRENQTICIEDLNVKGMIRNHKLSKSIASVSWAKFFEMLEYKAGWYGNEIHRVPTMYPSSQTCSCCGYRNPRIKNLGIRIWECPKCHAVHDRDTNASINILKKGLQMQSA

SEQ ID NO: 3560 - protein, 358 aa, unknown
  TnpB Polypeptide
MVLTYRYRIKDATAGRHLLRQARAVNRVWNYCGEIHEAARRHNKSWPSGFDLIKLTSGSSKLLGLHSDTVQAVCKQFALARDAHRKRPRWRGRKSLSWIPFQAARAIRVHSDSAMFLGRRYRLWLSRPIEGDIRCGSFAQDARGRWYLNLQVEVPEDREHGTGEIGIDLGLKSLATLSTGEKIEAPRLYRKYERALAIAQRAGYKPRVRAIHAKIANCRKHFLHELSTRLVRENRRICVGNVNSGGLARTSMAKSVLDAGWSQLRSQLHYKAVRHGAEYIEVDERLTTQVCSACGACGGPKGREDLVVREWICGGCGARHDRDINSAINILVSGRNVGLLRTEIPSLQRREDVNWRCP

SEQ ID NO: 3561 - protein, 323 aa, Nonomuraea sp.
VLLCNQAATFVSGQAWRQRVFTVLELHRLAYYPVRAQFAGLGAQAAVRAIARVAGAYANRRATKKRAHVFRPYGAVPYDARLMSWNRDARTVSLWTPTGRVTVPYTGRPEDLKAVDTLPLGEADLIFRRGVWLLQVSVTLPKPAVREPVNGFLGVDQGVANLAVSNDGAVLPGAALPGPIGGNGHVRSLRGRRHRQRRRLQKKGTSSARRVLRRLSGREHRMMTDVNHQISKHVVREAERTGRAGRGRLHSGRPRLHRAGLSRLRVRLQSESARPGPVRLHRVWPRWARRSHRGLQHRRTRRGGLGCCQPAARYRPPFSQTGP

SEQ ID NO: 3562 - protein, 393 aa, unknown
  TnpB Polypeptide
MKKLYKFRLYPSDLIEKKMIFVLDSCRILYNMQLEYEKQIYFLDQRYANRTELNNLIPDWKIIEPNIRKVHSQVLQNVSDRLHKAFEGFFRRTKSGEKAGFPRFKNRDRCVSFSYVQSGFKLEGGKLKLSKVGEINICLHRDIKGKVKTLTIEKTRTNKWYACFSVEQAQPIEQKRKGACVGIDIGLNHFYADSEGNKICAPEYLRKSEQKVVLLQKHHSRKKKGSLNRAKLRLKIAKLHEKVANQRLDFLHKQARKLADNYAYVAVEQLHIENMVKNHCLAKSISDASWYKFLHILSYKVEETGGQIVRVNAKGTSQYCICGNKVEKSLAVRVHKCNKCGLRMDRDVMSAILIKAIAFDKHTVGTTGINACGDATSAHPEIVAQIASLKQEA

SEQ ID NO: 3563 - protein, 449 aa, unknown
  TnpB Polypeptide
MCARKEDMSGGCLPAMCRYASKKDTSTAGEKLLTSWVKKVIVDMQERIRAYKAELKLNNKQITGCTNHINAARFAWNWGLARRIEAYKEQGVTLNAISLHRELNSLKKTELSWLYDVSKCAPQEALRDLDKAYTNFFEHRARYPRFKTKKGKRSKQSFRLTGVIRVFTDSIQLPRLGILRLKEHNYLPSDEHILAATVSETAGHWFVSVQVKEDVEIPFNNGKIAGVDLGIKTMAYVSDGTTFESPKALKRHERKLKRAQRKVSRRIKGSNNRAKAIKELQRIHKRIQNIRTDAIHKATSHLAKTKSVIVLEDLNVKGMMKNHCLAKAIADVGLYEFRRQMEYKCPLYGAELIFADRFYPSSKMCSQCRHIKTDLTLSQRTYICDECGFTADRDHNASLNLRQVAVSSTDTLKTPDGAESSGLLNTGANETFLNETGSKHYLGTGVLNG

SEQ ID NO: 3564 - protein, 471 aa, unknown
  TnpB Polypeptide
MGQATRTTKLFLSFSRRDQGGANNQKRAALDATAAVLTAARAFYIDFFLAHADKLSERVTYYSEEHLELRERLISAHELLTWAESCTVATAAHPHPWTGWNFTQRFAGMPFAYRRSVIKDAIGKVRSYLSNHANWQKSGKQKGKPGLPAATDQPTLYQGCLSLDLETLDLQEAFVRINVYTAEGWRWMQYPVNSSHYLVERLKEEGWQRQSPTLVLRAHSAALHIPQVKKIAARKVMERKQDPDLVTVAVDLNVKNLAVITARAHGTIIETVFVTDHGLDAHRYHHLKRIAKKQWQSGKPVKGEHSNQQLWRHVDRLNEDAAHKVARIIATVCARYTGCILLFERLRTIKAGKASKSRRMNRRRANQLRGKINQHAREKAYAQGIVTVEVNPHGTSQYCSRCGAKGERFSYRGGKRIAQKWGKLFWCPVCHYEAHADFNASANVHRSFYREGHWQPRQAKAPPPARVEDGT

SEQ ID NO: 3565 - protein, 275 aa, unknown
  TnpB Polypeptide
VQSKKGVWYACISVSWEVPRPTETPRFIGVDRGQNHLAVAVTPEGRSLFLSFGWVRHIRRRYAAKRRRLQKKGKHKTLKRLEQKESRTIRHINHIISKKLVAFAKEHGCGIRMEDLSGIRQSKQRQSTKAKADLNRDFWLESKTAYKALGAGVAFEKVPAAYTSKTCRRCGAIGVRHRHSFRCKRCGYQGHADHNAGSNLANWLGLSCCSAGRGAWHTPKLGKRTQPERAGLVRTRIPRIYPWECQNWRSRPSTIWQRTWQLTKTWVVSSARATW

SEQ ID NO: 3566 - protein, 418 aa, Salinirussus sp.
MDVRRTAVVKLAVSDEQRDALHRTADQYLYCAKRTADYCWSNTSYTECKTNKRQVRDALYPELREETDLQAQLVQAAIRRAVEAVKACVGRWKKGQRVSCPTFTAETLDYDTRSATFFRNKVSLATVEGRVEPSFVLPADSPTPYEQYVLSEDYEFRESTLRYDAATDEFYLHISTRRCESDGDDAEGSADTGHPDQTVLGIDLGVTSLAVSSTGRFWQGDDYDHWCREFEKRRGEMQQCGTQASHNALLRLGKREEAWCKQYIHTVANELVTEAVEHDCDVIAFEDLTDIRERLPHANWHHIWAFRRLFEYVSYKAPERSISVEQVEPAHTSQRCSRTDCGFTHEDNRHGERFECQKCGYEVNADYNGAKNIGLRYARKRTHRLRSSPTSGSGDAPVDVRVNGGTLNGESHRPIAGD

SEQ ID NO: 3567 - protein, 299 aa, Salinirussus sp.
MSSGTIDIEEFENADADEFEERNDTERIVMFLDKNDDRAWKAATIADQLELETDAVSFIHDSDGRSVGRLDLSDERERLEREQRSLSRKEYESNNWEKQRRCVAKVHAQMSNKKHDFKHKLAHFYTTEYDAVFVENLNVKGMLESSENARNKAEVGWRDFITILEHHGEKNGCHVVQVDPRGTTKECASCGVEARKPLWAREHSCPTCGFELDRDWNAALNVLNRGLDKLGVVHSEATSPEIEDFWCANESQSDSLTPVEAATAVSTDGGDSSSIVVDASRVVEAGSPALKEATRSVAE

SEQ ID NO: 3568 - protein, 479 aa, Moorea sp.
MYKTIPIKATFTDEDNLFWLFQCQQANNLWNCAVYHAKQKHYNWLEQQSDAFTTYWKGDDLRYGWKTYKCGTKYPELCRDLKDNPHYKAMAAQSAQQTLKSVAESISSYNQLVGLYYKGQVDRPRLLRYRQKGGLAAVTFPRQALTYKNGLFYPSVSKESKPELLTEIVLELPEFVDPDWVKEVTVRPYLGQLWIDWVIDDGKQPVEHNPSLDYSQAWSFDHGGDNWLTGVSTHGKSLIIDGRRLKSMNQGYARLVAKYKAGKPEFYWDSNLDRVQRKRNNQMRDAINKAARFIINRCLHDCVGNLIIGWNERQKDSSNMGKRGNQNFVVIPTKRLIERLKQLCPEYGIRLTVTEEAYTSKASYLDDDSLPRHGEKPQGWTPSGKRVRRGLYKSSKGHLINADCNGASNIAKKVATQLGLDLTKVSRGALTLPHRYDIFKSLNKSYRMRSVRVRVASAKAESVACGRRPRCANGDSSTV

SEQ ID NO: 3569 - protein, 645 aa, unknown
  TnpB Polypeptide
MSHLTTLSAQQTQAHPHPSSAKVMRNYQVVLKCADQSQREEINQRIRILEERQTTLLTPYVVKKAIDLYQSNPKEKFFVRKLGKAVGMNPNIAESAFHWLQIAVKGKIDKEKKVQGMFNFLLKNPQQLIEWVIFGRSPYTERSLENYWKLKRRYIINLLVNTRTQADSYWRKKRDNVYTSATLKLNHLLPIYTQLDVLQAIDDALFYQQHEFSVLPKLTKNQQTFLNKLKLLKKEQSTVVPFLPSWINSPQPSRWKSLKELAEQLAQVLGKPTRKLFSAVRLIVVFTLFDHYMQSVPQLIKALPVEQVVPPPFKRKKKGRLPIKLLMKKDYVITREGNSKELTNQVNKQGWTELGFPQKGKKRLNAQVHFPKKVLEYIQNGARIKVFQVSCGKAPSYKPRVDVVLEGTHDCFHSSTLLQSYLHHIPAKKTSVLGIDINRLGQYMVVFNVPAPLPPDVMVLAKSYDHLSKKVIDELNLGYLTKRKEYNTLGSCKLKGELNRVYARRSRILREITRLLPHFLAAVLVKKKCKTLKIERLTADATGTKGALAKAIYTMPDSLFIYKKAVWLASLELGYEVKLKDVPPYHTSSIHHGCKGTLSRVKGQHDFAPCSKCGQQVNTHENAALNIASLKGVILPNDLFPSTHV

SEQ ID NO: 3570 - protein, 384 aa, Symploca sp.
LKTDEILSKEIDQTLLVFACACDWVNKTTPKKLTNKTAMQSLVYADVRAKFGLSANLAIQAIRRVCANRKTAAQKGKKITEFAPTSASYDARIFSFDEKNWRVSLKLLEHRRKFDLLIGNYQRHLLKGTKPTSATLVKRRDGTYYINIQVEKPIHAATPGNGVLGVDLGRTDIASTSDGQSWSGKQTTNIRNHHWRMRAILSQKASKGTRSSRRRCRQLQKRLRGREKRFQSWVNHNISKELVDNAATSSRAIAIEDLTGIRDRTNKQPRSKKDKRLGNSWAFYQLRQFLEYKSLLKGVKLILVPPAYTSKTCHKCKHLGDRKGKKFYCLNPDCCWSGDADYNGSQNIAALGMIVNHPGGSSRLHCNLSTDGSGLLKAHTYPIG

SEQ ID NO: 3571 - protein, 333 aa, Streptomyces sp.
MVTRVRRAFKYRFHPTEAQAAELSRTFGCVRKVCNMAPAVRPEAWTLRAERVTYNATSAMLTAWKKTEELAYLNEVSSVPLQQALRHLQAGFTNFFGKRVKYPRFKSRKKSRKSAEYTTSVFRFHDGRLTLSTGEKIANPRHERRDRARLARAQRELSRKAPGDGANRAKARCKVARIHARIADRRRDHLHKITARLVRENQTIVIEDLTVRNLLKNGKLARAISDAAWSQFRSLLEYKARWYGRDVIAVDHWFPSSKLCSACGTLQDRMPLHVRTWTCDGCGITHDRDVNAAHNLLAAGPAVSACGAGVRPQRESSRTGQPVTKQETPRRKP

SEQ ID NO: 3572 - protein, 449 aa, unknown
  TnpB Polypeptide
MLKQKYTTVTQLHKVNNKDIIKYFEDASVYFCKLQRKAFHLFKNENITGNKIEYKKFRQDFMKEHSISRRTADSILKDVQRGMKALEELKKYEVSQKEQKIKKLMEDIEKLDNKISILQNKMENKIKVDHIKYWNLKKLRAFKKMKMNKFQLVLKQLKWQIKTGNHKLCFGTKALLKSNKEKFVLQRDSQMSYIGSQDEAGRNSRFQLNYNNQNNQFEIKIRKDFGLDKEDKYVLGKCYFNHHKNKLIEALSNKNSTPLTYSIIRKNGRYYLHCTFEYRIEDECNFLTRKTQGAIGVDFNRGFLAVSEIDKSGNLIGIDILKYRFRKGNKTQSDLEGCILKVLEKALETGKDVCFEDLNFKSKKSKMMRGTTTIGRKYNNMLHSLSYSLYNKLITNIAFRNKVGIIKVNPAWTSWIAKNKFCERMKLNIHTGASFVIARRGLGIKDTVK

SEQ ID NO: 3573 - protein, 401 aa, unknown
  TnpB Polypeptide
MRVTRAFRFAYNWGLERCKKALEERKKLFSAPELYREWNRWKRENAPCWSEVCKCAPQEAFRDLKKALQNWKAKRARFPRFKRKKAQADNTARLTGSIRVFPCHVQLPRMGKVRSKEPTEKLLRLLQEGRGKIFSATVSWEADRWYVSLTCEVERPEPKAREVRGAHDVVGVDLGLFSFVVLSDGTRIEAPRPLARRLRLFKRRSKQLSRKEKGSNNGKKAALRLARLHRKIKNTRLDFLHKLTTWLARTKPVIVVEDLNVRGLSRGWLSRSVADVGWGAFRRMLVYKAGWYGAVLIVVPRSFPSTRLCSRCGHLHGRMPLSERVFWCEACGLKTDRDLKVALNLRAYGLAHLTGSTGSSPGSHACGDFFGGGTAYPGWSTSYGSLKQEVAPHHHPSGMVK

SEQ ID NO: 3574 - protein, 379 aa, unknown
  TnpB Polypeptide
VRRAYKFRLYPNRNQERELEIMLETHRRLYNACLGQRKSVYEKDKISVSYCEQSAWFKKQRAVHPWFAKLNFSSAQATMRRLDKAFAAFFRRLRAGEKPGYPRFKVAGRYDSIEFPAYGDGLRLQEKLRIQHVGQVKVKRHRGMEGAIKTVTLKRESDKWYAIFSCDLGDVSIESSANPPVGIDVGIESFFTTSEGEHEPNPAYLKAQLPALRRAGRAVSRKQKGSKNRRKAVGVLRAWHVRVRNLRGEHRHQVALKLCRRYGLIAVESLNIKGMLRNRRLSRAIVDAAWGGFLATLRCKAERAGVVVVEVNARGTSQRCSHCGQVVEKCLGQRQHVCSCGLALHRDVNAARNILALARTGPAEPNVGVNSHVLRSRHL

SEQ ID NO: 3575 - protein, 380 aa, unknown
  TnpB Polypeptide
MILSYQYRLYPKEAQIQALNDLLEQARQLYNAALEERREAWLMVGVSLNYVSQANQLKEIRIADPDGLGKLNFSACQQILRRLEKSFSAFFRRIKAGEKPGFPRFKSRSRFRSLEFRFGDGASLKGDRLRIQGVGEIRAFFHRPIPEDAKIKAAVVRRDSLGQWFATFQLEVPDSKPEAHSGEPVGIDLGVTTLVALSTGELIEAPRHFRKTEKKLRRQQRRLSRRKKFSLRWHRARKQVAKTHRRITNQRKDFSHKLSRRLVNEFSLVAVEDLNVNGLSRSKLAKSIHDAGWSQLLAHLSFKAESAGSKVVAVDPRYTSQICSDCGSLVPKKLSVRVHRCPECGLVIDRDHNAAINILHRALLGPDGASVRQRIPAGTA

SEQ ID NO: 3576 - protein, 390 aa, Clostridium sp.
MIKAIKVKLYPTKKQEELMWKSAGISRFSYNWGLDYLNNYYEENKKSLSIGSLRKIFTEVRKSDKYEWLKEVSSEIPQQALKDLGEAFQKFFKKESDYPKFKKKGRCQTSFFHLNNKFVVEDNYIKLEKIGHVKMKDEGRLPIGNYKKDKIKVLNPRVKHNGKFWYIALAFECEDKEIEELTGESVGVDLGIKDLAMVSNIEKPFKNINKSKEMRRLNKKLKRLQRRVSRKYDMLKDGKNFEKDQRLIKTQNIIKLEKQIKLVHKRIADIRLNHIHQATNAIVKTKPSRVVVEDLNVKGMLKNKHLSKAIAEQCFNKFITILSHKCKWKGIEFVKANRYFPSSKMCSCCGTIKKDLRLKDRTYVCVNDRCNLVMDRDKNASFNLAKYELA

SEQ ID NO: 3577 - protein, 405 aa, Caldicellulosiruptor sp.
MYKTQKNHIRCDKQTYRLLRILCHLSKNLYNYALYHVRQHYFRTQQYLRYESVYHLVKENENYRLLPSQVAQQTVQAVDEAFKSFFKLLATKKEGKIDWKVSPPKYLPKDGMFLLMFPKDQFKVKGDKLRLSLGRNFYREFGVRYLYFDLPAMVLGKRIKEVRILPKFHGRWFEIEYVYEEEEKNYNLDKSKYLSIDLGLDNFAAVVDTIGTAFLIEGRYIKSVNRWVNKERARLQSIYSKQGIKCGKKLAQISFKREHILNNFLNQAVSHIIKHCLNNQIGTVVVGEMKNIKQEIELGKVNNQNFESIPYEKFKRKLEAKCHFYGIWYVEVDESYTSQMCSRCGIVKKDNRKHRGLYVCSECGYVANADINGSINILRKVAGESALKQIVSSGCVNHPVRIRVA

SEQ ID NO: 3578 - protein, 194 aa, Anaerobutyricum sp.
LKLPKIGQVRLKQHRSVPDEYRLKSVTVSQTPSGKYYASILFEYEDQVEEKKLQKFLGLDFSMHELYRDSNGKEPAYPGYYRNAEKKLAREQRKLSKMQKGSNNRNKQRLKVAKLHEKVSNQRKDFLHKQSRQITNAYDCVCIEDLDMKAMLRSLNLGKSVSDNGWGMFITFLKYKLEEQGKKLVRVDRFFASS

SEQ ID NO: 3579 - protein, 540 aa, unknown
  TnpB Polypeptide
MSDRPIFTYQTRLKLESGQSDELSAYAGLHGKAERCLFAALQAGGTINDLKRDFQKRFGLTARQFNALRVGLDGKIASIKARRPELLAESAARIARAEKVIAKLEKRSAGSNKLHQKKRRLATIQARRAAMQADQATGQVRLCFGSKRLFRAQFDLAANGYADHNQWKADWVAARNDQFFVLGSGDETAGNQTCQALVADDGSLTLQLRLPNALGGGMLTLPGIRFAYGQDPIVASLERSRRVRTITKTGKATIKRVGSAISYRFVRDATGWRVFASVESAPVDQASSRQLGAIGVDINADHLAVSETDRFGNWIGSTRISLNLYGKTHDQTRALIGEACVGLARQAKHAGKPVVIEALNFQKKRAELEAVDPRHARMLSSFTCNKVVSGLKAACFRAGIEVIEVNPAYTSVIGAVNHAQVKGISVHQGAALAIARRGLGLCERPSVRQGIIPVRNGGHVTFSLPARNREKHVWSFWSKVRTALKAAHVAHGRSGEATNPPAPLISATRSVGSHRSLPAKSRHANRQQHCSADVIADVPF

SEQ ID NO: 3580 - protein, 416 aa, Natronorubrum sp.
MAIRVTRTYVGSIQNHRQVCDGLDSLGDSASKIWNVARWTADRIWDATGEIPDEGTLKAYMKNRECWKDLNAQSSQKVIEELSDAFQSWFDLRHKYGEANPPGYRKHGDTRPRSTVTFKVDGFKHDPENNRVRLSKGSNLKESWSDFILCEYQTRPDVDLSEVNKVQNVRAVWNGDEWELHFVCKVELETTDSAGDEVAGIDLGIKNIATVVFPDEYVLYPGNSLKEDKHYFTQAEYDTEGENGPSQKSMWARRKLAERETHFYHTLTDSIITECVKRGVGTLAVSWPEDVRKSDWGKTGNKKLHTWAFDRIYQYLAYKGELRGVEVLKENEWNTSKTCSACGDDTKSNRKHRGLYVCSSCGLVGNADCNGAENIRQKITPSPHSEDRSNGCVAQPSVHLFDSESGVFAPREQVVS

SEQ ID NO: 3581 - protein, 365 aa, unknown
  TnpB Polypeptide
LKIRTHRGWVELKYRDNKQLHRYLYGGWIPASELKLKTGGGRRVLAYIAFVKVYTVFYDKTNVIAVDVNENNITIAIFRNGVLVEVVRIETGLGRIVIAYAFRRKRISKDKSTKTREIKKKLRKLREGDRKKDILYMVAKFIEELARENNAVVVIGDIGGDDKKRMEEGKSRKLRHRIHQWSIATLIKLLEDRPIHVVRVSERGSSSVDPFTRKRIDGYSPLVIRTAVRGANGRFKVVKVVLRVAYVDGRIIEKDVIGAINIGLKYLSSDGSPVALGSTGAHEVWVKLMISHQGPTPLTKIPLVGKRYCIPSRIMFWSERVPLALFYVAEDLIEDMVVGRHEIDLWGVVFTREGPRATRRVLRVI

SEQ ID NO: 3582 - protein, 468 aa, Glycomyces sp.
VKVTRIAYSRSLNRGKYVQLAEQAQRLGAVRSKVWREYGSIRGVGIRDRQIRDQWMSDGTAAAFGLPANAWKETLRDSVADVAASREAAKVTVRKAIHHRTGDLGERKRLYTALKHDSWVSDTYLRRLMRRHWKRSSSRVANQIVVRSDAYRAFQLAENGDIWLSVPGLERRQTVKIPLNTTAAPSGTLRLILRFDRVEVHYQVEATELATSKRPCGVGTIGVDKGYSEVLTDSEGVRHGVRLGELLSSESDHRKAKNARRAKLRAVAAKARELGDCAKADRIGRNNLGTVKHDRRKLRFERQVRTETFTAVHRVVDKASHIVVEDLARTFLSRRRLGKNTNRRLAAWTKGVTAEAIANVSERRGSALTLVNAAYTSQVAPCCNVLGHRSGDRLDCTRCRAVWQADHAAAINVLRRNADPDIGLWTPPPRVKQILQQRDRHRTRLPVQDPSTLVRGANHPIQATAPGR

SEQ ID NO: 3583 - protein, 351 aa, Actinobacteria sp.
VRRCRSYRFLLSPTVRQRAALDGLLGLECELYNAALEERRGAWRWEHRSVSYVDQCRTLTSLRAVRPEVLACGVVVCRGTLRRLDWAFGGFYRRCGAGQRPGYPRFRPRSRWDSLQWEDRSGWRLDETGRRLHLLEIGAITARLHRPLRGTPKAITVRREGRRWWVTVRCVDVPAEPLHPTGRRVGIDVGVTVLVATSDGTLVTNERFAQRAAGRLACAQRALATKPRGSNRRRRAAERVATAHRHVRNCRTDRAHQLSRRLVDDHDLIVHEQLPVANLVRRPHPRPDRAGGFEPNGAAAKSGLNRCLYDAGWGQLLAMISYKAESAGRHPTGGWCQAASSMGWFQAVCSS

SEQ ID NO: 3584 - protein, 412 aa, unknown
  TnpB Polypeptide
MTKEMRSVEFVVLPTSRTKARKMFQIAGACRFVWNHFRDKNLSNYQKFENGKADRPSASYFSLGIEFTRLRHETAWLLELPANPVKHTLKYFADALKQAVQGKKGFPKPKSRKKTAPSFTLPSKENFRIKKLDGKYSLLRIPLVGWVRLTRRGGNPHEGGTPKQVVLRHDGHRWRAFVFYEVEVEKKLDDREILGVDMNVRQISTSDGHFYFLPDLRKKEARRKRYQRRMARQVKGSNRRKDTKKRLAKVSRKIASIRRNWIHQTTKEIADKCGTVAVEDLNVKGMTASAKGTVENPGKNVKQKTGLNRAILDTAFREMKRNLEYKCGRLIEVHPEYTSQACSKCGHTDKENRKTQSRFQCICCGFASNADTNAAINIRRLGMAQLHGEGIALANPANREIDTRLPYGQSSI

SEQ ID NO: 3585 - protein, 252 aa, Methylacidiphilales sp.
MFNLTYEFKLKPSQNQIGMFEEWLETHRRVYNHALAERKDWYKSRSCQVNTCSLRSCYIIPADAPRPTFASQCKSLTAARKESEYLQRVNAQSLQQTLRRLEKAFVSMWEQNHGFPRFKKQGRMRSFSFPQLGVNPLSNGYVKLPIIGSVKVRQSRSIPDGGVIKQARLVRKVSGWYVMLTVQWDVNPPQPLPHGEAIGIDVGLTSFVATSNGLLVKRPRFFVDAECKLKLLQQRVSRKRLGSNNWKKPRRK

SEQ ID NO: 3586 - protein, 311 aa, unknown
  TnpB Polypeptide
MILTYKIKHLKSFSQELAQAREVAEYALKTKSRSSKDVKHIGLKSTIANQILKKYSSDKKLKRIHRVNLVIPSQGIKVNKEERVLSIPCVKLTLKYYFPDNFEKINQIECNKEYAYVSITLPEVAELKAESFIGVDLNTTGHCAVVGNPASGKVLKLGKSSLYIHKKYSQLRRNFQKQNKLKKLKQVKDREKRITKDLLHKVSRKIVKYAQEEKAGIKLEKLTGIRGRAKVARSFTYFLHSWSFYQISKMIGYKAKLLGIPVVYIDPRYTSQECSRCRKIGNRNGKIFKCSSCEHVDHADVNASFNIALRH

SEQ ID NO: 3587 - protein, 334 aa, unknown
  TnpB Polypeptide
LPCNASQQVVGQVFKSINSWIKLKKDFEKNPAKYNNCRPHLPSYKKGKKQNMVVFTTNTCRVKEGYIYFVKNIIQPIKTKIGDNKLCQVRIIPQATCYVVEVIYEKKEQDLNLNKDNVLSIDLGLNNLCSCVNNVDKQPFIVNGRIMKSFNQWYNKRKAKLMSFAGDKGTSKRLRQLNNYRNFWIEDHIHKVSRFIINYCVDNNIGSLVVGLNKGWKQEINLGKKTNQKFVEIPFSRLIDKISYKCKLVGISFYLSEESYTSKVDHLAFEELGKHDVYLGKRKQRGLFQSSVNKLINADINGAIGIGRKVFGDSYVSRIIDSGLAFNPIKVNIS

SEQ ID NO: 3588 - protein, 438 aa, unknown
  TnpB Polypeptide
MTEKVEALEEEPTIVIQTKVYQLHPNKVMRQALDGACDYRRYCWNQGLALWNEMYEARKIVKTAIYGHSKKKIKLTARQKALLKANPLSTERKVRDELVANKADWQYQYSAHLLGLAIADLANAWSNFFDKAQPGWGKPQFKSKRLSRQGFKSDQSRIENGVLYLERAKESTVPKNQWQGFKLSEKPLSDKFGVVSYFREKGRYYAAIPFKIKVENVKQLPKTGKATAVDVNVGHYDYTEGRINVLPKRLERIYKKIKHYQRQLAKKRIKNGCSACESKNYLKTRAKLQTCYRKAGNIQNDLLQKFTTELVKKYDQIVIEDLSVKGMLMSHVASKGVHRSMFGKFKQVLTYKCDWYDKELILANKLYPSTQRCAACGNVKKGDDKITLYGNKKHDTKHNEYVCYNEKCPNYNKIIDRDKNAMLNLLALAEHPELNTTL

SEQ ID NO: 3589 - protein, 379 aa, unknown
  TnpB Polypeptide
MEQITVTAKIQISASDADKALLDNTMSVYRDACNYVSDYVFRTHDLKQFSLNKALYSELRKRFGLKSQMAQSVFKTVIARYKTILETENKWIKPSFKKPQYDLVWNRDYSLTQNCFSVNTLKGRVKLPYFASGMSKYFDHTIYKFGTARLVNKRGKYFLHIPVSYDVEESNLSDVCNVVGIDRGINFVVATYDSKHKSGFVSGKKIKQKRASYSKLRKELQMRQTPSSRRRLKAIGQRENRWMQNVNHCVSKALVENNPKHTLFVLEDLSGIRSATERVRTKDRYVSVSWSFYDLEQKLMYKAKQNQSSVIKVDSHYTSQCCPVCGHIERSNRNKKIHLFCCKNCGYKSNDDRIGAMNLYRMGINYLADSQVPDTVIAE

SEQ ID NO: 3590 - protein, 406 aa, Streptomyces sp.
MLAGRRYLLDLSPEQAGMCEEFGNICRSVWNIALEQRREYRRRGAWMNYVPQAAELADAKREHPWLKAAPSHVLQQTLRDLDRACRDHGTFAVRWRSKARWAPSFRFPAGNLVIVERLGRKWGRVKLPKLGWARFRWSRPLGGGIRSATVSRKAGRWYVSFLVDDGAATPERHAMPGTAVGIDRGVKTAAVTSDGDFHDRQFITPGEAGRYRRLQQQYARTKKGSAGRAKVHARMNRIMGRVTDRRGDFCARTAAQITAKNAVVVLEDLKTRNMSASASGTIETPGTRAAQKRGLNRAILDKGWHRLELALTSAARYTGTTVVKVNPAYTSQRCSACGLVTEGNRESQSVFACKAPDCGHRQHADVNAAINIKHAAGHAVSACGDLGNSRSVKQEPVSRATGRTPA

SEQ ID NO: 3591 - protein, 300 aa, Okeania sp.
LKRKKDRQSFTVYDGNGKVTINPGKKIKIPTLGTFRLWESIPYTTASQTFTISRTGEKWFVSFSIEAEKLPVHPLLDKRQYETFGIDVGVKQFASIANQKKRENEVVSLPDSIKLEQLNLAKFQWRNRNKQVGGKGKPPSKNAIKYYKKLAKYHCRIANVRRDFIEKTTTKLVTQVKHVCLESLNVKGMMQNGKLAASIARQGFYQFRQRLTTKIVSSGGTVVLADQWFPSSKTCHSCGHIHQELKLKDRTFDCPNFGMIIDRDLNAALVLSQYGEINQKNRVGCTRIYACELEEGGLPG

SEQ ID NO: 3592 - protein, 442 aa, unknown
  TnpB Polypeptide
MQIISSYGVELRKQNIPIRQTLEIYRSAVSYLIGIYVQVWEKLAEIPDAKRRFNAAEHLVHTTKKNHACFDFDIRFPKMPSYLRRSAIQHALGTVSSYKTRLDLWEKTDGKSGKPKLVYENHAMPVFYRDVMYREGAEGKDEAYLKLYDGHDWKWFCVRLDHTDMEYLRKYWSGKKASAPTLEKRHRKYFLRFSYTEEVTLTKTPVKEQIICSVDLGINTDAVCTIMRADGTVLGRKFIDHPSEKDRMYRTLGRIRRFQREHGSAQTQGRWAYTKRLNTELGKKTAGAIVRYAEENHADVIVFEYLEMQGKISGKKKQKLHLWRKRDIQRRCEHQAHRKGMRVSRICAWNTSRLAYDGSGAVTRDRENHSLCTFQTGKRYNCDLSASYNIGARYFIRELLKPLPVTERSLLEAKVPPVKRRTSCVYADLRKLHSEMELLKAA

SEQ ID NO: 3593 - protein, 409 aa, unknown
  TnpB Polypeptide
MFFVAAGYAGALTVTVKMKVSPEPAAVELLRRYRNALDYAIRMVIEHKALTLSKAHALLYKTLRETYGLPSRVAQDCFREAIAIAKSWLKNPNRGRLPTIKTLRMWLTHRSGYRIKDGYVEIIGNIQLPVVGWDKRYDEYPNREARLVLRRGEMYLMVFKQIPKPEKYQPHGVLAVDVNEKQVVVGNSSVEERIETPIDRALHYKELVERLQKKYSDSRYNAWLRRRGIRRRIAHFHRKAKNVLEDWARKTSCKIAKTAGQMKYAVAREDLTHLINALRKLPKSHKVALLTLGYRRLSWWLDWQAEKRGVPIVVVEPRGTSTTCPRCGAKLREVGHRWMRCPKCGFEGDRDTVAVINIERRALLKMGGSLATPTAPQMTDVAPNRWGEPMNRPKKGALWGGEEARRFIS

SEQ ID NO: 3594 - protein, 386 aa, Okeania sp.
LKARYKYRIYPNHVQIQKLSQLFGCCRYVWNQSLAHCNQLYADGIKKPSYTDLTKQFITQAKRELLWLKEVASTPLQQSLKDLDQAYKNFFNSCTGKRKGIKVKPPKFKSRKSKQTARFVGANYQINQDKIYLPKVGKIKIVWSRPLASQPTSVTIIRDSANRYFASFVVETCAEHLPKSNNSIGIDLGISTFATLSTGEKIKASLPLKKNLKKLAKFQRKLSRAEVGSKRREKARLKVAKLHAKIKDVRADFLHKLSTKLTHKYDVIVLEDLNVSGMIKNRKLARAISDLGWRQFRTLLEGKAEKYDRDFRVINRWEPTTRKCSCCGFKGGKKDLGVSCGMLRKREWTCLNCGAFHDRDINAAINILNAESVVETVIQPITKVES

SEQ ID NO: 3595 - protein, 484 aa, Okeania sp.
LKARYKYRIYPNHVQIQKLSQLFGCCRYVWNQSLAHCNQLYADGIKKPSYTDLTKQFITQAKRELLWLKEVASTPLQQSLKDLDQAYKNFFNSCTGKRKGIKVKPPKFKSRKSKQTARFVGANYQINQDKIYLPKVGKIKIVWSRPLASQPTSVTIIRDSANRYFASFVVETCAEHLPKSNNSIGIDLGISTFATLSTGEKIKASLPLKKNLKKLAKFQRKLSRAEVGSKRREKARLKVAKLHAKIKDVRADFLHKLSTKLTHKYDVIVLEDLNVSGMIKNRKLARAISDLGWRQFRTLLEGKAEKYDRDFRVINRWEPTTRKCSCCGFKGGKKDLGVSCGMLRKREWTCLNCGAFHDRDINAAINILNAESVVETVIQPITKVESVIENPVQLSLFNEVAEGQRSIFIGHGAAVRLAVKSKQAAMMCQPTLNLSSNSVCLIDGWESRVVSKSNVGRMSKYRQIPHTIIDWDRLLSRIEEEIVN

SEQ ID NO: 3596 - protein, 361 aa, unknown
  TnpB Polypeptide
MKEHLWIEKNLWNILLEANQKKYNETKKFLTRNEMQKTVKNTGLYSQVAQTLSHRLQNALWRMVKMRKQGKECGYPRFKNMDRMKSLNYPQSGFRLDRKLKVTPFGELSIKQHREIEGKIKTLTLKKESSGKWFATFSVETEPQIPKINHGEQVGIDLGLTKFAVLSNKEVIKNPRHLKQYEEKLAQLQIRLSKKKKGSNNRKRAKHKVALLHEKISNTRTDFLHKTSTRLVNTYSLIALEKLASQEMTRQNFGKSINDAGWNMFANMIGYKAEEAGCKVVFVDPKNTTQECSNCREIVKKELSDRIHDCPFCGFVMDRDLNAAKNILIRATAGLAGSQASRDGDSLPSLKEEAHTIHGWE

SEQ ID NO: 3597 - protein, 390 aa, unknown
  TnpB Polypeptide
MILAHKIELKPTTAQLTGLKKAAGTARYTWNWALAEWIRQYEAGLKPKSLDLKKQWNREKPEWVYESPKDANQQPFSFLGMAWSRFFKEISDKPTFKKKGNHDSFYLSNDKFHVENRHIKIPHIGSVKMTEKLRFSGRIQSGTVSHQADRWFASISVEVIDYKKERTSNNLEGVDLGITAAATLSTGEKVLSPKPLKSNLKKLKRLSRKHSKKIKGSNNRRKSAIKLAVLHMRIGNIRKDFLHKLTTRLCRENQTIVIEDLNVSGMLKNHRLARAISDIGFYEFRRQMTYKKDIYEDNLIVADRWFPSSKLCRKCGQIKEVFPLSERTFICECGHIEDRDINAANNLLTLGYRGNNACGHGSSGSDLYGLSETAVGEAGISGEHLCSLRK

SEQ ID NO: 3598 - protein, 291 aa, Dysgonomonas sp.
  misc_feature (225)..(285): Xaa can be any naturally occurring amino acid
MISYKYKLYKTDKTKHLDRLLREGVFVWNHTLAIQKRYYLLYHKYVSANNMQKHFSKRYKFSLLHSQSVQDIIQRLDIAYRRFFNHLAKRPPKFKKALDFCSIVFKQGGYSLNGNELVVNKLKKKYKFSLSREYRGNIKRLTIKRNHLGEYFIILCIDREVDRYGKTHDGASVGIDFGLKKYMMMSDGMEIDNPQFLKSDLVELRRRSRNLSKCKKGSNNRKRKXXXXXXXXXXXXXXXXXXXXXXXXXXXXXXXXXXXXXXXXXXXXXXXXXXXXXXXXXXXXXCSLSLP

SEQ ID NO: 3599 - protein, 472 aa, Thermosulfurimonas sp.
MKTKRAIVFELNHLTEEQEIILGYLTYHAGRLWNQANYLIKNKLAKPDYRDLYNKLKGESLHLRSLQSRSAQIVLDELSRGWINFFNFLENPGKFKKKGINIVRPPKYVNPENPHRVVTWDKTGFRIEGSRIRLSLSRSLKKHLLEKFGISPEYLWIETGYRKLKDLKVLNIQIVPYKSYGHISYKLVVVYELEIPNRKPQGNKVLAIDYGVSNFATCVIEGNPVSYIIDGKGLKTLLWKKLKKIAKLQSRLDNLKNKGIPTTALEKKLHRLWKSVKNLLRDFAHKVSSLIKRLAVLSGVKTVVIGKVQESKNKGNNLADLVNQMFKLLPHGKVTEYLTYKLKEAGIGVKLIDESYTSVTDSCDEEAGVTKKSKGNGRRVKRGLFLSPIKGLINADVNGARNILRKFKRKWFDLVTGLGKVVRVRIYRMSEGISESLLFAGIGVCGGVNPPRGIRTGKTSQTPSEAPSVRAE

SEQ ID NO: 3600 - protein, 630 aa, Rhodococcus sp.
MLVGGLMDDVTAVPASLSGRVSGRCGRHGINDGVSTTPRQFAFTTRAYMAVDDATGEHIGLDDVDIRVGWLLDLIAAAGGELVSRLWHPATFDVLAAGRDRQDRRLPTQGHVAAARLGWTPRYLDGAYVPSRVTRVVTAQVMATLRTLTYRDSAITALSARFDPATGSLAPPTGSAEYVPPGFARGVQRQLAARARRDGGAPAGRVRITDLQEPPQTSAMARLSAADRQLARITAADRELMLTVKLPTSPAPAVRAQWRSIRLTAAIPEHLRGRTITDWHLPTLVLDRRGLLWRCAGTELAPAADLMAGTVAVGVDWSPTSLGAAAITADNPEGLVSDYRGWTYDDRGLGIKLARLQAEGQLLHAKAARLTRLAATAPPEVRAQLEEKIAVLDTHRTAVGVKRGKINRELAFHFARQVTDYAAAADAEMIAVEDLTTLETRGHGRVNNNRAAQSARRRAVAALAHTAAGVGVPVVSVPARGSSAQCPGCDQPLARPGGYHTAWCPGCRVGGNRDHLAGVNLAKRALLGKNKVTRRRGQLPAIRVAEHAPVRQCRDKHAPTPSRPRHRRVRRSRPTVTPRLGVTPKQHVPASQASVWDTVKPTPPHGDAGSRDTRTSPTPATPVADSTRST

SEQ ID NO: 3601 - protein, 414 aa, Clostridiaceae sp.
MCADLLNSYERTYFLDGRTFCLQCRKCIRIDIEKIYRKSRVERWRQWVLKAYKYRIYPNSEQRIQIAKTFGCCRFVYNQTLAYRKEIYEKEKKAVSKTDCNNYCNRELKKDYEWLKAIDKFALTNAIYHMDAAYQKFFKEHAGYPKFKSKHDNHKSYTTNFTNGNIAVDFETGKIKLPKLKAVKARLHREYRGQIKSATVSQVSSGKYYVSILVETEHKELAHTNHNIGIDLGIKDLCITSDGKVYGNLKIIKKYEKQLVKLQRQLSHKGKRSKNYYKTKKKIALCHEKIRNIRKDYLHKVSHEIISENQVIVSENLQIKNMVKNHHLAKAISDVSWYELTRQLEYKAKWNGRKYIKIDTFYASSQLCSVCGYQNPDTKDLSVRTWICPKCGAEHDRDINAAKNILTEGLRQIA

SEQ ID NO: 3602 - protein, 416 aa, Litorivivens sp.
MQPVILKAYKFRLDLTCEQSARMTELVGCARWAWNKGLDRCLKLLDSGERIPGQTAITYWVKEFRDNPEHAFLKTSYTDNLQQKLRDLSLAWQRYFDPKLEASRPVFKKKHVDSDNSIRFVNFSKYCKIDNRRVKLPGGLGWCRFRKSRNIAGKIKNCTITRNAGHWFISFQVEQKVEQLAHPSTREVGIDMGVAKFVTLSDGTSIKPLNIYRKYEQRLAKEQRRLAKKVKFSNNWRKQKQRITRLHSKIAHCRNDFLHKASTEISKNHAMIVIEDLRTKNMSRSAKGTIDAPGTNVKAKSGLNKSILDQGWYEFRRQLEYKQAWLGGDVLAVPAHHTSQTCPACDHVSPDNRKTQANFTCVQCGHQDNADRVAAINILARGRRVLACGESSLDDSMKQEPVLPREGLAPSAAIAA

SEQ ID NO: 3603 - protein, 393 aa, Litorivivens sp.
MLRAMKVRLYPDDQAKAELDRQFGAVRFVYNKALAIISHRYKVHGDSLRASKDIKPLLAVAKRSRKYSWLKDFDSIALQEACRNLDTAFKNFFDKSSPSRYPRFKSRRGQQSSYHCTGTTAYDDESITLPKIGKIPAKIHRDIKGSLKSITVSRSPTGKYYAAILVDTDEVLPEQITDINAHSVRGIDVGLAALVNCDNGIKIDNPRFIQRSTKNLRRKQKSLSRKKKGSSNRAKARLAVAKCHEKVANARNDFQHKLSRRLVDENQAIVVETLKVKNMMKNRRLSKAIADASWHSQIEKLSYKAEQAGKHLVKIDQWFASSKTCSCCGKKVEKLPLNIRSWTCACGAVLDRDTNAAINIRQQGILKLKARGSPFLLMEACVRPTHCRLRPEK

SEQ ID NO: 3604 - protein, 360 aa, unknown
  TnpB Polypeptide
MATMRAFNAACQYISDVAWDAQEFRRVPVHHLTYYDVRARFNLPSQLAVRAIGVVTDSYKADKEHRHTFGQRSAVVYDERLCKIGATTVALRALDDRQSIKWAGGGYQKSHLAAALHIGECDLIYRADKDRWRLAVTIDLPDVPPSPPVDATGVDQGIVNVATTSDGDMYGGASVLGVRRRYFHMRQKLQKKGTKSAHRLLKRRAKKERRFQQDVSHAITKRIASHARATGRAVGCEDLKGIRSRVKVSRSQRRTHSSWAFAQFTTHLAYKCQERGVSFVLVDPRYTSQTCRRCGHCEKANRHSQSSFLCRSCGFAANADINGAENIRVKALDVLGAGTRSDARTSGATRGVACGQAHGL

SEQ ID NO: 3605 - protein, 379 aa, unknown
  TnpB Polypeptide
MRKTFKYRIYPTRAQSTRMRKALSACCWLYNYLVEQRTSAWKKDKKSVSLYDQHAVIPDLKEKNTDLALVHSQVLQNAAVRVDLAFKAFFRRCKAGEKPGYPRFHGIDRYDSFTYPQAPSGCALHGKFLHLSKIGVVPVILHRKLEGIPKTVTIKRSRTDKWYVTFSCEVDAPKKLKKSKEKTGIDVGLATFATLSNGDKIENPRFFREEEEALVNVQRQHAKLAKGTPERRKHVKAVARVHERIAWRRENFAHQHSRKIVNRFGFIAVEDLSVNRMLHNRCLSKSISDAAWSMFDGLLAYKAEWAGRQHVRVNPAYTSQTCSQCGHRQKMPLSDRTYACPCCGLSIDRDLNAAKNILALGLQGAGRKPQEATGLKPVE

SEQ ID NO: 3606 - protein, 344 aa, Campylobacterales sp.
MLAHKIELKPNNKQITYFKKACGISRVAWNWGLANWEKQYKDGLKPLGMSLKKEFNSIKKEQFPFTYEVTKYASQQPFIQLQEAYNRFFKKLGGKLKFKKKNKSHDSFYIGGDQIKVIGKKVKIPNLGLVRLKESIRFDGKISNATVSRIADKWFISFAIKPSMSYHKTCKNQASVGIDLGISHLAVLSDGSFIDSPKPLKRNLKKLKRLSRQLSKKQHSRKKGDTTPKSNNYIKHSLKVSKLHKKISDIRKDFLHKFTSYLTDNFQYISIESLNVKGVMSNSKLSRAISDIGIYEFKRQILYKAELKGNYILENDKWFASSKTCPNCGNNKADLILKIEYMSV

SEQ ID NO: 3607 - protein, 401 aa, Methanosarcinales sp.
MRRANIFKLKPTKEQEKKLFELADNCSRLWNEINYKRRQSFFSGEIDWNTDEEYNKYKHLIGSATAQQIIIKNNEAWKSYFALLKRKAKGKLPKYQNVRPPRYWKDRKKGKRVLRILIRNDCYKLGGDVLRLPLGLRIKWKGRNRWKGKQGRLEIVYDDLSKSWYALQPVEVKPLHQPIGNKKAYCDLGVRVPIMAEIDGEVIGFRGNSLLADWWYWTEKIAEHQSMLKETNDKHTSKRLRKLYRKRKRRFRHAVNTIVSRFVELCYSKGVSEIVVGDLNGIRENNTKGKKANSMIHNFWSHKYLVQRIKEKAEEYGIKVIEVNESYTSSVCPRCHSRNVFKRKRLFKCLNCGLEAHRDAVGCVNIAIGHAQTSRSAGVINGAVARPLLLSAEAGTSHASA

SEQ ID NO: 3608 - protein, 347 aa, Caldalkalibacillus sp.
  misc_feature (115)..(115): Xaa can be any naturally occurring amino acid
MQKAYRFRLYPNQKQQTLIHKTFGCCRYVFNHFLAKRKEVYEAERKTLGYNACSSMLTQLKKELEWMKEPDATALQTALRHLDDAFKRFFREKKGYPQFKSRKNPVQSYTSKNNXAKSREVEGRILSATIRKNPSGKYFVSVLVETEIQPLPACDSKVGVDLGVKDFATLSTGEVIPNPKYLKKYEAQLIRWQRKLSRRKKGGSNWHKARLKMARLHEKVANCRKDFLHKLSTRLIHENQVICLEDLSVQNMQKNHRLAKSIADVSWSMFRTMLEYKAKWYGRTIVVVDKTFPSSQLCSTPGCGYRYREVKNLGLREWTCPSCGTHHDRDINAAKNILQEGLRLLAV

SEQ ID NO: 3609 - protein, 419 aa, Streptosporangium sp.
VEPCCGTTRPLAARTRNGPGVRRAVPSAHRGARRLRVAGRGIDHRPAAGAEGLPPGDGELFGKTHKRPTWRRRGRSEGFRIVAVKPGDVRRLSRKVGEVRIPKVGWVRFRWSRPVEQAKSFRVSRDVAGRWHVAFAVIPAPISGPGTGAAVGVDRGVTASAALSTGELLNVPPLWETEKKRLLRLQRRLARAKRGSKRRSKAKTAIAKLKAREGDRRKDWVEKTSTDLARRFDVIAVEDLKISNMTRSAKGTLEAPGTNVRQKAGLNQGILANGWGQLVIRTGHKAPGRVQMIDPRYTSQTCNACGHIARESRESQALFLCVACQHQDNADINAAKNHRDTAAGLRGGCAGRLAVGRAGEPRTSTRPPPCGVVAVGILCSSGRGGCQLQVELFKVGVGFVVISLLTVMEGELCGETLRT

SEQ ID NO: 3610 - protein, 405 aa, unknown
  TnpB Polypeptide
MDLTEKEIIYSTDGRFDLIKNLCHLSKNLYNASLYDVRQYYFETKSYRTWQSQRLIFTKNHNLDYYALQSHLAGEVLIQVGRQFLSFFNNKSNKKKRIPKYKDKYGYNVVSFPKLTISKRIVFDENKQLYTYTLCKRSYNLKIQSTKSNIKMVKFVYDESKDIIKCFKIYEVEQPKLKQDNSRYFSIDPGLNNIVSIYNNIGIRPLLYNGRPIKSINQYYNKNTAKLRSELPTNVKSSKRLKQLSFKRNNKIEYEMHKISNHIINEAVKHNISKIFIGNNIGWKNEINIGMRNNQNFVNIPHTKLFQQLLYKGALRGIEVIFTEESYTSKASFFDMDDLPIYGESDTPNFSGRRIKRGLYRDGDGNIWNADLNGAANIMRKVSDRAYKNLRKTKELMQCPILVTL

SEQ ID NO: 3611 - protein, 393 aa, Mycobacterium sp.
MRRAYVFRLRPTARQHVALHACLDAHRELYNAALQERRDAWAHSKTRIRYGEQSGQLTAIRGVRADHAVWSFSSQQATLHRLSKAFDGFFRRVKAGQTPGYPRFKGKARFDSVEWPKDGDGARWLPEHDRVYLQGIGQVKVTAHRQVQGRVKTIAVKRQGRRWMLVLSCDDVPVTPLPATGKQAGIDVGVVTYATMSDGATVDNPRWARQEATRLEVAQQRLQRAKRGSNNRSARRETVAARHRKIADRRKDFNHKQARRLVESYDLLVVEDLAIANMVRRVKPKPDPEKPGQFLPNGARAKSGLNRSISDAGWGQFVSILRAKAEDAGRIWVEVNPRHTSDGCECCGHAVPENRVRQAEFVCQRCGHTAPADEHAARNILRAGLALHTATAA

SEQ ID NO: 3612 - protein, 428 aa, unknown
  TnpB Polypeptide
VTFKFALDPNHAQEQVLLTHAGAARFAFNHHLARIKANLDQREAERTYGLTGDELTPALSWSKFSFINEFNAWKNGQLDTSPVNDDGTVGLAWRGEVNADVFECASVNAAQALANFAESRKGVRAGKTVGFPKFKSRHKSVPSFRLRNRSKVGASQQIRVAGPKSLRLPTIGEIRVHGCTRKMRRMLDAGRLHLYSASVRFERGRWHVALTGLAAQTHHLRRSPAGRHQTPAGLDLGVTSLAVVADAEGRVLRVVKGVNALQHAQARLRAANKAYSRTKTGSNGRAKAARRLGKIHARVAHLRSNLAHQLSHELATTLTRLTVEDLNVAGMVQLRSLARRISDAGLGDLGRLLEYKARWYGLELVQADRWFPSSKSCSSCGAVKADLTLADRTYTCACGLVLDRDVNAAINLARWAPAPASPPVALAA

SEQ ID NO: 3613 - protein, 402 aa, Escherichia sp.
VKRLQAFKFQLRPGGQQECEMRRFAGACRFVFNRALARQNENHEAGNKYIPYGKMASWLVEWKNATETQWLKDSPSQPLQQSLKDLERAYKNFFRKRAAFPRFKKRGQNDAFRYPQGVKLDQENSRIFLPKLGWMRYRNSRQVTGVVKNVTVSQSCGKWYISIQTESEVSTPVHPSASMIGLDAGVAKLATLSDGTVFGPVNSFQKNQKTLARLQRQLSRKVKFSNNWQKQKRKIQQLHSRIANIRRDYLHKVTTTVSKNHAMIVIEDLKVSNMSKSAAGTVSQPGRNVRAKSGLNRSILDQGWYEMRRQLEYKQLWRGGQVLAVPPAYTSQRCACCGHTAKENRLSQSQFRCQVCGYTANADVNGARNILAAGHAVLACGEMVQSGRPLKQEPTEMIQATA

SEQ ID NO: 3614 - protein, 372 aa, unknown
  TnpB Polypeptide
MGEGRNRAYKFRIYPNRDQSVLLNKTFGCCRFIWNRMLDDKIRIYKETGKMQRTTPASYKTEFPWLKEVDSLALANVQLYLEKAYKAFFRDPKIGFPNFKSKHGSRKSYTTNVVNGNICLKDHRLKLPKVGWIRVKDHRPIPDTCQLKSVTVSAESNGTYYASLLVEEQICESQAEKAYTTEDQVLGIDYAMHELAVFSDGARAEYPQYFRRAEEKLAKEQRKLSHCVKGSKNYQKQKKKVAACHKKIRDQRRDFLHKLSHQIATAYDAVAVEDLDMKAMSRCLHFGKSVMDNGNGMFRTMLGYKLKDQGKKLIVIGRFYPSSKKCSCCGKVKQELSLSERVYRCECGNELDRDVNAAINIREEGLRLLLAQ

SEQ ID NO: 3615 - protein, 187 aa, Mycolicibacterium sp.
VDQVLTIPRVAGGSSRPDPTPAAANSPLVNSPYNKPRPTNPKPHSDWTTKRVPLTGMLHNRRLARRIAGAGWGELRRQLSYKSQWRGGELIVADRFYASSKLCSGCGATKAKLRLSERVYHCETCGVTLDRDLNAARNLAALASQAAGGTSSPSCGATLNEPAGNPQKAGQVGSGYRHGKPRVGNAA

SEQ ID NO: 3616 - protein, 457 aa, Mycolicibacterium sp.
MARFEIPDGWCIQAFRFTLDPTEEQVRSLARHFGARRKAYNWTVAALKADIDAWHATGVETSKPSLRVLRKKWNTVKDEVCVDVETGTVWWPECSKEAYADGIGGAVDAYWNWQQSRSDKRTGKRVGFPRFKRKGCDADRVTFTTGAMRIERDRRHLTIPVIGTVRTQENTRRVERLIAKGRARVLAISVRRNGTRLDASLRVLIRRPQQVSVASPGSRVGVDLGVRRLATIANEVGAVLEQVPNPRPLDAALRELRHASRARSRCTKGSRRYRECTTQISRLHRRVNDVRTHHLHVLTTRLAKTHGRIVVEGLDAAGMLRQKGLAGARARRRGLSDSALGTPRRHLSYKTGWYGSALMVADRRFPSSKICHVCRHVQDIGWAENWTCDSCSVTHQRDDNAAINLARYEETFRSSAQLGPPLSVEPTVRPGPARLVAVKRGRDAALRLPNNPETGCK

SEQ ID NO: 3617 - protein, 362 aa, Mycolicibacterium sp.
VSRGRRLVGLVWNSSWCGKSGSEVLTTSGPPGARAPSLVRGYRFALDPTPSQEQALRSHCGAQRYAYNWGLRRVIANLEQRAAEQTYGISDRDLTPSLDWSAYALRRLWNDAKDDVAPWWEDNSKEAYSSGLANLAVGLRCWVKSQSGDRRGPRMRFPQFKSKKCQMSCRFTTGAFGLSDADRRHIKLPRIGLVRTHESTRKLARRVAEGTARIKSATISYARGRWFVSFSVEVRMAPSVLGLPREVVGVDLGIQHLAILSEPVRGISDAAGMVANPAHLEQVNKTLRRLQRKATRREGPDRRTGKPPSRRWYRAQDKVNRLHTRVANARINALHRLTTSLSERFDQIVIEDLNIAGEVSPP

SEQ ID NO: 3618 - protein, 532 aa, Pelotomaculum sp.
VHITVPKKLINKAKLDALCELDRLHARAVNEWIGRWYGRTELIEKILKGTATTLMQKEALERPLETPLPSAYVQIAGNRMLDILREHYLAVQDKITSDVWKDRNLSMEYRLVCSVFVRNATLFHRFVNGLTEAEDVVAEWRASKSERLRKVAEAYDSFSPQARAGIEGFITARFREIRAAWRVPAFRGGVIQLDYRVFALEEARGTKEFNLWARVTTAVSHRRIAVPLRLTAEKRRLLDSLFPDWLKSTARKAQLVVRGRHIRLSVPVAKPRVEPKGEPEAVLGCDIGMAALLNLSNGVKLGKSFKGIAGKLYDEYLRLQGVRNKIRGLRQRAEKRLSVTKNPETRHRLERKIAEYDRHLSDHRWVVLRRRIKAAVSTEIGRAVNQFLALLGPNPERVLVVMEDLSEMAAEGARQSSRARFDLSVWARGELQDHLKRDLEWLGGRVAFVPPEYTSQTCPICGWVDKENRRGREFRCRCCGFAADADTVGALNIGERFSDAELLALAERYWYSRDLRREKIKELLLARAENAA

SEQ ID NO: 3619 - protein, 434 aa, Psychrobacter sp.
MKINKAYKFRLEPNAEQAVILNNLVGSARFVWNQMLAISFEMFAKNEFINATNLVNKIMDVKNNPDFEFLKSSSNAVSLQQKVRDLASAWSRFFDPKAHARLKENKKKPKKPKCFKLTDGTQIQLRPLMPRFKRKSDGCDSIRLVQFDKYCRVEGNRVKLPNGVGLVKFRKSQEIIGTIKNVTISNKSGYWYVSFGTEREVENPTHPSKTAVGIDLGVSKLITASNGQHIKPKNSFKANQAKLAKLQRQLSRKVLFSNNWKKQNRKIQKLHHHIANIRHDYLHKITTSISKNHAMIACEDLKVVNMSKSASGTMENKGRHVKAKSGLNKSILDQGWGMMIDMMDYKQQWRGGLLIKVDPHYTSQMCYECKHIAKENRRTQAKFECVKCGYIANADFNAARNILAAGHAVLSAEGGCGKGRPLKQKTCNPCEKVA

SEQ ID NO: 3620 - protein, 438 aa, Haloferacaceae sp.
MHIHRTYRAKILNHGQVAEMLDRHGWSTSKLWNVANYHSREQWNETGEIPDDSDLKRKLKTHPTYKGLHSQSSQRVLEELAEAFNSWYGKRKSDDRANPPGYRKKNYYDNDGNRVHEEHPRATVTWKQKGIRHDTKHNRVRLSKGANHKEHPRAWEYILCEYETRPCVTVENLQQVRAVYEKAKGRWELHLVCKHEIEPPDAPGNESAGVDLGVCNFATVAYSTEEADLYPGNRLKQDGYYFPKEIAKCDDSCGERATRLHHTWSERRTHFFHSLAKHIVERCVERRVGRINVGKLAGVREDENGESKNWGKHGNLDLHGWAFDRFTSILTYKAKVEGIEVVEVSERDTSKTCCVCGREDDRQRVERGLYVCDDCDAAFNADVNGAENIRLDLNQSNSESSGQLSGDRSTGWLAQPGVYLHDLSHGFSPREQVVDCKP

SEQ ID NO: 3621 - protein, 578 aa, Haloferacaceae sp.
MSSHLSLSLRLPFEESERHARLDTLTTRVANTLIEQYWTPEHLTGIDNYSYQAWKYFDEGETFTDVDLYLPSRYKRCVMQKVGETLRSHADKREAFQTIQTVLPDHKIRRIHTRRIKERLWDAEEYLKSEYVDLLIGQLNSYYNKHGRFPESYFDMQECPTYSKGVLPYSADDGPTSGQAVKYEYDKDKQTLTVKLKTPDTVEPEARGDWTWTEHELESYEAFHKLLEHGSLSAPSFQPTTTKTGGDYYELAFPVEVEHQEKPDNVKTVLAIDGGIRKDATAVVVNEDGEQLSTPYFIQNTERERMRNLARERNQLNSKLAYLRQQGRDHTDSFTQVHAEYERANNKIRHKREQLVHDVSNQVLALALVYEVDAIVHEDLRSLSPPRGEGKLSWELSSWARREIVSKIEYRAEITGLHVKRVRPRNTSRSCPRCGSTGHTTKSPDHTFEVWWGGHFCCDNARCGYQADRDYVGAVNVARVFYSDSVTLKHGFTSSYIGDFEIVPASCSAGARLTFGTAPVAFTGQSSEVTAGGGSAYIAPAVTPAETENNSSNPDSASSPAMFGTTRFTRVTTNCYRK

SEQ ID NO: 3622 - protein, 598 aa, Haloferacaceae sp.
MLIGVQYHTWYVVLKRTVRVKLSIPDERRDDLKRTMLTFREAAQMFANRGWERDADGYVITSRTVYKRVRKETELHADLCIGAVNLAADSLRSAVERMKAGKRAGKPTFSAPTTVYNTNAVSYFDGYCTLAAFGGRVRAEYVYPDDENCPQTRYLSGEWDRKGATLHYDRDGGDYYLHITVEKDDEKLGETENGTVLGVDLGVENVAVTSTGAFWGGGYLNHRRDEYERTRGKLQQTGTESAYRTIKQMGTRESRWANDYLHRVSKALVHEAITHTCSPIAFEDLTDIRERMPGVKKFHVWAFKQLCEYVEYKAAEFGIRTVQVDPAYTSQRCSCCGTTLREHRPSQAEFLCRKCGYEVHADYNAAKNSATKYVRAGQKRPSGRVNRQLALKSGTLNGNGGVFPCQRRRVGQTGSSPTSPGVYAGVVDPRSERDAGRRRRPPPRCRYERGAPESPTFSNPKNNVHTGASHRPDTRRFSDANGIAVPRNAEAVSAASNAVELDAPAFDGSLEPRRLKSAHVRAALVRLDGDRRRARPVRSLRGFRPGWTRRGTSSPLKRTRQRWPLRRREPDGVDLAFSTRHSPVSVIARLGTAIEARR

SEQ ID NO: 3623 - protein, 306 aa, Haloferacaceae sp.
MGECRLFDRDGEWYFHIVATRDVDERETTSSAETPIGLDIEEASLVTVCHRDERGSPTVPNLWNDEGKRVRQLRETYFTATRRLQQRGSERIAESYGDELWRHIDHILHTVTSEVVAYADQFENPVLVLENLTHIRENMDYGAFMNRRLHGWGFAKMYAQIRYKAAEKGIRVETVNPAYTSKTCHCCGEKGYRPNQATFVCSNSECWVSEFQADVNAALNIADRYLSGESHSREHTSGNDSAEEGGRLTVPQDSQADATQQATLGTYASRNLRTESVGPKSHGGIPATVGAGGGQRTAVRGTGPGQ

SEQ ID NO: 3624 - protein, 290 aa, Haloferacaceae sp.
VSGNSSGSRHGSSAVSRTTSLASSSTRRAVRLCCLSKLADIPIRLHRAIPDDATLKQVTVKKEPTGEWFATFGVEMDREPPEPPENPEKCVGIDVGILKYAHDTDGTAVGSLDLSDERERLEREQRSLSRKQHGSNNYEKQRRRVAECHAVLRRKRRDFLHKLSNYYAREYDLVAVEDLNVKGMLESPSNSRNTASAAWRVFLSVLEYKCERAGTHFVAVNPRGTTKECASCGVSTEKPLWVREHSCPACGFEADRDANAVARTAGSGGQPKRGAFWQRRGTFFLAVFPM

SEQ ID NO: 3625 - protein, 421 aa, Haloferacaceae sp.
MARRTNTFVVRPRSEQDAELLHDLLDASASLWNELTYERRQNYFDGESVWDTADYRKQYVGVLGSATAQQLIRKSKSAWESFFSLKEKGERCSPPGYWGNEEDGRTLRTYIRNDQYTLVLGNRSRLEIPVGKELKAKYGLGSRERLRLEVAGVPKWDGKQCRLELYYDELSDQFRAFQPVKLDTSRLDSPLASEEAALDIGANHLVACTTTTGQQYLYEGRDLFDQFRDTTREIARLQSKLREGRYSSKRIRRLYRRRTRRRDHAQNALVRDLLERLYEDGVSTVYVGDLTDVLETHWSVRANAKTHNFWAFRAFIDRLACTAEEYGITVEVRSEAWTSKTCPNCGSTTDTIRHQDTLTCSCGFEGHADLVASESFLRRQTDVPRPMARPVRFAWDSHEWLESSRSHESPKEVRTNRSIHG

SEQ ID NO: 3626 - protein, 409 aa, Haloferacaceae sp.
MRYNYRYRLKPSDELHERLAWTVDTCRQVYNHFLHRLNRVDGTSPYSEQSILPNLKREWTDLKDVHSKVLQKVVQRLYDNRSTLKARKDNGYRVGKLKWKGPQEYRSIKYSQSGFELNNTSGRPVLSLSKIGEIPMVYHREIPDDATIKEVVVKQEPTGEWFAVLGIETEDDAPLKPENPKKCVGIDVGILKYAHDSDGTAVERPDLADERKRLERAQRKLSRKEHGSANYRTQQRVVARRHADLKRKRRDFLHKLSNYYAREYDLVAVEDLDTKGMMELPSNSRNRAGAAWGTFLRMLEYKCEREGTHFVAVDPRGTTKECSKCGISTEKPLWVREHSCPSCGFEADRDLNAAYNILARGLTDVGVVHSESMPAETALPTDTHLVSAKRVVETGSPVLSEATRPSRAG

SEQ ID NO: 3627 - protein, 259 aa, Haloferacaceae sp.
LHFVCRVEIDIASVPGDGVAGIDLGISGLATVSYGDKTVLYPGGALKEDEYYFAKKRAETDDSTSRERSVSPENAPPDGRTVEDIVAECVERGVGMIVVGDLGGIREDENGEARNWGDHGNLDLHGWAFGRFTTMLSYKVASEGIDVVEKSERGTSKTCSACGQSDKRQRVERGLYVRDCGFVGNADCNGAANIRRRVLPNRACDGGDRDTGWLASRSASGTSMTHRKRFAFSRQPAVRLFDPSEGRFAPREQVVDREP

SEQ ID NO: 3628 - protein, 397 aa, Haloferacaceae sp.
VNASKLWNVGRWTAQRVWDACGQIPDANALMAYLKNHERYADLHSQSSQRVLQELGEAFTSWYEKRGNGDKNANPPGYRKHNDDHPRSTVTFKQAGFKHDTANNRVRLSKGRNLKDGWSDFVLCEYDVIGPVGRTIENVQQVRAVYEHGVWRLHFVCRVEVAVADPPGDSVAGIDLGICNFATVSYGDEAMLYPGGALKEDEYYFAKKRAETDDSASREARRLDHKRTDRRTHFLHTLSKDIVAECVERGVGTIVVGDLTGIREDENGDAHNWGDHGNLDLHGWAFDRFTQMLSYKAEAEGIEVVTTYERDTSKTCSACGRSAKHQRVERGLYVCECGFVGNADCNGAENIRRKVLPNLACDGGDRDNGWLAQPAVRLFDRSEGVFAPRDQVTDREP

SEQ ID NO: 3629 - protein, 317 aa, Bacillus sp.
  misc_feature (299)..(299): Xaa can be any naturally occurring amino acid
MEVNEMMINKAYKFRIYPNQAQAILINKTIGCSRFVFNHFLSLWDHAYKETGKGLTYGTCSAKLPAMKKEFVWLKEVDSIAIQSSVRNLADAYTRFFKKQNSAPRFKSKKNNVQSYTTKQTNENIAVVGNKIKLPKLGLVRFAKSREVEGHIVNATVRRNPSGRYFVSLLVETEVQELPKTHSYIGIDVGLKDFAILSDGTPYKNPKFFRSLEDKLAKVQRVLSRRMKGSSRWNKQRVKVARIHEYISNARKDYLDKISTEIIKNHDVIGIEDLQVSNMLKNHKLAKAISEVSWSQFRXRIENICLQPIMFLLWISK

SEQ ID NO: 3630 - protein, 218 aa, unknown
  TnpB Polypeptide
VSREPSGKYFASLLFDCENQTAEKRQAEKFLGMDFAMHGMCVFSTGERAGYPMFYRNAEKKLAREQRKLSRCEKGSRNYQKQKKKVALYHEKIKNQRKDFQHKLSHSLAEDYDAVCVEDLNLKGIAGGLHFGKGIQDNGYGQFLSMLGYKLEERGKYLIKVDRYFASSKICSVCGHKKKELALSERIYLCECGNRMDRDVNAAVNILKEGKRIYKKCA

SEQ ID NO: 3631 - protein, 369 aa, Lactobacillus sp.
MQKVLDDLCDYRRYCWNVGLALWNELYEESLILDDKRLRPNEYKVRNELVANKADWQYRFSARCLQLAISDLNKAWKNFFDKAQVNWGKPRFKSKKAPRQGFKTDRAKIIKGKLRLDKPHGIKKWYDIRMSGVKSLTGELKVVSIYRENGKYWASLPFEVEVANKAKTGDKTAVDVNVGHFNYTAGQVNTLPKRLKHLYQRIKCYQKSLAKKRVVNGKQAIQSHNYVKTRAKLQRDYRKVANIQRDLIQKFTTKLVTNYDKIAIEDLQVKQMQMSHVASKGLQRSLFSHFRQILTYKCEWYGKYLVIADKYYPSTQRCSNCGYIKTGDDKISLAGNRKHNTKHHEYICYECGHVMDRDINAVYNLLALI

SEQ ID NO: 3632 - protein, 408 aa, unknown
  TnpB Polypeptide
MPDLTAIKIRLYPNKEQREQLDRTFGCCRFLWNHMLAEHQVKYNQYKMDGIKSKYKTEAEYKQEFPFLKEADSKALQNVNWNLQEAFSRFFQNIKDRKAKKTKIYIGYPRFKSRHKAQNSYTTDMINNNIKIDFVQRTLQLPKFKSPIKYSDPRVFNEKIRSVTVSKTKSGRYYASILIEKENLVVPMTAIHEEKVIAFDMSMSSFLVTKDYKLQNPRFFRKALHKIVKAHRHVSRTVKKSKNRFKARKHLAKVYERYVNQKKDWTYKITKNLVDQYDAVVLEDINIKGMSMFNKGYAKNVTKDFSWGEFITILNYKMARRGKHLVKVNRFFPSSQLCSACGYQYKELTLDQHEWTCPKCHVHHDRDINASQNLRKEGLRLLSEMGITLIRATVGTTESYACRDCVSP

SEQ ID NO: 3633 - protein, 384 aa, unknown
  TnpB Polypeptide
MYYKAYKFRIYPNESQKELINKTFGCSRFIYNYFLSMYKESKHTKASENIKYYTNYLKYECPFLQEIDSIVIRKSLFNLEDSFKRYFKRQSEYPKFKSKFKRNSYNTNAVYGSYKNNNYCNIELDLENKTIKLPKLKNIKIRGYRNLKYINGRILNATISRESNGKYYVSVLYEISEKVKEVTPTSIIGIDLGVKKLLTLSDGNTYENNKYIEKYEKRIKRTQRELSRKVKGSSNYYKCKKKLAILHSKLANSRKYYIHKITKNITNEYDIITCEKLHTKEMIINGKKNTLSKNINDACFNEILRQLEYKSKFKGKQFYQIYEYYSSSQICSRCDNQDKKYKNLNERIYECTKCHLELDRDLNASINIMFEGLKMYIENNANLV

SEQ ID NO: 3634 - protein, 493 aa, Persephonella sp.
MDKIKRILSIRISGKQRRERISNLLYSLAQFRNLLIIFNKRYQENYGKRILNESYLYSLISDKPYNPRKPKEDDENYQEKLKKNEEKIKNNYIIQTLIRQLIKDYKSFFKSIQRYKQNPSSFNAVPRPSKAKKLKDIPSFTAERNVNTFKIIEEKKGKYILITLTNDKKEKQYIKVKLPKNFNYDIKSAGIKFIASNVYIDIVYEKPLINEKKEKTHLAGIDLGLDNLITLFSTNKGLKTVIISGKEIKSINQWYNKEKAKLQSQIDNIQNQINELKKENLDITTLEQEKRMLIKKQKELSAYRNRWITDTFHKITRKVADFLNETGHKEVYIGKGATESKNGINLSTKTNQNFVNIPFRKLINQLKYKLEEYGIKPTEITEEFTSKTSPFADLNKLKEKLKQLYKGIRIKRGLYKDYVTNKVFNADAVGSYNILRKEAKPLIDEKTLMDKLARPIKVKLNQLFKVTCESLVEIAGRRTNRVHDRRTLVNNVL

SEQ ID NO: 3635 - protein, 434 aa, Persephonella sp.
MSVTTLKKQKIKESLKKTKEKRRNQVPKVYQLKISYSNLNKDQKQWLEKVFLEAKWLYNYTVADIENRLNPQTEKLKQVEIKTPNGYEKREITCLSSQMKQGILDRIKKNLSNLSKAKQKGIKVGKLKFKSDYKNIPLKQNGITFKVLKDKNRVKIQGLKKPFRVLGLHQIPENSDIAKAELIKKPDGYYIYLTCYIDKNQIKKEKIKKPIAIDFGIKHQLTLSNGIKIKYSIEETKRLKRLQKKLTKQKKGSKNYFKTRYKIQREHQKIYNRRKDIQNKIFSLLKRYEHVLIQDEAIKQWHSGLFGKQIQNTGIGGIISRLKNNLETLISVDRYEATTKICSNCGNRKEDITLSDRTYRCENCGLVIDRDLNSTINILKIGLSKVETTTIKNLPTDCGKVTPVERKASARILESNPYIRVSYASVKQEAPNFS

SEQ ID NO: 3636 - protein, 197 aa, Bacillus sp.
LPKLGFVRFAKSLEIKGRIVNATVRRNPSSKCFVSLLVETEVQEIPKTHSYIGMDVGLKNFAILSDGTTYQNHKFFRTLEEKLAKAQRVLSRRAKESSRWNKQRVKVARIYEYMTNTRKDYLDKTSTEIIKNHDVIGIEDLQVSNMLQNHKLAKAISEVSWSQFRTMLEYKAKLYGKQVIVASKIFASSQLCSCYGY

SEQ ID NO: 3637 - protein, 288 aa, Bacillus sp.
MRIHAFSKKQNSAPRFKSKKNNVQSYTTKQTNENIAVVGNKIKLSKLGLVRFAKSREVEGRIVNATVRRNPSGRYFVSLLVETEVQELLKTSSYIGMDVGLKDFAILSDGTTYKNPKFFRLLEEKLAQAQRVLSRRLKGSSCWNKQRVKVARIHEYISNTRKDYLDKISTEIIKNHDVISIEDLQVSNMLKNHKLAKAISEVSWSQFRSVLEYKAKWYGKQVIVVSKTFASSQLCSCCGYQNKDVKNLNLRKCVCPSCQTHHDRDINASINLKHEAIRLLTARTAEIA

SEQ ID NO: 3638 - protein, 304 aa, Microcystis sp.
LAGRTKYPNFKKKHQGGSAEFTKSAFKFKDRQIYLAKCTEPLPIRWSRQIPESCEPSTVTVRLHPSGRWHISIRFDDPTIKPLPVTDKAIGIDLGISSLVITSDGDKVSNPKHFKKHYRRLRKAQKSLSRKQKGSKNREKAKIKVARIHAQITDNRKDHLHKLTTQLVRENQTIVVENLAVKNMVKNPKLSQAISDVSWGEITRQLAYKCRWYGRNYIEIDRWFPSSKRCSNCGYIAEKMPLNVREWDCPDCGTHHDRDINASKNILAAGLAVSVCRATIRPEQSKSVKAGAKNPSEKKQKPKS

SEQ ID NO: 3639 - protein, 488 aa, Gordonia sp.
MARFEIPRGWTAQAYTFALDPTPAQVRAFRSHAGGARTAHNTMLAVVKAVLDQRAAERSYGLAEEELTPSLSWSLAGLRKEWNARKGEVAPWWAENSKEAYSTGLDSLARGLDAWSKSRAGERAGKTVGFPRFKTARARRSVRFTTGTIRVEVDRHHVTLPRLGAMKTHESTRKLARRVQAGTARILSATLSEDTAGRWHVAFQTIVQRTPAVPGNVGSGEPVVGVDVGVKADSLLVVATPDGREINRVPAPKSYVRTHDRRRALQRRAARQQGPYDVSTKTRRAASKRWLRTQARINKTHAHAAAVRSDVRHKATTALAQQNQVIVVETLNVSGMRSKGGVHKCGLNRALADAALAEIRRMLAYKTKWYGSHLVAADRCYPSSKTCSGCGSVKAKLTLADRVYACEACGLIIDRDHNAAINLARLGETHTLGEQSPAGSGLVAGRGAMQETATTSVVNAAGSETSTPHNTAGVDQTGTAVLQGTAAR

SEQ ID NO: 3640 - protein, 375 aa, unknown
  TnpB Polypeptide
MKTAYKFRMYPNRQQVAQLELTLDTCRYLYNLALADRKNVYETEGIRQSYEDQAAKLTVERKNGNFNSIYAHCLQDVLRRLDKSFKAFFRRVKVGEEPGYPRFKGEGWYKSFTYPDSETGYKLDGSKLTLSKIGSIRIFKHREVEGKIKTCTIKKDNLGHWYAILISEVEDVSPIEPKTAIGVDVGLKSLVALSGGETVEYPRYYVMAEKKLAAAQRNLSRKKKGSANRRKAKAKVAKISQDVQHHRDEFLHQLSKMLVDLADLIVFENLNISGMLKNHHLAKHIQDHAWGKLIQFTQSKAAKAGKVVELVDARYTSQKCSQCGIMVPKTLAERVHICPNCGLEMDRDINASLNIRTLGLRGRAYRDTAKESAGQ

SEQ ID NO: 3641 - protein, 441 aa, Aphanothece sp.
MFGCQQVLIKTDKDTKAIIEYLCRESNSLYNCSVYYARQIWFKTGKIVTGFDLTKEMKSNPHFRAGYASSMQQTCLNVGESFKSFKQLLKKSLKGELNQKPNAPKYRKSGGLFTVTYPKKWLKLIDGNVRFPLGNQVKVWFKLTEFLLPFPINLKWESIKEVRIVPRNGCLYAEFVYKQILEYRQIQPVDATKVSQSGLGGFPQEELAVLGIDHGLNNWLTCVSNVETSFIIDGKHLKSINQWYNKQVATLKQGKPKGFWSRTLAHVTEKRNRQMRDAVNKAARIVINHCLINGIGTIVFGWNQGQKNESNMGTKNNQKFVQIPTAKLKERIAQLCEQYGIKFVETEESYTSKASFLDNDELPKYGEKPDGWQSSGKRIKRGLYRSADNWLVNADCNGSANILRKVKAMLKLDLSRVIRGILTMPIRIRFWSKAVPESASL

SEQ ID NO: 3642 - protein, 374 aa, unknown
  TnpB Polypeptide
MVNDSIRIGLLNDASSLRKLSLLSYNQLARYDSPSYYKLCAISRAAGILAARNKSVRRGFPTRTPYAVRQQLVSCYGFKVENGELKIPVSRGKRFRILLTKHTVEIISQPGVKVRSFTLTQNRLSLCVARDTSMIECTSTVGVDRNLRNLTVGNDQETSRYDLSKCVRTANTTMRIVSSFTRDDDRIRTVIASKYGQRRTSRTGHLLHNATKIIVAVAVQRRTAVVLENIEGIRSLYRRGNGQGRKCRGRMNSWSFGEAQRQIEYKARWVGLPVIRLSRRETRGSSVTCPRCGERLQSDKRLERKLWCGKCRVVLDRDMVAAVNLARRGRVRFARSRPPITEAQGRAGEAMKGNPTPTVIPGVDAPKLTHQTKS

SEQ ID NO: 3643 - protein, 475 aa, Dactylosporangium sp.
LKSYKPPAGWSMQAYKFALDPSDTQVLGLRRNTGAARFAYNHMLRRVSAVREQRAAEASYGVAEADLTPWQGWSLPDLRRTWNDVKQWVAPWWSECSKEAFNTGLANLSAALGNWHASRTAARNGRRMGWPRTKRKHAKRSARFTTGAIRVDPGYRHVVLPRLGRIRTHESTRKLARRVQAGTARILSATVTETAGRWFCSFQVAACRDHSRPAHAPRAGRVVGVDAGIKHLAVLSTGELVPNPAPFKAALKRLGKAQRRAARRIGPYDPASSSKRTASNRWQRAQAMVTRLHATVAAVRADSWHHLTTRLAQQFDTVVVEDLHVAGMVRNHKLARSLADAAPATLRRHLGYKTGWYGSTLYVADRWYPSSKTCSGCQTAKPKLSLAERTFNCTTCGQSLDRDVNAARNLAALVRHVDLELPGDAKTGRGAHVRPARPAPAGRAAGREASRPAHPVNVARQRTTTNHESCLLTER

SEQ ID NO: 3644 - protein, 685 aa, unknown
  TnpB Polypeptide
LLDARPWTGLIGDVLPSFGPPALSPSSLPGTRWRGLEQLTRFLVICFRNKGRGRESVRFTTGAIRVDDKSRVVLPRIGWVKTHEPATALLRRIQAGTARILAATVSREGGRWFVSFTCEVERPPGRPWFPWKVVGVDAGVKHLAVLSTGEKGPNPRPLEKALRKIARSSRALARRQKGSRGWQQARRRLARLHARARDVRQDVAWWSSNSCTWRPPQRPSPMAIPNGHPQRPSSDRQAARPPSVPLHLPVPDLPQHPQRIAADHLLDLVVGVVVLDGPADDVGPRLGDVLQTPHIGHMGMVLARRLAGADGQVGGKGLVQGHVVAEEQIGPEGHVVDAHQFHAVFEVLHHRLDAVLGVVAGQGGVGRRLDADHAAPLGAGLDHLVGLEAPAGPQGAGPGVGDEDRLLAEPDRIQGRLVARVGHVDGDPQLVHPLHGLPAEDRQPAVPRLPQAAAQGVPLAVGDAHHPDPQAVQHIEPVQLVLDGRRRLQAGDQGDPALGVGAQDVVDPLRPDDEVLVGQVGEPHADVVDDVGPFPPHLGGDGGGAVEEVLAHGIEPRSRQALVAREDPALADVVEDLSHVLGDHHQVLVEGDHHVLRQEPLDPLLLGVGHLHHVGGDPADLPGQLEGPVVDPRLKELEGTVAVVLLPLGGRTRRGGTGRGFGRLLLTGNFLSPGSVHALEALKLS

SEQ ID NO: 3645 - protein, 320 aa, Micromonospora sp.
LDDHRNLYNAALEERREAWRRSRVTVRYGDQSAQLKDIRRTDPSGQARWSFSSQQATLRRLEKAFAAFFRRVKSGQAPGYPRFKGSGWFDTVEWPKDRDGCRWDSAPDSGQVRLYLQGVGHVRVHAHRASDGVHVANPRYLAASTARLGAAQQVLARRERGSNRRRKARERVAALHARVRRQRLDHAHKTARWLVRHHDLIAHEDLRIGNMTRSAAGTLDAPGSNVAQKSGLNRSILDAGWGAFLRILAAKAESAGRLVVAVNPANTSRTCPQCGHCARDNRPTQAGFTCATCGYNGHADVVGASNILRAGLALQSVQAA

SEQ ID NO: 3646 - protein, 389 aa, unknown
  TnpB Polypeptide
MYPSEAQEQQMLSHCAHARFVWNLAVDQQSNYRVTRGSAPNHVARNRQLTEARANSEWLRSGSQTVQQQALRDFDQAQRNFFNRPNHFKPPTFRKRHLNEGFRIVAVKPEHVRKINRRWSEVKVPKIGWVRFRRTRAVPEAKSYRVTLDRAGRWHIAFAVVPDPIPAPGGGEVAGVDRGVVHAAALHDGSTYDYSRPDLDVRVKRLQRRLARAKKGSNRRAKVRSQLGRAQAKRADARKDFIEKTTTDIARSFDLIRLENLNTKSMTTSSKGTIEEPGANVAQKAGLNRAILDKAWGLFAQRLEHKAKGRVEYVPAAYTSQRCSACQKPHERSRKSQAVFLCIFCGFSANADVNAAINIAAGHAVTAQGGSPLGQPTNCEPQTNPLRVA

SEQ ID NO: 3647 - protein, 383 aa, Clostridium sp.
MAKEVKMVMEIVRTLKIKLNINQEEKNMINSTLEAFLKALNYASQVAFNNGEITNKPKLQKLVYDDLRTKFNLKSQMAVNTCTTVCSSYVTQHSNKVFNSLAVYKSPKAIYSYGRDYSFLNDGQTISINTIAKRIKVHFKVNNYFKKYLTKEWSFGSLEIVERENSYYAHITVSKEVQEKPLNEFKNIIGIDLGQNFIATFYDSKGKIKFFKGRYLKDMRAKYTRLRKQLQRKGTYNAHKKIVTINQREQRTMTYINHKISKEIVEYAKQNNAIIAMENLTGINLSCKVKKDNRYYRVSWAFNQLQQFIEYKAVQAGLKVIYINPKYTSQTCPICGHIHKDNRNKKLHIFKCRACGCTLNDDLIGAKNIQHKGYDEKVKLETA

SEQ ID NO: 3648 - protein, 367 aa, unknown
  TnpB Polypeptide
MKERAYKYRFYPTTEQAELLSRTFGCVRMVYNSILKWRTDAYYNDGESINYNTASGKLTELKKQPEFDWLNEVSCVPLQQSLRHQQTAFKNFFNKQAKYPKFKKKRSNQSAEFTRSAFKYKDGKLYIAKSKTPLDVRWSRELPSSPTTITVSRDSAGRYFVSCLCRFEPKSLPVVNKTVGIDLGLTDLVITSDGVKSGNPRHTAKYAAKLAKAQRVLSKKKKGSSNSHKARQKVARIQATIADCRRDFTHKLTTQLINDNQVISCESLSVKNMVKNPKLAKAISDANWGELVNQLKYKADWYGRTLVQIDKWYPSSKRCSCCGHVVDSLPLNVRLWTCPACKSKLDRDTNAAINIKGAGQALLACGV

SEQ ID NO: 3649 - protein, 404 aa, unknown
  TnpB Polypeptide
MEIILNRGYKFKAKPTQEQKEFFMKSFGCTRKIYNYYVDNLYKQLEQQNYKNGFIKGIKYITPAKIKKQFDYMKEIDSLALCNAQIDFKNAISKFNKEYDKKSYSKRSKKREKTLGITPTFKDLKGMPNFKSIKNNDFSYKTNNQSRGGKWNDIKLQNKLLYIPKLKIPIKIIQHRDLPKNSIIKNVTISMDYKGIFYVSLCIEYTKNIEQKKSEKILGLDYSQHDFYYSSEDKTGNYPKYYKTMQDKLKLEQQKLSRKVLKSNNWYKQKKVISKIQTKIANQRKDWLHKESTRLCNEFDAIIFEDIDLRGMAQCLKLGKNLSDNGFGMFRTYCKYKLEERGKQFIKIDKWYPSSKKCNDCGYIKEDLQLSDREWICPKCGSVHNRDYNASLNIKEAGQSLLAW

SEQ ID NO: 3650 - protein, 221 aa, Fusobacterium sp.
QVPSGKYYISLCCTDVEAEKLESTNKNVGIDLGIKNFALTSDETSIKNPKYLQKSLNKLAILQRRLSRKPKGSSNRNKARIKVAKLFEKISNQRKDFLQKLSTELIKEYDIICMEDLKVKNMIKNHRLAHRLARNIADVSWSEFSRILEYKAKWYGKTVVRVDRFFASSQICNCCGYRNKEVKDLSVREWTCPVCGAVHNRDINAAKNILKEGLRILGISA

SEQ ID NO: 3651 - protein, 327 aa, unknown
  TnpB Polypeptide
MAMTDEQRLAKNASIKEAMKATHEKRKSQVCRVYMLKVQKNSLSARQKEDFRMLFLEAKWLYNDILNYGNVKGQSVFEYELGDDVEVKLPDGTFDPRTLSHIGSQMKQSVYADLKSSIKSLARLKKTGHKVGRLKFKSEIGAVSLKQYGTTYKFHNDHLVKIQNIHGLVRVNGLDQIKDNVEFANAKLLNRADGYYLAVTTYTERKPYTDRPRADVGIDMGCHTSFTLSTGEEIDVKVKEPERLKRLQRKQHRQKKGSNSRRRTIHRIQKTHQRLVNREPFRVAEDRARQGRAAQLPRKGEGKVESPGPRLCRQSLGTHHAAVHQLR

SEQ ID NO: 3652 - protein, 335 aa, unknown
  TnpB Polypeptide
MTNLAINGEVKAFKLKMLFCFEMLSSGQLLGHEEREPNSPAMPEEGIYEVKHTNKRTSIVRLFPNGFQERKLKRLANISAKLFNEINYERRQQFFQQHHVDFDTTWNKYYEKYKDKLGSANVQAVMQKNNEAWNSFFSLLKLKKEGKLPPFIKRVSPPKYWKDRETKKRKLMLVIRQDRYVVDEQNHKLILKDFELEIDFIGRLRWYGKQGRLEIYYDEAKNAWYASIPVDVGVEITKNRNKSKYIVHGERKSVQVESPKGNKMASIDLGINVLASVIVEDGTWLLYKGVRAKEDYFYFEKKIAEVQSLADKTKNMGEHEAYEELLREKKRLHGN

SEQ ID NO: 3653 - protein, 394 aa, Nostoc sp.
MLVYEFKLKGKQQQFNLIDEAIRTALFIRNSCIRYWMDNKQIGKYDLSSYCKILAKNFEWAGKLNSMARQAASDRAWSAIARFYDNCKKKISGKKGFPKFKKRGHSVEYKTTGWKLSEDRKYLTLTDGFEIGQLKLVGTYDLHFYQIKDIKRVRLIKRADGYYVQFCIAFDRKVEVESSRKAVGLDVGLTHFYTDSDGNKVENPRFLRKFEKALKRLQKRVSKKFRKGQSQSNNYKKAKSKLARKHLKVSRQRKDFVVKLAKCVIQSADLIAYEDLQVRNMVKNHKLAKSISDAAWYQFRCWLEYFGDIYGKITIAVAPQYTSINCSSCGRQVKKSLSTRTHKCICGAELCRDENAALNILAKSLRTVGHTGIYAWGQNDLCLDLETSIDKSAG

SEQ ID NO: 3654 - protein, 183 aa, Selenomonas sp.
MDEDDANYPNFLRKAEKRLAQAQRKLSKRKKGSHNREKQRLRVAVLHEKIANQRRDFLHKKARNLVDKYDAIGIEDISVKAMSKRKKGGKFSFGKSVADNGWNMFTNILEYKLAWQGKQLVKIDKWYPSSQLCHVCGFQNDATKDLSVREWDCPKCGSHHNRDKNAAINIREEARRISAGHNV

SEQ ID NO: 3655 - protein, 373 aa, Hyella sp.
MKTYQFKLYQHKRNKHLHRAINAASSIYNHCIALHKRYYRLFGKHLNKNKLMKHIAKLRKKNEYWLLVGSQATQDIIQRIDRAYDLFFKHHKKGVRPPNFKKRIKYKSFTLKQAGYKFLDDNQLKIGKRIYKIWKSREIKGKIKTVTIKRNPLGELFIFVVTDFVDRQVSTMSGKSAGFDFGLKVFLSCSDNTEVKSPLFLKQSLKELKIASRNHSTKKKRSNNREKARKNLVRVHEKVVNRRTDWFWKLAHELTERFDYLYFETLNLRGMQRLWGRKIGDLAMQQFLNILEFVAEKKGKFVGYIDRWYPSTKTCSECNFVIDKLGLAERYWVCPSCNTKHGRDSNSSINILRVGASTLRLGDVSLSQTAISA

SEQ ID NO: 3656 - protein, 203 aa, Lachnospiraceae sp.
MQDIRNSRANTITINHTQQTSQMEILRQIKSATVSQVSSGKYYVSILVETEHKELAHKGKRSKNYYKTKKKIALCHEKIRNIRKDYLHKVSHEIISENQVIVSENLQIKNMVKNHHLAKSISDVSWYELTRQLEYKAKWNGRKYIKIDTFYASSQLCSVCGYQNPDIKDLSVRTWICPKCGAEHDRDINAAKNILTEGLRQIA

SEQ ID NO: 3657 - protein, 505 aa, unknown
  TnpB Polypeptide
MRSTTSSYIVELPLRVNDQQNRFLEKAFEFGRMLYNATLGTALGRLQRMRETKEWREARDMPKGRARTKAFTAVHNAFGLNEFGLVTIANDHRKASGRNDIGSHEAQSIGKTVWRALKRYMFQQGGKPRFKSFKRGLNSIEGTDNHEIMYKPEQKAIVWRRNGIKYMKPDTDYMKEALASDRRVKYCRIVRRTLNGKKRWFVQLVVEGVPPVRKVYAPKCEVVGIDPGPSRIAYFHEHHAAIVEVAPNVDLQESKIRLLQRRIDRSKRANNPDNFNPDGTVIKGSIKWITSNRGRKLLAKLAEHHRRLAATRKRDHGKLVNDLLQIGGTIKIEKNSYRSYQRNFGRSTNRTGMGEFVAHLKRKAESAGCEVIELDAYKLKMSQYDPATDSYRKKPLKERWHRWGNSDTLVQRDVMSAFLACHATKKGHDRALLLQKWTTAEALLRGSGLCRQQPRSDQGEPQGSSRLTKPNCASKEERERGLPQTLCSIGDVQAALPPEKALRVS

SEQ ID NO: 3658 - protein, 399 aa, unknown
  TnpB Polypeptide
MKIRKAYRYRLKANAKQVSFFNNQAGCCRFVWNKALSIQKQRFDAGEKLLKLSELSKLLTVWKREEGAEFLSIAQAQSMQQVLRNLDRAVVESFNKNTKKRFPRLKKKGRCRDSFRYPQDVRINCNMVFLPKIGWIRFTKSREIEGKIKNATVSRSGEHWYVSIQTEIDIPNPVHPSTSSVGIDLGITRFATLSDGSFFSPLNSFKELENKLSNEQRKLSRKVKFSANWNKQKKKITKIYGKNADSRKDYLHKASTTISKNHAVVCVEDLKISNMSKSASGTKDVPGKNVKAKSGLNKAILDQGWYEFRRQLEYKLLWSGGRLIKVPPQNTSRTCPECGCISKENRKTQAVFMCIECGYKENADYVAAINIKRAGHARLACEVSGAAMPPATGTCTISV

SEQ ID NO: 3659 - protein, 373 aa, Paenibacillus sp.
MWKNKRRGGEDMQTVTVQIRIFPSNPSVLVNMGNEYIRTVNLLTEQAEASGTFPKLTSKNIDANLPSAVKNQLIRDARSIFQKSVKNKKRSILKKRVYYINNQNYSIGDDSVSFPACIDGKVQRLVVPAFMAERERNMLANSKQGLLRVVQKSNKWFVQVSVEKPTGQATGTVEMGIDLGLKVPAVVVTSNGKTKFFGNGRKNKFIRRKYNSRRRKLGKLKKLSAIRKQRDKESRYIKDQNHKISRQIVTMAQRENVSVIKLEKLSDIRKTTRTSRKNAKNLQSWSFYQLQQFIAYKSALVGIKVMEVNPAYTSQTCPSCGDRNKAKDRMYQCFCGYAAHRDRVGAINIMRQPVADGVRPRLSAKAVGNSLSA

SEQ ID NO: 3660 - protein, 395 aa, unknown
  TnpB Polypeptide
MKRAYKYRFYPTSDQAELLAQTFGCVRFVYNSILRWRTDAWYRDHQKMGYVQASARLTALKKEPEFAWLNDVSCVPLQQSLRHQQTAFSNFFAGRARYPKFKSKRYKQAAELTASAFKYRDGRLYMAKSKAPLDVRWSRPLPSVPSTVTITKDTAGRYFVSCLCEFEPLSLPITAKTVGIDVGLKDLFVTDIGFKSGNPRHTAKYAARLALLQRRLSKKTRGSKNRAKARLKVARLHAKIADCRLDALHKATRKLINENQIVCVESLKVKNMMCNPSLSKAIADAGWSIFVRQLQYKGEWAGRSVVAIDPFFPSSKRCSCCGFTMEKMPLAVRQWHCPECGADHDRDVNAARNIKAAGLAVLAHGEPVNPDSHKAAQVRLCEVGILAHQGGDQST

SEQ ID NO: 3661 - protein, 319 aa, unknown
  TnpB Polypeptide
LVQCARDQASDILKRVGFEQDRKPVKRINGSVRYNSRTYTPKLIKNIISISTVDGRKTFNLDIPEHFKKYKHGTVKGMVLAPRKDFFLIRMVVEIENPEFKYKKIRMLGIDCGINKIAVCSDNTFFASKELKRRKGEFLYLRKKLQSKGTRSAKRLLVKISGREERFVADVNHRVSKTIVNSRYNTFVFEKLSVKKSKKLGKRFNRKLGGWSFRQLQMFTEYKALELGKMVVYVNPVYTSQTCSVCATTNKTFRHGNLFSCDKCGLNLDADLNASRNLAMLGKSIHGRLSVNQPNVSCDDVASAKAQLQRSIVTSHLTC

SEQ ID NO: 3662 - protein, 279 aa, unknown
  TnpB Polypeptide
LKYAHDTDGTAVESLDLSDERERLERAQHDLSQKERGSANWERQRQVVAERHADLKRKRRDFLHKLSNYYATEYDLVAVEGLDAKELVELPGNSRNRAGAAWGTFLRMLEYKCEREGTHFAEVDPRNTTKACASCGVKTDKPLWVREHSCPSCGFEADRDANAAWNILSRGLKNIGVVHSESTPVETALPTDTVVSAKRVIETGSPITRSQRLRVSSQNSESSDDTLKERTASAVSRVGSSPEAAEELVIVIRVYRRNSRLFDSTDTLEKAIAPAARTG

(The sequence listing continues in the following parts.)
